(19) United States
(12) Patent Application Publication
(10) Pub. No.: US 2026/0132425 A1
(43) Pub. Date: May 14, 2026

(54) IMPROVED GENE EDITING SYSTEMS UTILIZING TRANS RECRUITING COMPONENTS

(71) Applicant: Flagship Pioneering Innovations VI, LLC, Cambridge, MA (US)

(72) Inventors: Anne Helen Bothmer, Cambridge, MA (US); Jeffrey Ian Boucher, Cambridge, MA (US); Cecilia Giovanna Silvia Cotta-Ramusino, Cambridge, MA (US); Ananya Ray, Melrose, MA (US); Carlos Sanchez, Boston, MA (US); Barrett Ethan Steinberg, Somerville, MA (US); Arijita Chakraborty, Somerville, MA (US)

(21) Appl. No.: 19/119,200

(22) PCT Filed: Oct. 17, 2023
(86) PCT No.: PCT/US2023/077099

§ 371 Date: Apr. 8, 2025

Related U.S. Application Data
(60) Provisional application No. 63/417,119, filed on Oct. 18, 2022.
(60) Provisional application No. 63/478,861, filed on Jan. 6, 2023.
(60) Provisional application No. 63/530,644, filed on Aug. 3, 2023.

(51) Int. Cl. C12N 15/90; C12N 9/12; C12N 9/22; C12N 15/11

(52) U.S. Cl. CPC C12N 15/907; C12N 9/1276; C12N 9/226; C12N 15/11; C12N 2310/20

(57) ABSTRACT

The disclosure provides, e.g., compositions, systems, and methods for targeting, editing, modifying, or manipulating a host cell's genome at one or more locations in a DNA sequence in a cell, tissue, or subject.

### CROSS REFERENCE TO RELATED APPLICATIONS

[0001] This application is a U.S. National Application under 35 U.S.C. § 371 of International Application No. PCT/US2023/077099, filed Oct. 17, 2023, which claims the benefit of U.S. Provisional Application No. 63/417,119, filed Oct. 18, 2022, U.S. Provisional Application No. 63/478,861, filed Jan. 6, 2023, and U.S. Provisional Application No. 63/530,644, filed Aug. 3, 2023. The contents of the aforementioned applications are hereby incorporated by reference in their entirety.

### SEQUENCE LISTING

[0002] The instant application contains a Sequence Listing which has been submitted electronically in XML format compliant with WIPO Standard ST.26 and is hereby incorporated by reference in its entirety. Said XML copy, created on Nov. 14, 2023 is named V2065-7042WO_SL.xml and is 6,100,984 bytes in size.

### BACKGROUND

[0003] Integration of a nucleic acid of interest into a genome occurs at low frequency and with little site specificity, in the absence of a specialized protein to promote the insertion event. Some existing approaches, like CRISPR/Cas9, are more suited for small edits that rely on host repair pathways, and are less effective at integrating longer sequences. Other existing approaches, like Cre/loxP, require a first step of inserting a loxP site into the genome and then a second step of inserting a sequence of interest into the loxP site. There is a need in the art for improved compositions (e.g., proteins and nucleic acids) and methods for inserting, altering, or deleting sequences of interest in a genome.

### SUMMARY OF THE INVENTION

[0004] This disclosure relates to novel compositions, systems and methods for altering a genome at one or more locations in a host cell, tissue or subject, in vivo or in vitro. In particular, the invention features compositions, systems and methods for inserting, altering, or deleting sequences of interest in a host genome.

[0005] As demonstrated in this disclosure, Applicants have discovered compositions and mechanisms for enabling editing sequences of interest in a host genome by delivering gene modifying polypeptide, or a polynucleotide encoding such polypeptide, in conjunction with separate RNA template elements, including a trans template RNA element. The present disclosure relates, in part, to association of a trans template RNA to a gene modifying polypeptide:sgRNA:target genomic DNA complex by two or more interactions. Without wishing to be bound by theory, it is has been found that such association by way of two or more interactions or points of anchoring can achieve high rewriting activity, e.g., for achieving single or several nucleotide long edits. As described herein, examples of two of more interactions include, for example, 1) an RRS (RBD recruitment site):RBD (RNA-binding domain) interaction, typically between the gene modifying polypeptide and the 3′ end of the trans template, and 2) a 5′ end block Cas9 scaffold and spacer to target DNA interaction (mediated via an additional gene modifying polypeptide). This configuration exemplifies exemplary interactions that together anchor a trans template RNA to a gene modifying polypeptide:sgRNA:target genomic DNA complex to enable rewriting. It is further contemplated that the presence of both an RRS:RBD interaction and a 5′ end block spacer can provide high rewriting activity and the presence of the 5′ end block spacer rescues rewriting activity observed with a trans template having a weaker RRS:RBD interaction.

[0006] The present disclosure further relates, in part, to gene modifying systems designed to facilitate long edits (e.g., long insertions, e.g., insertions of greater than or equal to 100, 110, 120, 130, 140, 150, 160, 170, 180, 190, 200, 225, 250, 275, or 300 nucleotides) in the genome of a host cell, tissue, or subject, in vivo or in vitro. The present disclosure relates, in part, to trans template RNA elements comprising a 5′ end block gRNA spacer, where the gRNA spacer has a length sufficient to support nicking of a target sequence in genomic DNA. Without wishing to be bound by theory, it has been found that a 5′ end block gRNA spacer that supports nicking enables a trans template RNA-containing gene modifying system to achieve long edits (e.g., long insertions). The present disclosure further relates, in part, to trans template RNA elements comprising long post-edit homology regions (e.g., comprising at least 30, 35, 40, 45, 50, 55, or 60 nucleotides). Without wishing to be bound by theory, it has been found that a long post-edit homology region enables a trans template RNA-containing gene modifying system to achieve long edits (e.g., long insertions). The present disclosure also provides various gene modified polypeptides suitable for use with trans templates.

[0007] Features of the compositions or methods can include one or more of the following enumerated embodiments.
[0008] 1. A template RNA comprising:
   [0009] a) a heterologous object sequence comprising, from 5′ to 3′:
      [0010] i) a post-edit homology region having a length of at least 30 nucleotides,
      [0011] ii) a mutation region having a length of at least 20 nucleotides, to introduce a mutation into a target nucleic acid sequence wherein the mutation region, and
      [0012] iii) optionally, a pre-edit homology region, and
   [0013] b) a primer binding site sequence (PBS sequence) that binds a first portion of the target nucleic acid sequence, wherein first portion is in the first strand of the target nucleic acid sequence, and wherein the PBS sequence is 3′ of the heterologous object sequence,
   [0014] c) an RBD recruitment site (RRS), wherein the RRS is 5′ of the heterologous object sequence or 3′ of the PBS sequence; and
   [0015] d) an end block sequence which is 5′ of the heterologous object sequence (e.g., wherein the end block sequence is 5′ of both of the heterologous object sequence and the RRS), wherein the end block sequence comprises:
      [0016] i) a gRNA spacer (optionally, having a length of at least 18 nt), wherein the gRNA spacer is complementary to a second portion of the target nucleic acid sequence wherein the second portion is on the first strand of the target nucleic acid sequence; and
      [0017] ii) a gRNA scaffold.
[0018] 2. A template RNA comprising:
   [0019] a) a heterologous object sequence comprising, from 5′ to 3′:
      [0020] i) a post-edit homology region having a length of at least 7, 10, 13, 15, 17, 20, 25, or 30 nucleotides,
      [0021] ii) a mutation region having a length of at least 20 nucleotides, to introduce a mutation into a target nucleic acid sequence wherein the mutation region, and
      [0022] iii) optionally, a pre-edit homology region, and
   [0023] b) a primer binding site sequence (PBS sequence) that binds a first portion of the target nucleic acid sequence, wherein first portion is in the first strand of the target nucleic acid sequence, and wherein the PBS sequence is 3′ of the heterologous object sequence,
   [0024] c) an RBD recruitment site (RRS), wherein the RRS is 5′ of the heterologous object sequence or 3′ of the PBS sequence; and
   [0025] d) an end block sequence which is 5′ of the heterologous object sequence (e.g., wherein the end block sequence is 5′ of both of the heterologous object sequence and the RRS), wherein the end block sequence comprises:
      [0026] i) a gRNA spacer (optionally having a length of at least 18 nt), wherein the gRNA spacer is complementary to a second portion of the target nucleic acid sequence wherein the second portion is on the first strand of the target nucleic acid sequence; and
      [0027] ii) a gRNA scaffold.
[0028] 3. A template RNA comprising:
   [0029] a) a heterologous object sequence comprising a mutation region to introduce a mutation into a target nucleic acid sequence (wherein optionally the heterologous object sequence comprises, from 5′ to 3′, a post-edit homology region, the mutation region, and a pre-edit homology region), and
   [0030] b) a primer binding site sequence (PBS sequence) that binds a first portion of the target nucleic acid sequence, wherein first portion is in the first strand of the target nucleic acid sequence, and wherein the PBS sequence is 3′ of the heterologous object sequence, and
   [0031] c) an RBD recruitment site (RRS), wherein the RRS is 3′ of the PBS sequence or 5′ of the heterologous object sequence.
[0032] 4. A template RNA comprising:
   [0033] a) a heterologous object sequence comprising a mutation region to introduce a mutation into a target nucleic acid sequence (wherein optionally the heterologous object sequence comprises, from 5′ to 3′, a post-edit homology region, the mutation region, and a pre-edit homology region), and
   [0034] b) a primer binding site sequence (PBS sequence) that binds a first portion of the target nucleic acid sequence, wherein first portion is in the first strand of the target nucleic acid sequence, and wherein the PBS sequence is 3′ of the heterologous object sequence, and
   [0035] c) an RBD recruitment site (RRS), wherein optionally the RRS is situated between the PBS sequence and the heterologous object sequence, or within the heterologous object sequence (e.g., between the pre-edit homology region and the mutation region).
[0036] 5. The template RNA of any of the preceding embodiments, wherein the post-edit homology region comprises, in 5′ to 3′ order:
   [0037] i) a primer homology region, and
   [0038] ii) optionally, an extension homology region.
[0039] 6. The template RNA of embodiment 5, wherein the primer homology region has a length of at least 7, 10, 13, 15, 17, 20, 25, 30, or 31 nucleotides.
[0040] 7. The template RNA of embodiment 5, wherein the primer homology region has a length of 5-50, 5-10, 7-10, 10-15, 15-20, 20-25, 25-30, 30-35, or 35-50 nucleotides.
[0041] 8. The template RNA of any of any of the preceding embodiments, which lacks an extension homology region.
[0042] 9. The template RNA of any of embodiments 5-7, wherein the extension homology region has a length of at least 8, 15, 23, or 31 nucleotides.
[0043] 10. The template RNA of any of embodiments 5-7, wherein the extension homology region has a length of at least 15 nucleotides.
[0044] 11. The template RNA of any of embodiments 5-7, wherein the extension homology region has a length of 1-5, 5-10, 10-15, 15-20, 20-25, 25-30, or 30-35 nucleotides.
[0045] 12. The template RNA of any of embodiments 5-11, wherein the extension homology region and the primer homology region together have a length of at least 17 or 20 nucleotides.
[0046] 13. The template RNA of any of the preceding embodiments, wherein the region of the target nucleic acid corresponding to the PBS is 0-10 nt, e.g., 6 nt from the region of the target nucleic acid corresponding to the post-edit homology region.
[0047] 14. The template RNA of any of the preceding embodiments, wherein the post-edit homology region has a length of at least 44, 45, 46, 47, 48, 49, or 50 nucleotides.
[0048] 15. The template RNA of any of the preceding embodiments, wherein the post-edit homology region has a length of at least 30, 35, 40, or 45 nucleotides.
[0049] 16. The template RNA of any of the preceding embodiments, wherein the post-edit homology region has a length of 30-35, 35-40, 40-45 or 45-50 nucleotides.
[0050] 17. The template RNA of any of the preceding embodiments, wherein the post-edit homology region has a length of 46 nucleotides.
[0051] 18. The template RNA of any of the preceding embodiments, wherein the heterologous object sequence (e.g., between the post-edit homology region and the mutation region) comprises a deletion relative to a portion of the target nucleic acid sequence, the portion comprising at least 2, 3, 4, 5, 6, 7, 8, 9, 10, 11, 12, 13, 14, 15, 16, 17, 18, 19, 20, 30, 40, 50, 100, 200, 300, or 400 contiguous nucleotides, or 2-10, 10-20, 20-50, 50-100, 100-200, or 200-500 contiguous nucleotides of the target nucleic acid sequence.
[0052] 19. The template RNA of embodiment 18, which results in a deletion in the target DNA that is between the first stand nick and second strand nick.
[0053] 20. The template RNA of embodiment 19, wherein a first end of the deletion is 6 bp away from the first strand nick.
[0054] 21. The template RNA of embodiment 19, wherein a second end of the deletion is 15-20, 20-25, 20-30, 30-35, 35-50, 50-100, 100-200, or 200-500 bp away from the second strand nick.
[0055] 22. The template RNA of any of embodiments 18-21, wherein the deletion in the target DNA is immediately adjacent to the region of the target nucleic acid corresponding to the post-edit homology region.
[0056] 23. The template RNA of any of the preceding embodiments, wherein the editing does not increase the length of the target nucleic acid sequence.
[0057] 24. The template RNA of any of the preceding embodiments, wherein the mutation region has a length of at least 30, 40, 50, 60, 70, 80, 90, 100, 110, 120, 125, 130, 140, 150, 175, or 200 nucleotides.
[0058] 25. The template RNA of any of the preceding embodiments, wherein the mutation region has a length of about 20-300, 30-250, 50-200, 125-175, 100-150, or 150-200 nucleotides.
[0059] 26. The template RNA of any of the preceding embodiments, wherein the post-edit homology region has a length of at least 35, 40, 45, 46, 50, 55, 60, 70, 80, 90, 100, 102, or 150 nucleotides.
[0060] 27. The template RNA of any of the preceding embodiments, wherein the post-edit homology region has a length of about 35-55 or 40-50 nucleotides.
[0061] 28. The template RNA of any of the preceding embodiments, wherein the pre-edit homology region has a length of about 5-10, 10-15, or 15-20 nucleotides.
[0062] 29. The template RNA of any of the preceding embodiments, wherein the PBS sequence has a length of 8-20, 10-15, or 13 nucleotides.
[0063] 30. The template RNA of any of the preceding embodiments, wherein the RRS comprises an MS2 sequence.
[0064] 31. The template RNA of any of the preceding embodiments, which comprises a plurality (e.g., 2, 3, or 4) of RRS sequences in tandem.
[0065] 32. The template RNA of embodiment 31, wherein the plurality of RRS sequences are MS2 sequences.
[0066] 33. The template RNA of any of the preceding embodiments, which comprises a linker sequence between the RRS and PBS, wherein optionally the linker sequence has a length of 4-20 nucleotides, e.g., 8 or 16 nucleotides.
[0067] 34. The template RNA of any of the preceding embodiments, wherein the end block sequence comprises a sequence of Table 41 or a sequence having at least 70%, 75%, 80%, 85%, 90%, 95%, 98%, or 99% identity thereto.
[0068] 35. The template RNA of any of the preceding embodiments, wherein the RRS is 3′ of the PBS sequence.
[0069] 36. The template RNA of any of embodiments any of embodiments 1-32, wherein the RRS is 5′ of the heterologous object sequence.
[0070] 37. The template RNA of any of the preceding embodiments, wherein the RRS has a sequence according to Table 40 or a sequence having at least 70%, 75%, 80%, 85%, 90%, 95%, 98%, or 99% identity thereto.
[0071] 38. The template RNA of any of the preceding embodiments, which comprises a plurality of RRSs, e.g., a tandem array of 2, 3, 4, 5, or 10 RRSs.
[0072] 39. The template RNA of any of the preceding embodiments, wherein the PBS sequence comprises 8-17 nucleotides, e.g., 8-17 nucleotides of 100% identity to the target nucleic acid sequence.
[0073] 40. The template RNA of any of the preceding embodiments, wherein the pre-edit homology region comprises up to 20 nucleotides, e.g., up to 20 nucleotides of 100% identity to the target nucleic acid sequence.
[0074] 41. The template RNA of any of the preceding embodiments, wherein the post-edit homology region comprises 30-500 nucleotides, e.g., 30-500 nucleotides of 100% identity to the target nucleic acid sequence.
[0075] 42. The template RNA of any of the preceding embodiments, wherein the mutation region is configured to produce an insertion in the target nucleic acid.
[0076] 43. The template RNA of any of the preceding embodiments, wherein the gRNA scaffold is situated between the gRNA spacer and the heterologous object sequence.
[0077] 44. The template RNA of any of the preceding embodiments, which comprises an end block sequence, e.g., an end block sequence of Table 41 or a sequence having at least 70%, 75%, 80%, 85%, 90%, 95%, 98%, or 99% identity thereto.
[0078] 45. The template RNA of any of the preceding embodiments, which comprises an end block sequence 5′ of the heterologous object sequence.
[0079] 46. The template RNA of any of the preceding embodiments, which comprises an end block sequence 3′ of the PBS sequence, and optionally wherein the RRS is situated between the end block sequence and the PBS sequence.
[0080] 47. The template RNA of any of the preceding embodiments, which comprises a first end block sequence 3′ of the PBS sequence and a second end block sequence 5′ of the heterologous object sequence.
[0081] 48. The template RNA of any of the preceding embodiments, wherein the end block sequence is 5′ of the heterologous object sequence and the RRS is 3′ of the PBS sequence.
[0082] 49. The template RNA of any of embodiments 1-47, wherein the end block sequence is 3′ of the PBS sequence and the RRS is 5′ of the heterologous object sequence.
[0083] 50. The template RNA of any of the preceding embodiments, wherein the RRS has a sequence according to Table 40 or a sequence having at least 70%, 75%, 80%, 85%, 90%, 95%, 98%, or 99% identity thereto, or the reverse complement thereof.
[0084] 51. The template RNA of any of the preceding embodiments, which comprises a plurality of RRSs, e.g., a tandem array of 2, 3, 4, 5, or 10 RRSs.
[0085] 52. The template RNA of any if the preceding embodiments, wherein the PBS sequence is 5-1000 nt in length.
[0086] 53. The template RNA of any if the preceding embodiments, wherein the PBS sequence comprises 8-17 nucleotides, e.g., 8-17 nucleotides of 100% identity to the target nucleic acid sequence.
[0087] 54. The template RNA of any of the preceding embodiments wherein the pre-edit homology region comprises up to 30 nucleotides, e.g., up to 20 nucleotides, e.g., up to 20 nucleotides of 100% identity to the target nucleic acid sequence.
[0088] 55. The template RNA of any of the preceding embodiments, which does not comprise a post-edit homology region.
[0089] 56. The template RNA of any of embodiments 1-54, wherein the post-edit homology region comprises 5-1000, 5-500 nucleotides, e.g., 5-500 nucleotides of 100% identity to the target nucleic acid sequence.
[0090] 57. The template RNA of any of the preceding embodiments, which does not comprise a post-edit homology region.
[0091] 58. The template RNA of any of the preceding embodiments, wherein the mutation region is configured to produce an insertion, a deletion, or a substitution in the target nucleic acid.
[0092] 59. The template RNA of any of the preceding embodiments, wherein the mutation region comprises a first region (e.g., a first nucleotide) designed to insert a first sequence alteration into the target nucleic acid and a second region (e.g., a second nucleotide) designed to inactivate a PAM sequence in the target nucleic acid (e.g., a “PAM-kill” mutation as described herein).
[0093] 60. The template RNA of any of the preceding embodiments, which further comprises:
   [0094] a gRNA spacer that is complementary to a different portion (e.g., a second portion) of the target nucleic acid sequence, e.g., wherein the different portion (e.g., second portion) is on the first strand of the target nucleic acid sequence; and
   [0095] a gRNA scaffold.
[0096] 61. The template RNA of embodiment 60, wherein the gRNA spacer is 5′ of the heterologous object sequence.
[0097] 62. The template RNA of embodiment 60 or 61, wherein the gRNA scaffold is situated between the gRNA spacer and the heterologous object sequence.
[0098] 63. The template RNA of any of embodiments 60-62 wherein the gRNA spacer and the PBS sequence bind the same strand of the target nucleic acid sequence.
[0099] 64. The template RNA of any of embodiments 60-63 wherein the gRNA spacer, the heterologous object sequence, and the PBS sequence bind the same strand of the target nucleic acid sequence.
[0100] 65. The template RNA of any of the preceding embodiments, which does not comprise a gRNA spacer or a gRNA scaffold.
[0101] 66. The template RNA of any of the preceding embodiments, which comprises a linker of up to 20 nucleotides between the RRS and the PBS sequence.
[0102] 67. A gene modifying polypeptide comprising:
   [0103] a reverse transcriptase (RT) domain; and
   [0104] a DNA binding domain (DBD) that binds to a target nucleic acid sequence and is heterologous to the RT domain (e.g., a Cas domain, e.g., a Cas nickase domain, e.g., a Cas9 nickase domain); and
   [0105] a RNA-binding domain (RBD) that is heterologous to the DBD and the RT domain.
[0106] 68. A gene modifying polypeptide comprising:
   [0107] a reverse transcriptase (RT) domain; and
   [0108] a DNA binding domain (DBD) that binds to a target nucleic acid sequence and is heterologous to the RT domain (e.g., a Cas domain, e.g., a Cas nickase domain, e.g., a Cas9 nickase domain); and
   [0109] a RNA-binding domain (RBD) that is heterologous to the DBD and the RT domain, wherein the domains are arranged, in an N-terminal to C-terminal direction:
   [0110] a) DBD, RT domain, RBD;
   [0111] b) RT domain, DBD, RBD;
   [0112] c) RBD, DBD, RT domain;
   [0113] d) RBD, RT domain, DBD;
   [0114] e) DBD, RBD, RT domain; or
   [0115] f) RT domain, RBD, DBD.
[0116] 69. A gene modifying polypeptide comprising:
   [0117] a reverse transcriptase (RT) domain; and
   [0118] a DNA binding domain (DBD) that binds to a target nucleic acid sequence and is heterologous to the RT domain (e.g., a Cas nickase domain, e.g., a Cas9 nickase domain); and
   [0119] a plurality (e.g., 2, 3, 4, or 5) RNA-binding domains (RBD) that are heterologous to the DBD and the RT domain.
[0120] 70. The gene modifying polypeptide of embodiment 69, wherein the RBD has an amino acid sequence according to Table 31, or at least 75%, 80%, 85%, 90%, 95%, 96%, 97%, 98%, or 99% identity thereto.
[0121] 71. The gene modifying polypeptide of any of embodiments 67-70, wherein the plurality of RBDs have the same amino acid sequence as each other.
[0122] 72. The gene modifying polypeptide of any of embodiments 67-70, wherein the plurality of RBDs have different amino acid sequences from each other.
[0123] 73. The gene modifying polypeptide of any of embodiments 67-72, wherein the DBD has an amino acid sequence according to Table 7 or 8, or at least 75%, 80%, 85%, 90%, 95%, 96%, 97%, 98%, or 99% identity thereto.
[0124] 74. The gene modifying polypeptide of any of embodiments 67-73, wherein the RT domain is from a retrovirus, or a polypeptide domain having at least 75%, 80%, 85%, 90%, 95%, 96%, 97%, 98%, or 99% amino acids sequence identity thereto.
[0125] 75. The gene modifying polypeptide of any of embodiments 67-74, wherein the RT domain has an amino acid sequence according to Table 6, or at least 75%, 80%, 85%, 90%, 95%, 96%, 97%, 98%, or 99% identity thereto.
[0126] 76. The gene modifying polypeptide of any of embodiments 67-75, wherein the gene modifying polypeptide comprises a linker.
[0127] 77. The gene modifying polypeptide of any of embodiment 76, wherein the linker comprises a sequence according to Table 10, or a sequence having at least 75%, 80%, 85%, 90%, 95%, 96%, 97%, 98%, or 99% identity thereto.
[0128] 78. The gene modifying polypeptide of embodiment 76 or 77, wherein the linker is disposed between the DBD and the RT domain, the RT domain and the RBD, or between the RBD and the DBD.
[0129] 79. The gene modifying polypeptide of any of embodiments 67-78, wherein the gene modifying polypeptide comprises, in an N-terminal to C-terminal direction:
   [0130] a) the DBD, a first linker, the RT domain, a second linker, the RBD;
   [0131] b) the RT domain, a first linker, the DBD, a second linker, the RBD;
   [0132] c) the RBD, a first linker, the DBD, a second linker, the RT domain;
   [0133] d) RBD, a first linker, RT domain, a second linker, DBD;
   [0134] e) the DBD, a first linker, the RBD, a second linker, the RT domain; or
   [0135] f) the RT domain, a first linker, the RBD, a second linker, the DBD.
[0136] 80. The gene modifying polypeptide of any of embodiments 67-79, which was produced by intein-mediated fusion of an N-terminal portion comprising an intein-N domain and a C-terminal portion comprising an intein-C domain.
[0137] 81. A polypeptide system (e.g., a polypeptide complex) comprising:
   [0138] a) a reverse transcriptase (RT) domain; and
   [0139] b) a DNA binding domain (DBD) that binds to a target nucleic acid sequence and is heterologous to the RT domain (e.g., a Cas domain, e.g., a Cas9 domain, e.g., a Cas9 nickase domain); and
   [0140] c) a RNA-binding domain (RBD) that is heterologous to the DBD and the RT domain,
   [0141] wherein at least 2 of (e.g., all of) (a), (b), and (c) are in separate polypeptides, e.g., separate polypeptides that noncovalently form a complex.
[0142] 82. The polypeptide system of embodiment 81, wherein complex formation is mediated by a first dimerization domain that binds a second, compatible dimerization domain.
[0143] 83. The polypeptide system of embodiment 82, wherein complex formation is mediated by a third dimerization domain that binds a fourth, compatible dimerization domain.
[0144] 84. The polypeptide system of any of embodiments 81-83, wherein:
   [0145] the RBD is operably linked (e.g., via a linker) to a first dimerization domain;
   [0146] the DBD is operably linked (e.g., via a linker) to a second dimerization domain that binds the first dimerization domain;
   [0147] the DBD is operably linked (e.g., via a linker) to a third dimerization domain; and
   [0148] the RT domain is operably linked (e.g., via a linker) to a fourth dimerization domain that binds the third dimerization domain.
[0149] 85. The polypeptide system of any of embodiments 81-84, wherein the first and second dimerization domains are: chemical-induced dimerization domains, light-induced dimerization domains, antibody-peptide dimerization domains, or coiled coil dimerization domains.
[0150] 86. The polypeptide system of any of embodiments 81-85, wherein the third and fourth dimerization domains are: chemical-induced dimerization domains, light-induced dimerization domains, antibody-peptide dimerization domains, or coiled coil dimerization domains.
[0151] 87. The polypeptide system of any of embodiments 81-86, wherein the first dimerization domain and the second dimerization domain are each present in a plurality of copies, e.g., 2, 3, 4, 5, 10, 15, 20, or 30 copies.
[0152] 88. The polypeptide system of any of embodiments 81-87, wherein the third dimerization domain and the fourth dimerization domain are each present in a plurality of copies, e.g., 2, 3, 4, 5, 10, 15, 20, or 30 copies.
[0153] 89. The polypeptide system of any of embodiments 81-88, wherein the first dimerization domain and the second dimerization domain have the same sequence (e.g., wherein the first dimerization domain and the second dimerization domain form a homodimer).
[0154] 90. The polypeptide system of any of embodiments 81-89, wherein the third dimerization domain and the fourth dimerization domain have the same sequence (e.g., wherein the third dimerization domain and the fourth dimerization domain form a homodimer).
[0155] 91. The polypeptide system of any of embodiments 81-90, wherein the first dimerization domain and the second dimerization domain have different sequences (e.g., wherein the first dimerization domain and the second dimerization domain form a heterodimer).
[0156] 92. The polypeptide system of any of embodiments 81-91, wherein the third dimerization domain and the fourth dimerization domain have different sequences (e.g., wherein the third dimerization domain and the fourth dimerization domain form a hetero dimer).
[0157] 93. The polypeptide system of any of embodiments 81-92, wherein the DBD is operably linked to one or more additional DBDs, wherein optionally the additional DBDs have the same sequence as the DBD.
[0158] 94. The polypeptide system of any of embodiments 81-93, wherein the RBD has an amino acid sequence according to Table 31, or at least 75%, 80%, 85%, 90%, 95%, 96%, 97%, 98%, or 99% identity thereto.
[0159] 95. The polypeptide system of any of embodiments 81-94, wherein the plurality of RBDs have the same amino acid sequence as each other.
[0160] 96. The polypeptide system of any of embodiments 81-94, wherein the plurality of RBDs have different amino acid sequences from each other.
[0161] 97. The polypeptide system of any of embodiments 81-96, wherein the DBD has an amino acid sequence according to Table 7 or 8, or at least 75%, 80%, 85%, 90%, 95%, 96%, 97%, 98%, or 99% identity thereto.
[0162] 98. The polypeptide system of any of embodiments 81-97, wherein the RT domain is from a retrovirus, or a polypeptide domain having at least 75%, 80%, 85%, 90%, 95%, 96%, 97%, 98%, or 99% amino acids sequence identity thereto.
[0163] 99. The polypeptide system of any of embodiments 81-98, wherein the RT domain has an amino acid sequence according to Table 6, or at least 75%, 80%, 85%, 90%, 95%, 96%, 97%, 98%, or 99% identity thereto.
[0164] 100. The polypeptide system of any of embodiments 81-99, wherein each linker independently comprises a sequence according to Table 10, or a sequence having at least 75%, 80%, 85%, 90%, 95%, 96%, 97%, 98%, or 99% identity thereto.
[0165] 101. A nucleic acid or a plurality of nucleic acids encoding the polypeptides of any of the systems of embodiment 81-100.
[0166] 102. A gene modifying system comprising the template RNA of any of embodiments 1-66 and a gene modifying polypeptide, or a nucleic acid encoding the gene modifying polypeptide.
[0167] 103. A system comprising:
   [0168] a template RNA (e.g., the template RNA of any of embodiments 1-66);
   [0169] a gene modifying polypeptide of any of embodiments 67-80 or the polypeptide system of any of embodiments 81-100; and
   [0170] a first gRNA comprising:
      [0171] a gRNA spacer that binds a third portion of the target nucleic acid sequence, wherein the third portion is on the second strand of the target nucleic acid sequence; and
      [0172] a gRNA scaffold that binds the DBD of the gene modifying polypeptide or the polypeptide system.
[0173] 104. The system of embodiment 103, wherein the template RNA does not comprise a gRNA spacer or a gRNA scaffold.
[0174] 105. The gene modifying polypeptide or system of any of embodiments 67-80 or 102-104, wherein the gene modifying polypeptide comprises
   [0175] a reverse transcriptase (RT) domain;
   [0176] a DNA binding domain (DBD) that binds to a target nucleic acid sequence and is heterologous to the RT domain (e.g., a Cas domain, e.g., a Cas nickase domain, e.g., a Cas9 nickase domain); and
   [0177] a RNA-binding domain (RBD) that is heterologous to the DBD and the RT domain.
[0178] 106. The gene modifying polypeptide or system of any of embodiments 67-80 or 102-105 wherein the domains are arranged, in an N-terminal to C-terminal direction:
   [0179] a) DBD, RT domain, RBD;
   [0180] b) RT domain, DBD, RBD;
   [0181] c) RBD, DBD, RT domain;
   [0182] d) RBD, RT domain, DBD;
   [0183] e) DBD, RBD, RT domain; or
   [0184] f) RT domain, RBD, DBD.
[0185] 107. The gene modifying polypeptide or system of any of embodiments 67-80 or 102-106, which comprises a plurality (e.g., 2, 3, 4, or 5) RNA-binding domains (RBD) that are heterologous to the DBD and the RT domain.
[0186] 108. The gene modifying polypeptide or system of any of embodiments 67-80 or 102-107, wherein the RBD has an amino acid sequence according to Table 31, or at least 75%, 80%, 85%, 90%, 95%, 96%, 97%, 98%, or 99% identity thereto.
[0187] 109. The gene modifying polypeptide or system of any of embodiments 67-80 or 102-108, wherein the plurality of RBDs have the same amino acid sequence as each other.
[0188] 110. The gene modifying polypeptide or system of any of embodiments 67-80 or 102-108, wherein the plurality of RBDs have different amino acid sequences from each other.
[0189] 111. The gene modifying polypeptide or system of any of embodiments 67-80 or 102-110, wherein the DBD has an amino acid sequence according to Table 7 or 8, or at least 75%, 80%, 85%, 90%, 95%, 96%, 97%, 98%, or 99% identity thereto.
[0190] 112. The gene modifying polypeptide or system of any of any of embodiments 67-80 or 102-111, wherein the RT domain has an amino acid sequence according to Table 6, or at least 75%, 80%, 85%, 90%, 95%, 96%, 97%, 98%, or 99% identity thereto.
[0191] 113. The gene modifying polypeptide or system of any of embodiments 67-80 or 102-112, wherein the gene modifying polypeptide comprises a linker.
[0192] 114. The gene modifying polypeptide or system of embodiment 113, wherein the linker of the gene modifying polypeptide comprises a sequence according to Table 10, or a sequence having at least 75%, 80%, 85%, 90%, 95%, 96%, 97%, 98%, or 99% identity thereto.
[0193] 115. The gene modifying polypeptide or system of embodiments 113 or 114, wherein the linker of the gene modifying polypeptide is disposed between the DBD and the RT domain, the RT domain and the RBD, or between the RBD and the DBD.
[0194] 116. The gene modifying polypeptide or system of any of embodiments 67-80 or 102-115, wherein the gene modifying polypeptide comprises, in an N-terminal to C-terminal direction:
   [0195] a) the DBD, a first linker, the RT domain, a second linker, the RBD;
   [0196] b) the RT domain, a first linker, the DBD, a second linker, the RBD;
   [0197] c) the RBD, a first linker, the DBD, a second linker, the RT domain;
   [0198] d) RBD, a first linker, RT domain, a second linker, DBD;
   [0199] e) the DBD, a first linker, the RBD, a second linker, the RT domain; or
   [0200] f) the RT domain, a first linker, the RBD, a second linker, the DBD.
[0201] 117. The gene modifying polypeptide or system of any of embodiments 67-80 or 102-116, wherein the gene modifying polypeptide was produced by intein-mediated fusion of an N-terminal portion comprising an intein-N domain and a C-terminal portion comprising an intein-C domain.
[0202] 118. The gene modifying polypeptide or system of any of embodiments 67-80 or 102-117, wherein the gene modifying polypeptide binds the gRNA scaffold.
[0203] 119. The gene modifying polypeptide or system of any of embodiments 67-80 or 102-117, wherein the gene modifying polypeptide does not substantially bind the gRNA scaffold.
[0204] 120. The system of any of embodiments 102 or 105-119, which further comprises a gRNA, wherein the gRNA comprises:
   [0205] a second gRNA spacer that binds a third portion of the target nucleic acid sequence, wherein the third portion is on the second strand of the target nucleic acid sequence; and
   [0206] a second gRNA scaffold that binds the DBD of the gene modifying polypeptide.
[0207] 121. The system of embodiment 120, wherein the second gRNA scaffold has a different sequence from the sequence of the gRNA scaffold in the template RNA.
[0208] 122. The system of embodiment 120 or 121, wherein the gRNA directs a first strand nick to a first site of a first strand of a target nucleic acid molecule, and/or the end block sequence directs a second strand nick to a second site of a second strand of the target nucleic acid molecule.
[0209] 123. The system of embodiment 122, wherein the first strand nick and the second strand nick are about 18, 19, 20, 21, 22, 23, 24, 25-50, 50-100, 100-200, or 200-500 nucleotides apart in the target nucleic acid molecule.
[0210] 124. The system of embodiment 122, wherein the first strand nick and the second strand nick are about 15-20 or 20-25 nucleotides apart in the target nucleic acid molecule.
[0211] 125. The system of any of embodiments 102-124, wherein the post-edit homology region comprises the same nucleic acid sequence as a region in the second strand of the target nucleic acid molecule comprising the second site.
[0212] 126. The system of any of embodiments 102-125, wherein the post-edit homology region comprises the nucleic acid sequence of at least a portion of (e.g., all of) the gRNA spacer of the end block sequence, wherein optionally:
   [0213] a) the post-edit homology region comprises the nucleic acid sequence of the gRNA spacer of the end block sequence;
   [0214] b) the post-edit homology region comprises the nucleic acid sequence of a portion of, but not all of, the gRNA spacer of the end block sequence.
[0215] 127. The system of any of embodiments 102-126, wherein the post-edit homology region comprises a first subregion and the gRNA spacer of the end block sequence comprises a second subregion, wherein the first subregion and the second subregion have the same nucleic acid sequence.
[0216] 128. The system of any of embodiments 102-127, wherein the distance between (i) the second portion of the target nucleic acid sequence and (ii) the third portion of the target nucleic acid sequence is about 12, 13, 14, 15, 16, 17, 18, or 19 nucleotides.
[0217] 129. The system of any of embodiments 102-128, which further comprises a second Cas protein or a nucleic acid encoding the second Cas protein.
[0218] 130. The system of embodiment 129, wherein the second Cas protein is a Cas nickase protein (e.g., a Cas9 nickase protein) or a dead Cas protein (e.g., a dead Cas9 protein).
[0219] 131. The system of embodiment 129 or 130, wherein the second Cas protein binds the gRNA scaffold of the template RNA.
[0220] 132. The system of any of embodiments 129-131, wherein the gene modifying polypeptide does not substantially bind the gRNA scaffold of the template RNA.
[0221] 133. The system of any of embodiments 129-132, wherein the second Cas protein does not substantially bind the second gRNA scaffold.
[0222] 134. The system of any of embodiments 102-133, wherein the gRNA spacer of the template RNA induces nicking of the target nucleic acid, e.g., at the second strand of the target nucleic acid sequence.
[0223] 135. The system of any of embodiments 102-134, wherein the gRNA spacer binds to a region of the target nucleic acid sequence that is within about 5, 10, 15, 20, 25, 30, or 40 nucleotides of the region of the target nucleic acid sequence bound by the PBS sequence.
[0224] 136. The system of any of embodiments 102-135, which further comprises:
   [0225] a second Cas protein (e.g., a dead Cas protein), or a nucleic acid encoding the second Cas protein and
   [0226] a second gRNA comprising:
      [0227] a gRNA spacer that binds the first strand of the target nucleic acid at a location 3′ of the location bound by the PBS sequence, and
      [0228] a gRNA scaffold that binds the second Cas protein.
[0229] 137 The system of embodiment 136, wherein the second Cas protein is a dead Cas protein (e.g., a dead Cas9 protein) or a Cas nickase protein (e.g., a Cas9 nickase protein)
[0230] 138. The system of embodiment 136, wherein the gRNA spacer of the second gRNA has a length of at least 18 nucleotides (e.g., 18-28 nucleotides, e.g., 18-21 nucleotides) and the second Cas protein is a dead Cas protein.
[0231] 139. The system of embodiment 136, wherein the gRNA spacer of the second gRNA has a length of 17 nucleotides or less (e.g., 14-17 nucleotides), wherein optionally the second Cas protein is a Cas nickase protein.
[0232] 140. The system of any of embodiments 102-139, wherein the template RNA comprises:
   [0233] a gRNA spacer that is complementary to a second portion of the target nucleic acid sequence wherein the second portion is on the first strand of the target nucleic acid sequence; and
   [0234] a gRNA scaffold.
[0235] 141. The system of embodiment 140, wherein the gRNA scaffold binds the DBD of the gene modifying polypeptide or the polypeptide system.
[0236] 142. The system of any of embodiments 102-141, wherein the gRNA spacer has a length of 17 nucleotides or less.
[0237] 143. The system of any of embodiments 102-142, wherein the gRNA spacer of the template RNA induces nicking of the template nucleic acid, e.g., at the second strand of the target nucleic acid sequence.
[0238] 144. The system of any of embodiments 102-143, wherein the gRNA spacer of the template RNA does not induce nicking of the template nucleic acid.
[0239] 145. A system comprising:
   [0240] i) a template RNA of any of embodiments 1-66 (e.g., a template RNA of embodiment 65);
   [0241] ii) a first polypeptide comprising:
      [0242] a DNA binding domain (DBD) (e.g., a Cas domain, e.g., a Cas nickase domain, e.g., a Cas9 nickase domain); and
      [0243] a RNA-binding domain (RBD) that is heterologous to the DBD, wherein the RBD binds the RRS of the template RNA;
   [0244] iii) a first gRNA comprising:
      [0245] a gRNA spacer that directs the DBD of the first polypeptide to a second portion of the target nucleic acid sequence, wherein the second portion of the target nucleic acid sequence is on the second strand of the nucleic acid sequence; and
      [0246] a gRNA scaffold that binds the DBD of the first polypeptide;
   [0247] iv) a second polypeptide comprising:
      [0248] an RT domain, and
      [0249] a DNA binding domain (DBD) (e.g., a Cas domain, e.g., a Cas nickase domain, e.g., a Cas9 nickase domain), that is heterologous to the RT domain, and wherein the DBD of the second polypeptide has a different sequence from the DBD of the first polypeptide; and
   [0250] v) a second gRNA comprising:
      [0251] a gRNA spacer that directs the DBD of the second polypeptide to a third portion of the target nucleic acid sequence, wherein the third portion is on the first strand of the target nucleic acid, and
      [0252] a gRNA scaffold that binds the DBD of the second polypeptide.
[0253] 146. The system of embodiment 145, wherein the DBD of the second polypeptide comprises a Cas nickase domain or a dead Cas domain.
[0254] 147. The system of embodiment 145, wherein the gRNA spacer of the second RNA induces nicking of the template nucleic acid, e.g., at the second strand of the target nucleic acid sequence.
[0255] 148. The system of embodiment 145, wherein the gRNA spacer of the second RNA does not induce nicking of the template nucleic acid.
[0256] 149. The system of embodiment 145, wherein the first gRNA does not detectably bind to the DBD of the second polypeptide.
[0257] 150. The system of embodiment 145, wherein the second gRNA does not detectably bind to the DBD of the first polypeptide.
[0258] 151. A system comprising:
   [0259] i) a template RNA of any of embodiments 1-66, wherein the template RNA comprises:
      [0260] a gRNA spacer that is complementary to a second portion of the target nucleic acid sequence wherein the second portion is on the first strand of the target nucleic acid sequence; and
      [0261] a gRNA scaffold;
   [0262] ii) a first polypeptide comprising:
      [0263] a DNA binding domain (DBD) (e.g., a Cas domain, e.g., a Cas nickase domain, e.g., a Cas9 nickase domain); and
      [0264] a RNA-binding domain (RBD) that is heterologous to the DBD, wherein the RBD binds the RRS of the template RNA;
   [0265] iii) a first gRNA comprising:
      [0266] a gRNA spacer that directs the DBD of the first polypeptide to a third portion of the target nucleic acid sequence, wherein the third portion of the target nucleic acid sequence is on the second strand of the nucleic acid sequence; and
      [0267] a gRNA scaffold that binds the DBD of the first polypeptide; and
   [0268] iv) a second polypeptide comprising:
      [0269] an RT domain, and
      [0270] a DNA binding domain (DBD) (e.g., a Cas domain, e.g., a Cas nickase domain, e.g., a Cas9 nickase domain), that is heterologous to the RT domain, and wherein the DBD of the second polypeptide has a different sequence from the DBD of the first polypeptide, and wherein the gRNA scaffold of the template RNA binds the DBD of the second polypeptide.
[0271] 152. The system of embodiment 151, wherein the DBD of the second polypeptide comprises a Cas nickase domain or a dead Cas domain.
[0272] 153. The system of embodiment 151, wherein the gRNA spacer of the template RNA induces nicking of the template nucleic acid, e.g., at the second strand of the target nucleic acid sequence.
[0273] 154. The system of embodiment 151, wherein the gRNA spacer of the template RNA does not induce nicking of the template nucleic acid.
[0274] 155. The system of any of embodiments 151-154, wherein the first gRNA does not detectably bind to the DBD of the second polypeptide.
[0275] 156. The system of any of embodiments 151-155, wherein the gRNA of the template RNA does not detectably bind to the DBD of the first polypeptide.
[0276] 157. A polypeptide system comprising:
   [0277] a first polypeptide comprising:
      [0278] a DNA binding domain (DBD) (e.g., a Cas domain, e.g., a Cas nickase domain, e.g., a Cas9 nickase domain);
      [0279] a RNA-binding domain (RBD) that is heterologous to the DBD; and
      [0280] optionally, a linker disposed between the DBD and the RBD; and a second polypeptide comprising:
      [0281] an RT domain, and
      [0282] a DNA binding domain (DBD) (e.g., a Cas domain, e.g., a Cas nickase domain, e.g., a Cas9 nickase domain), that is heterologous to the RT domain; and
      [0283] optionally, a linker disposed between the RT domain and the DBD.
[0284] 158. The template RNA or system of any of embodiments 1-66 or 102-157, wherein the target nucleic acid sequence is a target gene, enhancer, or promoter.
[0285] 159. The template RNA of system of any of embodiments 1-66 or 102-158, wherein the target nucleic acid sequence is a human target gene, human enhancer, or human promoter.
[0286] 160. The system or polypeptide system of any of embodiments 67-159, wherein the RBD has a sequence of Table 31, or a sequence having at least 70%, 75%, 80%, 85%, 90%, 95%, 98%, or 99% identity thereto.
[0287] 161. A method for modifying a target nucleic acid in a cell (e.g., a human cell), the method comprising contacting the cell with the system of any one of embodiments 102-160, or nucleic acid encoding the same, thereby modifying the target nucleic acid.
[0288] 162. The method of embodiment 161, wherein presence of the second polypeptide, compared to an otherwise similar system lacking the second polypeptide, results in one or more of:
   [0289] increased unwinding of the target nucleic acid;
   [0290] increased number of target nucleic acids that are modified;
   [0291] increased length of insertion into the target nucleic acid; or
   [0292] reduced MMR activity at the target nucleic acid.
[0293] 163. The method of embodiment 161 or 162, wherein the cell is in vivo or ex vivo.
[0294] 164. The method of any of embodiments 161-163, which results in an insertion into the target nucleic acid.
[0295] 165. The method of embodiment 164, wherein the insertion has a length of at least 20, 30, 40, 50, 60, 70, 80, 90, 100, 110, 120, 125, 130, 140, 150, 175, or 200 nucleotides.
[0296] 166. The method of embodiment 164 or 165, wherein the insertion has a length of about 20-300, 30-250, 50-200, 125-175, 100-150, or 150-200 nucleotides.
[0297] 167. A template RNA comprising:
   [0298] a) a heterologous object sequence comprising a mutation region to introduce a mutation into a target nucleic acid sequence (wherein optionally the heterologous object sequence comprises, from 5′ to 3′, a post-edit homology region, the mutation region, and a pre-edit homology region), and
   [0299] b) a primer binding site sequence (PBS sequence) that binds a first portion of the target nucleic acid sequence, wherein first portion is in the first strand of the target nucleic acid sequence, and wherein the PBS sequence is 3′ of the heterologous object sequence, and
   [0300] c) an RBD recruitment site (RRS), wherein the RRS is 3′ of the PBS sequence or 5′ of the heterologous object sequence.
[0301] 168. The template RNA of any of embodiments 1-66 or 167, wherein the RRS comprises the RRS of a template sequence as listed in Table S4, or a sequence having at least 70%, 75%, 80%, 85%, 90%, 95%, 98%, or 99% identity thereto.
[0302] 169. The template RNA of any of embodiments 1-66, 167, or 168, which comprises an end block sequence, e.g., an end block sequence of Table 41, or comprising a sequence having at least 70%, 75%, 80%, 85%, 90%, 95%, 98%, or 99% identity thereto.
[0303] 170. The template RNA of any of embodiments 1-66 or 167-169, wherein the end block sequence is 5′ of the heterologous object sequence (e.g., located at the 5′ end of the template RNA), optionally wherein the RRS is 3′ of the PBS sequence.
[0304] 171. The template RNA of any of embodiments 1-66 or 167-170, wherein the end block sequence comprises a gRNA scaffold.
[0305] 172. The template RNA of any of embodiments 1-66 or 167-171, wherein the gRNA scaffold is chosen from Table 41.
[0306] 173. The template RNA of any of embodiments 1-66 or 167-172, wherein the gRNA scaffold is a Cas9 scaffold.
[0307] 174. The template RNA of any of embodiments 1-66 or 167-173, wherein the end block sequence comprises a gRNA spacer, e.g., positioned at the 5′ end of the end block sequence (e.g., 5′ of the gRNA scaffold and/or positioned at the 5′ end of the template RNA).
[0308] 175. The template RNA of any of embodiments 1-66 or 167-174, wherein the gRNA spacer induces nicking of the target nucleic acid.
[0309] 176. The template RNA of any of embodiments 1-66 or 167-175, wherein the end block sequence binds to a DNA binding domain, e.g., of a gene modifying polypeptide (e.g., as described herein).
[0310] 177. The template RNA of any of embodiments 1-66 or 167-176, wherein the gene modifying polypeptide bound to the end block sequence does not create a nick in the second strand of the target nucleic acid sequence.
[0311] 178. The template RNA of any of embodiments 1-66 or 167-177, wherein the gRNA spacer binds to a second portion of the first strand of the target nucleic acid sequence located 3′ relative to the first portion of the target nucleic acid sequence.
[0312] 179. The template RNA of embodiment 178, wherein the 5′ end of the portion of the first strand bound by the gRNA spacer is between 10-20, 20-30, 30-40, 40-50, 50-100, 100-150, or 150-200 nucleotides from the 3′ end of the first portion.
[0313] 180. The template RNA of any of embodiments 1-66 or 167-179, wherein:
   [0314] (i) the gRNA spacer has a length of less than or equal to 17 nucleotides, e.g., about 5, 6, 7, 8, 9, 10, 11, 12, 13, 14, 15, 16, or 17 nucleotides;
   [0315] (ii) the gRNA spacer has 100% complementarity to the second portion on the first strand of the target nucleic acid sequence; and/or
   [0316] (iii) the gRNA spacer directs nicking activity by a Cas domain.
[0317] 181. The template RNA of embodiment 180, wherein:
   [0318] (i) the gRNA spacer has a length of less than or equal to 17 nucleotides, e.g., about 5, 6, 7, 8, 9, 10, 11, 12, 13, 14, 15, 16, or 17 nucleotides; and
   [0319] (ii) the gRNA spacer has 100% complementarity to the second portion on the first strand of the target nucleic acid sequence.
[0320] 182. The template RNA of embodiment 180, wherein:
   [0321] (ii) the gRNA spacer has 100% complementarity to the second portion on the first strand of the target nucleic acid sequence; and
   [0322] (iii) the gRNA spacer directs nicking activity by a Cas domain.
[0323] 183. The template RNA of any of embodiments 1-66 or 167-182, wherein the end block sequence is 3′ of the PBS sequence and/or the RRS (e.g., located at the 3′ end of the template RNA), optionally wherein the RRS is 5′ of the heterologous object sequence.
[0324] 184. The template RNA of embodiment 183, wherein the end block sequence comprises GGGTCAGGAGCCCCCCCCTGAACCCAGGATAACCCTCAAAGTCGGGGGGC (SEQ ID NO: 18,101), an end block sequence of Table 41, or comprising a sequence having at least 70%, 75%, 80%, 85%, 90%, 95%, 98%, or 99% identity to any thereof.
[0325] 185. The template RNA of any of embodiments 1-66 or 167-184, wherein the end block sequence comprises an aptamer.
[0326] 186. The template RNA of any of embodiments 1-66 or 167-185, wherein the end block sequence is capable of binding to an RNA aptamer-binding protein (e.g., an RNA aptamer-binding protein attached to a gene modifying polypeptide, e.g., at the DBD).
[0327] 187. The template RNA of any of embodiments 1-66 or 167-186, wherein the end block sequence comprises one or more hairpins (e.g., 1, 2, 3, 4, or 5 hairpins).
[0328] 188. The template RNA of any of embodiments 1-66 or 167-187, wherein the end block comprises an ePEG end block.
[0329] 189. The template RNA of any of embodiments 1-66 or 167-188, further comprising:
   [0330] a 5′ end block sequence, e.g., an end block sequence of Table 41, or comprising a sequence having at least 70%, 75%, 80%, 85%, 90%, 95%, 98%, or 99% identity thereto, wherein the 5′ end block sequence is 5′ of the heterologous object sequence (e.g., located at the 5′ end of the template RNA), optionally wherein the RRS is 3′ of the PBS sequence; and
   [0331] a 3′ end block sequence, e.g., an end block sequence of Table 41 or the sequence GGGTCAGGAGCCCCCCCCTGAACCCAGGATAACCCTCAAAGTCGGGGGGC (SEQ ID NO: 18,101), or comprising a sequence having at least 70%, 75%, 80%, 85%, 90%, 95%, 98%, or 99% identity to any thereof, wherein the 3′ end block sequence is 3′ of the PBS sequence and/or the RRS (e.g., located at the 3′ end of the template RNA), optionally wherein the RRS is 5′ of the heterologous object sequence.
[0332] 190. The template RNA of any of embodiments 1-66 or 167-189, wherein the RRS comprises an MS2 sequence.
[0333] 191. The template RNA of any of embodiments 1-66 or 167-190, wherein the RRS binds to an MCP polypeptide.
[0334] 192. The template RNA of any of embodiments 1-66 or 167-191, wherein the RRS comprises a PP7 sequence.
[0335] 193. The template RNA of any of embodiments 1-66 or 167-192, wherein the RRS and the PBS are separated by a region having of length of about 5-10, 10-15, or 15-20 nucleotides (e.g., about 8 nucleotides or about 16 nucleotides).
[0336] 194. The template RNA of any of embodiments 1-66 or 167-193, wherein the RRS has a sequence according to Table 40 or a sequence having at least 70%, 75%, 80%, 85%, 90%, 95%, 98%, or 99% identity thereto.
[0337] 195. The template RNA of any of embodiments 1-66 or 167-194, which comprises a plurality of RRSes (e.g., identical or different RRSes), e.g., 1, 2, 3, 4, 5, 6, 7, 8, 9, or 10 RRSes, e.g., a tandem array of 2, 3, 4, 5, or 10 RRSs.
[0338] 196. The template RNA of embodiment 195, wherein the plurality of RRSes each comprises an MS2 sequence.
[0339] 197. The template RNA of embodiment 195 or 196, wherein the plurality of RRSes comprises 4 repeats of the MS2 sequence.
[0340] 198. The template RNA of any of embodiments 1-66 or 167-197, wherein the PBS sequence comprises 8-17 nucleotides, e.g., 8-17 nucleotides of 100% identity to the target nucleic acid sequence.
[0341] 199. The template RNA of embodiment 198, wherein the PBS sequence has a length of about 8, 13, or 17 nucleotides.
[0342] 200. The template RNA of embodiment 198, wherein the PBS sequence has a length of about 13 nucleotides.
[0343] 201. The template RNA of any of embodiments 1-66 or 167-200, wherein the pre-edit homology region comprises up to 20 nucleotides, e.g., up to 20 nucleotides of 100% identity to the target nucleic acid sequence.
[0344] 202. The template RNA of any of embodiments 1-66 or 167-201, wherein the post-edit homology region comprises 5-500 nucleotides, e.g., 5-500 nucleotides of 100% identity to the target nucleic acid sequence.
[0345] 203. The template RNA of any of embodiments 1-66 or 167-202, wherein the post-edit homology region comprises 10-20, 20-30, 30-40, 40-50, 50-60, or 60-70 nucleotides, e.g., about 12 nucleotides or about 63 nucleotides.
[0346] 204. The template RNA of embodiment 203, wherein the post-edit homology region comprises one or more (e.g., 1, 2, 3, 4, or 5) single nucleotide substitutions, e.g., at approximately regular intervals (e.g., spaced about 5, 6, 7, 8, 9, 10, 11, 12, 13, 14, 15, 16, 17, 18, 19, or 20 nucleotides apart).
[0347] 205. The template RNA of any of embodiments 1-66 or 167-204, wherein the mutation region is configured to produce an insertion, a deletion, or a substitution in the target nucleic acid.
[0348] 206. The template RNA of any of embodiments 1-64, 66, or 167-205, wherein the gRNA spacer is complementary to a different portion (e.g., a second portion) of the target nucleic acid sequence, e.g., wherein the different portion (e.g., second portion) is on the first strand of the target nucleic acid sequence.
[0349] 207. The template RNA of embodiment 206, wherein the gRNA spacer is 5′ of the heterologous object sequence.
[0350] 208. The template RNA of embodiment 206 or 207, wherein the gRNA scaffold is situated between the gRNA spacer and the heterologous object sequence.
[0351] 209. The template RNA of any of embodiments 1-64, 66, or 167-208, wherein the gRNA spacer and the PBS sequence bind the same strand of the target nucleic acid sequence.
[0352] 210. The template RNA of any of embodiments 1-64, 66, or 167-209, wherein the gRNA spacer, the heterologous object sequence, and the PBS sequence bind the same strand of the target nucleic acid sequence.
[0353] 211. The template RNA of any of embodiments 3, 4, 66, or 167-173, which does not comprise a gRNA spacer or a gRNA scaffold.
[0354] 212. The template RNA of any of embodiments 1-66 or 167-211, which comprises a linker of up to 20 nucleotides between the RRS and the PBS sequence.
[0355] 213. The template RNA of any of embodiments 1-66 or 167-212, wherein the template RNA is linear.
[0356] 214. The template RNA of any of embodiments 1-66 or 167-212, wherein the template RNA is circular.
[0357] 215. A gene modifying polypeptide comprising:
   [0358] a reverse transcriptase (RT) domain; and
   [0359] a DNA binding domain (DBD) that binds to a target nucleic acid sequence and is heterologous to the RT domain (e.g., a Cas domain, e.g., a Cas nickase domain, e.g., a Cas9 nickase domain); and
   [0360] a RNA-binding domain (RBD) that is heterologous to the DBD and the RT domain,
   [0361] wherein the domains are arranged, in an N-terminal to C-terminal direction:
   [0362] (a) DBD, RT domain, RBD;
   [0363] (b) RT domain, DBD, RBD;
   [0364] (c) RBD, DBD, RT domain;
   [0365] (d) RBD, RT domain, DBD;
   [0366] (e) DBD, RBD, RT domain; or
   [0367] (f) RT domain, RBD, DBD.
[0368] 216. The gene modifying polypeptide of embodiment 215, further comprising one or more (e.g., 1, 2, 3, or 4) additional RBDs (e.g., one or more additional copies of the RBD, e.g., adjacent to the RBD).
[0369] 217. A gene modifying polypeptide comprising:
   [0370] a reverse transcriptase (RT) domain; and
   [0371] a DNA binding domain (DBD) that binds to a target nucleic acid sequence and is heterologous to the RT domain (e.g., a Cas nickase domain, e.g., a Cas9 nickase domain); and
   [0372] a plurality (e.g., 2, 3, 4, or 5) RNA-binding domains (RBD) that are heterologous to the DBD and the RT domain.
[0373] 218. The gene modifying polypeptide of any of embodiments 215-217, wherein the RBD comprises an amino acid sequence according to Table 31 or the amino acid sequence of the RBD of a gene modifying polypeptide as listed in any of Tables S1-S3, or an amino acid sequence having at least 75%, 80%, 85%, 90%, 95%, 96%, 97%, 98%, or 99% identity thereto.
[0374] 219. The gene modifying polypeptide of any of embodiments 215-218, wherein the plurality of RBDs have the same amino acid sequence as each other.
[0375] 220. The gene modifying polypeptide of any of embodiments 215-218, wherein the plurality of RBDs have different amino acid sequences from each other.
[0376] 221. The gene modifying polypeptide of any of embodiments 215-220, wherein the DBD comprises an amino acid sequence according to Table 7 or 8 or the amino acid sequence of the DBD of a gene modifying polypeptide as listed in any of Tables S1-S3, or an amino acid sequence having at least 75%, 80%, 85%, 90%, 95%, 96%, 97%, 98%, or 99% identity thereto.
[0377] 222. The gene modifying polypeptide of any of embodiments 215-221, wherein the RT domain is from a retrovirus, or a polypeptide domain having at least 75%, 80%, 85%, 90%, 95%, 96%, 97%, 98%, or 99% amino acids sequence identity thereto.
[0378] 223. The gene modifying polypeptide of any of embodiments 215-222, wherein the RT domain comprises an amino acid sequence according to Table 6 or the amino acid sequence of the RT domain of a gene modifying polypeptide as listed in any of Tables S1-S3, or an amino acid sequence having at least 75%, 80%, 85%, 90%, 95%, 96%, 97%, 98%, or 99% identity thereto.
[0379] 224. The gene modifying polypeptide of any of embodiments 215-223, wherein:
   [0380] (a) the RBD comprises an amino acid sequence of the RBD of a gene modifying polypeptide as listed in any of Tables S1-S3, or an amino acid sequence having at least 75%, 80%, 85%, 90%, 95%, 96%, 97%, 98%, or 99% identity thereto;
   [0381] (b) the DBD comprises an amino acid sequence of the DBD of said gene modifying polypeptide listed in any of Tables S1-S3, or an amino acid sequence having at least 75%, 80%, 85%, 90%, 95%, 96%, 97%, 98%, or 99% identity thereto; and
   [0382] (c) the RT domain comprises an amino acid sequence of the RT domain of said gene modifying polypeptide listed in any of Tables S1-S3, or an amino acid sequence having at least 75%, 80%, 85%, 90%, 95%, 96%, 97%, 98%, or 99% identity thereto.
[0383] 225. The gene modifying polypeptide of any of embodiments 215-224, wherein the gene modifying polypeptide comprises a linker.
[0384] 226. The gene modifying polypeptide of embodiment 225, wherein the linker is 2-5 amino acids in length (e.g., 4 amino acids in length).
[0385] 227. The gene modifying polypeptide of embodiment 225, wherein the linker is 5-10 amino acids in length (e.g., 8 amino acids in length).
[0386] 228. The gene modifying polypeptide of embodiment 225, wherein the linker is 10-20 amino acids in length (e.g., 16 amino acids in length).
[0387] 229. The gene modifying polypeptide of any of embodiments 225-228, wherein the linker comprises a sequence according to Table 10, or a sequence having at least 75%, 80%, 85%, 90%, 95%, 96%, 97%, 98%, or 99% identity thereto.
[0388] 230. The gene modifying polypeptide of any of embodiments 225-229, wherein the linker is disposed between the DBD and the RT domain, the RT domain and the RBD, or between the RBD and the DBD.
[0389] 231. The gene modifying polypeptide of any of embodiments 215-230, which comprises a first linker and a second linker, wherein:
   [0390] (i) the first linker is disposed between the DBD and the RT domain and the second linker is disposed between the RT domain and the RBD;
   [0391] (ii) the first linker is disposed between the DBD and the RBD and the second linker is disposed between the RBD and RT domain; or
   [0392] (iii) the first linker is disposed between the RT domain and the DBD and the second linker is disposed between the DBD and RBD.
[0393] 232. The gene modifying polypeptide of any of embodiments 215-231, wherein the gene modifying polypeptide comprises, in an N-terminal to C-terminal direction:
   [0394] g) the DBD, a first linker, the RT domain, a second linker, the RBD;
   [0395] h) the RT domain, a first linker, the DBD, a second linker, the RBD;
   [0396] i) the RBD, a first linker, the DBD, a second linker, the RT domain;
   [0397] j) RBD, a first linker, RT domain, a second linker, DBD;
   [0398] k) the DBD, a first linker, the RBD, a second linker, the RT domain; or
   [0399] l) the RT domain, a first linker, the RBD, a second linker, the DBD.
[0400] 233. The gene modifying polypeptide of any of embodiments 215-232, which was produced by intein-mediated fusion of an N-terminal portion comprising an intein-N domain and a C-terminal portion comprising an intein-C domain.
[0401] 234. The gene modifying polypeptide of any of embodiments 215-233, wherein the DBD comprises a Cas domain, e.g., a Cas9 domain, e.g., a Cas9 nickase domain (e.g., as described herein).
[0402] 235. The gene modifying polypeptide embodiment 234, wherein the Cas domain is a dCas9 domain.
[0403] 236. The gene modifying polypeptide embodiment 234, wherein the Cas domain is an nCas9 domain.
[0404] 237. The gene modifying polypeptide of any of embodiments 215-236, wherein the RT domain comprises an AVIRE domain (e.g., as described herein), or an amino acid sequence have at least 70%, 75%, 80%, 85%, 90%, 95%, 96%, 97%, 98%, or 99% sequence identity thereto.
[0405] 238. The gene modifying polypeptide of embodiment 237, wherein the AVIRE domain comprises an AVIRE amino acid sequence listed in Table 6 or an amino acid sequence have at least 70%, 75%, 80%, 85%, 90%, 95%, 96%, 97%, 98%, or 99% sequence identity thereto.
[0406] 239. The gene modifying polypeptide of any of embodiments 215-237, wherein the RT domain comprises an MLVMS domain (e.g., as described herein, e.g., an MLVMS RT domain as listed in Table 6), or an amino acid sequence have at least 70%, 75%, 80%, 85%, 90%, 95%, 96%, 97%, 98%, or 99% sequence identity thereto.
[0407] 240. The gene modifying polypeptide of embodiment 239, wherein the MLVMS domain comprises an MLVMS amino acid sequence listed in Table 6 or an amino acid sequence have at least 70%, 75%, 80%, 85%, 90%, 95%, 96%, 97%, 98%, or 99% sequence identity thereto
[0408] 241. The gene modifying polypeptide of any of embodiments 215-240, wherein the domains are arranged, in an N-terminal to C-terminal direction:
   [0409] a) DBD, RT domain, RBD;
   [0410] b) RT domain, DBD, RBD;
   [0411] c) RBD, DBD, RT domain;
   [0412] d) RBD, RT domain, DBD;
   [0413] e) DBD, RBD, RT domain; or
   [0414] f) RT domain, RBD, DBD.
[0415] 242. The gene modifying polypeptide of embodiment 241, further comprising one or more (e.g., 1, 2, 3, or 4) additional RBDs (e.g., one or more additional copies of the RBD, e.g., adjacent to the RBD).
[0416] 243. The gene modifying polypeptide of any of embodiments 215-242, further comprising one or more additional RT domains (e.g., one or more additional copies of the RT domain, e.g., adjacent to the RT domain).
[0417] 244. The gene modifying polypeptide of embodiment 243, wherein one or more of the additional RT domains comprises an AVIRE domain (e.g., as described herein).
[0418] 245. The gene modifying polypeptide of any of embodiments 215-244, wherein one or more of the additional RT domains comprises an MLVMS domain (e.g., as described herein).
[0419] 246. The gene modifying polypeptide of any of embodiments 215-245, comprising an RNA aptamer-binding domain.
[0420] 247. The gene modifying polypeptide of embodiment 246, wherein the DBD is attached to the RNA aptamer-binding domain, e.g., via a linker.
[0421] 248. A polypeptide system (e.g., a polypeptide complex) comprising:
   [0422] a) a reverse transcriptase (RT) domain; and
   [0423] b) a DNA binding domain (DBD) that binds to a target nucleic acid sequence and is heterologous to the RT domain (e.g., a Cas domain, e.g., a Cas9 domain, e.g., a Cas9 nickase domain); and
   [0424] c) a RNA-binding domain (RBD) that is heterologous to the DBD and the RT domain,
   [0425] wherein at least 2 of (e.g., all of) (a), (b), and (c) are in separate polypeptides, e.g., separate polypeptides that noncovalently form a complex.
[0426] 249. The polypeptide system of embodiment 248, wherein the RT domain and the DBD are in separate polypeptides.
[0427] 250. The polypeptide system of embodiment 248-249, wherein the RT domain and the RBD are in separate polypeptides.
[0428] 251. The polypeptide system of embodiment 248-250, wherein complex formation is mediated by a first dimerization domain that binds a second, compatible dimerization domain.
[0429] 252. The polypeptide system of embodiment 248-250, wherein complex formation is mediated by a third dimerization domain that binds a fourth, compatible dimerization domain.
[0430] 253. The polypeptide system of any of embodiments 248-252, wherein:
   [0431] the RBD is operably linked (e.g., via a linker) to a first dimerization domain;
   [0432] the DBD is operably linked (e.g., via a linker) to a second dimerization domain that binds the first dimerization domain;
   [0433] the DBD is operably linked (e.g., via a linker) to a third dimerization domain; and
   [0434] the RT domain is operably linked (e.g., via a linker) to a fourth dimerization domain that binds the third dimerization domain.
[0435] 254. The polypeptide system of any of embodiment 251, wherein the first and second dimerization domains are: chemical-induced dimerization domains, light-induced dimerization domains, antibody-peptide dimerization domains, or coiled coil dimerization domains.
[0436] 255. The polypeptide system of any of embodiment 252, wherein the third and fourth dimerization domains are: chemical-induced dimerization domains, light-induced dimerization domains, antibody-peptide dimerization domains, or coiled coil dimerization domains.
[0437] 256. The polypeptide system of any of embodiment 251 or 254, wherein the first dimerization domain and the second dimerization domain are each present in a plurality of copies, e.g., 2, 3, 4, 5, 10, 15, 20, or 30 copies.
[0438] 257. The polypeptide system of any of embodiment 252 or 255, wherein the third dimerization domain and the fourth dimerization domain are each present in a plurality of copies, e.g., 2, 3, 4, 5, 10, 15, 20, or 30 copies.
[0439] 258. The polypeptide system of any of embodiments 251, 254, or 256, wherein the first dimerization domain and the second dimerization domain have the same sequence (e.g., wherein the first dimerization domain and the second dimerization domain form a homodimer).
[0440] 259. The polypeptide system of any of embodiments 252, 255, or 257, wherein the third dimerization domain and the fourth dimerization domain have the same sequence (e.g., wherein the third dimerization domain and the fourth dimerization domain form a homodimer).
[0441] 260. The polypeptide system of any of embodiments 251, 254, 256, or 258, wherein the first dimerization domain and the second dimerization domain have different sequences (e.g., wherein the first dimerization domain and the second dimerization domain form a heterodimer).
[0442] 261. The polypeptide system of any of embodiments 252, 255, 257, or 259, wherein the third dimerization domain and the fourth dimerization domain have different sequences (e.g., wherein the third dimerization domain and the fourth dimerization domain form a hetero dimer).
[0443] 262. The polypeptide system of any of embodiments 248-261, wherein the DBD is operably linked to one or more additional DBDs, wherein optionally the additional DBDs have the same sequence as the DBD.
[0444] 263. The polypeptide system of any of embodiments 248-262, wherein the RBD has an amino acid sequence according to Table 31, or at least 75%, 80%, 85%, 90%, 95%, 96%, 97%, 98%, or 99% identity thereto.
[0445] 264. The polypeptide system of any of embodiments 248-263, wherein the plurality of RBDs have the same amino acid sequence as each other.
[0446] 265. The polypeptide system of any of embodiments 248-263, wherein the plurality of RBDs have different amino acid sequences from each other.
[0447] 266. The polypeptide system of any of embodiments 248-265, wherein the DBD has an amino acid sequence according to Table 31, or at least 75%, 80%, 85%, 90%, 95%, 96%, 97%, 98%, or 99% identity thereto.
[0448] 267. The polypeptide system of any of embodiments 248-266, wherein the RT domain is from a retrovirus, or a polypeptide domain having at least 75%, 80%, 85%, 90%, 95%, 96%, 97%, 98%, or 99% amino acids sequence identity thereto.
[0449] 268. The polypeptide system of any of embodiments 248-267, wherein the RT domain has an amino acid sequence according to Table 6, or at least 75%, 80%, 85%, 90%, 95%, 96%, 97%, 98%, or 99% identity thereto.
[0450] 269. The polypeptide system of any of embodiments 248-268, wherein each linker independently comprises a sequence according to Table 10, or a sequence having at least 75%, 80%, 85%, 90%, 95%, 96%, 97%, 98%, or 99% identity thereto.
[0451] 270. A nucleic acid or a plurality of nucleic acids encoding the polypeptides of any of embodiments 67-100, 102-156, or 215-269.
[0452] 271. A system comprising:
   [0453] a template RNA of any of embodiments 1-66 or 167-214;
   [0454] a gene modifying polypeptide, e.g., a gene modifying polypeptide of any of embodiments 67-80, or 215-269, or a polypeptide system, e.g., a polypeptide system of any of embodiments 81-100, or 248-269; and
   [0455] a first gRNA comprising:
      [0456] a gRNA spacer that binds a third portion of the target nucleic acid sequence, wherein the third portion is one the second strand of the target nucleic acid sequence; and
      [0457] a gRNA scaffold that binds the DBD of the gene modifying polypeptide or the polypeptide system.
[0458] 272. The system of embodiment 271, wherein the gRNA scaffold of the first gRNA has the same protein binding specificity as the gRNA sequence of the template RNA.
[0459] 273. The system of embodiment 272, wherein the gRNA sequence of the template RNA binds to a first copy of a gene modifying polypeptide (e.g., at the DBD of the gene modifying polypeptide), and the gRNA scaffold of the first gRNA binds to a second copy of the gene modifying polypeptide (e.g., at the DBD of the gene modifying polypeptide).
[0460] 274. The system of embodiment 271, wherein the template RNA does not comprise a gRNA spacer or a gRNA scaffold.
[0461] 275. The system of embodiment 271-273, wherein the gRNA spacer binds to a region of the target nucleic acid sequence that is within about 5, 10, 15, 20, 25, 30, or 40 nucleotides of the region of the target nucleic acid sequence bound by the PBS sequence.
[0462] 276. The system of any of embodiments 271-273, or 275, which further comprises:
   [0463] a second Cas protein (e.g., a dead Cas protein) or a nucleic acid encoding the second Cas protein and
   [0464] a second gRNA comprising:
      [0465] a gRNA spacer that binds the first strand of the target nucleic acid at a location 3′ of the location bound by the PBS sequence, and
      [0466] a gRNA scaffold that binds the second Cas protein.
[0467] 277. The system of embodiment 276, wherein the second Cas protein is a dead Cas protein (e.g., a dead Cas9 protein) or a Cas nickase protein (e.g., a Cas9 nickase protein)
[0468] 278. The system of embodiment 276 or 277, wherein the gRNA spacer of the second gRNA has a length of at least 18 nucleotides (e.g., 18-28 nucleotides, e.g., 18-21 nucleotides) and the second Cas protein is a dead Cas protein.
[0469] 279. The system of embodiment 276 or 277, wherein the gRNA spacer of the second gRNA has a length of 17 nucleotides or less (e.g., 14-17 nucleotides), wherein optionally the second Cas protein is a 30 Cas nickase protein.
[0470] 280. The system of any of embodiments 271-273, or 275-279, wherein the template RNA further comprises:
   [0471] a gRNA spacer that is complementary to a second portion of the target nucleic acid sequence wherein the second portion is on the first strand of the target nucleic acid sequence; and
   [0472] a gRNA scaffold.
[0473] 281. The system of embodiment 271-273, or 275-280, wherein the gRNA scaffold binds the DBD of the gene modifying polypeptide or the polypeptide system.
[0474] 282. The system of embodiment 271-273, or 275-281, wherein the gRNA spacer has a length of 17 nucleotides or less.
[0475] 283. The system of any of embodiments 271-273, or 275-282, wherein the gRNA spacer of the template RNA induces nicking of the template nucleic acid, e.g., at the second strand of the target nucleic acid sequence.
[0476] 284. The system of any of embodiments 271-273, or 275-282, wherein the gRNA spacer of the template RNA does not induce nicking of the template nucleic acid.
[0477] 285. A system comprising:
   [0478] i) a template RNA of any of embodiments 1-66, or 167-214 (e.g., a template RNA of embodiment 18);
   [0479] ii) a first polypeptide comprising:
      [0480] a DNA binding domain (DBD) (e.g., a Cas domain, e.g., a Cas nickase domain, e.g., a Cas9 nickase domain); and
      [0481] a RNA-binding domain (RBD) that is heterologous to the DBD, wherein the RBD binds the RRS of the template RNA;
   [0482] iii) a first gRNA comprising:
      [0483] a gRNA spacer that directs the DBD of the first polypeptide to a second portion of the target nucleic acid sequence, wherein the second portion of the target nucleic acid sequence is on the second strand of the nucleic acid sequence; and
      [0484] a gRNA scaffold that binds the DBD of the first polypeptide;
   [0485] iv) a second polypeptide comprising:
      [0486] an RT domain, and
      [0487] a DNA binding domain (DBD) (e.g., a Cas domain, e.g., a Cas nickase domain, e.g., a Cas9 nickase domain), that is heterologous to the RT domain, and wherein the DBD of the second polypeptide has a different sequence from the DBD of the first polypeptide; and
   [0488] v) a second gRNA comprising:
      [0489] a gRNA spacer that directs the DBD of the second polypeptide to a third portion of the target nucleic acid sequence, wherein the third portion is on the first strand of the target nucleic acid, and
      [0490] a gRNA scaffold that binds the DBD of the second polypeptide.
[0491] 286. The system of embodiment 285, wherein the DBD of the second polypeptide comprises a Cas nickase domain or a dead Cas domain.
[0492] 287. The system of embodiment 285 or 286, wherein the gRNA spacer of the second RNA induces nicking of the template nucleic acid, e.g., at the second strand of the target nucleic acid sequence.
[0493] 288. The system of embodiment 285 or 286, wherein the gRNA spacer of the second RNA does not induce nicking of the template nucleic acid.
[0494] 289. The system of any of embodiments 285-288, wherein the first gRNA does not detectably bind to the DBD of the second polypeptide.
[0495] 290. The system of any of embodiments 285-289, wherein the second gRNA does not detectably bind to the DBD of the first polypeptide.
[0496] 291. A system comprising:
   [0497] i) a template RNA of any of embodiments 1-66, or 167-214, wherein the template RNA comprises:
      [0498] a gRNA spacer that is complementary to a second portion of the target nucleic acid sequence wherein the second portion is on the first strand of the target nucleic acid sequence; and
      [0499] a gRNA scaffold;
   [0500] ii) a first polypeptide comprising:
      [0501] a DNA binding domain (DBD) (e.g., a Cas domain, e.g., a Cas nickase domain, e.g., a Cas9 nickase domain); and
      [0502] a RNA-binding domain (RBD) that is heterologous to the DBD, wherein the RBD binds the RRS of the template RNA;
   [0503] iii) a first gRNA comprising:
      [0504] a gRNA spacer that directs the DBD of the first polypeptide to a third portion of the target nucleic acid sequence, wherein the third portion of the target nucleic acid sequence is on the second strand of the nucleic acid sequence; and
      [0505] a gRNA scaffold that binds the DBD of the first polypeptide; and
   [0506] iv) a second polypeptide comprising:
      [0507] an RT domain, and
      [0508] a DNA binding domain (DBD) (e.g., a Cas domain, e.g., a Cas nickase domain, e.g., a Cas9 nickase domain), that is heterologous to the RT domain, and wherein the DBD of the second polypeptide has a different sequence from the DBD of the first polypeptide, and wherein the gRNA scaffold of the template RNA binds the DBD of the second polypeptide.
[0509] 292. The system of embodiment 291, wherein the DBD of the second polypeptide comprises a Cas nickase domain or a dead Cas domain.
[0510] 293. The system of embodiment 291 or 292, wherein the gRNA spacer of the template RNA induces nicking of the template nucleic acid, e.g., at the second strand of the target nucleic acid sequence.
[0511] 294. The system of embodiments 291-293, wherein the gRNA spacer of the template RNA does not induce nicking of the template nucleic acid.
[0512] 295. The system of any of embodiments 291-293, wherein the first gRNA does not detectably bind to the DBD of the second polypeptide.
[0513] 296. The system of any of embodiments 291-295, wherein the gRNA of the template RNA does not detectably bind to the DBD of the first polypeptide.
[0514] 297. A polypeptide system comprising:
   [0515] a first polypeptide comprising:
      [0516] a DNA binding domain (DBD) (e.g., a Cas domain, e.g., a Cas nickase domain, e.g., a Cas9 nickase domain);
      [0517] a RNA-binding domain (RBD) that is heterologous to the DBD; and
      [0518] optionally, a linker disposed between the DBD and the RBD; and
   [0519] a second polypeptide comprising:
      [0520] an RT domain, and
      [0521] a DNA binding domain (DBD) (e.g., a Cas domain, e.g., a Cas nickase domain, e.g., a Cas9 nickase domain), that is heterologous to the RT domain; and
      [0522] optionally, a linker disposed between the RT domain and the DBD.
[0523] 298. The template RNA or system of any of embodiments 1-66, 102-156, 167-214, or 271-297, wherein the target nucleic acid sequence is a target gene, enhancer, or promoter.
[0524] 299. The template RNA of system any of embodiments 1-66, 102-156, 167-214, or 271-298, wherein the target nucleic acid sequence is a human target gene, human enhancer, or human promoter.
[0525] 300. The system or polypeptide system of any of embodiments 81-100, 102-156, or 248-299, wherein the RBD has a sequence of Table 31, or a sequence having at least 70%, 75%, 80%, 85%, 90%, 95%, 98%, or 99% identity thereto.
[0526] 301. The system or polypeptide system of any of embodiments 81-100, 102-156, or 248-300, wherein the domains are arranged, in an N-terminal to C-terminal direction, the RT domain, a first linker, the DBD, a second linker, and the RBD.
[0527] 302. The system or polypeptide system of any of embodiments 67-100, 102-156, or 248-301, wherein the domains are arranged, in an N-terminal to C-terminal direction, the RBD, a first linker, the RT domain, a second linker, and the DBD.
[0528] 303. The system or polypeptide system of embodiment 301 or 302, or the gene modifying polypeptide of any of embodiments 68, 71-80, or 217-247, wherein:
   [0529] (i) the DBD comprises a Cas9 domain (e.g., as described herein);
   [0530] (ii) the first linker comprises the amino acid sequence of SEQ ID NO: 217, and/or the second linker comprises the amino acid sequence of SEQ ID NO: 217; and/or
   [0531] (iii) the RBD comprises one or more (e.g., 1, 2, or 4) MCPs (e.g., as listed in Table 31).
[0532] 304. The system, polypeptide system, or gene modifying polypeptide of embodiment 303, wherein the MCP comprises an N55K mutation.
[0533] 305. The system or polypeptide system of embodiment 303 or 304, or the gene modifying polypeptide of any of embodiments 68, 71-80, or 217-247, wherein the RBD comprises, in N-terminal to C-direction, a first amino acid sequence according to SEQ ID NO: 18003, an alanine residue, and a second amino acid sequence according to SEQ ID NO: 18003.
[0534] 306. The system or polypeptide system of embodiment 303 or 304, or the gene modifying polypeptide of any of embodiments 68, 71-80, or 217-247, wherein the RBD comprises, in N-terminal to C-direction, a first amino acid sequence according to SEQ ID NO: 18002, an alanine residue, and a second amino acid sequence according to SEQ ID NO: 18003.
[0535] 307. The system or polypeptide system of embodiment 303 or 304, or the gene modifying polypeptide of any of embodiments 68, 71-80, or 217-247, wherein the RBD comprises, in N-terminal to C-terminal direction, a first amino acid sequence according to SEQ ID NO: 18003, an alanine residue, a second amino acid sequence according to SEQ ID NO: 18003, optionally a linker sequence, a third amino acid sequence according to SEQ ID NO: 18003, an alanine residue, and a fourth amino acid sequence according to SEQ ID NO: 18003.
[0536] 308. The system or polypeptide system of embodiment 303 or 304, or the gene modifying polypeptide of any of embodiments 68, 71-80, or 217-247, wherein the RBD comprises, in N-terminal to C-terminal direction, a first amino acid sequence according to SEQ ID NO: 18002, an alanine residue, a second amino acid sequence according to SEQ ID NO: 18003, optionally a linker sequence, a third amino acid sequence according to SEQ ID NO: 18002, an alanine residue, and a fourth amino acid sequence according to SEQ ID NO: 18003.
[0537] 309. The system or polypeptide system of any of embodiments 67-100, 102-156, or 248-308, or the gene modifying polypeptide of any of embodiments 68, 71-80, or 217-247, wherein the domains are arranged, in an N-terminal to C-terminal direction, the RT domain, a first linker comprising the amino acid sequence of SEQ ID NO: 217, a Cas9 domain, a second linker comprising the amino acid sequence of SEQ ID NO: 217, and an MCP.
[0538] 310. The system or polypeptide system of any of embodiments 67-100, 102-156, or 248-309, or the gene modifying polypeptide of any of embodiments 68, 71-80, or 217-247, wherein the domains are arranged, in an N-terminal to C-terminal direction, the RT domain, a first linker comprising the amino acid sequence of SEQ ID NO: 217, a Cas9 domain, a second linker comprising the amino acid sequence of SEQ ID NO: 217, and two MCPs.
[0539] 311. The system or polypeptide system of any of embodiments 67-100, 102-156, or 248-310, or the gene modifying polypeptide of any of embodiments 68, 71-80, or 217-247, wherein the domains are arranged, in an N-terminal to C-terminal direction, the RT domain, a first linker comprising the amino acid sequence of SEQ ID NO: 217, a Cas9 domain, a second linker comprising the amino acid sequence of SEQ ID NO: 217, a first amino acid sequence according to SEQ ID NO: 18003, an alanine residue, and a second amino acid sequence according to SEQ ID NO: 18003.
[0540] 312. The system or polypeptide system of any of embodiments 67-100, 102-156, or 248-311, or the gene modifying polypeptide of any of embodiments 68, 71-80, or 217-247, wherein the domains are arranged, in an N-terminal to C-terminal direction, the RT domain, a first linker comprising the amino acid sequence of SEQ ID NO: 217, a Cas9 domain, a second linker comprising the amino acid sequence of SEQ ID NO: 217, a first amino acid sequence according to SEQ ID NO: 18002, an alanine residue, and a second amino acid sequence according to SEQ ID NO: 18003.
[0541] 313. The system or polypeptide system of any of embodiments 67-100, 102-156, or 248-312, or the gene modifying polypeptide of any of embodiments 68, 71-80, or 217-247, wherein the domains are arranged, in an N-terminal to C-terminal direction, the RT domain, a first linker comprising the amino acid sequence of SEQ ID NO: 217, a Cas9 domain, a second linker comprising the amino acid sequence of SEQ ID NO: 217, and four MCPs.
[0542] 314. The system or polypeptide system of any of embodiments 67-100, 102-156, or 248-313, or the gene modifying polypeptide of any of embodiments 68, 71-80, or 217-247, wherein the domains are arranged, in an N-terminal to C-terminal direction, the RT domain, a first linker comprising the amino acid sequence of SEQ ID NO: 217, a Cas9 domain, a second linker comprising the amino acid sequence of SEQ ID NO: 217, and a first amino acid sequence according to SEQ ID NO: 18003, an alanine residue, a second amino acid sequence according to SEQ ID NO: 18003, optionally a linker sequence, a third amino acid sequence according to SEQ ID NO: 18003, an alanine residue, and a fourth amino acid sequence according to SEQ ID NO: 18003.
[0543] 315. The system or polypeptide system of any of embodiments 67-100, 102-156, or 248-314, or the gene modifying polypeptide of any of embodiments 68, 71-80, or 217-247, wherein the domains are arranged, in an N-terminal to C-terminal direction, the RT domain, a first linker comprising the amino acid sequence of SEQ ID NO: 217, a Cas9 domain, a second linker comprising the amino acid sequence of SEQ ID NO: 217, a first amino acid sequence according to SEQ ID NO: 18002, an alanine residue, a second amino acid sequence according to SEQ ID NO: 18003, optionally a linker sequence, a third amino acid sequence according to SEQ ID NO: 18002, an alanine residue, and a fourth amino acid sequence according to SEQ ID NO: 18003.
[0544] 316. The system or polypeptide system of any of embodiments 67-100, 102-156, or 248-315, or the gene modifying polypeptide of any of embodiments 68, 71-80, or 217-247, wherein the domains are arranged, in an N-terminal to C-terminal direction, an MCP, a first linker comprising the amino acid sequence of SEQ ID NO: 217, the RT domain, a second linker comprising the amino acid sequence of SEQ ID NO: 217, and a Cas9 domain.
[0545] 317. The system or polypeptide system of any of embodiments 67-100, 102-156, or 248-316, or the gene modifying polypeptide of any of embodiments 68, 71-80, or 217-247, wherein the domains are arranged, in an N-terminal to C-terminal direction, two MCPs, a first linker comprising the amino acid sequence of SEQ ID NO: 217, the RT domain, a second linker comprising the amino acid sequence of SEQ ID NO: 217, and a Cas9 domain.
[0546] 318. The system or polypeptide system of any of embodiments 67-100, 102-156, or 248-317, or the gene modifying polypeptide of any of embodiments 68, 71-80, or 217-247, wherein the domains are arranged, in an N-terminal to C-terminal direction, a first amino acid sequence according to SEQ ID NO: 18003, an alanine residue, a second amino acid sequence according to SEQ ID NO: 18003, a first linker comprising the amino acid sequence of SEQ ID NO: 217, the RT domain, a second linker comprising the amino acid sequence of SEQ ID NO: 217, and a Cas9 domain.
[0547] 319. The system or polypeptide system of any of embodiments 67-100, 102-156, or 248-318, or the gene modifying polypeptide of any of embodiments 68, 71-80, or 217-247, wherein the domains are arranged, in an N-terminal to C-terminal direction, a first amino acid sequence according to SEQ ID NO: 18002, an alanine residue, a second amino acid sequence according to SEQ ID NO: 18003, a first linker comprising the amino acid sequence of SEQ ID NO: 217, the RT domain, a second linker comprising the amino acid sequence of SEQ ID NO: 217, and a Cas9 domain.
[0548] 320. The system or polypeptide system of any of embodiments 67-100, 102-156, or 248-319, or the gene modifying polypeptide of any of embodiments 68, 71-80, or 217-247, wherein the domains are arranged, in an N-terminal to C-terminal direction, four MCPs, a first linker comprising the amino acid sequence of SEQ ID NO: 217, the RT domain, a second linker comprising the amino acid sequence of SEQ ID NO: 217, and a Cas9 domain.
[0549] 321. The system or polypeptide system of any of embodiments 67-100, 102-156, or 248-320, or the gene modifying polypeptide of any of embodiments 68, 71-80, or 217-247, wherein the domains are arranged, in an N-terminal to C-terminal direction, a first amino acid sequence according to SEQ ID NO: 18003, an alanine residue, a second amino acid sequence according to SEQ ID NO: 18003, optionally a linker sequence, a third amino acid sequence according to SEQ ID NO: 18003, an alanine residue, a fourth amino acid sequence according to SEQ ID NO: 18003, a first linker comprising the amino acid sequence of SEQ ID NO: 217, the RT domain, a second linker comprising the amino acid sequence of SEQ ID NO: 217, and a Cas9 domain.
[0550] 322. The system or polypeptide system of any of embodiments 67-100, 102-156, or 248-321, or the gene modifying polypeptide of any of embodiments 68, 71-80, or 217-247, wherein the domains are arranged, in an N-terminal to C-terminal direction, a first amino acid sequence according to SEQ ID NO: 18002, an alanine residue, a second amino acid sequence according to SEQ ID NO: 18003, optionally a linker sequence, a third amino acid sequence according to SEQ ID NO: 18002, an alanine residue, a fourth amino acid sequence according to SEQ ID NO: 18003, a first linker comprising the amino acid sequence of SEQ ID NO: 217, the RT domain, a second linker comprising the amino acid sequence of SEQ ID NO: 217, and a Cas9 domain.
[0551] 323. The system or polypeptide system of any of embodiments 67-100, 102-156, or 248-322, or the gene modifying polypeptide of any of embodiments 68, 71-80, or 217-247, wherein the first amino acid sequence according to SEQ ID NO: 18003 is immediately adjacent to the alanine residue that is C-terminal of the first amino acid sequence according to SEQ ID NO: 18003.
[0552] 324. The system or polypeptide system of any of embodiments 67-100, 102-156, or 248-323, or the gene modifying polypeptide of any of embodiments 68, 71-80, or 217-247, wherein the first amino acid sequence according to SEQ ID NO: 18002 is immediately adjacent to the alanine residue that is C-terminal of the first amino acid sequence according to SEQ ID NO: 18002.
[0553] 325. The system or polypeptide system of any of embodiments 67-100, 102-156, or 248-324, or the gene modifying polypeptide of any of embodiments 68, 71-80, or 217-247, wherein the second amino acid sequence according to SEQ ID NO: 18003 is immediately adjacent to the alanine residue that is N-terminal of the second amino acid sequence according to SEQ ID NO: 18003.
[0554] 326. The system or polypeptide system of any of embodiments 67-100, 102-156, or 248-325, or the gene modifying polypeptide of any of embodiments 68, 71-80, or 217-247, wherein the third amino acid sequence according to SEQ ID NO: 18003 is immediately adjacent to the alanine residue that is C-terminal of the third amino acid sequence according to SEQ ID NO: 18003.
[0555] 327. The system or polypeptide system of any of embodiments 67-100, 102-156, or 248-326, or the gene modifying polypeptide of any of embodiments 68, 71-80, or 217-247, wherein the third amino acid sequence according to SEQ ID NO: 18002 is immediately adjacent to the alanine residue that is C-terminal of the third amino acid sequence according to SEQ ID NO: 18002.
[0556] 328. The system or polypeptide system of any of embodiments 67-100, 102-156, or 248-327, or the gene modifying polypeptide of any of embodiments 68, 71-80, or 217-247, wherein the fourth amino acid sequence according to SEQ ID NO: 18003 is immediately adjacent to the alanine residue that is N-terminal of the fourth amino acid sequence according to SEQ ID NO: 18003.
[0557] 329. The system or polypeptide system of any of embodiments 67-100, 102-156, or 248-328, or the gene modifying polypeptide of any of embodiments 68, 71-80, or 217-247, which comprises an amino acid sequence according to SEQ ID NO: 18005 or 18006, or a sequence with at least 80%, 85%, 90%, 95%, 98%, or 99% identity thereto.
[0558] 330. The system or polypeptide system of any of embodiments 67-100, 102-156, or 248-329, or the gene modifying polypeptide of any of embodiments 68, 71-80, or 217-247, which comprises an amino acid sequence according to Table S5 or Table S6, or a sequence with at least 80%, 85%, 90%, 95%, 98%, or 99% identity thereto.
[0559] 331. The system or polypeptide system of any of embodiments 67-100, 102-156, or 248-329, or the gene modifying polypeptide of any of embodiments 68, 71-80, or 217-247, which comprises an amino acid sequence according to Table N1, or a sequence with at least 80%, 85%, 90%, 95%, 98%, or 99% identity thereto.
[0560] 332. The system or polypeptide system of any of embodiments 67-100, 102-156, or 248-329, or the gene modifying polypeptide of any of embodiments 68, 71-80, or 217-247, which comprises an amino acid sequence according to Table N2, or a sequence with at least 80%, 85%, 90%, 95%, 98%, or 99% identity thereto.
[0561] 333. The system or polypeptide system of any of embodiments 67-100, 102-156, or 248-329, or the gene modifying polypeptide of any of embodiments 68, 71-80, or 217-247, which comprises an amino acid sequence according to Table N4, or a sequence with at least 80%, 85%, 90%, 95%, 98%, or 99% identity thereto.
[0562] 334. The system or polypeptide system of any of embodiments 67-100, 102-156, or 248-329, or the gene modifying polypeptide of any of embodiments 68, 71-80, or 217-247, which comprises the amino acid sequence of SEQ ID NO: 17,101, or a sequence with at least 80%, 85%, 90%, 95%, 98%, or 99% identity thereto.
[0563] 335. The template RNA, system, or polypeptide of any of embodiments 1-162, or 167-334, which induces an insertion having at least 65%, 70%, 75%, 80%, 85%, 90%, 95%, 96%, 97%, 98%, 99%, or 100% sequence identity to a desired insertion sequence.
[0564] 336. The template RNA, system, or polypeptide of any of embodiments 1-162, or 167-335, which induces an insertion having 100% sequence identity to a desired insertion sequence.
[0565] 337. The template RNA, system, or polypeptide of any of embodiments 1-162, or 167-336, which induces an insertion having the same length as a desired insertion sequence.
[0566] 338. The template RNA, system, or polypeptide of any of embodiments 1-162, or 167-337, which induces an insertion having the same length as a desired insertion sequence wherein the insertion does not comprise a position of non-identity to a desired insertion sequence.
[0567] 339. The template RNA, system, or polypeptide of any of embodiments 1-162, or 167-338, which induces an insertion having the same length as a desired insertion sequence in at least about 4%, 5%, 6%, 7%, 8%, 9%, 10%, 110%, 12%, 130%, 14%, 150%, 20%, 21%, 22%, 230%, 24%, 250%, 30%, 35%, 36%, 37%, 38%, 39%, or 40% of cells.
[0568] 340. The template RNA, system, or polypeptide of any of embodiments 1-162, or 167-339, which induces an insertion having the same length as a desired insertion sequence, and wherein sequencing of the insertion does not reveal a position of non-identity to a desired insertion sequence (e.g., sequencing reveals that each position of the insertion is identical to the desired insertion sequence, or sequencing categorizes one or more positions of the insertion as ambiguous and all other positions of the insertion as identical to the desired insertion sequence).
[0569] 341. The template RNA, system, or polypeptide of any of embodiments 1-162, or 167-340, which induces an insertion having at least 80%, 85%, 90%, 95%, 96%, 97%, 98%, 99%, or 100% sequence identity to a desired insertion sequence in at least about 4%, 5%, 6%, 7%, 8%, 9%, 10%, 11%, 12%, 13%, 14%, 15%, 20%, 21%, 22%, 23%, 24%, 25%, 30%, 35%, 36%, 37%, 38%, 39%, or 40% of cells.
[0570] 342. The template RNA, system, or polypeptide of any of embodiments 1-162, or 167-341, which induces an insertion having 100% sequence identity to a desired insertion sequence in at least about 4%, 5%, 6%, 7%, 8%, 9%, 10%, 110%, 12%, 130%, 14%, 150%, 20%, 210%, 22%, 230%, 24%, 250%, 30%, 35%, 36%, 37%, 38%, 39%, or 40% of cells.
[0571] 343. The template RNA, system, or polypeptide of any of embodiments 1-162, or 167-342, which induces an insertion having 100% sequence identity to a desired insertion sequence in at least about 8% of cells.
[0572] 344. The template RNA, system, or polypeptide of any of embodiments 1-162, or 167-343, which induces an insertion having 100% sequence identity to a desired insertion sequence in at least about 11% of cells.
[0573] 345. The template RNA, system, or polypeptide of any of embodiments 1-162, or 167-344, which induces an insertion having 100% sequence identity to a desired insertion sequence in at least about 24% of cells.
[0574] 346. The template RNA, system, or polypeptide of any of embodiments 1-162, or 167-345, which induces an insertion having 100% sequence identity to a desired insertion sequence in at least about 37% of cells.
[0575] 347. The template RNA, system, or polypeptide of any of embodiments 1-162, or 167-346, which induces insertions at two copies of a target locus in at least about 4%, 5%, 6%, 7%, 8%, 9%, 10%, 11%, 12%, 13%, 14%, 15%, 20%, 21%, 22%, 23%, 24%, 25%, 30%, 35%, 36%, 37%, 38%, 39%, or 40% of cells.
[0576] 348. The template RNA, system, or polypeptide of any of embodiments 1-162, or 167-347, wherein the gene modifying polypeptide comprises, in N-terminal to C-terminal order, a Cas domain (e.g., a Cas9 domain), an RBD, and a reverse transcriptase (RT) domain.
[0577] 349. The template RNA, system, or polypeptide of any of embodiments 1-162, or 167-348, wherein the gene modifying polypeptide comprises, in N-terminal to C-terminal order, a Cas domain (e.g., a Cas9 domain), a reverse transcriptase (RT) domain, and an RBP domain.
[0578] 350. The template RNA, system, or polypeptide of any of embodiments 1-162, or 167-349, wherein the gene modifying polypeptide comprises, in N-terminal to C-terminal order, a reverse transcriptase (RT) domain, an RBP domain, and a Cas domain (e.g., a Cas9 domain).
[0579] 351. The template RNA, system, or polypeptide of any of embodiments 1-162, or 167-350, wherein the template RNA comprises an end block sequence that promotes nicking at a target site by a Cas domain (e.g., a Cas9 domain).
[0580] 352. The template RNA, system, or polypeptide of any of embodiments 1-162, or 167-351, wherein the template RNA comprises an end block sequence comprising a gRNA spacer having a length greater than 15 nucleotides (e.g., at least 16, 17, 18, 19, 20, 21, 22, 23, 24, or 25 nucleotides).
[0581] 353. The template RNA, system, or polypeptide of any of embodiments 1-162, or 167-352, wherein the template RNA comprises an end block sequence comprising a gRNA spacer having a length of at least 20 nucleotides.
[0582] 354. The template RNA, system, or polypeptide of any of embodiments 1-162, or 167-353, wherein the template RNA comprises at least 4 copies of the RBD recruitment site (RRS), e.g., at least 4 copies of an MS2 sequence.
[0583] 355. The template RNA, system, or polypeptide of any of embodiments 1-162 or 167-354, which produces perfect editing at about 5%, 10%, or 15%, or about 1-5%, 5-10%, 10-15%, or 15-20% of target nucleic acids.
[0584] 356. A method for modifying a target nucleic acid in a cell (e.g., a human cell), the method comprising contacting the cell with the system of any one of the preceding embodiments, or nucleic acid encoding the same, thereby modifying the target nucleic acid.
[0585] 357. The method of embodiment 356, wherein presence of the second polypeptide, compared to an otherwise similar system lacking the second polypeptide, results in one or more of:
   [0586] increased unwinding of the target nucleic acid;
   [0587] increased number of target nucleic acids that are modified;
   [0588] increased length of insertion into the target nucleic acid; or
   [0589] reduced MMR activity at the target nucleic acid.
[0590] 358. The method of embodiment 356 or 357, wherein the cell is in vivo or ex vivo.
[0591] 359. A system comprising:
   [0592] I) template RNA comprising:
      [0593] a) a heterologous object sequence comprising, from 5′ to 3′:
         [0594] i) optionally, a post-edit homology region,
         [0595] ii) a mutation region, to introduce a mutation into a target nucleic acid sequence wherein the mutation region, and
         [0596] iii) optionally, a pre-edit homology region, and
      [0597] b) a primer binding site sequence (PBS sequence) that binds a first portion of the target nucleic acid sequence, wherein first portion is in the first strand of the target nucleic acid sequence, and wherein the PBS sequence is 3′ of the heterologous object sequence,
      [0598] c) an RBD recruitment site (RRS), wherein the RRS is 5′ of the heterologous object sequence or 3′ of the PBS sequence; and
      [0599] d) an end block sequence which is 5′ of the heterologous object sequence (e.g., wherein the end block sequence is 5′ of both of the heterologous object sequence and the RRS), wherein the end block sequence comprises:
         [0600] i) a gRNA spacer having a length of 12-17 nt (e.g., 15 nt), wherein the gRNA spacer is complementary to a second portion of the target nucleic acid sequence wherein the second portion is on the first strand of the target nucleic acid sequence; and
         [0601] ii) a gRNA scaffold; and
   [0602] II) a gRNA configured to produce a second strand nick (a “second strand nick gRNA”), comprising:
      [0603] i) a gRNA spacer having a length of at least 18 nt, wherein the gRNA spacer is complementary to a further portion of the first target nucleic acid sequence; and
      [0604] ii) a gRNA scaffold,
   [0605] wherein:
      [0606] the second portion is situated between the first portion and the further portion; or
      [0607] the further portion is situated between the first portion and the second portion.
[0608] 360. The system of embodiment 359, which is capable of producing an insertion, deletion, or replacement in the target nucleic acid sequence.
[0609] 361. The system of embodiment 359, wherein the heterologous object sequence (e.g., between the post-edit homology region and the mutation region) comprises a deletion relative to a portion of the target nucleic acid sequence, the portion comprising at least 2, 3, 4, 5, 6, 7, 8, 9, 10, 11, 12, 13, 14, 15, 16, 17, 18, 19, 20, 30, 40, 50, 100, 200, 300, or 400 contiguous nucleotides, or 2-10, 10-20, 20-50, 50-100, 100-200, or 200-500 contiguous nucleotides of the target nucleic acid sequence.

[0610] In one aspect, the disclosure relates to a system for modifying DNA, comprising (a) a nucleic acid encoding a gene modifying polypeptide capable of target primed reverse transcription, the polypeptide comprising (i) a reverse transcriptase domain and (ii) a Cas9 nickase that binds DNA and has endonuclease activity, and (b) a template RNA comprising (i) a gRNA spacer that is complementary to a first portion of a human gene, (ii) a gRNA scaffold that binds the polypeptide, (iii) a heterologous object sequence comprising a mutation region, and (iv) a primer binding site (PBS) sequence comprising at least 3, 4, 5, 6, 7, or 8 bases of 100% homology to a target DNA strand at the 3′ end of the template RNA.

[0611] The gRNA spacer may comprise at least 15 bases of 100% homology to the target DNA at the 5′ end of the template RNA. The template RNA may further comprise a PBS sequence comprising at least 5 bases of at least 80% homology to the target DNA strand. The template RNA may comprise one or more chemical modifications.

[0612] The domains of the gene modifying polypeptide may be joined by a peptide linker. The polypeptide may comprise one or more peptide linkers. The gene modifying polypeptide may further comprise a nuclear localization signal. The polypeptide may comprise more than one nuclear localization signal, e.g., multiple adjacent nuclear localization signals or one or more nuclear localization signals in different regions of the polypeptide, e.g., one or more nuclear localization signals in the N-terminus of the polypeptide and one or more nuclear localization signals in the C-terminus of the polypeptide. The nucleic acid encoding the gene modifying polypeptide may encode one or more intein domains.

[0613] Introduction of the system into a target cell may result in insertion of at least 1, 2, 3, 4, 5, 10, 15, 20, 25, 30, 35, 40, 45, 50, 60, 70, 80, 90, 100, 150, 200, 250, 300, 350, 400, 500, or 1000 base pairs of exogenous DNA. Introduction of the system into a target cell may result in deletion, wherein the deletion is less than 2, 3, 4, 5, 10, 50, or 100 base pairs of genomic DNA upstream or downstream of the insertion. Introduction of the system into a target cell may result in substitution, e.g., substitution of 1, 2, or 3 nucleotides, e.g., consecutive nucleotides.

[0614] The heterologous object sequence may be at least 5, 10, 25, 50, 100, 150, 200, 250, 300, 400, 500, 600, or 700 base pairs.

[0615] In one aspect, the disclosure relates to a pharmaceutical composition comprising the system described above and a pharmaceutically acceptable excipient or carrier, wherein the pharmaceutically acceptable excipient or carrier is selected from the group consisting of a plasmid vector, a viral vector, a vesicle, and a lipid nanoparticle. In one aspect, the disclosure relates to a pharmaceutical composition comprising the system described above and multiple pharmaceutically acceptable excipients or carriers, wherein the pharmaceutically acceptable excipients or carriers are selected from the group consisting of a plasmid vector, a viral vector, a vesicle, and a lipid nanoparticle, e.g., where the system described above is delivered by two distinct excipients or carriers, e.g., two lipid nanoparticles, two viral vectors, or one lipid nanoparticle and one viral vector. The viral vector may be an adeno-associated virus (AAV).

[0616] In one aspect, the disclosure relates to a host cell (e.g., a mammalian cell, e.g., a human cell) comprising the system described above.

[0617] The system may be introduced in vivo, in vitro, ex vivo, or in situ. The nucleic acid of (a) may be integrated into the genome of the host cell. In some embodiments, the nucleic acid of (a) is not integrated into the genome of the host cell. In some embodiments, the heterologous object sequence is inserted at only one target site in the host cell genome. The heterologous object sequence may be inserted at two or more target sites in the host cell genome, e.g., at the same corresponding site in two homologous chromosomes or at two different sites on the same or different chromosomes. The heterologous object sequence may encode a mammalian polypeptide, or a fragment or a variant thereof. The components of the system may be delivered on 1, 2, 3, 4, or more distinct nucleic acid molecules. The system may be introduced into a host cell by electroporation or by using at least one vehicle selected from a plasmid vector, a viral vector, a vesicle, and a lipid nanoparticle.

### BRIEF DESCRIPTION OF THE DRAWINGS

[0618] The patent or application file contains at least one drawing executed in color. Copies of this patent or patent application publication with color drawing(s) will be provided by the Office upon request and payment of the necessary fee.

[0619] FIG. 1 is a series of diagrams showing components of an exemplary trans gene modifying system. The exemplary system comprises three components: (1) a gene modifying polypeptide, (2) a template RNA, and (3) a gRNA. The gene modifying polypeptide includes a nickase Cas9 (nCas9), an RNA binding domain (RBD), and a polymerase (in this example a retroviral reverse transcriptase (RT)). The template contains an RBD recruitment site (RRS), a primer binding site sequence (PBS sequence) (Priming) and a heterologous object sequence (template region), as well as an end protection/end block sequence that, in this embodiment, (a) protects the structure from exonucleases, and/or (b) terminates the RT due to the secondary structure. The third component is a gRNA. In a fully assembled trans gene modifying reaction, the gRNA associates with the nCas9 of the gene modifying polypeptide, and directs the polypeptide to the DNA. The nCas9 then introduces a nick into the DNA. The RBD of the polypeptide recruits the template to the site of the nick through its interaction with the RRS on the template RNA. The Cas9 induced nick results in a 3′ flap, that can anneal to the PBS sequence of the template RNA. The RT can then reverse transcribe the template until it hits the end protection structure. The highly structured end protection will terminate the reverse transcription. Cellular repair processes will incorporate the edited strand into the genome.

[0620] FIGS. 2A-2B are a series of diagrams showing exemplary polypeptides that can be used in a trans gene modifying system as described herein. There are several ways by which a polypeptide containing an nCas9-RT-RBD can be assembled: (A) by direction fusion, (B) by using either intein or dimerization (homo or hetero) domains that covalently or non-covalently assemble the full polypeptide, respectively. (A) In a direct fusion approach, a linker connects the nCas9 with the RBD, which in turn is connected through a linker with the RT (e.g., as shown). Exemplary possible configurations are listed in the panel below FIG. 2A, and RBDs/linkers are listed in a separate table. An RBP repeat can be present once or multiple (e.g., n=1-5) times in a RBD. (B) The polypeptide can also be assembled using various intein or dimerization domains. In some instances, the nCas9 is linked to a dimerization domain (FD #1), and the RBD is linked to its partner dimerization domain. The nCas9 is linked to a second dimerization domain (FD2), while the RT is linked to its partner. The dimerization domain can either result in covalent linkage (e.g., when using inteins), or in non-covalent assembly of the polypeptide (e.g., using chemical or light induced dimerization). Two dimerization reactions are utilized, upon which a polypeptide complex is assembled. Exemplary possible variations are described herein (e.g., intein dimerization domains, chemically-induced dimerization domains, light-induced dimerization domains, antibody-peptide dimerization domains, coiled-coil dimerization domains). The dimerization domains can be present once or multiple (n=1-30) times, e.g., as tandem repeats.

[0621] FIGS. 3A-3C are a series of diagrams showing an exemplary template RNA and subregions thereof. (A) Schematic of an exemplary template RNA. This template includes (3′ to 5′) of one or several (n=1-10) RRS at the 3′ end, a linker, followed by a PBS sequence (priming) (8-17 nts), followed by a heterologous object sequence (template). The template region contains, in some embodiments, a pre-edit homology region (0-20 nts), the mutation region having a desired modification to the genome (e.g., an insertion, deletion, or point mutation(s)), and a post-edit homology region (e.g., n=5-500 nts). Lastly, an end protection/end block sequence is present at the 5′ end of the template RNA. Exemplary possible configurations are listed in the panel below FIG. 3A. (B) Exemplary variations for the various template RNA components are listed. Exemplary sequences for such components are described herein. (C) Schematic of an exemplary template RNA wherein the RRS is situated between the pre-edit homology region and the mutation region.

[0622] FIGS. 4A-4B are a series of diagrams showing, among other things, increased unwinding of a target nucleic acid, as well as engagement and modulation of a second strand of the target nucleic acid, e.g., to increase gene modifying efficiency and/or to permit long insertions. There are several ways in which the second strand can be engaged in the context of trans gene modification. (A) In one exemplary configuration, a second Cas9-gRNA complex can be introduced in trans. This second Cas9 complex can be, for example, a nickase Cas9 (nCas9) to direct a nick on the second strand. This nick could be used to initiate second strand synthesis after the RT reaction, and/or to signal to the cell endogenous Mismatch repair system that the first (edited) strand should be maintained and copied. Alternatively, the Cas9 can be, for example, a catalytically inactive (dead) Cas9 (dCas9). Without wishing to be bound by theory, in some embodiments this would unwind the DNA and could facilitate the repair of especially longer insertions. The Cas9 in this scenario can be of the same or orthogonal species as the Cas9 present in the trans rewriting polypeptide. Thus, FIG. 4A shows an exemplary 5-component system comprising 3 RNAs and 2 different polypeptides. As described herein, the system illustrated in FIG. 4A could be altered to become a 4-component system, e.g., by fusing the template RNA to the gRNA that binds the top strand of the target nucleic acid sequence. (B) In an alternate configuration, the second strand modulation is recruited by the template RNA, by using a gRNA (full or partial) as an end structure. This gRNA can either be a full gRNA with a scaffold and a 20 nt spacer, or a partial gRNA with a scaffold and a spacer of 17 or fewer nucleotides. A full gRNA will engage the polypeptide complex and can position the nick from the nCas9 in the polypeptide complex to the second strand. Placement of this nick could be used to initiate second strand synthesis after the RT reaction, and/or to signal to the cell endogenous mismatch repair system that the first (edited) strand should be maintained and copied. A spacer region (e.g., having a length of less than or equal to 17 nucleotides, e.g., about 5, 6, 7, 8, 9, 10, 11, 12, 13, 14, 15, 16, or 17 nucleotides) can lead to binding of the polypeptide complex, but will not result in a nick. This would unwind the DNA and may facilitate the repair of insertions (e.g., longer insertions). Thus, FIG. 4B shows an exemplary 3-component system comprising two RNAs and one polypeptide (which is present in two copies). As described herein, the system illustrated in FIG. 4B could be altered to become a 4-component system, e.g., by replacing the right hand copy of the gene modifying polypeptide with a different Cas protein.

[0623] FIG. 5 shows a graph of % GFP positive cells after treating the GFP reporter-expressing cell line with a gene modifying system comprising a ttRNA having the characteristics indicated on the X-axis or with a control gene modifying system. “Short spacer” indicates a 15 nt spacer and “long spacer” indicates a 20 nt spacer. “Homology2” refers to the post-edit homology region.

[0624] FIGS. 6A-6D show graphs of % GFP positive cells after treating the GFP reporter-expressing cell line with a gene modifying system comprising a ttRNA having the characteristics indicated on the X-axis and above the graph.

[0625] FIGS. 7A-7D are a series of graphs showing percentage perfect editing at the GFP locus, determined using next-generation sequence data from amplicon sequencing, after treating GFP reporter-expressing cells with a gene modifying system comprising a ttRNA having the indicated characteristics.

[0626] FIGS. 8A-8B are a series of graphs showing percentage GFP-positive cells after treating GFP reporter-expressing cells with a gene modifying system comprising a ttRNA with 4 MS2 sequences and a 5′ end block comprising a gRNA scaffold and either a short 15-nt spacer or a long 20-nt spacer.

[0627] FIGS. 9A-9B are a series of graphs showing percentage perfect editing at the GFP locus, determined using next-generation sequence data from amplicon sequencing, after treating GFP reporter-expressing cells with a gene modifying system comprising a gene modifying system comprising a ttRNA with 4 MS2 sequences and a 5′ end block comprising a gRNA scaffold and either a short 15-nt spacer or a long 20-nt spacer.

[0628] FIGS. 10A-10C are a series of diagrams illustrating a gene modifying system utilizing a trans template, and the target nucleic acid corresponding to such a system. Each is described in more detail below.

[0629] FIG. 10A depicts a target nucleic acid annotated with the positions of different parts of a template RNA (specifically, a trans template RNA) and gRNA of a gene modifying system. Arrows indicate the position of the primary gRNA nick (directed by the gRNA) and the second nick (which can be generated by the end block sequence of the trans template RNA, described further in FIG. 10B). The position on the target nucleic acid that corresponds to the pre-edit homology region of the trans template RNA is labeled “Homology Arm 1”. The position on the target nucleic acid that corresponds to the post-edit homology region is labeled “Post-edit homology arm”. The post-edit homology arm of the DNA is divided into two parts: one labeled “extension” and one labeled “primer”. The DNA region labeled “extension” (which in this example is 35 bp long) corresponds to the part of the trans template RNA called the extension homology region. However, the length of the extension homology region need not be identical to the length of the DNA region labeled “extension”. Rather, different lengths of extension homology region can be selected, for instance, between 0-35 nucleotides. In this example, an extension homology region of 0 nucleotides can be used to create a deletion of 35 nucleotides, because the trans template RNA is missing 35 nucleotides relative to the target nucleic acid. In contrast, in this example, an extension homology region of 35 nucleotides does not result in a deletion, because the trans template RNA comprises all 35 nucleotides corresponding to the DNA region labeled “extension”. Extension homology regions of intermediate length can be selected to make deletions of intermediate length. As mentioned above, the post-edit homology arm also contains a region labeled “primer”. This is the region immediately 5′ of the site of the second strand nick. Without wishing to be bound by theory, in some embodiments, the region of the DNA labeled “primer” acts as a primer as described below with respect to FIG. 10B.

[0630] FIG. 10B depicts a target nucleic acid and a gene modifying system comprising a template RNA (specifically, a trans template RNA), a gRNA, and two gene modifying polypeptides (or two copies of the same gene modifying polypeptide). The gRNA, here labeled “sgRNA4”, positions the first gene modifying polypeptide on the target nucleic acid, where it can produce a first strand nick. The gene modifying polypeptide comprises a Cas9 nickase domain, an RNA binding domain (RBD), which here comprises two copies of the MCP domain, and an RT domain. The regions and their functions of the trans template RNA in this figure (labeled “trans-template” in the figure) are now described from 3′ to 5′. Without being bound by theory, the trans template RNA associates with the gene modifying polypeptide by virtue of the trans template RNA's RRS (here, an MS2 sequence) binding to the RBD of the gene modifying polypeptide. In the trans template RNA shown in this figure, adjacent to the RRS is the primer binding site (PBS). The PBS can be seen binding to the nicked first strand of the target nucleic acid, where it may promote target-primed reverse transcription (TPRT). Next, the template RNA may optionally comprise a pre-edit homology region. Following the pre-edit homology region, the trans template RNA comprises a mutation region. Here, the mutation region comprises an insertion sequence (labeled “insertion seq” in the figure), designed to insert a sequence of interest into the target nucleic acid. Following the mutation region, the trans template RNA typically comprises a post-edit homology region. Following the post-edit homology region is an end block sequence at the 5′ end (labeled “5′ end block” in the figure). The 5′ end block in this figure is a gRNA that comprises a gRNA scaffold region shown as a hairpin and a gRNA spacer region shown pairing with the first strand of the target nucleic acid. Without wishing to be bound by theory, the 5′ end block may recruit a gene modifying polypeptide and unwind the target nucleic acid and produce a second strand nick. The gene modifying polypeptide that produces the second strand nick may have the same sequence or a different sequence from the gene modifying polypeptide that produces the first strand nick.

[0631] FIG. 10C depicts a target nucleic acid annotated with the positions of different parts of a template RNA (specifically, a trans template RNA) and gRNA of a gene modifying system as described above with respect to FIG. 10A. The position on the target nucleic acid between the primary gRNA nick and the second nick is labeled “variable spacing”, indicating that the gene editing system can be configured to place the second strand nick at a desired point in the target nucleic acid, to control the size of deletion being generated. In this example, within the region of the target nucleic acid labeled “variable spacing”, is a region labeled “variable #bp deleted”, between the position on the target nucleic acid that corresponds to the pre-edit homology region (labeled as “Homology Arm 1”) and the extension homology region of the post-edit homology region (labeled as “extension 0-35 bp”). This illustrates the position of the deletion generated by the gene modifying system. In this example, because the template RNA lacks a sequence according to the box labeled “variable #bp deleted”, the edited DNA comprises a deletion that corresponds to the sequence that the template RNA lacks. In this scenario, the deleted target sequence may be replaced with any insertion sequence encoded in the mutation region of the template. Lastly, as similarly noted above for FIG. 10A, the length of the extension homology region in FIG. 10C need not be identical to the length of the DNA region labeled “extension”. Rather, different lengths of extension homology region can be selected, for instance, between 0-35 nucleotides. In this example, an extension homology region of 0 nucleotides can be used to create a deletion of 35 nucleotides, because the trans template RNA is missing 35 nucleotides relative to the target nucleic acid. In contrast, in this example, an extension homology region of 35 nucleotides does not result in a deletion, because the trans template RNA comprises all 35 nucleotides corresponding to the DNA region labeled “extension”. Extension homology regions of intermediate length can be selected to make deletions of intermediate length.

[0632] FIGS. 11A-11C are a series of diagrams illustrating target nucleic acid corresponding to gene modifying systems utilizing trans templates having, in this example, different length of extension homology region. FIGS. 11A-11C depict a target nucleic acid annotated with the positions of different parts of a template RNA (specifically, a trans template RNA) and gRNA of a gene modifying system, with annotations as described above with respect to FIG. 10A. In particular, FIG. 11A depicts that a target nucleic acid region labeled “extension contiguous to homology arm 1” corresponds to a full length of extension homology region of the trans template RNA (in this example, 35 nucleotides). FIG. 11B depicts a target nucleic acid labeled “short extension” corresponds to a short extension homology region of the trans template RNA which is next to the 3′ end of the primer homology region of the trans template RNA. In this example, the length of extension homology region can have a length of 1, 2, 3, 4, 5, 6, 7, 8, 9, 10, 11, 12, 13, 14, 15, 16, 17, 18, 19, 20, 21, 22, 23, 24, 25, 26, 27, 28, 29, 30, 31, 32, 33, or 34 nucleotides. FIG. 11C depicts a target nucleic acid labeled “no extension” that has no corresponding extension homology region of the trans template RNA. In other words, the extension homology region of the trans template RNA has a length of 0 nucleotide.

[0633] FIGS. 12A-12C are a series of diagrams illustrating a gene modifying system utilizing a trans template, and the target nucleic acid corresponding to such a system. Each is described in more detail below.

[0634] FIG. 12A depicts a target nucleic acid and a gene modifying system comprising a template RNA (specifically, a trans template RNA), two gRNAs, and three gene modifying polypeptides (or three copies of the same gene modifying polypeptide). The first gRNA, here labeled “sgRNA4”, positions the first gene modifying polypeptide on the target nucleic acid, where it can produce a first strand nick. The gene modifying polypeptide comprises a Cas9 nickase domain, an RNA binding domain (RBD), which here comprises two copies of the MCP domain, and an RT domain. The regions and their functions of the trans template RNA in this figure (labeled “trans-template” in the figure) are described above with respect to FIG. 10B. In particular, the trans template RNA comprises an end block sequence at the 5′ end (labeled “template anchor” in the figure). The 5′ end block in this figure comprises a gRNA scaffold region shown as a hairpin and a gRNA spacer region shown pairing with the first strand of the target nucleic acid. Without wishing to be bound by theory, a 5′ end block acting as a template anchor may recruit a second gene modifying polypeptide (labeled “Second complex (anchoring)”) and unwind the target nucleic acid, but does not produce a nick because the spacer is too short. The second gRNA, labeled “2^{nd} nick gRNA”, comprises a gRNA scaffold region shown as a hairpin and a gRNA spacer region shown pairing with the first strand of the target nucleic acid. Without wishing to be bound by theory, the second gRNA may recruit a third gene modifying polypeptide (labeled “Third complex (nicking)”) and bind the target nucleic acid at the position that corresponds to the post-edit homology region of the trans template RNA and produce a second strand nick. The second and the third gene modifying polypeptide may have the same amino acid sequence or a different amino acid sequence from the gene modifying polypeptide that produces the first strand nick. The gene modifying polypeptide that produces the second strand nick may have the same amino acid sequence or a different amino acid sequence from the gene modifying polypeptide that produces the first strand nick. In contrast to the system illustrated in FIG. 10B, the system described in FIG. 12A allows the site of the second nick to be at a different position from the site of the template anchor.

[0635] FIGS. 12B and 12C further illustrate the position of the template anchor and the second strand nick on the target nucleic acid. FIGS. 12B and 12C depict target nucleic acid annotated with the positions of different parts of a template RNA (specifically, a trans template RNA) and gRNA of gene modifying systems, with annotations as described above with respect to FIG. 10A. In particular, in some embodiments, the template anchoring induced by the 5′ end block of the trans template RNA and the second gene modifying polypeptide can be located between the position of the target nucleic acid that corresponds to the pre-edit homology region (labeled “Homology Arm 1”) and the post-edit homology region (labeled “Post-edit homology region”), as shown in FIG. 12B. In some embodiments, the template anchoring induced by the 5′ end block of the trans template RNA and the second gene modifying polypeptide can be located outside of the region between the position of the target nucleic acid that corresponds to the pre-edit homology region (labeled “Homology Arm 1”) and the post-edit homology region (labeled “Post-edit homology region”), as shown in FIG. 12C. In other words, FIG. 12C illustrates embodiments wherein the position of the target nucleic acid that corresponds to the post-edit homology region is situated between the template anchor and the position of the target nucleic acid that corresponds to the pre-edit homology region (labeled “Homology Arm 1”). A system as described in FIG. 12B or 12C can be used, in some instances, to direct a replacement or deletion to the target nucleic acid.

[0636] FIG. 13 is a graph showing percentage GFP-positive cells after treating cells comprising variant lengths of disruption sequence in a GFP reporter cassette with a gene modifying system comprising a gene modifying polypeptide, a gRNA and a ttRNA having 5′ end block comprising a gRNA.

[0637] FIG. 14 is a series of graphs showing percentage of GFP-positive cells after treating a 150-bp insertion GFP reporter-expressing cell line with a gene modifying system comprising a ttRNA having 4 MS2 repeats or 1 MS2 repeat. The gene modifying polypeptides in the system included an RT-Cas9-MCP configuration and an MCP-RT-Cas9 configuration. Also tested was a variant that included an N55K mutation in the MCP region.

[0638] FIGS. 15A and 15B are a series of graphs showing editing of GFP reporter cells treated with a gene modifying system comprising a gRNA, and a gene modifying polypeptide and ttRNA encoding cognate RBP/RRS pairs (e.g. MCP variants with MS2 variants; PCP variants with PP7 variants; Com variants with com variants). The gene modifying polypeptides included the following configurations: Cas9-RBP-RT, RT-RBP-Cas9, and Cas9-RT-RBP. (A) Percentage GFP-positive cells after treatment with the indicated gene modifying systems. (B) Percentage of cells that showed perfect editing at the GFP locus after treatment with the indicated gene modifying systems.

[0639] FIG. 16 is a graph showing percentage GFP-positive cells after treating a 150 bp insertion GFP reporter-expressing cell line with a gene modifying system comprising a gRNA, ttRNA and a gene modifying polypeptide comprising an exemplary Marathon RT domain. The gene modifying polypeptides included various configurations (i.e., Config 1, Config 2, and Config 3 as described in Example 3), or with H2O only or no-gRNA negative control gene modifying systems.

[0640] FIG. 17 is a graph showing percentage perfect editing at the GFP locus after treating a 150 bp insertion GFP reporter-expressing cell line with a gene modifying system comprising a gRNA, a gene modifying polypeptide, and a ttRNA having the indicated primer length and the indicated length of an extension to the homology region.

### DETAILED DESCRIPTION

### Definitions

[0641] The term “expression cassette,” as used herein, refers to a nucleic acid construct comprising nucleic acid elements sufficient for the expression of the nucleic acid molecule of the instant invention.

[0642] The term “extension homology region” of a template RNA, as used herein, refers to a 3′ portion of the post-edit homology region that has sequence identity to the sequence immediately adjacent to the second strand nick on the side closer to the first strand nick.

[0643] A “gRNA spacer”, as used herein, refers to a portion of a nucleic acid that has complementarity to a target nucleic acid and can, together with a gRNA scaffold, target a Cas protein to the target nucleic acid.

[0644] A “gRNA scaffold”, as used herein, refers to a portion of a nucleic acid that can bind a Cas protein and can, together with a gRNA spacer, target the Cas protein to the target nucleic acid. In some embodiments, the gRNA scaffold comprises a crRNA sequence, tetraloop, and tracrRNA sequence.

[0645] A “gene modifying polypeptide”, as used herein, refers to a polypeptide comprising a retroviral reverse transcriptase, or a polypeptide comprising an amino acid sequence having at least 75%, 80%, 85%, 90%, 95%, 96%, 97%, 98%, or 99% amino acid sequence identity to a retroviral reverse transcriptase, which is capable of integrating a nucleic acid sequence (e.g., a sequence provided on a template nucleic acid) into a target DNA molecule (e.g., in a mammalian host cell, such as a genomic DNA molecule in the host cell). In some embodiments, the gene modifying polypeptide is capable of integrating the sequence substantially without relying on host machinery. In some embodiments, the gene modifying polypeptide integrates a sequence into a random position in a genome, and in some embodiments, the gene modifying polypeptide integrates a sequence into a specific target site. In some embodiments, a gene modifying polypeptide includes one or more domains that, collectively, facilitate 1) binding the template nucleic acid, 2) binding the target DNA molecule, and 3) facilitate integration of the at least a portion of the template nucleic acid into the target DNA. Gene modifying polypeptides include both naturally occurring polypeptides as well as engineered variants of the foregoing, e.g., having one or more amino acid substitutions to the naturally occurring sequence. Gene modifying polypeptides also include heterologous constructs, e.g., where one or more of the domains recited above are heterologous to each other, whether through a heterologous fusion (or other conjugate) of otherwise wild-type domains, as well as fusions of modified domains, e.g., by way of replacement or fusion of a heterologous sub-domain or other substituted domain. Exemplary gene modifying polypeptides, and systems comprising them and methods of using them, that can be used in the methods provided herein are described, e.g., in PCT/US2021/020948, which is incorporated herein by reference with respect to gene modifying polypeptides that comprise a retroviral reverse transcriptase domain. In some embodiments, a gene modifying polypeptide integrates a sequence into a gene. In some embodiments, a gene modifying polypeptide integrates a sequence into a sequence outside of a gene. A “gene modifying system,” as used herein, refers to a system comprising a gene modifying polypeptide and a template nucleic acid.

[0646] The term “domain” as used herein refers to a structure of a biomolecule that contributes to a specified function of the biomolecule. A domain may comprise a contiguous region (e.g., a contiguous sequence) or distinct, non-contiguous regions (e.g., non-contiguous sequences) of a biomolecule. Examples of protein domains include, but are not limited to, an endonuclease domain, a DNA binding domain, a reverse transcription domain; an example of a domain of a nucleic acid is a regulatory domain, such as a transcription factor binding domain. In some embodiments, a domain (e.g., a Cas domain) can comprise two or more smaller domains (e.g., a DNA binding domain and an endonuclease domain).

[0647] The term “end block sequence,” as used herein, refers to an RNA sequence having a secondary structure that impairs reverse transcription and/or impairs exonuclease activity. In some instances, an end block sequence comprises a stem-loop sequence.

[0648] As used herein, the term “exogenous”, when used with reference to a biomolecule (such as a nucleic acid sequence or polypeptide) means that the biomolecule was introduced into a host genome, cell or organism by the hand of man. For example, a nucleic acid that is as added into an existing genome, cell, tissue or subject using recombinant DNA techniques or other methods is exogenous to the existing nucleic acid sequence, cell, tissue or subject.

[0649] As used herein, “first strand” and “second strand”, as used to describe the individual DNA strands of target DNA, distinguish the two DNA strands based upon which strand the reverse transcriptase domain initiates polymerization, e.g., based upon where target primed synthesis initiates. The first strand refers to the strand of the target DNA upon which the reverse transcriptase domain initiates polymerization, e.g., where target primed synthesis initiates. The second strand refers to the other strand of the target DNA. First and second strand designations do not describe the target site DNA strands in other respects; for example, in some embodiments the first and second strands are nicked by a polypeptide described herein, but the designations ‘first’ and ‘second’ strand have no bearing on the order in which such nicks occur.

[0650] A “genomic safe harbor site” (GSH site) is a site in a host genome that is able to accommodate the integration of new genetic material, e.g., such that the inserted genetic element does not cause significant alterations of the host genome posing a risk to the host cell or organism. A GSH site generally meets 1, 2, 3, 4, 5, 6, 7, 8 or 9 of the following criteria: (i) is located >300 kb from a cancer-related gene; (ii) is >300 kb from a miRNA/other functional small RNA; (iii) is >50 kb from a 5′ gene end; (iv) is >50 kb from a replication origin; (v) is >50 kb away from any ultraconservered element; (vi) has low transcriptional activity (i.e. no mRNA+/−25 kb); (vii) is not in a copy number variable region; (viii) is in open chromatin; and/or (ix) is unique, with 1 copy in the human genome. Examples of GSH sites in the human genome that meet some or all of these criteria include (i) the adeno-associated virus site 1 (AAVS1), a naturally occurring site of integration of AAV virus on chromosome 19; (ii) the chemokine (C-C motif) receptor 5 (CCR5) gene, a chemokine receptor gene known as an HIV-1 coreceptor; (iii) the human ortholog of the mouse Rosa26 locus; (iv) the ribosomal DNA (“rDNA”) locus. Additional GSH sites are known and described, e.g., in Pellenz et al. epub Aug. 20, 2018 (doi.org/10.1101/396390).

[0651] The term “heterologous,” as used herein to describe a first element in reference to a second element means that the first element and second element do not exist in nature disposed as described. For example, a heterologous polypeptide, nucleic acid molecule, construct or sequence refers to (a) a polypeptide, nucleic acid molecule or portion of a polypeptide or nucleic acid molecule sequence that is not native to a cell in which it is expressed, (b) a polypeptide or nucleic acid molecule or portion of a polypeptide or nucleic acid molecule that has been altered or mutated relative to its native state, or (c) a polypeptide or nucleic acid molecule with an altered expression as compared to the native expression levels under similar conditions. For example, a heterologous regulatory sequence (e.g., promoter, enhancer) may be used to regulate expression of a gene or a nucleic acid molecule in a way that is different than the gene or a nucleic acid molecule is normally expressed in nature. In another example, a heterologous domain of a polypeptide or nucleic acid sequence (e.g., a DNA binding domain of a polypeptide or nucleic acid encoding a DNA binding domain of a polypeptide) may be disposed relative to other domains or may be a different sequence or from a different source, relative to other domains or portions of a polypeptide or its encoding nucleic acid. In certain embodiments, a heterologous nucleic acid molecule may exist in a native host cell genome, but may have an altered expression level or have a different sequence or both. In other embodiments, heterologous nucleic acid molecules may not be endogenous to a host cell or host genome but instead may have been introduced into a host cell by transformation (e.g., transfection, electroporation), wherein the added molecule may integrate into the host genome or can exist as extra-chromosomal genetic material either transiently (e.g., mRNA) or semi-stably for more than one generation (e.g., episomal viral vector, plasmid or other self-replicating vector).

[0652] As used herein, “insertion” of a sequence into a target site refers to the net addition of DNA sequence at the target site, e.g., where there are new nucleotides in the heterologous object sequence with no cognate positions in the unedited target site. In some embodiments, a nucleotide alignment of the PBS sequence and heterologous object sequence to the target nucleic acid sequence would result in an alignment gap in the target nucleic acid sequence.

[0653] As used herein, a “deletion” generated by a heterologous object sequence in a target site refers to the net deletion of DNA sequence at the target site, e.g., where there are nucleotides in the unedited target site with no cognate positions in the heterologous object sequence. In some embodiments, a nucleotide alignment of the PBS sequence and heterologous object sequence to the target nucleic acid sequence would result in an alignment gap in the molecule comprising the PBS sequence and heterologous object sequence.

[0654] The term “inverted terminal repeats” or “ITRs” as used herein refers to AAV viral cis-elements named so because of their symmetry. These elements promote efficient multiplication of an AAV genome. It is hypothesized that the minimal elements for ITR function are a Rep-binding site (RBS; 5′-GCGCGCTCGCTCGCTC-3′ (SEQ ID NO: 18102) for AAV2) and a terminal resolution site (TRS; 5′-AGTTGG-3′ for AAV2) plus a variable palindromic sequence allowing for hairpin formation. According to the present invention, an ITR comprises at least these three elements (RBS, TRS, and sequences allowing the formation of an hairpin). In addition, in the present invention, the term “ITR” refers to ITRs of known natural AAV serotypes (e.g. ITR of a serotype 1, 2, 3, 4, 5, 6, 7, 8, 9, 10 or 11 AAV), to chimeric ITRs formed by the fusion of ITR elements derived from different serotypes, and to functional variants thereof “Functional variant” refers to a sequence presenting a sequence identity of at least 80%, 85%, 90%, preferably of at least 95% with a known ITR and allowing multiplication of the sequence that includes said ITR in the presence of Rep proteins.

[0655] The term “mutation region,” as used herein, refers to a region in a template RNA having one or more sequence difference relative to the corresponding sequence in a target nucleic acid. The sequence difference may comprise, for example, a substitution, insertion, frameshift, or deletion.

[0656] The term “mutated” when applied to nucleic acid sequences means that nucleotides in a nucleic acid sequence are inserted, deleted, or changed compared to a reference (e.g., native) nucleic acid sequence. A single alteration may be made at a locus (a point mutation), or multiple nucleotides may be inserted, deleted, or changed at a single locus. In addition, one or more alterations may be made at any number of loci within a nucleic acid sequence. A nucleic acid sequence may be mutated by any method known in the art.

[0657] “Nucleic acid molecule” refers to both RNA and DNA molecules including, without limitation, complementary DNA (“cDNA”), genomic DNA (“gDNA”), and messenger RNA (“mRNA”), and also includes synthetic nucleic acid molecules, such as those that are chemically synthesized or recombinantly produced, such as RNA templates, as described herein. The nucleic acid molecule can be double-stranded or single-stranded, circular, or linear. If single-stranded, the nucleic acid molecule can be the sense strand or the antisense strand. Unless otherwise indicated, and as an example for all sequences described herein under the general format “SEQ ID NO:,” “nucleic acid comprising SEQ ID NO: 1” refers to a nucleic acid, at least a portion which has either (i) the sequence of SEQ ID NO: 1, or (ii) a sequence complimentary to SEQ ID NO: 1. The choice between the two is dictated by the context in which SEQ ID NO:1 is used. For instance, if the nucleic acid is used as a probe, the choice between the two is dictated by the requirement that the probe be complementary to the desired target. Nucleic acid sequences of the present disclosure may be modified chemically or biochemically or may contain non-natural or derivatized nucleotide bases, as will be readily appreciated by those of skill in the art. Such modifications include, for example, labels, methylation, substitution of one or more naturally occurring nucleotides with an analog, inter-nucleotide modifications such as uncharged linkages (for example, methyl phosphonates, phosphotriesters, phosphoramidates, carbamates, etc.), charged linkages (for example, phosphorothioates, phosphorodithioates, etc.), pendant moieties, (for example, polypeptides), intercalators (for example, acridine, psoralen, etc.), chelators, alkylators, and modified linkages (for example, alpha anomeric nucleic acids, etc.). Also included are chemically modified bases (see, for example, Table 13), backbones (see, for example, Table 14), and modified caps (see, for example, Table 15). Also included are synthetic molecules that mimic polynucleotides in their ability to bind to a designated sequence via hydrogen bonding and other chemical interactions. Such molecules are known in the art and include, for example, those in which peptide linkages substitute for phosphate linkages in the backbone of a molecule, e.g., peptide nucleic acids (PNAs). Other modifications can include, for example, analogs in which the ribose ring contains a bridging moiety or other structure such as modifications found in “locked” nucleic acids (LNAs). In various embodiments, the nucleic acids are in operative association with additional genetic elements, such as tissue-specific expression-control sequence(s) (e.g., tissue-specific promoters and tissue-specific microRNA recognition sequences), as well as additional elements, such as inverted repeats (e.g., inverted terminal repeats, such as elements from or derived from viruses, e.g., AAV ITRs) and tandem repeats, inverted repeats/direct repeats, homology regions (segments with various degrees of homology to a target DNA), untranslated regions (UTRs) (5′, 3′, or both 5′ and 3′ UTRs), and various combinations of the foregoing. The nucleic acid elements of the systems provided by the invention can be provided in a variety of topologies, including single-stranded, double-stranded, circular, linear, linear with open ends, linear with closed ends, and particular versions of these, such as doggybone DNA (dbDNA), closed-ended DNA (ceDNA).

[0658] As used herein, a “gene expression unit” is a nucleic acid sequence comprising at least one regulatory nucleic acid sequence operably linked to at least one effector sequence. A first nucleic acid sequence is operably linked with a second nucleic acid sequence when the first nucleic acid sequence is placed in a functional relationship with the second nucleic acid sequence. For instance, a promoter or enhancer is operably linked to a coding sequence if the promoter or enhancer affects the transcription or expression of the coding sequence. Operably linked DNA sequences may be contiguous or non-contiguous. Where necessary to join two protein-coding regions, operably linked sequences may be in the same reading frame.

[0659] The terms “host genome” or “host cell”, as used herein, refer to a cell and/or its genome into which protein and/or genetic material has been introduced. It should be understood that such terms are intended to refer not only to the particular subject cell and/or genome, but to the progeny of such a cell and/or the genome of the progeny of such a cell. Because certain modifications may occur in succeeding generations due to either mutation or environmental influences, such progeny may not, in fact, be identical to the parent cell, but are still included within the scope of the term “host cell” as used herein. A host genome or host cell may be an isolated cell or cell line grown in culture, or genomic material isolated from such a cell or cell line, or may be a host cell or host genome which composing living tissue or an organism. In some instances, a host cell may be an animal cell or a plant cell, e.g., as described herein. In certain instances, a host cell may be a mammalian cell, a human cell, avian cell, reptilian cell, bovine cell, horse cell, pig cell, goat cell, sheep cell, chicken cell, or turkey cell. In certain instances, a host cell may be a corn cell, soy cell, wheat cell, or rice cell.

[0660] As used herein, “operative association” describes a functional relationship between two nucleic acid sequences, such as a 1) promoter and 2) a heterologous object sequence, and means, in such example, the promoter and heterologous object sequence (e.g., a gene of interest) are oriented such that, under suitable conditions, the promoter drives expression of the heterologous object sequence. For instance, a template nucleic acid carrying a promoter and a heterologous object sequence may be single-stranded, e.g., either the (+) or (−) orientation. An “operative association” between the promoter and the heterologous object sequence in this template means that, regardless of whether the template nucleic acid will be transcribed in a particular state, when it is in the suitable state (e.g., is in the (+) orientation, in the presence of required catalytic factors, and NTPs, etc.), it is accurately transcribed. Operative association applies analogously to other pairs of nucleic acids, including other tissue-specific expression control sequences (such as enhancers, repressors and microRNA recognition sequences), IR/DR, ITRs, UTRs, or homology regions and heterologous object sequences or sequences encoding a retroviral RT domain.

[0661] The term “primer binding site sequence” or “PBS sequence,” as used herein, refers to a portion of a template RNA capable of binding to a region comprised in a target nucleic acid sequence. In some instances, a PBS sequence is a nucleic acid sequence comprising at least 3, 4, 5, 6, 7, or 8 bases with 100% identity to the region comprised in the target nucleic acid sequence. In some embodiments the primer region comprises at least 5, 6, 7, 8 bases with 100% identity to the region comprised in the target nucleic acid sequence. Without wishing to be bound by theory, in some embodiments when a template RNA comprises a PBS sequence and a heterologous object sequence, the PBS sequence binds to a region comprised in a target nucleic acid sequence, allowing a reverse transcriptase domain to use that region as a primer for reverse transcription, and to use the heterologous object sequence as a template for reverse transcription.

[0662] The term “primer homology region” of a template RNA, as used herein, refers to to a 5′ portion of the post-edit homology region that has sequence identity to the sequence immediately adjacent to the second strand nick on the side further from the first strand nick. In some embodiments, the primer homology region directs reverse transcription of a nascent DNA strand that can hybridize to the “primer” region of the second strand of the target DNA, i.e., second strand of the target DNA immediately 5′ to the second strand nick.

[0663] As used herein, a “stem-loop sequence” refers to a nucleic acid sequence (e.g., RNA sequence) with sufficient self-complementarity to form a stem-loop, e.g., having a stem comprising at least two (e.g., 3, 4, 5, 6, 7, 8, 9, or 10) base pairs, and a loop with at least three (e.g., four) base pairs. The stem may comprise mismatches or bulges.

[0664] As used herein, a “tissue-specific expression-control sequence” means nucleic acid elements that increase or decrease the level of a transcript comprising the heterologous object sequence in a target tissue in a tissue-specific manner, e.g., preferentially in on-target tissue(s), relative to off-target tissue(s). In some embodiments, a tissue-specific expression-control sequence preferentially drives or represses transcription, activity, or the half-life of a transcript comprising the heterologous object sequence in the target tissue in a tissue-specific manner, e.g., preferentially in an on-target tissue(s), relative to an off-target tissue(s). Exemplary tissue-specific expression-control sequences include tissue-specific promoters, repressors, enhancers, or combinations thereof, as well as tissue-specific microRNA recognition sequences. Tissue specificity refers to on-target (tissue(s) where expression or activity of the template nucleic acid is desired or tolerable) and off-target (tissue(s) where expression or activity of the template nucleic acid is not desired or is not tolerable). For example, a tissue-specific promoter drives expression preferentially in on-target tissues, relative to off-target tissues. In contrast, a microRNA that binds the tissue-specific microRNA recognition sequences is preferentially expressed in off-target tissues, relative to on-target tissues, thereby reducing expression of a template nucleic acid in off-target tissues. Accordingly, a promoter and a microRNA recognition sequence that are specific for the same tissue, such as the target tissue, have contrasting functions (promote and repress, respectively, with concordant expression levels, i.e., high levels of the microRNA in off-target tissues and low levels in on-target tissues, while promoters drive high expression in on-target tissues and low expression in off-target tissues) with regard to the transcription, activity, or half-life of an associated sequence in that tissue.

### INTRODUCTION

[0665] This disclosure relates to methods compositions for targeting, editing, modifying or manipulating a DNA sequence (e.g., inserting a heterologous object sequence into a target site of a mammalian genome) at one or more locations in a DNA sequence in a cell, tissue or subject, e.g., in vivo or in vitro. The heterologous object DNA sequence may include, e.g., a substitution, a deletion, an insertion, e.g., a coding sequence, a regulatory sequence, or a gene expression unit.

[0666] This disclosure relates, in part, to anchoring of a trans template RNA to a gene modifying polypeptide:sgRNA:target genomic DNA complex by two or more interactions. Without wishing to be bound by theory, it is contemplated that such anchoring can achieve high rewriting activity, e.g., for achieving single or several nucleotide long edits. For example, 1) an RRS:RBD interaction and 2) a 5′ end block Cas9 scaffold and spacer to target DNA interaction (mediated via an additional gene modifying polypeptide) represent exemplary interactions that together anchor a trans template RNA to a gene modifying polypeptide:sgRNA:target genomic DNA complex to enable rewriting. It is contemplated that the RRS:RBD interaction is critical in the absence of the 5′ end block spacer. It is further contemplated that the presence of both can provide high rewriting activity and the presence of the 5′ end block spacer in combination with a weaker RRS:RBD interaction rescues rewriting activity.

[0667] The disclosure relates, in part, to trans template RNAs designed to facilitate long edits (e.g., long insertions, e.g., insertions of greater than or equal to 100, 110, 120, 130, 140, 150, 160, 170, 180, 190, 200, 225, 250, 275, or 300 nucleotides) in the genome of a host cell, tissue, or subject, in vivo or in vitro.

[0668] The disclosure relates, in part, to trans template RNA elements comprising a 5′ end block gRNA spacer, where the gRNA spacer has a length sufficient to support nicking of a target sequence in genomic DNA. Without wishing to be bound by theory, it has been found that a 5′ end block gRNA spacer that supports nicking enables a trans template RNA-containing gene modifying system to achieve long edits (e.g., long insertions). The disclosure further relates, in part, to trans template RNA elements comprising long post-edit homology regions (e.g., comprising at least 30, 35, 40, 45, 50, 55, or 60 nucleotides). Without wishing to be bound by theory, it has been found that a long post-edit homology region enables a trans template RNA-containing gene modifying system to achieve long edits (e.g., long insertions).

[0669] The disclosure also provides methods for treating disease using reverse transcriptase-based systems for altering a genomic DNA sequence of interest, e.g., by inserting, deleting, or substituting one or more nucleotides into/from the sequence of interest.

[0670] The disclosure provides, in part, methods for treating disease using a gene modifying system comprising a gene modifying polypeptide component and a template nucleic acid (e.g., template RNA) component. In some embodiments, a gene modifying system can be used to introduce an alteration into a target site in a genome. In some embodiments, the gene modifying polypeptide component comprises a writing domain (e.g., a reverse transcriptase domain), a DNA-binding domain, and an endonuclease domain (e.g., nickase domain). In some embodiments, the template nucleic acid (e.g., template RNA) comprises a sequence (e.g., a gRNA spacer) that binds a target site in the genome (e.g., that binds to a second strand of the target site), a sequence (e.g., a gRNA scaffold) that binds the gene modifying polypeptide component, a heterologous object sequence, and a PBS sequence. Without wishing to be bound by theory, it is thought that the template nucleic acid (e.g., template RNA) binds to the second strand of a target site in the genome, and binds to the gene modifying polypeptide component (e.g., localizing the polypeptide component to the target site in the genome). It is thought that the endonuclease (e.g., nickase) of the gene modifying polypeptide component cuts the target site (e.g., the first strand of the target site), e.g., allowing the PBS sequence to bind to a sequence adjacent to the site to be altered on the first strand of the target site. It is thought that the writing domain (e.g., reverse transcriptase domain) of the polypeptide component uses the first strand of the target site that is bound to the complementary sequence comprising the PBS sequence of the template nucleic acid as a primer and the heterologous object sequence of the template nucleic acid as a template to, e.g., polymerize a sequence complementary to the heterologous object sequence. Without wishing to be bound by theory, it is thought that selection of an appropriate heterologous object sequence can result in substitution, deletion, and/or insertion of one or more nucleotides at the target site.

### Gene Modifying Systems

[0671] In some embodiments, a gene modifying system described herein comprises: (A) a gene modifying polypeptide or a nucleic acid encoding the gene modifying polypeptide, wherein the gene modifying polypeptide comprises (i) a reverse transcriptase domain, and either (x) an endonuclease domain that contains DNA binding functionality or (y) an endonuclease domain and separate DNA binding domain; and (B) a template RNA. A gene modifying polypeptide, in some embodiments, acts as a substantially autonomous protein machine capable of integrating a template nucleic acid sequence into a target DNA molecule (e.g., in a mammalian host cell, such as a genomic DNA molecule in the host cell), substantially without relying on host machinery. For example, the gene modifying protein may comprise a DNA-binding domain, a reverse transcriptase domain, and an endonuclease domain. In some embodiments, the DNA-binding function may involve an RNA component that directs the protein to a DNA sequence, e.g., a gRNA spacer. In other embodiments, the gene modifying polypeptide may comprise a reverse transcriptase domain and an endonuclease domain. The RNA template element of a gene modifying system is typically heterologous to the gene modifying polypeptide element and provides an object sequence to be inserted (reverse transcribed) into the host genome. In some embodiments, the gene modifying polypeptide is capable of target primed reverse transcription. In some embodiments, the gene modifying polypeptide is capable of second-strand synthesis.

[0672] In some embodiments, a gene modifying system described herein comprises a gene modifying polypeptide comprising the amino acid sequence, or a functional portion thereof, of an exemplary gene modifying polypeptide as listed in any of Tables S1-S3, or an amino acid sequence having at least 70%, 75%, 80%, 85%, 90%, 95%, 96%, 97%, 98%, or 99% identity thereto, or a nucleic acid molecule encoding the gene modifying polypeptide. In some embodiments, a gene modifying system described herein comprises a gene modifying polypeptide comprising the amino acid sequence of an RT domain of an exemplary gene modifying polypeptide as listed in any of Tables S1-S3, or an amino acid sequence having at least 70%, 75%, 80%, 85%, 90%, 95%, 96%, 97%, 98%, or 99% identity thereto, or a nucleic acid molecule encoding the gene modifying polypeptide. In some embodiments, a gene modifying system described herein comprises a gene modifying polypeptide comprising the amino acid sequence of a DBD of an exemplary gene modifying polypeptide as listed in any of Tables S1-S3, or an amino acid sequence having at least 70%, 75%, 80%, 85%, 90%, 95%, 96%, 97%, 98%, or 99% identity thereto, or a nucleic acid molecule encoding the gene modifying polypeptide. In some embodiments, a gene modifying system described herein comprises a gene modifying polypeptide comprising the amino acid sequence of an RBD of an exemplary gene modifying polypeptide as listed in any of Tables S1-S3, or an amino acid sequence having at least 70%, 75%, 80%, 85%, 90%, 95%, 96%, 97%, 98%, or 99% identity thereto, or a nucleic acid molecule encoding the gene modifying polypeptide. In some embodiments, a gene modifying system described herein comprises a gene modifying polypeptide comprising the amino acid sequence of the RT domain, DBD, and RBD of an exemplary gene modifying polypeptide as listed in any of Tables S1-S3, or amino acid sequences having at least 70%, 75%, 80%, 85%, 90%, 95%, 96%, 97%, 98%, or 99% identity thereto, or a nucleic acid molecule encoding the gene modifying polypeptide.

[0673] In some embodiments, a gene modifying system described herein comprises a gene modifying polypeptide comprising the amino acid sequence, or a functional portion thereof, of an exemplary gene modifying polypeptide as listed in Table S1, or an amino acid sequence having at least 70%, 75%, 80%, 85%, 90%, 95%, 96%, 97%, 98%, or 99% identity thereto, or a nucleic acid molecule encoding the gene modifying polypeptide. In some embodiments, a gene modifying system described herein comprises a gene modifying polypeptide comprising the amino acid sequence of an RT domain of an exemplary gene modifying polypeptide as listed in Table S1, or an amino acid sequence having at least 70%, 75%, 80%, 85%, 90%, 95%, 96%, 97%, 98%, or 99% identity thereto, or a nucleic acid molecule encoding the gene modifying polypeptide. In some embodiments, a gene modifying system described herein comprises a gene modifying polypeptide comprising the amino acid sequence of a DBD of an exemplary gene modifying polypeptide as listed in Table S1, or an amino acid sequence having at least 70%, 75%, 80%, 85%, 90%, 95%, 96%, 97%, 98%, or 99% identity thereto, or a nucleic acid molecule encoding the gene modifying polypeptide. In some embodiments, a gene modifying system described herein comprises a gene modifying polypeptide comprising the amino acid sequence of an RBD of an exemplary gene modifying polypeptide as listed in Table S1, or an amino acid sequence having at least 70%, 75%, 80%, 85%, 90%, 95%, 96%, 97%, 98%, or 99% identity thereto, or a nucleic acid molecule encoding the gene modifying polypeptide. In some embodiments, a gene modifying system described herein comprises a gene modifying polypeptide comprising the amino acid sequence of the RT domain, DBD, and RBD of an exemplary gene modifying polypeptide as listed in Table S1, or amino acid sequences having at least 70%, 75%, 80%, 85%, 90%, 95%, 96%, 97%, 98%, or 99% identity thereto, or a nucleic acid molecule encoding the gene modifying polypeptide.

[0674] In some embodiments, a gene modifying system described herein comprises a gene modifying polypeptide comprising the amino acid sequence, or a functional portion thereof, of an exemplary gene modifying polypeptide as listed in Table S2, or an amino acid sequence having at least 70%, 75%, 80%, 85%, 90%, 95%, 96%, 97%, 98%, or 99% identity thereto, or a nucleic acid molecule encoding the gene modifying polypeptide. In some embodiments, a gene modifying system described herein comprises a gene modifying polypeptide comprising the amino acid sequence of an RT domain of an exemplary gene modifying polypeptide as listed in Table S2, or an amino acid sequence having at least 70%, 75%, 80%, 85%, 90%, 95%, 96%, 97%, 98%, or 99% identity thereto, or a nucleic acid molecule encoding the gene modifying polypeptide. In some embodiments, a gene modifying system described herein comprises a gene modifying polypeptide comprising the amino acid sequence of a DBD of an exemplary gene modifying polypeptide as listed in Table S2, or an amino acid sequence having at least 70%, 75%, 80%, 85%, 90%, 95%, 96%, 97%, 98%, or 99% identity thereto, or a nucleic acid molecule encoding the gene modifying polypeptide. In some embodiments, a gene modifying system described herein comprises a gene modifying polypeptide comprising the amino acid sequence of an RBD of an exemplary gene modifying polypeptide as listed in Table S2, or an amino acid sequence having at least 70%, 75%, 80%, 85%, 90%, 95%, 96%, 97%, 98%, or 99% identity thereto, or a nucleic acid molecule encoding the gene modifying polypeptide. In some embodiments, a gene modifying system described herein comprises a gene modifying polypeptide comprising the amino acid sequence of the RT domain, DBD, and RBD of an exemplary gene modifying polypeptide as listed in Table S2, or amino acid sequences having at least 70%, 75%, 80%, 85%, 90%, 95%, 96%, 97%, 98%, or 99% identity thereto, or a nucleic acid molecule encoding the gene modifying polypeptide.

[0675] In some embodiments, a gene modifying system described herein comprises a gene modifying polypeptide comprising the amino acid sequence, or a functional portion thereof, of an exemplary gene modifying polypeptide as listed in Table S3, or an amino acid sequence having at least 70%, 75%, 80%, 85%, 90%, 95%, 96%, 97%, 98%, or 99% identity thereto, or a nucleic acid molecule encoding the gene modifying polypeptide. In some embodiments, a gene modifying system described herein comprises a gene modifying polypeptide comprising the amino acid sequence of an RT domain of an exemplary gene modifying polypeptide as listed in Table S3, or an amino acid sequence having at least 70%, 75%, 80%, 85%, 90%, 95%, 96%, 97%, 98%, or 99% identity thereto, or a nucleic acid molecule encoding the gene modifying polypeptide. In some embodiments, a gene modifying system described herein comprises a gene modifying polypeptide comprising the amino acid sequence of a DBD of an exemplary gene modifying polypeptide as listed in Table S3, or an amino acid sequence having at least 70%, 75%, 80%, 85%, 90%, 95%, 96%, 97%, 98%, or 99% identity thereto, or a nucleic acid molecule encoding the gene modifying polypeptide. In some embodiments, a gene modifying system described herein comprises a gene modifying polypeptide comprising the amino acid sequence of an RBD of an exemplary gene modifying polypeptide as listed in Table S3, or an amino acid sequence having at least 70%, 75%, 80%, 85%, 90%, 95%, 96%, 97%, 98%, or 99% identity thereto, or a nucleic acid molecule encoding the gene modifying polypeptide. In some embodiments, a gene modifying system described herein comprises a gene modifying polypeptide comprising the amino acid sequence of the RT domain, DBD, and RBD of an exemplary gene modifying polypeptide as listed in Table S3, or amino acid sequences having at least 70%, 75%, 80%, 85%, 90%, 95%, 96%, 97%, 98%, or 99% identity thereto, or a nucleic acid molecule encoding the gene modifying polypeptide.

[0676] In some embodiments, a gene modifying system described herein comprises a template RNA comprising a nucleic acid sequence as listed in Table S4, or a nucleic acid sequence having at least 70%, 75%, 80%, 85%, 90%, 95%, 96%, 97%, 98%, or 99% identity thereto. In some embodiments, a gene modifying system described herein comprises a template RNA comprising a 5′ end block sequence of a template sequence as listed in Table S4, or a nucleic acid sequence having at least 70%, 75%, 80%, 85%, 90%, 95%, 96%, 97%, 98%, or 99% identity thereto. In some embodiments, a gene modifying system described herein comprises a template RNA comprising a PBS sequence of a template sequence as listed in Table S4, or a nucleic acid sequence having at least 70%, 75%, 80%, 85%, 90%, 95%, 96%, 97%, 98%, or 99% identity thereto. In some embodiments, a gene modifying system described herein comprises a template RNA comprising a linker sequence of a template sequence as listed in Table S4, or a nucleic acid sequence having at least 70%, 75%, 80%, 85%, 90%, 95%, 96%, 97%, 98%, or 99% identity thereto. In some embodiments, a gene modifying system described herein comprises a template RNA comprising one or more (e.g., 1, 2, 3, or 4) RRS sequences of a template sequence as listed in Table S4, or nucleic acid sequences having at least 70%, 75%, 80%, 85%, 90%, 95%, 96%, 97%, 98%, or 99% identity thereto. In some embodiments, a gene modifying system described herein comprises a template RNA comprising a 3′ end block sequence of a template sequence as listed in Table S4, or a nucleic acid sequence having at least 70%, 75%, 80%, 85%, 90%, 95%, 96%, 97%, 98%, or 99% identity thereto. In some embodiments, a gene modifying system described herein comprises a template RNA comprising one or more (e.g., 1, 2, 3, or 4) of (e.g., in 5′ to 3′ order) a 5′ end block sequence, optionally a PBS sequence, one or more (e.g., 1, 2, 3, or 4) RRS sequences, and a 3′ end block sequence of a template sequence as listed in Table S4, or nucleic acid sequences having at least 70%, 75%, 80%, 85%, 90%, 95%, 96%, 97%, 98%, or 99% identity thereto.

[0677] In some embodiments the gene modifying system is combined with a second polypeptide. In some embodiments, the second polypeptide may comprise an endonuclease domain. In some embodiments, the second polypeptide may comprise a polymerase domain, e.g., a reverse transcriptase domain. In some embodiments, the second polypeptide may comprise a DNA-dependent DNA polymerase domain. In some embodiments, the second polypeptide aids in completion of the genome edit, e.g., by contributing to second-strand synthesis or DNA repair resolution.

[0678] A functional gene modifying polypeptide can be made up of unrelated DNA binding, reverse transcription, and endonuclease domains. This modular structure allows combining of functional domains, e.g., dCas9 (DNA binding), MMLV reverse transcriptase (reverse transcription), FokI (endonuclease). In some embodiments, multiple functional domains may arise from a single protein, e.g., Cas9 or Cas9 nickase (DNA binding, endonuclease).

[0679] In some embodiments, a gene modifying polypeptide includes one or more domains that, collectively, facilitate 1) binding the template nucleic acid, 2) binding the target DNA molecule, and 3) facilitate integration of the at least a portion of the template nucleic acid into the target DNA. In some embodiments, the gene modifying polypeptide is an engineered polypeptide that comprises one or more amino acid substitutions to a corresponding naturally occurring sequence. In some embodiments, the gene modifying polypeptide comprises two or more domains that are heterologous relative to each other, e.g., through a heterologous fusion (or other conjugate) of otherwise wild-type domains, or well as fusions of modified domains, e.g., by way of replacement or fusion of a heterologous sub-domain or other substituted domain. For instance, in some embodiments, one or more of: the RT domain is heterologous to the DBD; the DBD is heterologous to the endonuclease domain; or the RT domain is heterologous to the endonuclease domain.

[0680] In some embodiments, a template RNA molecule for use in the system comprises, from 5′ to 3′ (1) a gRNA spacer; (2) a gRNA scaffold; (3) heterologous object sequence (4) a primer binding site (PBS) sequence. In some embodiments:
[0681] (1) Is a gRNA spacer of ˜18-22 nt, e.g., is 20 nt
[0682] (2) Is a gRNA scaffold comprising one or more hairpin loops, e.g., 1, 2, of 3 loops for associating the template with a Cas domain, e.g., a nickase Cas9 domain. In some embodiments, the gRNA scaffold comprises the sequence, from 5′ to 3′, GTTTTAGAGCTAGAAATAGCAAGTTAAAATAAGGCTAGTCCGTTATCAACTTGAAAA AGTGGGACCGAGTCGGTCC (SEQ ID NO: 8).
[0683] (3) In some embodiments, the heterologous object sequence is, e.g., 7-74, e.g., 10-20, 20-30, 30-40, 40-50, 50-60, 60-70, or 70-80 nt or, 80-90 nt in length. In some embodiments, the first (most 5′) base of the sequence is not C.
[0684] (4) In some embodiments, the PBS sequence that binds the target priming sequence after nicking occurs is e.g., 3-20 nt, e.g., 7-15 nt, e.g., 12-14 nt. In some embodiments, the PBS sequence has 40-60% GC content.

[0685] In some embodiments, a second gRNA associated with the system may help drive complete integration. In some embodiments, the second gRNA may target a location that is 0-200 nt away from the first-strand nick, e.g., 0-50, 50-100, 100-200 nt away from the first-strand nick. In some embodiments, the second gRNA can only bind its target sequence after the edit is made, e.g., the gRNA binds a sequence present in the heterologous object sequence, but not in the initial target sequence.

[0686] In some embodiments, a gene modifying system described herein is used to make an edit in HEK293, K562, U2OS, or HeLa cells. In some embodiment, a gene modifying system is used to make an edit in primary cells, e.g., primary cortical neurons from E18.5 mice.

[0687] In some embodiments, a gene modifying polypeptide as described herein comprises a reverse transcriptase or RT domain (e.g., as described herein) that comprises a MoMLV RT sequence or variant thereof. In embodiments, the MoMLV RT sequence comprises one or more mutations selected from D200N, L603W, T330P, T306K, W313F, D524G, E562Q, D583N, P51L, S67R, E67K, T197A, H204R, E302K, F309N, L435G, N454K, H594Q, D653N, R110S, and K103L. In embodiments, the MoMLV RT sequence comprises a combination of mutations, such as D200N, L603W, and T330P, optionally further including T306K and/or W313F.

[0688] In some embodiments, an endonuclease domain (e.g., as described herein) comprises nCAS9, e.g., comprising the H840A mutation.

[0689] In some embodiments, the heterologous object sequence (e.g., of a system as described herein) is about 1-50, 50-100, 100-200, 200-300, 300-400, 400-500, 500-600, 600-700, 700-800, 800-900, 900-1000, or more, nucleotides in length.

[0690] In some embodiments, the RT and endonuclease domains are joined by a flexible linker, e.g., comprising the amino acid sequence SGGSSGGSSGSETPGTSESATPESSGGSSGGSS (SEQ ID NO: 6).

[0691] In some embodiments, the endonuclease domain is N-terminal relative to the RT domain. In some embodiments, the endonuclease domain is C-terminal relative to the RT domain.

[0692] In some embodiments, the system incorporates a heterologous object sequence into a target site by TPRT, e.g., as described herein.

[0693] In some embodiments, a gene modifying polypeptide comprises a DNA binding domain. In some embodiments, a gene modifying polypeptide comprises an RNA binding domain. In some embodiments, the RNA binding domain comprises an RNA binding domain of B-box protein, MS2 coat protein, dCas, or an element of a sequence of a table herein. In some embodiments, the RNA binding domain is capable of binding to a template RNA with greater affinity than a reference RNA binding domain.

[0694] In some embodiments, a gene modifying system is capable of producing an insertion into the target site of at least 45, 50, 55, 60, 65, 70, 75, 80, 85, 90, 95, or 100 nucleotides (and optionally no more than 500, 400, 300, 200, or 100 nucleotides). In some embodiments, a gene modifying system is capable of producing an insertion into the target site of at least 1, 2, 3, 4, 5, 6, 7, 8, 9, 10, 15, 20, 25, 30, 35, 40, 45, 50, 55, 60, 65, 70, 75, 80, 85, 90, 95, or 100 nucleotides (and optionally no more than 500, 400, 300, 200, or 100 nucleotides). In some embodiments, a gene modifying system is capable of producing an insertion into the target site of at least 0.2, 0.3, 0.4, 0.5, 0.6, 0.7, 0.8, 0.9, 1, 1.5, 2, 2.5, 3, 3.5, 4, 4.5, 5, 5.5, 6, 6.5, 7, 7.5, 8, 8.5, 9, 9.5 or 10 kilobases (and optionally no more than 1, 5, 10, or 20 kilobases). In some embodiments, a gene modifying system is capable of producing a deletion of at least 81, 85, 90, 95, 100, 110, 120, 130, 140, 150, 160, 170, 180, 190, or 200 nucleotides (and optionally no more than 500, 400, 300, or 200 nucleotides). In some embodiments, a gene modifying system is capable of producing a deletion of at least 81, 85, 90, 95, 100, 110, 120, 130, 140, 150, 160, 170, 180, 190, or 200 nucleotides (and optionally no more than 500, 400, 300, or 200 nucleotides). In some embodiments, a gene modifying system is capable of producing a deletion of at least 1, 2, 3, 4, 5, 6, 7, 8, 9, 10, 15, 20, 25, 30, 35, 40, 45, 50, 55, 60, 65, 70, 75, 80, 85, 90, 95, 100, 110, 120, 130, 140, 150, 160, 170, 180, 190, or 200 nucleotides (and optionally no more than 500, 400, 300, or 200 nucleotides). In some embodiments, a gene modifying system is capable of producing a deletion of at least 0.2, 0.3, 0.4, 0.5, 0.6, 0.7, 0.8, 0.9, 1, 1.5, 2, 2.5, 3, 3.5, 4, 4.5, 5, 5.5, 6, 6.5, 7, 7.5, 8, 8.5, 9, 9.5 or 10 kilobases (and optionally no more than 1, 5, 10, or 20 kilobases). In some embodiments, a gene modifying system is capable of producing a substitution into the target site of at least 1, 2, 3, 4, 5, 6, 7, 8, 9, 10, 15, 20, 25, 30, 35, 40, 45, 50, 60, 70, 80, 90, or 100 or more nucleotides. In some embodiments, a gene modifying system is capable of producing a substitution in the target site of 1-2, 2-3, 3-4, 4-5, 5-10, 10-15, 15-20, 20-30, 30-40, 40-50, 50-60, 60-70, 70-80, 80-90, or 90-100 nucleotides.

[0695] In some embodiments, the substitution is a transition mutation. In some embodiments, the substitution is a transversion mutation. In some embodiments, the substitution converts an adenine to a thymine, an adenine to a guanine, an adenine to a cytosine, a guanine to a thymine, a guanine to a cytosine, a guanine to an adenine, a thymine to a cytosine, a thymine to an adenine, a thymine to a guanine, a cytosine to an adenine, a cytosine to a guanine, or a cytosine to a thymine.

[0696] In some embodiments, an insertion, deletion, substitution, or combination thereof, increases or decreases expression (e.g. transcription or translation) of a gene. In some embodiments, an insertion, deletion, substitution, or combination thereof, increases or decreases expression (e.g. transcription or translation) of a gene by altering, adding, or deleting sequences in a promoter or enhancer, e.g. sequences that bind transcription factors. In some embodiments, an insertion, deletion, substitution, or combination thereof alters translation of a gene (e.g. alters an amino acid sequence), inserts or deletes a start or stop codon, alters or fixes the translation frame of a gene. In some embodiments, an insertion, deletion, substitution, or combination thereof alters splicing of a gene, e.g. by inserting, deleting, or altering a splice acceptor or donor site. In some embodiments, an insertion, deletion, substitution, or combination thereof alters transcript or protein half-life. In some embodiments, an insertion, deletion, substitution, or combination thereof alters protein localization in the cell (e.g. from the cytoplasm to a mitochondria, from the cytoplasm into the extracellular space (e.g. adds a secretion tag)). In some embodiments, an insertion, deletion, substitution, or combination thereof alters (e.g. improves) protein folding (e.g. to prevent accumulation of misfolded proteins). In some embodiments, an insertion, deletion, substitution, or combination thereof, alters, increases, decreases the activity of a gene, e.g. a protein encoded by the gene.

[0697] Exemplary gene modifying polypeptides, and systems comprising them and methods of using them are described, e.g., in PCT/US2021/020948, which is incorporated herein by reference with respect to retroviral RT domains, including the amino acid and nucleic acid sequences therein.

[0698] Exemplary gene modifying polypeptides and retroviral RT domain sequences are also described, e.g., in International Application No. PCT/US21/20948 filed Mar. 4, 2021, e.g., at Table 30, Table 31, and Table 44 therein; the entire application is incorporated by reference herein with respect to retroviral RTs, e.g., in said sequences and tables. Accordingly, a gene modifying polypeptide described herein may comprise an amino acid sequence according to any of the Tables mentioned in this paragraph, or a domain thereof (e.g., a retroviral RT domain), or a functional fragment or variant of any of the foregoing, or an amino acid sequence having at least 70%, 80%, 85%, 90%, 95%, or 99% identity thereto.

[0699] In some embodiments, a polypeptide for use in any of the systems described herein can be a molecular reconstruction or ancestral reconstruction based upon the aligned polypeptide sequence of multiple homologous proteins. In some embodiments, a reverse transcriptase domain for use in any of the systems described herein can be a molecular reconstruction or an ancestral reconstruction, or can be modified at particular residues, based upon alignments of reverse transcriptase domains from the same or different sources. A skilled artisan can, based on the Accession numbers provided herein, align polypeptides or nucleic acid sequences, e.g., by using routine sequence analysis tools as Basic Local Alignment Search Tool (BLAST) or CD-Search for conserved domain analysis. Molecular reconstructions can be created based upon sequence consensus, e.g. using approaches described in Ivics et al., Cell 1997, 501-510; Wagstaff et al., Molecular Biology and Evolution 2013, 88-99.

### Polypeptide Components of Gene Modifying Systems

[0700] In some embodiments, the gene modifying polypeptide possesses the functions of DNA target site binding, template nucleic acid (e.g., RNA) binding, DNA target site cleavage, and template nucleic acid (e.g., RNA) writing, e.g., reverse transcription. In some embodiments, each functions is contained within a distinct domain. In some embodiments, a function may be attributed to two or more domains (e.g., two or more domains, together, exhibit the functionality). In some embodiments, two or more domains may have the same or similar function (e.g., two or more domains each independently have DNA-binding functionality, e.g., for two different DNA sequences). In other embodiments, one or more domains may be capable of enabling one or more functions, e.g., a Cas9 domain enabling both DNA binding and target site cleavage. In some embodiments, the domains are all located within a single polypeptide. In some embodiments, a first domain is in one polypeptide and a second domain is in a second polypeptide. For example, in some embodiments, the sequences may be split between a first polypeptide and a second polypeptide, e.g., wherein the first polypeptide comprises a reverse transcriptase (RT) domain and wherein the second polypeptide comprises a DNA-binding domain and an endonuclease domain, e.g., a nickase domain. As a further example, in some embodiments, the first polypeptide and the second polypeptide each comprise a DNA binding domain (e.g., a first DNA binding domain and a second DNA binding domain). In some embodiments, the first and second polypeptide may be brought together post-translationally via a split-intein to form a single gene modifying polypeptide.

[0701] In some aspects, a gene modifying polypeptide described herein comprises (e.g., a system described herein comprises a gene modifying polypeptide that comprises): 1) a Cas domain (e.g., a Cas nickase domain, e.g., a Cas9 nickase domain); 2) a reverse transcriptase (RT) domain of Table 1, or a sequence having at least 70%, 75%, 80%, 85%, 90%, 95%, 97%, 98%, or 99% identity thereto, wherein the RT domain is C-terminal of the Cas domain; and a linker disposed between the RT domain and the Cas domain, wherein the linker has a sequence from the same row of Table 1 as the RT domain, or a sequence having at least 70%, 75%, 80%, 85%, 90%, 95%, 97%, 98%, or 99% identity thereto.

[0702] In some embodiments, the RT domain has a sequence with 100% identity to the RT domain of Table 1 and the linker has a sequence with 100% identity to the linker sequence from the same row of Table 1 as the RT domain. In some embodiments, the Cas domain comprises a sequence of Table 8, or a sequence having at least 70%, 75%, 80%, 85%, 90%, 95%, 98%, or 99% identity thereto. In some embodiments, the gene modifying polypeptide comprises an amino acid sequence according to any of SEQ ID Nos: 1-3332 in the sequence listing, or a sequence having at least 70%, 75%, 80%, 85%, 90%, 95%, 97%, 98%, or 99% identity thereto.

[0703] In some embodiments, a gene modifying polypeptide described herein comprises the amino acid sequence, or a functional portion thereof, of an exemplary gene modifying polypeptide as listed in any of Tables S1-S3, or an amino acid sequence having at least 70%, 75%, 80%, 85%, 90%, 95%, 96%, 97%, 98%, or 99% identity thereto. In some embodiments, a gene modifying polypeptide described herein comprises the amino acid sequence of an RT domain of an exemplary gene modifying polypeptide as listed in any of Tables S1-S3, or an amino acid sequence having at least 70%, 75%, 80%, 85%, 90%, 95%, 96%, 97%, 98%, or 99% identity thereto. In some embodiments, a gene modifying polypeptide described herein comprises the amino acid sequence of a DBD of an exemplary gene modifying polypeptide as listed in any of Tables S1-S3, or an amino acid sequence having at least 70%, 75%, 80%, 85%, 90%, 95%, 96%, 97%, 98%, or 99% identity thereto. In some embodiments, a gene modifying polypeptide described herein comprises the amino acid sequence of an RBD of an exemplary gene modifying polypeptide as listed in any of Tables S1-S3, or an amino acid sequence having at least 70%, 75%, 80%, 85%, 90%, 95%, 96%, 97%, 98%, or 99% identity thereto. In some embodiments, a gene modifying polypeptide described herein comprises the amino acid sequence of the RT domain, DBD, and RBD of an exemplary gene modifying polypeptide as listed in any of Tables S1-S3, or amino acid sequences having at least 70%, 75%, 80%, 85%, 90%, 95%, 96%, 97%, 98%, or 99% identity thereto.

[0704] In some embodiments, a gene modifying polypeptide described herein comprises the amino acid sequence, or a functional portion thereof, of an exemplary gene modifying polypeptide as listed in Table S1, or an amino acid sequence having at least 70%, 75%, 80%, 85%, 90%, 95%, 96%, 97%, 98%, or 99% identity thereto. In some embodiments, a gene modifying polypeptide described herein comprises the amino acid sequence of an RT domain of an exemplary gene modifying polypeptide as listed in Table S1, or an amino acid sequence having at least 70%, 75%, 80%, 85%, 90%, 95%, 96%, 97%, 98%, or 99% identity thereto. In some embodiments, a gene modifying polypeptide described herein comprises the amino acid sequence of a DBD of an exemplary gene modifying polypeptide as listed in Table S1, or an amino acid sequence having at least 70%, 75%, 80%, 85%, 90%, 95%, 96%, 97%, 98%, or 99% identity thereto. In some embodiments, a gene modifying polypeptide described herein comprises the amino acid sequence of an RBD of an exemplary gene modifying polypeptide as listed in Table S1, or an amino acid sequence having at least 70%, 75%, 80%, 85%, 90%, 95%, 96%, 97%, 98%, or 99% identity thereto. In some embodiments, a gene modifying polypeptide described herein comprises the amino acid sequence of the RT domain, DBD, and RBD of an exemplary gene modifying polypeptide as listed in Table S1, or amino acid sequences having at least 70%, 75%, 80%, 85%, 90%, 95%, 96%, 97%, 98%, or 99% identity thereto.

[0705] In some embodiments, a gene modifying polypeptide described herein comprises the amino acid sequence, or a functional portion thereof, of an exemplary gene modifying polypeptide as listed in Table S2, or an amino acid sequence having at least 70%, 75%, 80%, 85%, 90%, 95%, 96%, 97%, 98%, or 99% identity thereto. In some embodiments, a gene modifying polypeptide described herein comprises the amino acid sequence of an RT domain of an exemplary gene modifying polypeptide as listed in Table S2, or an amino acid sequence having at least 70%, 75%, 80%, 85%, 90%, 95%, 96%, 97%, 98%, or 99% identity thereto. In some embodiments, a gene modifying polypeptide described herein comprises the amino acid sequence of a DBD of an exemplary gene modifying polypeptide as listed in Table S2, or an amino acid sequence having at least 70%, 75%, 80%, 85%, 90%, 95%, 96%, 97%, 98%, or 99% identity thereto. In some embodiments, a gene modifying polypeptide described herein comprises the amino acid sequence of an RBD of an exemplary gene modifying polypeptide as listed in Table S2, or an amino acid sequence having at least 70%, 75%, 80%, 85%, 90%, 95%, 96%, 97%, 98%, or 99% identity thereto. In some embodiments, a gene modifying polypeptide described herein comprises the amino acid sequence of the RT domain, DBD, and RBD of an exemplary gene modifying polypeptide as listed in Table S2, or amino acid sequences having at least 70%, 75%, 80%, 85%, 90%, 95%, 96%, 97%, 98%, or 99% identity thereto.

[0706] In some embodiments, a gene modifying polypeptide described herein comprises the amino acid sequence, or a functional portion thereof, of an exemplary gene modifying polypeptide as listed in Table S3, or an amino acid sequence having at least 70%, 75%, 80%, 85%, 90%, 95%, 96%, 97%, 98%, or 99% identity thereto. In some embodiments, a gene modifying polypeptide described herein comprises the amino acid sequence of an RT domain of an exemplary gene modifying polypeptide as listed in Table S3, or an amino acid sequence having at least 70%, 75%, 80%, 85%, 90%, 95%, 96%, 97%, 98%, or 99% identity thereto. In some embodiments, a gene modifying polypeptide described herein comprises the amino acid sequence of a DBD of an exemplary gene modifying polypeptide as listed in Table S3, or an amino acid sequence having at least 70%, 75%, 80%, 85%, 90%, 95%, 96%, 97%, 98%, or 99% identity thereto. In some embodiments, a gene modifying polypeptide described herein comprises the amino acid sequence of an RBD of an exemplary gene modifying polypeptide as listed in Table S3, or an amino acid sequence having at least 70%, 75%, 80%, 85%, 90%, 95%, 96%, 97%, 98%, or 99% identity thereto. In some embodiments, a gene modifying polypeptide described herein comprises the amino acid sequence of the RT domain, DBD, and RBD of an exemplary gene modifying polypeptide as listed in Table S3, or amino acid sequences having at least 70%, 75%, 80%, 85%, 90%, 95%, 96%, 97%, 98%, or 99% identity thereto.

[0707] In some embodiments, a gene modifying polypeptide described herein comprises a DBD, RT domain, and one or more RBDs (e.g., as described herein).

[0708] In certain embodiments, the gene modifying polypeptide comprises, in N-terminal to C-terminal order, a DBD (e.g., a Cas domain, e.g., a Cas9 domain, e.g., as described herein), one or more (e.g., 1, 2, 3, or 4) RBDs, and an RT domain. In embodiments, the DBD and the N-terminal RBD are connected by a linker (e.g., as described herein). In embodiments, the C-terminal RBD and the RT domain are connected by a linker (e.g., as described herein).

[0709] In certain embodiments, the gene modifying polypeptide comprises, in N-terminal to C-terminal order, an RT domain, one or more (e.g., 1, 2, 3, or 4) RBDs, and a DBD (e.g., a Cas domain, e.g., a Cas9 domain, e.g., as described herein). In embodiments, the RT domain and the N-terminal RBD are connected by a linker (e.g., as described herein). In embodiments, the C-terminal RBD and the DBD are connected by a linker (e.g., as described herein).

[0710] In certain embodiments, the gene modifying polypeptide comprises, in N-terminal to C-terminal order, a DBD (e.g., a Cas domain, e.g., a Cas9 domain, e.g., as described herein), an RT domain, and one or more (e.g., 1, 2, 3, or 4) RBDs. In embodiments, the DBD and RT domain are connected by a linker (e.g., as described herein). In embodiments, the RT domain and the the N-terminal RBD are connected by a linker (e.g., as described herein).

[0711] In some embodiments, the gene modifying polypeptide comprises an N-terminal methionine residue.

[0712] In some embodiments, the gene modifying polypeptide comprises one or more nuclear localization sequences (NLSes), e.g., as described herein.

[0713] In some embodiments, the gene modifying polypeptide comprises a GG amino acid sequence between the Cas domain and the linker, an AG amino acid sequence between the RT domain and the second NLS, and/or a GG amino acid sequence between the linker and the RT domain. In some embodiments, the gene modifying polypeptide comprises a sequence of SEQ ID NO: 4000 which comprises the first NLS and the Cas domain, or a sequence having at least 70%, 75%, 80%, 85%, 90%, 95%, 98%, or 99% identity thereto. In some embodiments, the gene modifying polypeptide comprises a sequence of SEQ ID NO: 4001 which comprises the second NLS, or a sequence having at least 70%, 75%, 80%, 85%, 90%, 95%, 98%, or 99% identity thereto.

Exemplary N-terminal NLS-Cas9 domain
(SEQ ID NO: 4000)
MPAAKRVKLDGGDKKYSIGLDIGTNSVGWAVITDEYKVPSKKFKVLGNTD
RHSIKKNLIGALLFDSGETAEATRLKRTARRRYTRRKNRICYLQEIFSNE
MAKVDDSFFHRLEESFLVEEDKKHERHPIFGNIVDEVAYHEKYPTIYHLR
KKLVDSTDKADLRLIYLALAHMIKFRGHFLIEGDLNPDNSDVDKLFIQLV
QTYNQLFEENPINASGVDAKAILSARLSKSRRLENLIAQLPGEKKNGLFG
NLIALSLGLTPNFKSNFDLAEDAKLQLSKDTYDDDLDNLLAQIGDQYADL
FLAAKNLSDAILLSDILRVNTEITKAPLSASMIKRYDEHHQDLTLLKALV
RQQLPEKYKEIFFDQSKNGYAGYIDGGASQEEFYKFIKPILEKMDGTEEL
LVKLNREDLLRKQRTFDNGSIPHQIHLGELHAILRRQEDFYPFLKDNREK
IEKILTFRIPYYVGPLARGNSRFAWMTRKSEETITPWNFEEVVDKGASAQ
SFIERMTNFDKNLPNEKVLPKHSLLYEYFTVYNELTKVKYVTEGMRKPAF
LSGEQKKAIVDLLFKTNRKVTVKQLKEDYFKKIECFDSVEISGVEDRFNA
SLGTYHDLLKIIKDKDFLDNEENEDILEDIVLTLTLFEDREMIEERLKTY
AHLFDDKVMKQLKRRRYTGWGRLSRKLINGIRDKQSGKTILDFLKSDGFA
NRNFMQLIHDDSLTFKEDIQKAQVSGQGDSLHEHIANLAGSPAIKKGILQ
TVKVVDELVKVMGRHKPENIVIEMARENQTTQKGQKNSRERMKRIEEGIK
ELGSQILKEHPVENTQLQNEKLYLYYLQNGRDMYVDQELDINRLSDYDVD
HIVPQSFLKDDSIDNKVLTRSDKARGKSDNVPSEEVVKKMKNYWRQLLNA
KLITQRKFDNLTKAERGGLSELDKAGFIKRQLVETROITKHVAQILDSRM
NTKYDENDKLIREVKVITLKSKLVSDFRKDFQFYKVREINNYHHAHDAYL
NAVVGTALIKKYPKLESEFVYGDYKVYDVRKMIAKSEQEIGKATAKYFFY
SNIMNFFKTEITLANGEIRKRPLIETNGETGEIVWDKGRDFATVRKVLSM
PQVNIVKKTEVQTGGFSKESILPKRNSDKLIARKKDWDPKKYGGFDSPTV
AYSVLVVAKVEKGKSKKLKSVKELLGITIMERSSFEKNPIDFLEAKGYKE
VKKDLIIKLPKYSLFELENGRKRMLASAGELQKGNELALPSKYVNFLYLA
SHYEKLKGSPEDNEQKQLFVEQHKHYLDEIIEQISEFSKRVILADANLDK
VLSAYNKHRDKPIREQAENIIHLFTLTNLGAPAAFKYFDTTIDRKRYTST
KEVLDATLIHQSITGLYETRIDLSQLGGDGG
Exemplary C-terminal sequence comprising an NLS
(SEQ ID NO: 4001)
AGKRTADGSEFEKRTADGSEFESPKKKAKVE

### Gene Modifying Domain (RT Domain)

[0714] In certain aspects of the present invention, the gene modifying domain of the gene modifying system possesses reverse transcriptase activity and is also referred to as a reverse transcriptase domain (a RT domain). In some embodiments, the RT domain comprises an RT catalytic portion and RNA-binding region (e.g., a region that binds the template RNA).

[0715] In some embodiments, a nucleic acid encoding the reverse transcriptase is altered from its natural sequence to have altered codon usage, e.g. improved for human cells. In some embodiments the reverse transcriptase domain is a heterologous reverse transcriptase from a retrovirus. In some embodiments, the RT domain comprising a gene modifying polypeptide has been mutated from its original amino acid sequence, e.g., has at least 1, 2, 3, 4, 5, 6, 7, 8, 9, 10, 20, 30, 40, 50, 60, 70, 80, 90, or 100 substitutions. In some embodiments, the RT domain is derived from the RT of a retrovirus, e.g., HIV-1 RT, Moloney Murine Leukemia Virus (MMLV) RT, avian myeloblastosis virus (AMV) RT, or Rous Sarcoma Virus (RSV) RT.

[0716] In some embodiments, the retroviral reverse transcriptase (RT) domain exhibits enhanced stringency of target-primed reverse transcription (TPRT) initiation, e.g., relative to an endogenous RT domain. In some embodiments, the RT domain initiates TPRT when the 3 nt in the target site immediately upstream of the first strand nick, e.g., the genomic DNA priming the RNA template, have at least 66% or 100% complementarity to the 3 nt of homology in the RNA template. In some embodiments, the RT domain initiates TPRT when there are less than 5 nt mismatched (e.g., less than 1, 2, 3, 4, or 5 nt mismatched) between the template RNA homology and the target DNA priming reverse transcription. In some embodiments, the RT domain is modified such that the stringency for mismatches in priming the TPRT reaction is increased, e.g., wherein the RT domain does not tolerate any mismatches or tolerates fewer mismatches in the priming region relative to a wild-type (e.g., unmodified) RT domain. In some embodiments, the RT domain comprises a HIV-1 RT domain. In embodiments, the HIV-1 RT domain initiates lower levels of synthesis even with three nucleotide mismatches relative to an alternative RT domain (e.g., as described by Jamburuthugoda and Eickbush J Mol Biol 407(5):661-672 (2011); incorporated herein by reference in its entirety). In some embodiments, the RT domain forms a dimer (e.g., a heterodimer or homodimer). In some embodiments, the RT domain is monomeric. In some embodiments, an RT domain, naturally functions as a monomer or as a dimer (e.g., heterodimer or homodimer). In some embodiments, an RT domain naturally functions as a monomer, e.g., is derived from a virus wherein it functions as a monomer. In embodiments, the RT domain is selected from an RT domain from murine leukemia virus (MLV; sometimes referred to as MoMLV) (e.g., P03355), porcine endogenous retrovirus (PERV) (e.g., UniProt Q4VFZ2), mouse mammary tumor virus (MMTV) (e.g., UniProt P03365), Mason-Pfizer monkey virus (MPMV) (e.g., UniProt P07572), bovine leukemia virus (BLV) (e.g., UniProt P03361), human T-cell leukemia virus-1 (HTLV-1) (e.g., UniProt P03362), human foamy virus (HFV) (e.g., UniProt P14350), simian foamy virus (SFV) (e.g., UniProt P23074), or bovine foamy/syncytial virus (BFV/BSV) (e.g., UniProt 041894), or a functional fragment or variant thereof (e.g., an amino acid sequence having at least 70%, 80%, 90%, 95%, or 99% identity thereto). In some embodiments, an RT domain is dimeric in its natural functioning. In some embodiments, the RT domain is derived from a virus wherein it functions as a dimer. In embodiments, the RT domain is selected from an RT domain from avian sarcoma/leukemia virus (ASLV) (e.g., UniProt A0A142BKH1), Rous sarcoma virus (RSV) (e.g., UniProt P03354), avian myeloblastosis virus (AMV) (e.g., UniProt Q83133), human immunodeficiency virus type I (HIV-1) (e.g., UniProt P03369), human immunodeficiency virus type II (HIV-2) (e.g., UniProt P15833), simian immunodeficiency virus (SIV) (e.g., UniProt P05896), bovine immunodeficiency virus (BIV) (e.g., UniProt P19560), equine infectious anemia virus (EIAV) (e.g., UniProt P03371), or feline immunodeficiency virus (FIV) (e.g., UniProt P16088) (Herschhom and Hizi Cell Mol Life Sci 67(16):2717-2747 (2010)), or a functional fragment or variant thereof (e.g., an amino acid sequence having at least 70%, 80%, 90%, 95%, or 99% identity thereto). Naturally heterodimeric RT domains may, in some embodiments, also be functional as homodimers. In some embodiments, dimeric RT domains are expressed as fusion proteins, e.g., as homodimeric fusion proteins or heterodimeric fusion proteins. In some embodiments, the RT function of the system is fulfilled by multiple RT domains (e.g., as described herein). In further embodiments, the multiple RT domains are fused or separate, e.g., may be on the same polypeptide or on different polypeptides.

[0717] In some embodiments, a gene modifying system described herein comprises an integrase domain, e.g., wherein the integrase domain may be part of the RT domain. In some embodiments, an RT domain (e.g., as described herein) comprises an integrase domain. In some embodiments, an RT domain (e.g., as described herein) lacks an integrase domain, or comprises an integrase domain that has been inactivated by mutation or deleted. In some embodiment, a gene modifying system described herein comprises an RNase H domain, e.g., wherein the RNase H domain may be part of the RT domain. In some embodiments, the RNase H domain is not part of the RT domain and is covalently linked via a flexible linker. In some embodiments, an RT domain (e.g., as described herein) comprises an RNase H domain, e.g., an endogenous RNAse H domain or a heterologous RNase H domain. In some embodiments, an RT domain (e.g., as described herein) lacks an RNase H domain. In some embodiments, an RT domain (e.g., as described herein) comprises an RNase H domain that has been added, deleted, mutated, or swapped for a heterologous RNase H domain. In some embodiments, the polypeptide comprises an inactivated endogenous RNase H domain. In some embodiments, an endogenous RNase H domain from one of the other domains of the polypeptide is genetically removed such that it is not included in the polypeptide, e.g., the endogenous RNase H domain is partially or completely truncated from the comprising domain. In some embodiments, mutation of an RNase H domain yields a polypeptide exhibiting lower RNase activity, e.g., as determined by the methods described in Kotewicz et al. Nucleic Acids Res 16(1):265-277 (1988) (incorporated herein by reference in its entirety), e.g., lower by at least 10%, 20%, 30%, 40%, 50%, 60%, 70%, 80%, or 90% compared to an otherwise similar domain without the mutation. In some embodiments, RNase H activity is abolished.

[0718] In some embodiments, an RT domain is mutated to increase fidelity compared to an otherwise similar domain without the mutation. For instance, in some embodiments, a YADD (SEQ ID NO: 18103) or YMDD motif (SEQ ID NO: 18104) in an RT domain (e.g., in a reverse transcriptase) is replaced with YVDD (SEQ ID NO: 18105). In embodiments, replacement of the YADD (SEQ ID NO: 18103) or YMDD (SEQ ID NO: 18104) or YVDD (SEQ ID NO: 18105) results in higher fidelity in retroviral reverse transcriptase activity (e.g., as described in Jamburuthugoda and Eickbush J Mol Biol 2011; incorporated herein by reference in its entirety).

[0719] In some embodiments, a gene modifying polypeptide described herein comprises an RT domain having an amino acid sequence according to Table 6, or a sequence having at least 70%, 80%, 85%, 90%, 95%, 97%, 98%, or 99% identity thereto. In some embodiments, a nucleic acid described herein encodes an RT domain having an amino acid sequence according to Table 6, or a sequence having at least 70%, 80%, 85%, 90%, 95%, 97%, 98%, or 99% identity thereto.

TABLE 6
Exemplary reverse transcriptase domains from retroviruses

| RT | |
|---|---|
| Name | RT amino acid sequence |
| AVIRE_ | TAPLEEEYRLFLEAPIQNVILLEQWKREIPKVWAEINPPGLASTQAPIHVQLLSTALPVRVRQY |
| P03360 | PITLEAKRSLRETIRKFRAAGILRPVHSPWNTPLLPVRKSGTSEYRMVQDLREVNKRVETIHPT |
| | VPNPYTLLSLLPPDRIWYSVLDLKDAFFCIPLAPESQLIFAFEWADAEEGESGQLTWTRLPQGF |
| | KNSPTLFDEALNRDLQGFRLDHPSVSLLQYVDDLLIAADTQAACLSATRDLLMTLAELGYRV |
| | SGKKAQLCQEEVTYLGFKIHKGSRSLSNSRTQAILQIPVPKTKRQVREFLGTIGYCRLWIPGFA |
| | ELAQPLYAATRGGNDPLVWGEKEEEAFQSLKLALTQPPALALPSLDKPFQLFVEETSGAAKG |
| | VLTQALGPWKRPVAYLSKRLDPVAAGWPRCLRAIAAAALLTREASKLTFGQDIEITSSHNLES |
| | LLRSPPDKWLTNARITQYQVLLLDPPRVRFKQTAALNPATLLPETDDTLPIHHCLDTLDSLTST |
| | RPDLTDQPLAQAEATLFTDGSSYIRDGKRYAGAAVVTLDSVIWAEPLPIGTSAQKAELIALTK |
| | ALEWSKDKSVNIYTDSRYAFATLHVHGMIYRERGLLTAGGKAIKNAPEILALLTAVWLPKRV |
| | AVMHCKGHQKDDAPTSTGNRRADEVAREVAIRPLSTQATIS (SEQ ID NO: 18106) |
| AVIRE_ | TAPLEEEYRLFLEAPIQNVTLLEQWKREIPKVWAEINPPGLASTQAPIHVQLLSTALPVRVRQY |
| P03360_ | PITLEAKRSLRETIRKFRAAGILRPVHSPWNTPLLPVRKSGTSEYRMVQDLREVNKRVETIHPT |
| 3mut | VPNPYTLLSLLPPDRIWYSVLDLKDAFFCIPLAPESQLIFAFEWADAEEGESGQLTWTRLPQGF |
| | KNSPTLFNEALNRDLQGFRLDHPSVSLLQYVDDLLIAADTQAACLSATRDLLMTLAELGYRV |
| | SGKKAQLCQEEVTYLGFKIHKGSRSLSNSRTQAILQIPVPKTKRQVREFLGTIGYCRLWIPGFA |
| | ELAQPLYAATRPGNDPLVWGEKEEEAFQSLKLALTQPPALALPSLDKPFQLFVEETSGAAKG |
| | VLTQALGPWKRPVAYLSKRLDPVAAGWPRCLRAIAAAALLTREASKLTFGQDIEITSSHNLES |
| | LLRSPPDKWLTNARITQYQVLLLDPPRVRFKQTAALNPATLLPETDDTLPIHHCLDTLDSLTST |
| | RPDLTDQPLAQAEATLFTDGSSYIRDGKRYAGAAVVTLDSVIWAEPLPIGTSAQKAELIALTK |
| | ALEWSKDKSVNIYTDSRYAFATLHVHGMIYRERGWLTAGGKAIKNAPEILALLTAVWLPKR |
| | VAVMHCKGHQKDDAPTSTGNRRADEVAREVAIRPLSTQATIS (SEQ ID NO: 18107) |
| AVIRE_ | TAPLEEEYRLFLEAPIQNVILLEQWKREIPKVWAEINPPGLASTQAPIHVQLLSTALPVRVRQY |
| P03360_ | PITLEAKRSLRETIRKFRAAGILRPVHSPWNTPLLPVRKSGTSEYRMVQDLREVNKRVETIHPT |
| 3mutA | VPNPYTLLSLLPPDRIWYSVLDLKDAFFCIPLAPESQLIFAFEWADAEEGESGQLTWTRLPQGF |
| | KNSPTLFNEALNRDLQGFRLDHPSVSLLQYVDDLLIAADTQAACLSATRDLLMTLAELGYRV |
| | SGKKAQLCQEEVTYLGFKIHKGSRSLSNSRTQAILQIPVPKTKRQVREFLGKIGYCRLFIPGFA |
| | ELAQPLYAATRPGNDPLVWGEKEEEAFQSLKLALTQPPALALPSLDKPFQLFVEETSGAAKG |
| | VLTQALGPWKRPVAYLSKRLDPVAAGWPRCLRAIAAAALLTREASKLTFGQDIEITSSHNLES |
| | LLRSPPDKWLTNARITQYQVLLLDPPRVRFKQTAALNPATLLPETDDTLPIHHCLDTLDSLTST |
| | RPDLTDQPLAQAEATLFTDGSSYIRDGKRYAGAAVVTLDSVIWAEPLPIGTSAQKAELIALTK |
| | ALEWSKDKSVNIYTDSRYAFATLHVHGMIYRERGWLTAGGKAIKNAPEILALLTAVWLPKR |
| | VAVMHCKGHQKDDAPTSTGNRRADEVAREVAIRPLSTQATIS (SEQ ID NO: 16706) |
| BAEVM_ | TVSLQDEHRLFDIPVTTSLPDVWLQDFPQAWAETGGLGRAKCQAPIIIDLKPTAVPVSIKQYP |
| P10272 | MSLEAHMGIRQHIIKFLELGVLRPCRSPWNTPLLPVKKPGTQDYRPVQDLREINKRTVDIHPT |
| | VPNPYNLLSTLKPDYSWYTVLDLKDAFFCLPLAPQSQELFAFEWKDPERGISGQLTWTRLPQ |
| | GFKNSPTLFDEALHRDLTDFRTQHPEVTLLQYVDDLLLAAPTKKACTQGTRHLLQELGEKGY |
| | RASAKKAQICQTKVTYLGYILSEGKRWLTPGRIETVARIPPPRNPREVREFLGTAGFCRLWIPG |
| | FAELAAPLYALTKESTPFTWQTEHQLAFEALKKALLSAPALGLPDTSKPFTLFLDERQGIAKG |
| | VLTQKLGPWKRPVAYLSKKLDPVAAGWPPCLRIMAATAMLVKDSAKLTLGQPLTVITPHTL |
| | EAIVRQPPDRWITNARLTHYQALLLDTDRVQFGPPVTLNPATLLPVPENQPSPHDCRQVLAET |
| | HGTREDLKDQELPDADHTWYTDGSSYLDSGTRRAGAAVVDGHNTIWAQSLPPGTSAQKAEL |
| | IALTKALELSKGKKANIYTDSRYAFATAHTHGSIYERRGLLTSEGKEIKNKAEIIALLKALFLP |
| | QEVAIIHCPGHQKGQDPVAVGNRQADRVARQAAMAEVLTLATEPDNTSHIT (SEQ ID NO: |
| | 18108) |
| BAEVM_ | TVSLQDEHRLFDIPVTTSLPDVWLQDFPQAWAETGGLGRAKCQAPIIIDLKPTAVPVSIKQYP |
| P10272_ | MSLEAHMGIRQHIIKFLELGVLRPCRSPWNTPLLPVKKPGTQDYRPVQDLREINKRTVDIHPT |
| 3mut | VPNPYNLLSTLKPDYSWYTVLDLKDAFFCLPLAPQSQELFAFEWKDPERGISGQLTWTRLPQ |
| | GFKNSPTLFNEALHRDLTDFRTQHPEVTLLQYVDDLLLAAPTKKACTQGTRHLLQELGEKGY |
| | RASAKKAQICQTKVTYLGYILSEGKRWLTPGRIETVARIPPPRNPREVREFLGTAGFCRLWIPG |
| | FAELAAPLYALTKPSTPFTWQTEHQLAFEALKKALLSAPALGLPDTSKPFTLFLDERQGIAKG |
| | VLTQKLGPWKRPVAYLSKKLDPVAAGWPPCLRIMAATAMLVKDSAKLTLGQPLTVITPHTL |
| | EAIVRQPPDRWITNARLTHYQALLLDTDRVQFGPPVTLNPATLLPVPENQPSPHDCRQVLAET |
| | HGTREDLKDQELPDADHTWYTDGSSYLDSGTRRAGAAVVDGHNTIWAQSLPPGTSAQKAEL |
| | IALTKALELSKGKKANIYTDSRYAFATAHTHGSIYERRGWLTSEGKEIKNKAEIIALLKALFLP |
| | QEVAIIHCPGHQKGQDPVAVGNRQADRVARQAAMAEVLTLATEPDNTSHIT (SEQ ID NO: |
| | 18109) |
| BAEVM_ | TVSLQDEHRLFDIPVTTSLPDVWLQDFPQAWAETGGLGRAKCQAPIIIDLKPTAVPVSIKQYP |
| P10272_ | MSLEAHMGIRQHIIKFLELGVLRPCRSPWNTPLLPVKKPGTQDYRPVQDLREINKRTVDIHPT |
| 3mutA | VPNPYNLLSTLKPDYSWYTVLDLKDAFFCLPLAPQSQELFAFEWKDPERGISGQLTWTRLPQ |
| | GFKNSPTLFNEALHRDLTDFRTQHPEVTLLQYVDDLLLAAPTKKACTQGTRHLLQELGEKGY |
| | RASAKKAQICQTKVTYLGYILSEGKRWLTPGRIETVARIPPPRNPREVREFLGKAGFCRLFIPG |
| | FAELAAPLYALTKPSTPFTWQTEHQLAFEALKKALLSAPALGLPDTSKPFTLFLDERQGIAKG |
| | VLTQKLGPWKRPVAYLSKKLDPVAAGWPPCLRIMAATAMLVKDSAKLTLGQPLTVITPHTL |
| | EAIVRQPPDRWITNARLTHYQALLLDTDRVQFGPPVTLNPATLLPVPENQPSPHDCRQVLAET |
| | HGTREDLKDQELPDADHTWYTDGSSYLDSGTRRAGAAVVDGHNTIWAQSLPPGTSAQKAEL |
| | IALTKALELSKGKKANIYTDSRYAFATAHTHGSIYERRGWLTSEGKEIKNKAEIIALLKALFLP |
| | QEVAIIHCPGHQKGQDPVAVGNRQADRVARQAAMAEVLTLATEPDNTSHIT (SEQ ID NO: |
| | 18110) |
| BLVAU_ | GVLDAPPSHIGLEHLPPPPEVPQFPLNLERLQALQDLVHRSLEAGYISPWDGPGNNPVFPVRKP |
| P25059 | NGAWRFVHDLRVTNALTKPIPALSPGPPDLTAIPTHLPHIICLDLKDAFFQIPVEDRFRSYFAFT |
| | LPTPGGLQPHRRFAWRVLPQGFINSPALFERALQEPLRQVSAAFSQSLLVSYMDDILYVSPTEE |
| | QRLQCYQTMAAHLRDLGFQVASEKTRQTPSPVPFLGQMVHERMVTYQSLPTLQISSPISLHQL |
| | QTVLGDLQWVSRGTPTTRRPLQLLYSSLKGIDDPRAIIHLSPEQQQGIAELRQALSHNARSRY |
| | NEQEPLLAYVHLTRAGSTLVLFQKGAQFPLAYFQTPLTDNQASPWGLLLLLGCQYLQAQALS |
| | SYAKTILKYYHNLPKTSLDNWIQSSEDPRVQELLQLWPQISSQGIQPPGPWKTLVTRAEVFLTP |
| | QFSPEPIPAALCLFSDGAARRGAYCLWKDHLLDFQAVPAPESAQKGELAGLLAGLAAAPPEP |
| | LNIWVDSKYLYSLLRTLVLGAWLQPDPVPSYALLYKSLLRHPAIFVGHVRSHSSASHPIASLN |
| | NYVDQL (SEQ ID NO: 18111) |
| BLVAU_ | GVLDAPPSHIGLEHLPPPPEVPQFPLNLERLQALQDLVHRSLEAGYISPWDGPGNNPVFPVRKP |
| P25059_ | NGAWRFVHDLRVTNALTKPIPALSPGPPDLTAIPTHLPHIICLDLKDAFFQIPVEDRFRSYFAFT |
| 2mut | LPTPGGLQPHRRFAWRVLPQGFINSPALFQRALQEPLRQVSAAFSQSLLVSYMDDILYVSPTE |
| | EQRLQCYQTMAAHLRDLGFQVASEKTRQTPSPVPFLGQMVHERMVTYQSLPTLQISSPISLHQ |
| | LQTVLGDLQWVSRGTPTTRRPLQLLYSSLKPIDDPRAIIHLSPEQQQGIAELRQALSHNARSRY |
| | NEQEPLLAYVHLTRAGSTLVLFQKGAQFPLAYFQTPLTDNQASPWGLLLLLGCQYLQAQALS |
| | SYAKTILKYYHNLPKTSLDNWIQSSEDPRVQELLQLWPQISSQGIQPPGPWKTLVTRAEVFLTP |
| | QFSPEPIPAALCLFSDGAARRGAYCLWKDHLLDFQAVPAPESAQKGELAGLLAGLAAAPPEP |
| | LNIWVDSKYLYSLLRTLVLGAWLQPDPVPSYALLYKSLLRHPAIFVGHVRSHSSASHPIASLN |
| | NYVDQL (SEQ ID NO: 18112) |
| BLVJ_ | GVLDTPPSHIGLEHLPPPPEVPQFPLNLERLQALQDLVHRSLEAGYISPWDGPGNNPVFPVRKP |
| P03361 | NGAWRFVHDLRATNALTKPIPALSPGPPDLTAIPTHPPHIICLDLKDAFFQIPVEDRFRFYLSFT |
| | LPSPGGLQPHRRFAWRVLPQGFINSPALFERALQEPLRQVSAAFSQSLLVSYMDDILYASPTEE |
| | QRSQCYQALAARLRDLGFQVASEKTSQTPSPVPFLGQMVHEQIVTYQSLPTLQISSPISLHQLQ |
| | AVLGDLQWVSRGTPTTRRPLQLLYSSLKRHHDPRAIIQLSPEQLQGIAELRQALSHNARSRYN |
| | EQEPLLAYVHLTRAGSTLVLFQKGAQFPLAYFQTPLTDNQASPWGLLLLLGCQYLQTQALSS |
| | YAKPILKYYHNLPKTSLDNWIQSSEDPRVQELLQLWPQISSQGIQPPGPWKTLITRAEVFLTPQ |
| | FSPDPIPAALCLFSDGATGRGAYCLWKDHLLDFQAVPAPESAQKGELAGLLAGLAAAPPEPV |
| | NIWVDSKYLYSLLRTLVLGAWLQPDPVPSYALLYKSLLRHPAIVVGHVRSHSSASHPIASLNN |
| | YVDQL (SEQ ID NO: 18113) |
| BLVJ_ | GVLDTPPSHIGLEHLPPPPEVPQFPLNLERLQALQDLVHRSLEAGYISPWDGPGNNPVFPVRKP |
| P03361_ | NGAWRFVHDLRATNALTKPIPALSPGPPDLTAIPTHPPHIICLDLKDAFFQIPVEDRFRFYLSFT |
| 2mut | LPSPGGLQPHRRFAWRVLPQGFINSPALFNRALQEPLRQVSAAFSQSLLVSYMDDILYASPTEE |
| | QRSQCYQALAARLRDLGFQVASEKTSQTPSPVPFLGQMVHEQIVTYQSLPTLQISSPISLHQLQ |
| | AVLGDLQWVSRGTPTTRRPLQLLYSSLKRHHDPRAIIQLSPEQLQGIAELRQALSHNARSRYN |
| | EQEPLLAYVHLTRAGSTLVLFQKGAQFPLAYFQTPLTDNQASPWGLLLLLGCQYLQTQALSS |
| | YAKPILKYYHNLPKTSLDNWIQSSEDPRVQELLQLWPQISSQGIQPPGPWKTLITRAEVFLTPQ |
| | FSPDPIPAALCLFSDGATGRGAYCLWKDHLLDFQAVPAPESAQKGELAGLLAGLAAAPPEPV |
| | NIWVDSKYLYSLLRTWVLGAWLQPDPVPSYALLYKSLLRHPAIVVGHVRSHSSASHPIASLN |
| | NYVDQL (SEQ ID NO: 18114) |
| BLVJ_ | GVLDTPPSHIGLEHLPPPPEVPQFPLNLERLQALQDLVHRSLEAGYISPWDGPGNNPVFPVRKP |
| P03361_ | NGAWRFVHDLRATNALTKPIPALSPGPPDLTAPPTHPPHIICLDLKDAFFQIPVEDRFRFYLSFT |
| 2mutB | LPSPGGLQPHRRFAWRVLPQGFINSPALFQRALQEPLRQVSAAFSQSLLVSYMDDILYASPTEE |
| | QRSQCYQALAARLRDLGFQVASEKTSQTPSPVPFLGQMVHEQIVTYQSLPTLQISSPISLHQLQ |
| | AVLGDLQWVSRGTPTTRRPLQLLYSSLKRHHDPRAIIQLSPEQLQGIAELRQALSHNARSRYN |
| | EQEPLLAYVHLTRAGSTLVLFQKGAQFPLAYFQTPLTDNQASPWGLLLLLGCQYLQTQALSS |
| | YAKPILKYYHNLPKTSLDNWIQSSEDPRVQELLQLWPQISSQGIQPPGPWKTLITRAEVFLTPQ |
| | FSPDPIPAALCLFSDGATGRGAYCLWKDHLLDFQAVPAPESAQKGELAGLLAGLAAAPPEPV |
| | NIWVDSKYLYSLLRTWVLGAWLQPDPVPSYALLYKSLLRHPAIVVGHVRSHSSASHPIASLN |
| | NYVDQL (SEQ ID NO: 18115) |
| FFV_ | MDLLKPLTVERKGVKIKGYWNSQADITCVPKDLLQGEEPVRQQNVTTIHGTQEGDVYYVNL |
| O93209 | KIDGRRINTEVIGTTLDYAIITPGDVPWILKKPLELTIKLDLEEQQGTLLNNSILSKKGKEELKQ |
| | LFEKYSALWQSWENQVGHRRIRPHKIATGTVKPTPQKQYHINPKAKPDIQIVINDLLKQGVLI |
| | QKESTMNTPVYPVPKPNGRWRMVLDYRAVNKVTPLIAVQNQHSYGILGSLFKGRYKTTIDLS |
| | NGFWAHPIVPEDYWITAFTWQGKQYCWTVLPQGFLNSPGLFTGDVVDLLQGIPNVEVYVDD |
| | VYISHDSEKEHLEYLDILFNRLKEAGYIISLKKSNIANSIVDFLGFQITNEGRGLTDTFKEKLENI |
| | TAPTTLKQLQSILGLLNFARNFIPDFTELIAPLYALIPKSTKNYVPWQIEHSTTLETLITKLNGAE |
| | YLQGRKGDKTLIMKVNASYTTGYIRYYNEGEKKPISYVSIVFSKTELKFTELEKLLTTVHKGL |
| | LKALDLSMGQNIHVYSPIVSMQNIQKTPQTAKKALASRWLSWLSYLEDPRIRFFYDPQMPAL |
| | KDLPAVDTGKDNKKHPSNFQHIFYTDGSAITSPTKEGHLNAGMGIVYFINKDGNLQKQQEWS |
| | ISLGNHTAQFAEIAAFEFALKKCLPLGGNILVVTDSNYVAKAYNEELDVWASNGFVNNRKKP |
| | LKHISKWKSVADLKRLRPDVVVTHEPGHQKLDSSPHAYGNNLADQLATQASFKVH (SEQ ID |
| | NO: 18116) |
| FFV_ | MDLLKPLTVERKGVKIKGYWNSQADITCVPKDLLQGEEPVRQQNVTTIHGTQEGDVYYVNL |
| O93209_ | KIDGRRINTEVIGTTLDYAIITPGDVPWILKKPLELTIKLDLEEQQGTLLNNSILSKKGKEELKQ |
| 2mut | LFEKYSALWQSWENQVGHRRIRPHKIATGTVKPTPQKQYHINPKAKPDIQIVINDLLKQGVLI |
| | QKESTMNTPVYPVPKPNGRWRMVLDYRAVNKVTPLIAVQNQHSYGILGSLFKGRYKTTIDLS |
| | NGFWAHPIVPEDYWITAFTWQGKQYCWTVLPQGFLNSPGLFNGDVVDLLQGIPNVEVYVDD |
| | VYISHDSEKEHLEYLDILFNRLKEAGYIISLKKSNIANSIVDFLGFQITNEGRGLTDTFKEKLENI |
| | TAPTTLKQLQSILGLLNFARNFIPDFTELIAPLYALIPKSPKNYVPWQIEHSTTLETLITKLNGAE |
| | YLQGRKGDKTLIMKVNASYTTGYIRYYNEGEKKPISYVSIVFSKTELKFTELEKLLTTVHKGL |
| | LKALDLSMGQNIHVYSPIVSMQNIQKTPQTAKKALASRWLSWLSYLEDPRIRFFYDPQMPAL |
| | KDLPAVDTGKDNKKHPSNFQHIFYTDGSAITSPTKEGHLNAGMGIVYFINKDGNLQKQQEWS |
| | ISLGNHTAQFAEIAAFEFALKKCLPLGGNILVVTDSNYVAKAYNEELDVWASNGFVNNRKKP |
| | LKHISKWKSVADLKRLRPDVVVTHEPGHQKLDSSPHAYGNNLADQLATQASFKVH (SEQ ID |
| | NO: 18117) |
| FFV_ | MDLLKPLTVERKGVKIKGYWNSQADITCVPKDLLQGEEPVRQQNVTTIHGTQEGDVYYVNL |
| O93209_ | KIDGRRINTEVIGTTLDYAIITPGDVPWILKKPLELTIKLDLEEQQGTLLNNSILSKKGKEELKQ |
| 2mutA | LFEKYSALWQSWENQVGHRRIRPHKIATGTVKPTPQKQYHINPKAKPDIQIVINDLLKQGVLI |
| | QKESTMNTPVYPVPKPNGRWRMVLDYRAVNKVTPLIAVQNQHSYGILGSLFKGRYKTTIDLS |
| | NGFWAHPIVPEDYWITAFTWQGKQYCWTVLPQGFLNSPGLFNGDVVDLLQGIPNVEVYVDD |
| | VYISHDSEKEHLEYLDILFNRLKEAGYIISLKKSNIANSIVDFLGFQITNEGRGLTDTFKEKLENI |
| | TAPTTLKQLQSILGKLNFARNFIPDFTELIAPLYALIPKSPKNYVPWQIEHSTTLETLITKLNGAE |
| | YLQGRKGDKTLIMKVNASYTTGYIRYYNEGEKKPISYVSIVFSKTELKFTELEKLLTTVHKGL |
| | LKALDLSMGQNIHVYSPIVSMQNIQKTPQTAKKALASRWLSWLSYLEDPRIRFFYDPQMPAL |
| | KDLPAVDTGKDNKKHPSNFQHIFYTDGSAITSPTKEGHLNAGMGIVYFINKDGNLQKQQEWS |
| | ISLGNHTAQFAEIAAFEFALKKCLPLGGNILVVTDSNYVAKAYNEELDVWASNGFVNNRKKP |
| | LKHISKWKSVADLKRLRPDVVVTHEPGHQKLDSSPHAYGNNLADQLATQASFKVH (SEQ ID |
| | NO: 18118) |
| FFV_ | VPWILKKPLELTIKLDLEEQQGTLLNNSILSKKGKEELKQLFEKYSALWQSWENQVGHRRIRP |
| O93209- | HKIATGTVKPTPQKQYHINPKAKPDIQIVINDLLKQGVLIQKESTMNTPVYPVPKPNGRWRMV |
| Pro | LDYRAVNKVTPLIAVQNQHSYGILGSLFKGRYKTTIDLSNGFWAHPIVPEDYWITAFTWQGK |
| | QYCWTVLPQGFLNSPGLFTGDVVDLLQGIPNVEVYVDDVYISHDSEKEHLEYLDILFNRLKE |
| | AGYIISLKKSNIANSIVDFLGFQITNEGRGLTDTFKEKLENITAPTTLKQLQSILGLLNFARNFIP |
| | DFTELIAPLYALIPKSTKNYVPWQIEHSTTLETLITKLNGAEYLQGRKGDKTLIMKVNASYTTG |
| | YIRYYNEGEKKPISYVSIVFSKTELKFTELEKLLTTVHKGLLKALDLSMGQNIHVYSPIVSMQN |
| | IQKTPQTAKKALASRWLSWLSYLEDPRIRFFYDPQMPALKDLPAVDTGKDNKKHPSNFQHIF |
| | YTDGSAITSPTKEGHLNAGMGIVYFINKDGNLQKQQEWSISLGNHTAQFAEIAAFEFALKKCL |
| | PLGGNILVVTDSNYVAKAYNEELDVWASNGFVNNRKKPLKHISKWKSVADLKRLRPDVVVT |
| | HEPGHQKLDSSPHAYGNNLADQLATQASFKVH (SEQ ID NO: 18119) |
| FFV_ | VPWILKKPLELTIKLDLEEQQGTLLNNSILSKKGKEELKQLFEKYSALWQSWENQVGHRRIRP |
| O93209- | HKIATGTVKPTPQKQYHINPKAKPDIQIVINDLLKQGVLIQKESTMNTPVYPVPKPNGRWRMV |
| Pro_2mut | LDYRAVNKVTPLIAVQNQHSYGILGSLFKGRYKTTIDLSNGFWAHPIVPEDYWITAFTWQGK |
| | QYCWTVLPQGFLNSPGLFNGDVVDLLQGIPNVEVYVDDVYISHDSEKEHLEYLDILFNRLKE |
| | AGYIISLKKSNIANSIVDFLGFQITNEGRGLTDTFKEKLENITAPTTLKQLQSILGLLNFARNFIP |
| | DFTELIAPLYALIPKSPKNYVPWQIEHSTTLETLITKLNGAEYLQGRKGDKTLIMKVNASYTTG |
| | YIRYYNEGEKKPISYVSIVFSKTELKFTELEKLLTTVHKGLLKALDLSMGQNIHVYSPIVSMQN |
| | IQKTPQTAKKALASRWLSWLSYLEDPRIRFFYDPQMPALKDLPAVDTGKDNKKHPSNFQHIF |
| | YTDGSAITSPTKEGHLNAGMGIVYFINKDGNLQKQQEWSISLGNHTAQFAEIAAFEFALKKCL |
| | PLGGNILVVTDSNYVAKAYNEELDVWASNGFVNNRKKPLKHISKWKSVADLKRLRPDVVVT |
| | HEPGHQKLDSSPHAYGNNLADQLATQASFKVH (SEQ ID NO: 18120) |
| FFV_ | VPWILKKPLELTIKLDLEEQQGTLLNNSILSKKGKEELKQLFEKYSALWQSWENQVGHRRIRP |
| O93209- | HKIATGTVKPTPQKQYHINPKAKPDIQIVINDLLKQGVLIQKESTMNTPVYPVPKPNGRWRMV |
| Pro_2mutA | LDYRAVNKVTPLIAVQNQHSYGILGSLFKGRYKTTIDLSNGFWAHPIVPEDYWITAFTWQGK |
| | QYCWTVLPQGFLNSPGLFNGDVVDLLQGIPNVEVYVDDVYISHDSEKEHLEYLDILFNRLKE |
| | AGYIISLKKSNIANSIVDFLGFQITNEGRGLTDTFKEKLENITAPTTLKQLQSILGKLNFARNFIP |
| | DFTELIAPLYALIPKSPKNYVPWQIEHSTTLETLITKLNGAEYLQGRKGDKTLIMKVNASYTTG |
| | YIRYYNEGEKKPISYVSIVFSKTELKFTELEKLLTTVHKGLLKALDLSMGQNIHVYSPIVSMQN |
| | IQKTPQTAKKALASRWLSWLSYLEDPRIRFFYDPQMPALKDLPAVDTGKDNKKHPSNFQHIF |
| | YTDGSAITSPTKEGHLNAGMGIVYFINKDGNLQKQQEWSISLGNHTAQFAEIAAFEFALKKCL |
| | PLGGNILVVTDSNYVAKAYNEELDVWASNGFVNNRKKPLKHISKWKSVADLKRLRPDVVVT |
| | HEPGHQKLDSSPHAYGNNLADQLATQASFKVH (SEQ ID NO: 18121) |
| FLV_ | TLQLEEEYRLFEPESTQKQEMDIWLKNFPQAWAETGGMGTAHCQAPVLIQLKATATPISIRQY |
| P10273 | PMPHEAYQGIKPHIRRMLDQGILKPCQSPWNTPLLPVKKPGTEDYRPVQDLREVNKRVEDIHP |
| | TVPNPYNLLSTLPPSHPWYTVLDLKDAFFCLRLHSESQLLFAFEWRDPEIGLSGQLTWTRLPQ |
| | GFKNSPTLFDEALHSDLADFRVRYPALVLLQYVDDLLLAAATRTECLEGTKALLETLGNKGY |
| | RASAKKAQICLQEVTYLGYSLKDGQRWLTKARKEAILSIPVPKNSRQVREFLGTAGYCRLWI |
| | PGFAELAAPLYPLTRPGTLFQWGTEQQLAFEDIKKALLSSPALGLPDITKPFELFIDENSGFAK |
| | GVLVQKLGPWKRPVAYLSKKLDTVASGWPPCLRMVAAIAILVKDAGKLTLGQPLTILTSHPV |
| | EALVRQPPNKWLSNARMTHYQAMLLDAERVHFGPTVSLNPATLLPLPSGGNHHDCLQILAE |
| | THGTRPDLTDQPLPDADLTWYTDGSSFIRNGEREAGAAVTTESEVIWAAPLPPGTSAQRAELI |
| | ALTQALKMAEGKKLTVYTDSRYAFATTHVHGEIYRRRGLLTSEGKEIKNKNEILALLEALFLP |
| | KRLSIIHCPGHQKGDSPQAKGNRLADDTAKKAATETHSSLTVLP (SEQ ID NO: 18122) |
| FLV_ | TLQLEEEYRLFEPESTQKQEMDIWLKNFPQAWAETGGMGTAHCQAPVLIQLKATATPISIRQY |
| P10273_ | PMPHEAYQGIKPHIRRMLDQGILKPCQSPWNTPLLPVKKPGTEDYRPVQDLREVNKRVEDIHP |
| 3mut | TVPNPYNLLSTLPPSHPWYTVLDLKDAFFCLRLHSESQLLFAFEWRDPEIGLSGQLTWTRLPQ |
| | GFKNSPTLFNEALHSDLADFRVRYPALVLLQYVDDLLLAAATRTECLEGTKALLETLGNKGY |
| | RASAKKAQICLQEVTYLGYSLKDGQRWLTKARKEAILSIPVPKNSRQVREFLGTAGYCRLWI |
| | PGFAELAAPLYPLTRPGTLFQWGTEQQLAFEDIKKALLSSPALGLPDITKPFELFIDENSGFAK |
| | GVLVQKLGPWKRPVAYLSKKLDTVASGWPPCLRMVAAIAILVKDAGKLTLGQPLTILTSHPV |
| | EALVRQPPNKWLSNARMTHYQAMLLDAERVHFGPTVSLNPATLLPLPSGGNHHDCLQILAE |
| | THGTRPDLTDQPLPDADLTWYTDGSSFIRNGEREAGAAVTTESEVIWAAPLPPGTSAQRAELI |
| | ALTQALKMAEGKKLTVYTDSRYAFATTHVHGEIYRRRGWLTSEGKEIKNKNEILALLEALFL |
| | PKRLSIIHCPGHQKGDSPQAKGNRLADDTAKKAATETHSSLTVLP (SEQ ID NO: 18123) |
| FLV_ | TLQLEEEYRLFEPESTQKQEMDIWLKNFPQAWAETGGMGTAHCQAPVLIQLKATATPISIRQY |
| P10273_ | PMPHEAYQGIKPHIRRMLDQGILKPCQSPWNTPLLPVKKPGTEDYRPVQDLREVNKRVEDIHP |
| 3mutA | TVPNPYNLLSTLPPSHPWYTVLDLKDAFFCLRLHSESQLLFAFEWRDPEIGLSGQLTWTRLPQ |
| | GFKNSPTLFNEALHSDLADFRVRYPALVLLQYVDDLLLAAATRTECLEGTKALLETLGNKGY |
| | RASAKKAQICLQEVTYLGYSLKDGQRWLTKARKEAILSIPVPKNSRQVREFLGKAGYCRLFIP |
| | GFAELAAPLYPLTRPGTLFQWGTEQQLAFEDIKKALLSSPALGLPDITKPFELFIDENSGFAKG |
| | VLVQKLGPWKRPVAYLSKKLDTVASGWPPCLRMVAAIAILVKDAGKLTLGQPLTILTSHPVE |
| | ALVRQPPNKWLSNARMTHYQAMLLDAERVHFGPTVSLNPATLLPLPSGGNHHDCLQILAET |
| | HGTRPDLTDQPLPDADLTWYTDGSSFIRNGEREAGAAVTTESEVIWAAPLPPGTSAQRAELIA |
| | LTQALKMAEGKKLTVYTDSRYAFATTHVHGEIYRRRGWLTSEGKEIKNKNEILALLEALFLP |
| | KRLSIIHCPGHQKGDSPQAKGNRLADDTAKKAATETHSSLTVLP (SEQ ID NO: 18124) |
| FOAMV_ | MNPLQLLQPLPAEIKGTKLLAHWNSGATITCIPESFLEDEQPIKKTLIKTIHGEKQQNVYYVTF |
| P14350 | KVKGRKVEAEVIASPYEYILLSPTDVPWLTQQPLQLTILVPLQEYQEKILSKTALPEDQKQQLK |
| | TLFVKYDNLWQHWENQVGHRKIRPHNIATGDYPPRPQKQYPINPKAKPSIQIVIDDLLKQGVL |
| | TPQNSTMNTPVYPVPKPDGRWRMVLDYREVNKTIPLTAAQNQHSAGILATIVRQKYKTTLDL |
| | ANGFWAHPITPESYWLTAFTWQGKQYCWTRLPQGFLNSPALFTADVVDLLKEIPNVQVYVD |
| | DIYLSHDDPKEHVQQLEKVFQILLQAGYVVSLKKSEIGQKTVEFLGFNITKEGRGLTDTFKTK |
| | LLNITPPKDLKQLQSILGLLNFARNFIPNFAELVQPLYNLIASAKGKYIEWSEENTKQLNMVIE |
| | ALNTASNLEERLPEQRLVIKVNTSPSAGYVRYYNETGKKPIMYLNYVFSKAELKFSMLEKLLT |
| | TMHKALIKAMDLAMGQEILVYSPIVSMTKIQKTPLPERKALPIWITWMTYLEDPRIQFHYDK |
| | TLPELKHIPDVYTSSQSPVKHPSQYEGVFYTDGSAIKSPDPTKSNNAGMGIVHATYKPEYQVL |
| | NQWSIPLGNHTAQMAEIAAVEFACKKALKIPGPVLVITDSFYVAESANKELPYWKSNGFVNN |
| | KKKPLKHISKWKSIAECLSMKPDITIQHEKGISLQIPVFILKGNALADKLATQGSYVVN (SEQ |
| | ID NO: 18125) |
| FOAMV_ | MNPLQLLQPLPAEIKGTKLLAHWNSGATITCIPESFLEDEQPIKKTLIKTIHGEKQQNVYYVTF |
| P14350_ | KVKGRKVEAEVIASPYEYILLSPTDVPWLTQQPLQLTILVPLQEYQEKILSKTALPEDQKQQLK |
| 2mut | TLFVKYDNLWQHWENQVGHRKIRPHNIATGDYPPRPQKQYPINPKAKPSIQIVIDDLLKQGVL |
| | TPQNSTMNTPVYPVPKPDGRWRMVLDYREVNKTIPLTAAQNQHSAGILATIVRQKYKTTLDL |
| | ANGFWAHPITPESYWLTAFTWQGKQYCWTRLPQGFLNSPALFNADVVDLLKEIPNVQVYVD |
| | DIYLSHDDPKEHVQQLEKVFQILLQAGYVVSLKKSEIGQKTVEFLGFNITKEGRGLTDTFKTK |
| | LLNITPPKDLKQLQSILGLLNFARNFIPNFAELVQPLYNLIAPAKGKYIEWSEENTKQLNMVIE |
| | ALNTASNLEERLPEQRLVIKVNTSPSAGYVRYYNETGKKPIMYLNYVFSKAELKFSMLEKLLT |
| | TMHKALIKAMDLAMGQEILVYSPIVSMTKIQKTPLPERKALPIRWITWMTYLEDPRIQFHYDK |
| | TLPELKHIPDVYTSSQSPVKHPSQYEGVFYTDGSAIKSPDPTKSNNAGMGIVHATYKPEYQVL |
| | NQWSIPLGNHTAQMAEIAAVEFACKKALKIPGPVLVITDSFYVAESANKELPYWKSNGFVNN |
| | KKKPLKHISKWKSIAECLSMKPDITIQHEKGISLQIPVFILKGNALADKLATQGSYVVN (SEQ |
| | ID NO: 18126) |
| FOAMV_ | MNPLQLLQPLPAEIKGTKLLAHWNSGATITCIPESFLEDEQPIKKTLIKTIHGEKQQNVYYVTF |
| P14350_ | KVKGRKVEAEVIASPYEYILLSPTDVPWLTQQPLQLTILVPLQEYQEKILSKTALPEDQKQQLK |
| 2mutA | TLFVKYDNLWQHWENQVGHRKIRPHNIATGDYPPRPQKQYPINPKAKPSIQIVIDDLLKQGVL |
| | TPQNSTMNTPVYPVPKPDGRWRMVLDYREVNKTIPLTAAQNQHSAGILATIVRQKYKTTLDL |
| | ANGFWAHPITPESYWLTAFTWQGKQYCWTRLPQGFLNSPALFNADVVDLLKEIPNVQVYVD |
| | DIYLSHDDPKEHVQQLEKVFQILLQAGYVVSLKKSEIGQKTVEFLGFNITKEGRGLTDTFKTK |
| | LLNITPPKDLKQLQSILGKLNFARNFIPNFAELVQPLYNLIAPAKGKYIEWSEENTKQLNMVIE |
| | ALNTASNLEERLPEQRLVIKVNTSPSAGYVRYYNETGKKPIMYLNYVFSKAELKFSMLEKLLT |
| | TMHKALIKAMDLAMGQEILVYSPIVSMTKIQKTPLPERKALPIRWITWMTYLEDPRIQFHYDK |
| | TLPELKHIPDVYTSSQSPVKHPSQYEGVFYTDGSAIKSPDPTKSNNAGMGIVHATYKPEYQVL |
| | NQWSIPLGNHTAQMAEIAAVEFACKKALKIPGPVLVITDSFYVAESANKELPYWKSNGFVNN |
| | KKKPLKHISKWKSIAECLSMKPDITIQHEKGISLQIPVFILKGNALADKLATQGSYVVN (SEQ |
| | ID NO: 18127) |
| FOAMV_ | VPWLTQQPLQLTILVPLQEYQEKILSKTALPEDQKQQLKTLFVKYDNLWQHWENQVGHRKI |
| P14350- | RPHNIATGDYPPRPQKQYPINPKAKPSIQIVIDDLLKQGVLTPQNSTMNTPVYPVPKPDGRWR |
| Pro | MVLDYREVNKTIPLTAAQNQHSAGILATIVRQKYKTTLDLANGFWAHPITPESYWLTAFTWQ |
| | GKQYCWTRLPQGFLNSPALFTADVVDLLKEIPNVQVYVDDIYLSHDDPKEHVQQLEKVFQIL |
| | LQAGYVVSLKKSEIGQKTVEFLGFNITKEGRGLTDTFKTKLLNITPPKDLKQLQSILGLLNFAR |
| | NFIPNFAELVQPLYNLIASAKGKYIEWSEENTKQLNMVIEALNTASNLEERLPEQRLVIKVNTS |
| | PSAGYVRYYNETGKKPIMYLNYVFSKAELKFSMLEKLLTTMHKALIKAMDLAMGQEILVYS |
| | PIVSMTKIQKTPLPERKALPIRWITWMTYLEDPRIQFHYDKTLPELKHIPDVYTSSQSPVKHPS |
| | QYEGVFYTDGSAIKSPDPTKSNNAGMGIVHATYKPEYQVLNQWSIPLGNHTAQMAEIAAVEF |
| | ACKKALKIPGPVLVITDSFYVAESANKELPYWKSNGFVNNKKKPLKHISKWKSIAECLSMKP |
| | DITIQHEKGISLQIPVFILKGNALADKLATQGSYVVN (SEQ ID NO: 18128) |
| FOAMV_ | VPWLTQQPLQLTILVPLQEYQEKILSKTALPEDQKQQLKTLFVKYDNLWQHWENQVGHRKI |
| P14350- | RPHNIATGDYPPRPQKQYPINPKAKPSIQIVIDDLLKQGVLTPQNSTMNTPVYPVPKPDGRWR |
| Pro_2mut | MVLDYREVNKTIPLTAAQNQHSAGILATIVRQKYKTTLDLANGFWAHPITPESYWLTAFTWQ |
| | GKQYCWTRLPQGFLNSPALFNADVVDLLKEIPNVQVYVDDIYLSHDDPKEHVQQLEKVFQIL |
| | LQAGYVVSLKKSEIGQKTVEFLGFNITKEGRGLTDTFKTKLLNITPPKDLKQLQSILGLLNFAR |
| | NFIPNFAELVQPLYNLIAPAKGKYIEWSEENTKQLNMVIEALNTASNLEERLPEQRLVIKVNTS |
| | PSAGYVRYYNETGKKPIMYLNYVFSKAELKFSMLEKLLTTMHKALIKAMDLAMGQEILVYS |
| | PIVSMTKIQKTPLPERKALPIRWITWMTYLEDPRIQFHYDKTLPELKHIPDVYTSSQSPVKHPS |
| | QYEGVFYTDGSAIKSPDPTKSNNAGMGIVHATYKPEYQVLNQWSIPLGNHTAQMAEIAAVEF |
| | ACKKALKIPGPVLVITDSFYVAESANKELPYWKSNGFVNNKKKPLKHISKWKSIAECLSMKP |
| | DITIQHEKGISLQIPVFILKGNALADKLATQGSYVVN (SEQ ID NO: 18129) |
| FOAMV_ | VPWLTQQPLQLTILVPLQEYQEKILSKTALPEDQKQQLKTLFVKYDNLWQHWENQVGHRKI |
| P14350- | RPHNIATGDYPPRPQKQYPINPKAKPSIQIVIDDLLKQGVLTPQNSTMNTPVYPVPKPDGRWR |
| Pro_2mutA | MVLDYREVNKTIPLTAAQNQHSAGILATIVRQKYKTTLDLANGFWAHPITPESYWLTAFTWQ |
| | GKQYCWTRLPQGFLNSPALFNADVVDLLKEIPNVQVYVDDIYLSHDDPKEHVQQLEKVFQIL |
| | LQAGYVVSLKKSEIGQKTVEFLGFNITKEGRGLTDTFKTKLLNITPPKDLKQLQSILGKLNFAR |
| | NFIPNFAELVQPLYNLIAPAKGKYIEWSEENTKQLNMVIEALNTASNLEERLPEQRLVIKVNTS |
| | PSAGYVRYYNETGKKPIMYLNYVFSKAELKFSMLEKLLTTMHKALIKAMDLAMGQEILVYS |
| | PIVSMTKIQKTPLPERKALPIRWITWMTYLEDPRIQFHYDKTLPELKHIPDVYTSSQSPVKHPS |
| | QYEGVFYTDGSAIKSPDPTKSNNAGMGIVHATYKPEYQVLNQWSIPLGNHTAQMAEIAAVEF |
| | ACKKALKIPGPVLVITDSFYVAESANKELPYWKSNGFVNNKKKPLKHISKWKSIAECLSMKP |
| | DITIQHEKGISLQIPVFILKGNALADKLATQGSYVVN (SEQ ID NO: 18130) |
| GALV_ | VLNLEEEYRLHEKPVPSSIDPSWLQLFPTVWAERAGMGLANQVPPVVVELRSGASPVAVRQY |
| P21414 | PMSKEAREGIRPHIQKFLDLGVLVPCRSPWNTPLLPVKKPGTNDYRPVQDLREINKRVQDIHP |
| | TVPNPYNLLSSLPPSYTWYSVLDLKDAFFCLRLHPNSQPLFAFEWKDPEKGNTGQLTWTRLP |
| | QGFKNSPTLFDEALHRDLAPFRALNPQVVLLQYVDDLLVAAPTYEDCKKGTQKLLQELSKLG |
| | YRVSAKKAQLCQREVTYLGYLLKEGKRWLTPARKATVMKIPVPTTPRQVREFLGTAGFCRL |
| | WIPGFASLAAPLYPLTKESIPFIWTEEHQQAFDHIKKALLSAPALALPDLTKPFTLYIDERAGV |
| | ARGVLTQTLGPWRRPVAYLSKKLDPVASGWPTCLKAVAAVALLLKDADKLTLGQNVTVIAS |
| | HSLESIVRQPPDRWMTNARMTHYQSLLLNERVSFAPPAVLNPATLLPVESEATPVHRCSEILA |
| | EETGTRRDLEDQPLPGVPTWYTDGSSFITEGKRRAGAPIVDGKRTVWASSLPEGTSAQKAEL |
| | VALTQALRLAEGKNINIYTDSRYAFATAHIHGAIYKQRGLLTSAGKDIKNKEEILALLEAIHLP |
| | RRVAIIHCPGHQRGSNPVATGNRRADEAAKQAALSTRVLAGTTKP (SEQ ID NO: 18131) |
| GALV_ | VLNLEEEYRLHEKPVPSSIDPSWLQLFPTVWAERAGMGLANQVPPVVVELRSGASPVAVRQY |
| P21414_ | PMSKEAREGIRPHIQKFLDLGVLVPCRSPWNTPLLPVKKPGTNDYRPVQDLREINKRVQDIHP |
| 3mut | TVPNPYNLLSSLPPSYTWYSVLDLKDAFFCLRLHPNSQPLFAFEWKDPEKGNTGQLTWTRLP |
| | QGFKNSPTLFNEALHRDLAPFRALNPQVVLLQYVDDLLVAAPTYEDCKKGTQKLLQELSKLG |
| | YRVSAKKAQLCQREVTYLGYLLKEGKRWLTPARKATVMKIPVPTTPRQVREFLGTAGFCRL |
| | WIPGFASLAAPLYPLTKPSIPFIWTEEHQQAFDHIKKALLSAPALALPDLTKPFTLYIDERAGVA |
| | RGVLTQTLGPWRRPVAYLSKKLDPVASGWPTCLKAVAAVALLLKDADKLTLGQNVTVIASH |
| | SLESIVRQPPDRWMTNARMTHYQSLLLNERVSFAPPAVLNPATLLPVESEATPVHRCSEILAE |
| | ETGTRRDLEDQPLPGVPTWYTDGSSFITEGKRRAGAPIVDGKRTVWASSLPEGTSAQKAELV |
| | ALTQALRLAEGKNINIYTDSRYAFATAHIHGAIYKQRGWLTSAGKDIKNKEEILALLEAIHLPR |
| | RVAIIHCPGHQRGSNPVATGNRRADEAAKQAALSTRVLAGTTKP (SEQ ID NO: 18132) |
| GALV_ | VLNLEEEYRLHEKPVPSSIDPSWLQLFPTVWAERAGMGLANQVPPVVVELRSGASPVAVRQY |
| P21414_ | PMSKEAREGIRPHIQKFLDLGVLVPCRSPWNTPLLPVKKPGTNDYRPVQDLREINKRVQDIHP |
| 3mutA | TVPNPYNLLSSLPPSYTWYSVLDLKDAFFCLRLHPNSQPLFAFEWKDPEKGNTGQLTWTRLP |
| | QGFKNSPTLFNEALHRDLAPFRALNPQVVLLQYVDDLLVAAPTYEDCKKGTQKLLQELSKLG |
| | YRVSAKKAQLCQREVTYLGYLLKEGKRWLTPARKATVMKIPVPTTPRQVREFLGKAGFCRL |
| | FIPGFASLAAPLYPLTKPSIPFIWTEEHQQAFDHIKKALLSAPALALPDLTKPFTLYIDERAGVA |
| | RGVLTQTLGPWRRPVAYLSKKLDPVASGWPTCLKAVAAVALLLKDADKLTLGQNVTVIASH |
| | SLESIVRQPPDRWMTNARMTHYQSLLLNERVSFAPPAVLNPATLLPVESEATPVHRCSEILAE |
| | ETGTRRDLEDQPLPGVPTWYTDGSSFITEGKRRAGAPIVDGKRTVWASSLPEGTSAQKAELV |
| | ALTQALRLAEGKNINIYTDSRYAFATAHIHGAIYKQRGWLTSAGKDIKNKEEILALLEAIHLPR |
| | RVAIIHCPGHQRGSNPVATGNRRADEAAKQAALSTRVLAGTTKP (SEQ ID NO: 18133) |
| HTL1A_ | AVLGLEHLPRPPQISQFPLNPERLQALQHLVRKALEAGHIEPYTGPGNNPVFPVKKANGTWRF |
| P03362 | IHDLRATNSLTIDLSSSSPGPPDLSSLPTTLAHLQTIDLRDAFFQIPLPKQFQPYFAFTVPQQCNY |
| | GPGTRYAWKVLPQGFKNSPTLFEMQLAHILQPIRQAFPQCTILQYMDDILLASPSHEDLLLLSE |
| | ATMASLISHGLPVSENKTQQTPGTIKFLGQIISPNHLTYDAVPTVPIRSRWALPELQALLGEIQ |
| | WVSKGTPTLRQPLHSLYCALQRHTDPRDQIYLNPSQVQSLVQLRQALSQNCRSRLVQTLPLL |
| | GAIMLTLTGTTTVVFQSKEQWPLVWLHAPLPHTSQCPWGQLLASAVLLLDKYTLQSYGLLC |
| | QTIHHNISTQTFNQFIQTSDHPSVPILLHHSHRFKNLGAQTGELWNTFLKTAAPLAPVKALMP |
| | VFTLSPVIINTAPCLFSDGSTSRAAYILWDKQILSQRSFPLPPPHKSAQRAELLGLLHGLSSARS |
| | WRCLNIFLDSKYLYHYLRTLALGTFQGRSSQAPFQALLPRLLSRKVVYLHHVRSHTNLPDPIS |
| | RLNALTDALLITPVLQL (SEQ ID NO: 18134) |
| HTL1A_ | AVLGLEHLPRPPQISQFPLNPERLQALQHLVRKALEAGHIEPYTGPGNNPVFPVKKANGTWRF |
| P03362_ | IHDLRATNSLTIDLSSSSPGPPDLSSLPTTLAHLQTIDLRDAFFQIPLPKQFQPYFAFTVPQQCNY |
| 2mut | GPGTRYAWKVLPQGFKNSPTLFQMQLAHILQPIRQAFPQCTILQYMDDILLASPSHEDLLLLSE |
| | ATMASLISHGLPVSENKTQQTPGTIKFLGQIISPNHLTYDAVPTVPIRSRWALPELQALLGEIQ |
| | WVSKGTPTLRQPLHSLYCALQPHTDPRDQIYLNPSQVQSLVQLRQALSQNCRSRLVQTLPLL |
| | GAIMLTLTGTTTVVFQSKEQWPLVWLHAPLPHTSQCPWGQLLASAVLLLDKYTLQSYGLLC |
| | QTIHHNISTQTFNQFIQTSDHPSVPILLHHSHRFKNLGAQTGELWNTFLKTAAPLAPVKALMP |
| | VFTLSPVIINTAPCLFSDGSTSRAAYILWDKQILSQRSFPLPPPHKSAQRAELLGLLHGLSSARS |
| | WRCLNIFLDSKYLYHYLRTLALGTFQGRSSQAPFQALLPRLLSRKVVYLHHVRSHTNLPDPIS |
| | RLNALTDALLITPVLQL (SEQ ID NO: 18135) |
| HTL1A_ | AVLGLEHLPRPPQISQFPLNPERLQALQHLVRKALEAGHIEPYTGPGNNPVFPVKKANGTWRF |
| P03362_ | IHDLRATNSLTIDLSSSSPGPPDLSSPPTTLAHLQTIDLRDAFFQIPLPKQFQPYFAFTVPQQCNY |
| 2mutB | GPGTRYAWKVLPQGFKNSPTLFQMQLAHILQPIRQAFPQCTILQYMDDILLASPSHEDLLLLSE |
| | ATMASLISHGLPVSENKTQQTPGTIKFLGQIISPNHLTYDAVPTVPIRSRWALPELQALLGEIQ |
| | WVSKGTPTLRQPLHSLYCALQPHTDPRDQIYLNPSQVQSLVQLRQALSQNCRSRLVQTLPLL |
| | GAIMLTLTGTTTVVFQSKEQWPLVWLHAPLPHTSQCPWGQLLASAVLLLDKYTLQSYGLLC |
| | QTIHHNISTQTFNQFIQTSDHPSVPILLHHSHRFKNLGAQTGELWNTFLKTAAPLAPVKALMP |
| | VFTLSPVIINTAPCLFSDGSTSRAAYILWDKQILSQRSFPLPPPHKSAQRAELLGLLHGLSSARS |
| | WRCLNIFLDSKYLYHYLRTLALGTFQGRSSQAPFQALLPRLLSRKVVYLHHVRSHTNLPDPIS |
| | RLNALTDALLITPVLQL (SEQ ID NO: 18136) |
| HTL1C_ | AVLGLEHLPRPPEISQFPLNPERLQALQHLVRKALEAGHIEPYTGPGNNPVFPVKKANGTWRF |
| P14078 | IHDLRATNSLTIDLSSSSPGPPDLSSLPTTLAHLQTIDLKDAFFQIPLPKQFQPYFAFTVPQQCNY |
| | GPGTRYAWRVLPQGFKNSPTLFEMQLAHILQPIRQAFPQCTILQYMDDILLASPSHADLQLLS |
| | EATMASLISHGLPVSENKTQQTPGTIKFLGQIISPNHLTYDAVPKVPIRSRWALPELQALLGEIQ |
| | WVSKGTPTLRQPLHSLYCALQRHTDPRDQIYLNPSQVQSLVQLRQALSQNCRSRLVQTLPLL |
| | GAIMLTLTGTTTVVFQSKQQWPLVWLHAPLPHTSQCPWGQLLASAVLLLDKYTLQSYGLLC |
| | QTIHHNISTQTFNQFIQTSDHPSVPILLHHSHRFKNLGAQTGELWNTFLKTTAPLAPVKALMPV |
| | FTLSPVIINTAPCLFSDGSTSQAAYILWDKHILSQRSFPLPPPHKSAQRAELLGLLHGLSSARSW |
| | RCLNIFLDSKYLYHYLRTLALGTFQGRSSQAPFQALLPRLLSRKVVYLHHVRSHTNLPDPISRL |
| | NALTDALLITPVLQL (SEQ ID NO: 18137) |
| HTL1C_ | AVLGLEHLPRPPEISQFPLNPERLQALQHLVRKALEAGHIEPYTGPGNNPVFPVKKANGTWRF |
| P14078_ | IHDLRATNSLTIDLSSSSPGPPDLSSLPTTLAHLQTIDLKDAFFQIPLPKQFQPYFAFTVPQQCNY |
| 2mut | GPGTRYAWRVLPQGFKNSPTLFQMQLAHILQPIRQAFPQCTILQYMDDILLASPSHADLQLLS |
| | EATMASLISHGLPVSENKTQQTPGTIKFLGQIISPNHLTYDAVPKVPIRSRWALPELQALLGEIQ |
| | WVSKGTPTLRQPLHSLYCALQPHTDPRDQIYLNPSQVQSLVQLRQALSQNCRSRLVQTLPLL |
| | GAIMLTLTGTTTVVFQSKQQWPLVWLHAPLPHTSQCPWGQLLASAVLLLDKYTLQSYGLLC |
| | QTIHHNISTQTFNQFIQTSDHPSVPILLHHSHRFKNLGAQTGELWNTFLKTTAPLAPVKALMPV |
| | FTLSPVIINTAPCLFSDGSTSQAAYILWDKHILSQRSFPLPPPHKSAQRAELLGLLHGLSSARSW |
| | RCLNIFLDSKYLYHYLRTLALGTFQGRSSQAPFQALLPRLLSRKVVYLHHVRSHTNLPDPISRL |
| | NALTDALLITPVLQL (SEQ ID NO: 18138) |
| HTL1L_ | GLEHLPRPPEISQFPLNPERLQALQHLVRKALEAGHIEPYTGPGNNPVFPVKKANGTWRFIHD |
| P0C211 | LRATNSLTVDLSSSSPGPPDLSSLPTTLAHLQTIDLKDAFFQIPLPKQFQPYFAFTVPQQCNYGP |
| | GTRYAWKVLPQGFKNSPTLFEMQLASILQPIRQAFPQCVILQYMDDILLASPSPEDLQQLSEAT |
| | MASLISHGLPVSQDKTQQTPGTIKFLGQIISPNHITYDAVPTVPIRSRWALPELQALLGEIQWVS |
| | KGTPTLRQPLHSLYCALQGHTDPRDQIYLNPSQVQSLMQLQQALSQNCRSRLAQTLPLLGAI |
| | MLTLTGTTTVVFQSKQQWPLVWLHAPLPHTSQCPWGQLLASAVLLLDKYTLQSYGLLCQTI |
| | HHNISIQTFNQFIQTSDHPSVPILLHHSHRFKNLGAQTGELWNTFLKTAAPLAPVKALTPVFTL |
| | SPIIINTAPCLFSDGSTSQAAYILWDKHILSQRSFPLPPPHKSAQQAELLGLLHGLSSARSWHCL |
| | NIFLDSKYLYHYLRTLALGTFQGKSSQAPFQALLPRLLAHKVIYLHHVRSHTNLPDPISKLNAL |
| | TDALLITPIL (SEQ ID NO: 18139) |
| HTL1L_ | GLEHLPRPPEISQFPLNPERLQALQHLVRKALEAGHIEPYTGPGNNPVFPVKKANGTWRFIHD |
| P0C211_ | LRATNSLTVDLSSSSPGPPDLSSLPTTLAHLQTIDLKDAFFQIPLPKQFQPYFAFTVPQQCNYGP |
| 2mut | GTRYAWKVLPQGFKNSPTLFQMQLASILQPIRQAFPQCVILQYMDDILLASPSPEDLQQLSEA |
| | TMASLISHGLPVSQDKTQQTPGTIKFLGQIISPNHITYDAVPTVPIRSRWALPELQALLGEIQWV |
| | SKGTPTLRQPLHSLYCALQGHTDPRDQIYLNPSQVQSLMQLQQALSQNCRSRLAQTLPLLGAI |
| | MLTLTGTTTVVFQSKQQWPLVWLHAPLPHTSQCPWGQLLASAVLLLDKYTLQSYGLLCQTI |
| | HHNISIQTFNQFIQTSDHPSVPILLHHSHRFKNLGAQTGELWNTFLKTAAPLAPVKALTPVFTL |
| | SPIIINTAPCLFSDGSTSQAAYILWDKHILSQRSFPLPPPHKSAQQAELLGLLHGLSSARSWHCL |
| | NIFLDSKYLYHYLRTLAWGTFQGKSSQAPFQALLPRLLAHKVIYLHHVRSHTNLPDPISKLNA |
| | LTDALLITPIL (SEQ ID NO: 18140) |
| HTL1L_ | GLEHLPRPPEISQFPLNPERLQALQHLVRKALEAGHIEPYTGPGNNPVFPVKKANGTWRFIHD |
| P0C211_ | LRATNSLTVDLSSSSPGPPDLSSPPTTLAHLQTIDLKDAFFQIPLPKQFQPYFAFTVPQQCNYGP |
| 2mutB | GTRYAWKVLPQGFKNSPTLFQMQLASILQPIRQAFPQCVILQYMDDILLASPSPEDLQQLSEA |
| | TMASLISHGLPVSQDKTQQTPGTIKFLGQIISPNHITYDAVPTVPIRSRWALPELQALLGEIQWV |
| | SKGTPTLRQPLHSLYCALQGHTDPRDQIYLNPSQVQSLMQLQQALSQNCRSRLAQTLPLLGAI |
| | MLTLTGTTTVVFQSKQQWPLVWLHAPLPHTSQCPWGQLLASAVLLLDKYTLQSYGLLCQTI |
| | HHNISIQTFNQFIQTSDHPSVPILLHHSHRFKNLGAQTGELWNTFLKTAAPLAPVKALTPVFTL |
| | SPIIINTAPCLFSDGSTSQAAYILWDKHILSQRSFPLPPPHKSAQQAELLGLLHGLSSARSWHCL |
| | NIFLDSKYLYHYLRTLAWGTFQGKSSQAPFQALLPRLLAHKVIYLHHVRSHTNLPDPISKLNA |
| | LTDALLITPIL (SEQ ID NO: 18141) |
| HTL32_ | GLEHLPPPPEVSQFPLNPERLQALTDLVSRALEAKHIEPYQGPGNNPIFPVKKPNGKWRFIHDL |
| Q0R5R2 | RATNSVTRDLASPSPGPPDLTSLPQGLPHLRTIDLTDAFFQIPLPTIFQPYFAFTLPQPNNYGPGT |
| | RYSWRVLPQGFKNSPTLFEQQLSHILTPVRKTFPNSLIIQYMDDILLASPAPGELAALTDKVTN |
| | ALTKEGLPLSPEKTQATPGPIHFLGQVISQDCITYETLPSINVKSTWSLAELQSMLGELQWVSK |
| | GTPVLRSSLHQLYLALRGHRDPRDTIKLTSIQVQALRTIQKALTLNCRSRLVNQLPILALIMLR |
| | PTGTTAVLFQTKQKWPLVWLHTPHPATSLRPWGQLLANAVIILDKYSLQHYGQVCKSFHHNI |
| | SNQALTYYLHTSDQSSVAILLQHSHRFHNLGAQPSGPWRSLLQMPQIFQNIDVLRPPFTISPVV |
| | INHAPCLFSDGSASKAAFIIWDRQVIHQQVLSLPSTCSAQAGELFGLLAGLQKSQPWVALNIFL |
| | DSKFLIGHLRRMALGAFPGPSTQCELHTQLLPLLQGKTVYVHHVRSHTLLQDPISRLNEATDA |
| | LMLAPLLPL (SEQ ID NO: 18142) |
| HTL32_ | GLEHLPPPPEVSQFPLNPERLQALTDLVSRALEAKHIEPYQGPGNNPIFPVKKPNGKWRFIHDL |
| Q0R5R2_ | RATNSVTRDLASPSPGPPDLTSLPQGLPHLRTIDLTDAFFQIPLPTIFQPYFAFTLPQPNNYGPGT |
| 2mut | RYSWRVLPQGFKNSPTLFQQQLSHILTPVRKTFPNSLIIQYMDDILLASPAPGELAALTDKVTN |
| | ALTKEGLPLSPEKTQATPGPIHFLGQVISQDCITYETLPSINVKSTWSLAELQSMLGELQWVSK |
| | GTPVLRSSLHQLYLALRGHRDPRDTIKLTSIQVQALRTIQKALTLNCRSRLVNQLPILALIMLR |
| | PTGTTAVLFQTKQKWPLVWLHTPHPATSLRPWGQLLANAVIILDKYSLQHYGQVCKSFHHNI |
| | SNQALTYYLHTSDQSSVAILLQHSHRFHNLGAQPSGPWRSLLQMPQIFQNIDVLRPPFTISPVV |
| | INHAPCLFSDGSASKAAFIIWDRQVIHQQVLSLPSTCSAQAGELFGLLAGLQKSQPWVALNIFL |
| | DSKFLIGHLRRMAWGAFPGPSTQCELHTQLLPLLQGKTVYVHHVRSHTLLQDPISRLNEATD |
| | ALMLAPLLPL (SEQ ID NO: 18143) |
| HTL32_ | GLEHLPPPPEVSQFPLNPERLQALTDLVSRALEAKHIEPYQGPGNNPIFPVKKPNGKWRFIHDL |
| Q0R5R2_ | RATNSVTRDLASPSPGPPDLTSPPQGLPHLRTIDLTDAFFQIPLPTIFQPYFAFTLPQPNNYGPGT |
| 2mutB | RYSWRVLPQGFKNSPTLFQQQLSHILTPVRKTFPNSLIIQYMDDILLASPAPGELAALTDKVTN |
| | ALTKEGLPLSPEKTQATPGPIHFLGQVISQDCITYETLPSINVKSTWSLAELQSMLGELQWVSK |
| | GTPVLRSSLHQLYLALRGHRDPRDTIKLTSIQVQALRTIQKALTLNCRSRLVNQLPILALIMLR |
| | PTGTTAVLFQTKQKWPLVWLHTPHPATSLRPWGQLLANAVIILDKYSLQHYGQVCKSFHHNI |
| | SNQALTYYLHTSDQSSVAILLQHSHRFHNLGAQPSGPWRSLLQMPQIFQNIDVLRPPFTISPVV |
| | INHAPCLFSDGSASKAAFIIWDRQVIHQQVLSLPSTCSAQAGELFGLLAGLQKSQPWVALNIFL |
| | DSKFLIGHLRRMAWGAFPGPSTQCELHTQLLPLLQGKTVYVHHVRSHTLLQDPISRLNEATD |
| | ALMLAPLLPL (SEQ ID NO: 18144) |
| HTL3P_ | GLEHLPPPPEVSQFPLNPERLQALTDLVSRALEAKHIEPYQGPGNNPIFPVKKPNGKWRFIHDL |
| Q4U0X6 | RATNSLTRDLASPSPGPPDLTSLPQDLPHLRTIDLTDAFFQIPLPAVFQPYFAFTLPQPNNHGPG |
| | TRYSWRVLPQGFKNSPTLFEQQLSHILAPVRKAFPNSLIIQYMDDILLASPALRELTALTDKVT |
| | NALTKEGLPMSLEKTQATPGSIHFLGQVISPDCITYETLPSIHVKSIWSLAELQSMLGELQWVS |
| | KGTPVLRSSLHQLYLALRGHRDPRDTIELTSTQVQALKTIQKALALNCRSRLVSQLPILALIILR |
| | PTGTTAVLFQTKQKWPLVWLHTPHPATSLRPWGQLLANAIITLDKYSLQHYGQICKSFHHNIS |
| | NQALTYYLHTSDQSSVAILLQHSHRFHNLGAQPSGPWRSLLQVPQIFQNIDVLRPPFIISPVVID |
| | HAPCLFSDGATSKAAFILWDKQVIHQQVLPLPSTCSAQAGELFGLLAGLQKSKPWPALNIFLD |
| | SKFLIGHLRRMALGAFLGPSTQCDLHARLFPLLQGKTVYVHHVRSHTLLQDPISRLNEATDAL |
| | MLAPLLPL (SEQ ID NO: 18145) |
| HTL3P_ | GLEHLPPPPEVSQFPLNPERLQALTDLVSRALEAKHIEPYQGPGNNPIFPVKKPNGKWRFIHDL |
| Q4U0X6_ | RATNSLTRDLASPSPGPPDLTSLPQDLPHLRTIDLTDAFFQIPLPAVFQPYFAFTLPQPNNHGPG |
| 2mut | TRYSWRVLPQGFKNSPTLFQQQLSHILAPVRKAFPNSLIIQYMDDILLASPALRELTALTDKVT |
| | NALTKEGLPMSLEKTQATPGSIHFLGQVISPDCITYETLPSIHVKSIWSLAELQSMLGELQWVS |
| | KGTPVLRSSLHQLYLALRGHRDPRDTIELTSTQVQALKTIQKALALNCRSRLVSQLPILALIILR |
| | PTGTTAVLFQTKQKWPLVWLHTPHPATSLRPWGQLLANAIITLDKYSLQHYGQICKSFHHNIS |
| | NQALTYYLHTSDQSSVAILLQHSHRFHNLGAQPSGPWRSLLQVPQIFQNIDVLRPPFIISPVVID |
| | HAPCLFSDGATSKAAFILWDKQVIHQQVLPLPSTCSAQAGELFGLLAGLQKSKPWPALNIFLD |
| | SKFLIGHLRRMAWGAFLGPSTQCDLHARLFPLLQGKTVYVHHVRSHTLLQDPISRLNEATDA |
| | LMLAPLLPL (SEQ ID NO: 18146) |
| HTL3P_ | GLEHLPPPPEVSQFPLNPERLQALTDLVSRALEAKHIEPYQGPGNNPIFPVKKPNGKWRFIHDL |
| Q4U0X6_ | RATNSLTRDLASPSPGPPDLTSPPQDLPHLRTIDLTDAFFQIPLPAVFQPYFAFTLPQPNNHGPG |
| 2mutB | TRYSWRVLPQGFKNSPTLFQQQLSHILAPVRKAFPNSLIIQYMDDILLASPALRELTALTDKVT |
| | NALTKEGLPMSLEKTQATPGSIHFLGQVISPDCITYETLPSIHVKSIWSLAELQSMLGELQWVS |
| | KGTPVLRSSLHQLYLALRGHRDPRDTIELTSTQVQALKTIQKALALNCRSRLVSQLPILALIILR |
| | PTGTTAVLFQTKQKWPLVWLHTPHPATSLRPWGQLLANAIITLDKYSLQHYGQICKSFHHNIS |
| | NQALTYYLHTSDQSSVAILLQHSHRFHNLGAQPSGPWRSLLQVPQIFQNIDVLRPPFIISPVVID |
| | HAPCLFSDGATSKAAFILWDKQVIHQQVLPLPSTCSAQAGELFGLLAGLQKSKPWPALNIFLD |
| | SKFLIGHLRRMAWGAFLGPSTQCDLHARLFPLLQGKTVYVHHVRSHTLLQDPISRLNEATDA |
| | LMLAPLLPL (SEQ ID NO: 18147) |
| HTLV2_ | HLPPPPQVDQFPLNLPERLQALNDLVSKALEAGHIEPYSGPGNNPVFPVKKPNGKWRFIHDLR |
| P03363_ | ATNAITTTLTSPSPGPPDLTSLPTALPHLQTIDLTDAFFQIPLPKQYQPYFAFTIPQPCNYGPGTR |
| 2mut | YAWTVLPQGFKNSPTLFQQQLAAVLNPMRKMFPTSTIVQYMDDILLASPTNEELQQLSQLTL |
| | QALTTHGLPISQEKTQQTPGQIRFLGQVISPNHITYESTPTIPIKSQWTLTELQVILGEIQWVSKG |
| | TPILRKHLQSLYSALHPYRDPRACITLTPQQLHALHAIQQALQHNCRGRLNPALPLLGLISLST |
| | SGTTSVIFQPKQNWPLAWLHTPHPPTSLCPWGHLLACTILTLDKYTLQHYGQLCQSFHHNMS |
| | KQALCDFLRNSPHPSVGILIHHMGRFHNLGSQPSGPWKTLLHLPTLLQEPRLLRPIFTLSPVVL |
| | DTAPCLFSDGSPQKAAYVLWDQTILQQDITPLPSHETHSAQKGELLALICGLRAAKPWPSLNIF |
| | LDSKYLIKYLHSLAIGAFLGTSAHQTLQAALPPLLQGKTIYLHHVRSHTNLPDPISTFNEYTDS |
| | LILAPLVPL (SEQ ID NO: 18148) |
| JSRV_ | PLGTSDSPVTHADPIDWKSEEPVWVDQWPLTQEKLSAAQQLVQEQLRLGHIEPSTSAWNSPIF |
| P31623 | VIKKKSGKWRLLQDLRKVNETMMHMGALQPGLPTPSAIPDKSYIIVIDLKDCFYTIPLAPQDC |
| | KRFAFSLPSVNFKEPMQRYQWRVLPQGMTNSPTLCQKFVATAIAPVRQRFPQLYLVHYMDDI |
| | LLAHTDEHLLYQAFSILKQHLSLNGLVIADEKIQTHFPYNYLGFSLYPRVYNTQLVKLQTDHL |
| | KTLNDFQKLLGDINWIRPYLKLPTYTLQPLFDILKGDSDPASPRTLSLEGRTALQSIEEAIRQQQ |
| | ITYCDYQRSWGLYILPTPRAPTGVLYQDKPLRWIYLSATPTKHLLPYYELVAKIIAKGRHEAIQ |
| | YFGMEPPFICVPYALEQQDWLFQFSDNWSIAFANYPGQITHHYPSDKLLQFASSHAFIFPKIVR |
| | RQPIPEATLIFTDGSSNGTAALIINHQTYYAQTSFSSAQVVELFAVHQALLTVPTSFNLFTDSSY |
| | VVGALQMIETVPIIGTTSPEVLNLFTLIQQVLHCRQHPCFFGHIRAHSTLPGALVQGNHTADVL |
| | TKQVFFQS (SEQ ID NO: 18149) |
| JSRV_ | PLGTSDSPVTHADPIDWKSEEPVWVDQWPLTQEKLSAAQQLVQEQLRLGHIEPSTSAWNSPIF |
| P31623_ | VIKKKSGKWRLLQDLRKVNETMMHMGALQPGLPTPSPIPDKSYIIVIDLKDCFYTIPLAPQDC |
| 2mutB | KRFAFSLPSVNFKEPMQRYQWRVLPQGMTNSPTLCQKFVATAIAPVRQRFPQLYLVHYMDDI |
| | LLAHTDEHLLYQAFSILKQHLSLNGLVIADEKIQTHFPYNYLGFSLYPRVYNTQLVKLQTDHL |
| | KTLNDFQKLLGDINWIRPYLKLPTYTLQPLFDILKGDSDPASPRTLSLEGRTALQSIEEAIRQQQ |
| | ITYCDYQRSWGLYILPTPRAPTGVLYQDKPLRWIYLSATPTKHLLPYYELVAKIIAKGRHEAIQ |
| | YFGMEPPFICVPYALEQQDWLFQFSDNWSIAFANYPGQITHHYPSDKLLQFASSHAFIFPKIVR |
| | RQPIPEATLIFTDGSSNGTAALIINHQTYYAQTSFSSAQVVELFAVHQALLTVPTSFNLFTDSSY |
| | VVGALQMIETVPIIGTTSPEVLNLFTLIQQVLHCRQHPCFFGHIRAHSTLPGALVQGNHTADVL |
| | TKQVFFQS (SEQ ID NO: 18150) |
| KORV_ | TLGDQGSRGSDPLPEPRVTLTVEGIPTEFLVNTGAEHSVLTKPMGKMGSKRTVVAGATGSKV |
| Q9TTC1 | YPWTTKRLLKIGQKQVTHSFLVIPECPAPLLGRDLLTKLKAQIQFSTEGPQVTWEDRPAMCLV |
| | LNLEEEYRLHEKPVPPSIDPSWLQLFPMVWAEKAGMGLANQVPPVVVELKSDASPVAVRQY |
| | PMSKEAREGIRPHIQRFLDLGILVPCQSPWNTPLLPVKKPGTNDYRPVQDLREVNKRVQDIHP |
| | TVPNPYNLLSSLPPSHTWYSVLDLKDAFFCLKLHPNSQPLFAFEWRDPEKGNTGQLTWTRLP |
| | QGFKNSPTLFDEALHRDLASFRALNPQVVMLQYVDDLLVAAPTYRDCKEGTRRLLQELSKL |
| | GYRVSAKKAQLCREEVTYLGYLLKGGKRWLTPARKATVMKIPTPTTPRQVREFLGTAGFCR |
| | LWIPGFASLAAPLYPLTREKVPFTWTEAHQEAFGRIKEALLSAPALALPDLTKPFALYVDEKE |
| | GVARGVLTQTLGPWRRPVAYLSKKLDPVASGWPTCLKAIAAVALLLKDADKLTLGQNVLVI |
| | APHNLESIVRQPPDRWMTNARMTHYQSLLLNERVSFAPPAILNPATLLPVESDDTPIHICSEIL |
| | AEETGTRPDLRDQPLPGVPAWYTDGSSFIMDGRRQAGAAIVDNKRTVWASNLPEGTSAQKA |
| | ELIALTQALRLAEGKSINIYTDSRYAFATAHVHGAIYKQRGLLTSAGKDIKNKEEILALLEAIH |
| | LPKRVAIIHCPGHQRGTDPVATGNRKADEAAKQAAQSTRILTETTKN (SEQ ID NO: 18151) |
| KORV_ | TLGDQGSRGSDPLPEPRVTLTVEGIPTEFLVNTGAEHSVLTKPMGKMGSKRTVVAGATGSKV |
| Q9TTC1_ | YPWTTKRLLKIGQKQVTHSFLVIPECPAPLLGRDLLTKLKAQIQFSTEGPQVTWEDRPAMCLV |
| 3mut | LNLEEEYRLHEKPVPPSIDPSWLQLFPMVWAEKAGMGLANQVPPVVVELKSDASPVAVRQY |
| | PMSKEAREGIRPHIQRFLDLGILVPCQSPWNTPLLPVKKPGTNDYRPVQDLREVNKRVQDIHP |
| | TVPNPYNLLSSLPPSHTWYSVLDLKDAFFCLKLHPNSQPLFAFEWRDPEKGNTGQLTWTRLP |
| | QGFKNSPTLFNEALHRDLASFRALNPQVVMLQYVDDLLVAAPTYRDCKEGTRRLLQELSKL |
| | GYRVSAKKAQLCREEVTYLGYLLKGGKRWLTPARKATVMKIPTPTTPRQVREFLGTAGFCR |
| | LWIPGFASLAAPLYPLTRPKVPFTWTEAHQEAFGRIKEALLSAPALALPDLTKPFALYVDEKE |
| | GVARGVLTQTLGPWRRPVAYLSKKLDPVASGWPTCLKAIAAVALLLKDADKLTLGQNVLVI |
| | APHNLESIVRQPPDRWMTNARMTHYQSLLLNERVSFAPPAILNPATLLPVESDDTPIHICSEIL |
| | AEETGTRPDLRDQPLPGVPAWYTDGSSFIMDGRRQAGAAIVDNKRTVWASNLPEGTSAQKA |
| | ELIALTQALRLAEGKSINIYTDSRYAFATAHVHGAIYKQRGWLTSAGKDIKNKEEILALLEAIH |
| | LPKRVAIIHCPGHQRGTDPVATGNRKADEAAKQAAQSTRILTETTKN (SEQ ID NO: 18152) |
| KORV_ | TLGDQGSRGSDPLPEPRVTLTVEGIPTEFLVNTGAEHSVLTKPMGKMGSKRTVVAGATGSKV |
| Q9TTC1_ | YPWTTKRLLKIGQKQVTHSFLVIPECPAPLLGRDLLTKLKAQIQFSTEGPQVTWEDRPAMCLV |
| 3mutA | LNLEEEYRLHEKPVPPSIDPSWLQLFPMVWAEKAGMGLANQVPPVVVELKSDASPVAVRQY |
| | PMSKEAREGIRPHIQRFLDLGILVPCQSPWNTPLLPVKKPGTNDYRPVQDLREVNKRVQDIHP |
| | TVPNPYNLLSSLPPSHTWYSVLDLKDAFFCLKLHPNSQPLFAFEWRDPEKGNTGQLTWTRLP |
| | QGFKNSPTLFNEALHRDLASFRALNPQVVMLQYVDDLLVAAPTYRDCKEGTRRLLQELSKL |
| | GYRVSAKKAQLCREEVTYLGYLLKGGKRWLTPARKATVMKIPTPTTPRQVREFLGKAGFCR |
| | LFIPGFASLAAPLYPLTRPKVPFTWTEAHQEAFGRIKEALLSAPALALPDLTKPFALYVDEKEG |
| | VARGVLTQTLGPWRRPVAYLSKKLDPVASGWPTCLKAIAAVALLLKDADKLTLGQNVLVIA |
| | PHNLESIVRQPPDRWMTNARMTHYQSLLLNERVSFAPPAILNPATLLPVESDDTPIHICSEILAE |
| | ETGTRPDLRDQPLPGVPAWYTDGSSFIMDGRRQAGAAIVDNKRTVWASNLPEGTSAQKAELI |
| | ALTQALRLAEGKSINIYTDSRYAFATAHVHGAIYKQRGWLTSAGKDIKNKEEILALLEAIHLP |
| | KRVAIIHCPGHQRGTDPVATGNRKADEAAKQAAQSTRILTETTKN (SEQ ID NO: 18153) |
| KORV_ | LLGRDLLTKLKAQIQFSTEGPQVTWEDRPAMCLVLNLEEEYRLHEKPVPPSIDPSWLQLFPMV |
| Q9TTC1- | WAEKAGMGLANQVPPVVVELKSDASPVAVRQYPMSKEAREGIRPHIQRFLDLGILVPCQSPW |
| Pro | NTPLLPVKKPGTNDYRPVQDLREVNKRVQDIHPTVPNPYNLLSSLPPSHTWYSVLDLKDAFF |
| | CLKLHPNSQPLFAFEWRDPEKGNTGQLTWTRLPQGFKNSPTLFDEALHRDLASFRALNPQVV |
| | MLQYVDDLLVAAPTYRDCKEGTRRLLQELSKLGYRVSAKKAQLCREEVTYLGYLLKGGKR |
| | WLTPARKATVMKIPTPTTPRQVREFLGTAGFCRLWIPGFASLAAPLYPLTREKVPFTWTEAHQ |
| | EAFGRIKEALLSAPALALPDLTKPFALYVDEKEGVARGVLTQTLGPWRRPVAYLSKKLDPVA |
| | SGWPTCLKAIAAVALLLKDADKLTLGQNVLVIAPHNLESIVRQPPDRWMTNARMTHYQSLL |
| | LNERVSFAPPAILNPATLLPVESDDTPIHICSEILAEETGTRPDLRDQPLPGVPAWYTDGSSFIM |
| | DGRRQAGAAIVDNKRTVWASNLPEGTSAQKAELIALTQALRLAEGKSINIYTDSRYAFATAH |
| | VHGAIYKQRGLLTSAGKDIKNKEEILALLEAIHLPKRVAIIHCPGHQRGTDPVATGNRKADEA |
| | AKQAAQSTRILTETTKN (SEQ ID NO: 18154) |
| KORV_ | LLGRDLLTKLKAQIQFSTEGPQVTWEDRPAMCLVLNLEEEYRLHEKPVPPSIDPSWLQLFPMV |
| Q9TTC1- | WAEKAGMGLANQVPPVVVELKSDASPVAVRQYPMSKEAREGIRPHIQRFLDLGILVPCQSPW |
| Pro_3mut | NTPLLPVKKPGTNDYRPVQDLREVNKRVQDIHPTVPNPYNLLSSLPPSHTWYSVLDLKDAFF |
| | CLKLHPNSQPLFAFEWRDPEKGNTGQLTWTRLPQGFKNSPTLFNEALHRDLASFRALNPQVV |
| | MLQYVDDLLVAAPTYRDCKEGTRRLLQELSKLGYRVSAKKAQLCREEVTYLGYLLKGGKR |
| | WLTPARKATVMKIPTPTTPRQVREFLGTAGFCRLWIPGFASLAAPLYPLTRPKVPFTWTEAHQ |
| | EAFGRIKEALLSAPALALPDLTKPFALYVDEKEGVARGVLTQTLGPWRRPVAYLSKKLDPVA |
| | SGWPTCLKAIAAVALLLKDADKLTLGQNVLVIAPHNLESIVRQPPDRWMTNARMTHYQSLL |
| | LNERVSFAPPAILNPATLLPVESDDTPIHICSEILAEETGTRPDLRDQPLPGVPAWYTDGSSFIM |
| | DGRRQAGAAIVDNKRTVWASNLPEGTSAQKAELIALTQALRLAEGKSINIYTDSRYAFATAH |
| | VHGAIYKQRGWLTSAGKDIKNKEEILALLEAIHLPKRVAIIHCPGHQRGTDPVATGNRKADEA |
| | AKQAAQSTRILTETTKN (SEQ ID NO: 18155) |
| KORV_ | LLGRDLLTKLKAQIQFSTEGPQVTWEDRPAMCLVLNLEEEYRLHEKPVPPSIDPSWLQLFPMV |
| Q9TTC1- | WAEKAGMGLANQVPPVVVELKSDASPVAVRQYPMSKEAREGIRPHIQRFLDLGILVPCQSPW |
| Pro_3mutA | NTPLLPVKKPGTNDYRPVQDLREVNKRVQDIHPTVPNPYNLLSSLPPSHTWYSVLDLKDAFF |
| | CLKLHPNSQPLFAFEWRDPEKGNTGQLTWTRLPQGFKNSPTLFNEALHRDLASFRALNPQVV |
| | MLQYVDDLLVAAPTYRDCKEGTRRLLQELSKLGYRVSAKKAQLCREEVTYLGYLLKGGKR |
| | WLTPARKATVMKIPTPTTPRQVREFLGKAGFCRLFIPGFASLAAPLYPLTRPKVPFTWTEAHQ |
| | EAFGRIKEALLSAPALALPDLTKPFALYVDEKEGVARGVLTQTLGPWRRPVAYLSKKLDPVA |
| | SGWPTCLKAIAAVALLLKDADKLTLGQNVLVIAPHNLESIVRQPPDRWMTNARMTHYQSLL |
| | LNERVSFAPPAILNPATLLPVESDDTPIHICSEILAEETGTRPDLRDQPLPGVPAWYTDGSSFIM |
| | DGRRQAGAAIVDNKRTVWASNLPEGTSAQKAELIALTQALRLAEGKSINIYTDSRYAFATAH |
| | VHGAIYKQRGWLTSAGKDIKNKEEILALLEAIHLPKRVAIIHCPGHQRGTDPVATGNRKADEA |
| | AKQAAQSTRILTETTKN (SEQ ID NO: 18156) |
| MLVAV_ | TLNLEDEYRLYETSAEPEVSPGSTWLSDFPQAWAETGGMGLAVRQAPLIIPLKATSTPVSIKQ |
| P03356 | YPMSQEAKLGIKPHIQRLLDQGILVPCQSPWNTPLLPVKKPGTNDYRPVQDLREVNKRVEDIH |
| | PTVPNPYNLLSGLPPSHRWYTVLDLKDAFFCLRLHPTSQPLFAFEWRDPGMGISGQLTWTRLP |
| | QGFKNSPTLFDEALHRDLADFRIQHPDLILLQYVDDILLAATSELDCQQGTRALLLTLGNLGY |
| | RASAKKAQLCQKQVKYLGYLLKEGQRWLTEARKETVMGQPTPKTPRQLREFLGTAGFCRL |
| | WIPGFAEMAAPLYPLTKTGTLFNWGPDQQKAYQEIKQALLTAPALGLPDLTKPFELFVDEKQ |
| | GYAKGVLTQKLGPWRRPVAYLSKKLDPVAAGWPPCLRMVAAIAVLRKDAGKLTMGQPLVI |
| | LAPHAVEALVKQPPDRWLSNARMTHYQAMLLDTDRVQFGPVVALNPATLLPLPEEGAPHDC |
| | LEILAETHGTRPDLTDQPIPDADHTWYTDGSSFLQEGQRKAGAAVTTETEVIWARALPAGTS |
| | AQRAELIALTQALKMAEGKRLNVYTDSRYAFATAHIHGEIYRRRGLLTSEGREIKNKSEILAL |
| | LKALFLPKRLSIIHCLGHQKGDSAEARGNRLADQAAREAAIKTPPDTSTLL (SEQ ID NO: |
| | 18157) |
| MLVAV_ | TLNLEDEYRLYETSAEPEVSPGSTWLSDFPQAWAETGGMGLAVRQAPLIIPLKATSTPVSIKQ |
| P03356_ | YPMSQEAKLGIKPHIQRLLDQGILVPCQSPWNTPLLPVKKPGTNDYRPVQDLREVNKRVEDIH |
| 3mut | PTVPNPYNLLSGLPPSHRWYTVLDLKDAFFCLRLHPTSQPLFAFEWRDPGMGISGQLTWTRLP |
| | QGFKNSPTLFNEALHRDLADFRIQHPDLILLQYVDDILLAATSELDCQQGTRALLLTLGNLGY |
| | RASAKKAQLCQKQVKYLGYLLKEGQRWLTEARKETVMGQPTPKTPRQLREFLGTAGFCRL |
| | WIPGFAEMAAPLYPLTKPGTLFNWGPDQQKAYQEIKQALLTAPALGLPDLTKPFELFVDEKQ |
| | GYAKGVLTQKLGPWRRPVAYLSKKLDPVAAGWPPCLRMVAAIAVLRKDAGKLTMGQPLVI |
| | LAPHAVEALVKQPPDRWLSNARMTHYQAMLLDTDRVQFGPVVALNPATLLPLPEEGAPHDC |
| | LEILAETHGTRPDLTDQPIPDADHTWYTDGSSFLQEGQRKAGAAVTTETEVIWARALPAGTS |
| | AQRAELIALTQALKMAEGKRLNVYTDSRYAFATAHIHGEIYRRRGWLTSEGREIKNKSEILAL |
| | LKALFLPKRLSIIHCLGHQKGDSAEARGNRLADQAAREAAIKTPPDTSTLL (SEQ ID NO: |
| | 18158) |
| MLVAV_ | TLNLEDEYRLYETSAEPEVSPGSTWLSDFPQAWAETGGMGLAVRQAPLIIPLKATSTPVSIKQ |
| P03356_ | YPMSQEAKLGIKPHIQRLLDQGILVPCQSPWNTPLLPVKKPGTNDYRPVQDLREVNKRVEDIH |
| 3mutA | PTVPNPYNLLSGLPPSHRWYTVLDLKDAFFCLRLHPTSQPLFAFEWRDPGMGISGQLTWTRLP |
| | QGFKNSPTLFNEALHRDLADFRIQHPDLILLQYVDDILLAATSELDCQQGTRALLLTLGNLGY |
| | RASAKKAQLCQKQVKYLGYLLKEGQRWLTEARKETVMGQPTPKTPRQLREFLGKAGFCRLF |
| | IPGFAEMAAPLYPLTKPGTLFNWGPDQQKAYQEIKQALLTAPALGLPDLTKPFELFVDEKQG |
| | YAKGVLTQKLGPWRRPVAYLSKKLDPVAAGWPPCLRMVAAIAVLRKDAGKLTMGQPLVIL |
| | APHAVEALVKQPPDRWLSNARMTHYQAMLLDTDRVQFGPVVALNPATLLPLPEEGAPHDCL |
| | EILAETHGTRPDLTDQPIPDADHTWYTDGSSFLQEGQRKAGAAVTTETEVIWARALPAGTSA |
| | QRAELIALTQALKMAEGKRLNVYTDSRYAFATAHIHGEIYRRRGWLTSEGREIKNKSEILALL |
| | KALFLPKRLSIIHCLGHQKGDSAEARGNRLADQAAREAAIKTPPDTSTLL (SEQ ID NO: 18159) |
| MLVBM_ | TLGIEDEYRLHETSTEPDVSLGSTWLSDFPQAWAETGGMGLAVRQAPLIIPLKATSTPVSIQQY |
| Q7SVK7 | PMSHEARLGIKPHIQRLLDQGILVPCQSPWNTPLLPVKKPGTNDYRPVQDLREVNKRVEDIHP |
| | TVPNPYNLLSGLPPSHQWYTVLDLKDAFFCLRLHPTSQPLFAFEWRDPGMGISGQLTWTRLP |
| | QGFKNSPTLFDEALHRDLADFRIQHPDLILLQYVDDILLAATSELDCQQGTRALLQTLGDLGY |
| | RASAKKAQICQKQVKYLGYLLREGQRWLTEARKETVMGQPVPKTPRQLREFLGTAGFCRLW |
| | IPGFAEMAAPLYPLTKTGTLFSWGPDQQKAYQEIKQALLTAPALGLPDLTKPFELFVDEKQGY |
| | AKGVLTQKLGPWRRPVAYLSKKLDPVAAGWPPCLRMVAAIAVLTKDAGKLTMGQPLVILA |
| | PHAVEALVKQPPDRWLSNARMTHYQAMLLDTDRVQFGPVVALNPATLLPLPEEGAPHDCLE |
| | ILAETHGTRPDLTDQPIPDADHTWYTDGSSFLQEGQRKAGAAVTTETEVIWAGALPAGTSAQ |
| | RAELIALTQALKMAEGKRLNVYTDSRYAFATAHIHGEIYRRRGLLTSEGREIKNKSEILALLK |
| | ALFLPKRLSIIHCLGHQKGDSAEARGNRLADQAAREAAIKTPPDTSTLL (SEQ ID NO: 18160) |
| MLVBM_ | TLGIEDEYRLHETSTEPDVSLGSTWLSDFPQAWAETGGMGLAVRQAPLIIPLKATSTPVSIQQY |
| Q7SVK7 | PMSHEARLGIKPHIQRLLDQGILVPCQSPWNTPLLPVKKPGTNDYRPVQDLREVNKRVEDIHP |
| | TVPNPYNLLSGLPPSHQWYTVLDLKDAFFCLRLHPTSQPLFAFEWRDPGMGISGQLTWTRLP |
| | QGFKNSPTLFDEALHRDLADFRIQHPDLILLQYVDDILLAATSELDCQQGTRALLQTLGDLGY |
| | RASAKKAQICQKQVKYLGYLLREGQRWLTEARKETVMGQPVPKTPRQLREFLGTAGFCRLW |
| | IPGFAEMAAPLYPLTKTGTLFSWGPDQQKAYQEIKQALLTAPALGLPDLTKPFELFVDEKQGY |
| | AKGVLTQKLGPWRRPVAYLSKKLDPVAAGWPPCLRMVAAIAVLTKDAGKLTMGQPLVILA |
| | PHAVEALVKQPPDRWLSNARMTHYQAMLLDTDRVQFGPVVALNPATLLPLPEEGAPHDCLE |
| | ILAETHGTRPDLTDQPIPDADHTWYTDGSSFLQEGQRKAGAAVTTETEVIWAGALPAGTSAQ |
| | RAELIALTQALKMAEGKRLNVYTDSRYAFATAHIHGEIYRRRGLLTSEGREIKNKSEILALLK |
| | ALFLPKRLSIIHCLGHQKGDSAEARGNRLADQAAREAAIKTPPDTSTLL (SEQ ID NO: 18160) |
| MLVBM_ | TLGIEDEYRLHETSTEPDVSLGSTWLSDFPQAWAETGGMGLAVRQAPLIIPLKATSTPVSIQQY |
| Q7SVK7_ | PMSHEARLGIKPHIQRLLDQGILVPCQSPWNTPLLPVKKPGTNDYRPVQDLREVNKRVEDIHP |
| 3mut | TVPNPYNLLSGLPPSHQWYTVLDLKDAFFCLRLHPTSQPLFAFEWRDPGMGISGQLTWTRLP |
| | QGFKNSPTLFNEALHRDLADFRIQHPDLILLQYVDDILLAATSELDCQQGTRALLQTLGDLGY |
| | RASAKKAQICQKQVKYLGYLLREGQRWLTEARKETVMGQPVPKTPRQLREFLGTAGFCRLW |
| | IPGFAEMAAPLYPLTKPGTLFSWGPDQQKAYQEIKQALLTAPALGLPDLTKPFELFVDEKQGY |
| | AKGVLTQKLGPWRRPVAYLSKKLDPVAAGWPPCLRMVAAIAVLTKDAGKLTMGQPLVILA |
| | PHAVEALVKQPPDRWLSNARMTHYQAMLLDTDRVQFGPVVALNPATLLPLPEEGAPHDCLE |
| | ILAETHGTRPDLTDQPIPDADHTWYTDGSSFLQEGQRKAGAAVTTETEVIWAGALPAGTSAQ |
| | RAELIALTQALKMAEGKRLNVYTDSRYAFATAHIHGEIYRRRGWLTSEGREIKNKSEILALLK |
| | ALFLPKRLSIIHCLGHQKGDSAEARGNRLADQAAREAAIKTPPDTSTLL (SEQ ID NO: 18161) |
| MLVBM_ | TLGIEDEYRLHETSTEPDVSLGSTWLSDFPQAWAETGGMGLAVRQAPLIIPLKATSTPVSIQQY |
| Q7SVK7_ | PMSHEARLGIKPHIQRLLDQGILVPCQSPWNTPLLPVKKPGTNDYRPVQDLREVNKRVEDIHP |
| 3mut | TVPNPYNLLSGLPPSHQWYTVLDLKDAFFCLRLHPTSQPLFAFEWRDPGMGISGQLTWTRLP |
| | QGFKNSPTLFNEALHRDLADFRIQHPDLILLQYVDDILLAATSELDCQQGTRALLQTLGDLGY |
| | RASAKKAQICQKQVKYLGYLLREGQRWLTEARKETVMGQPVPKTPRQLREFLGTAGFCRLW |
| | IPGFAEMAAPLYPLTKPGTLFSWGPDQQKAYQEIKQALLTAPALGLPDLTKPFELFVDEKQGY |
| | AKGVLTQKLGPWRRPVAYLSKKLDPVAAGWPPCLRMVAAIAVLTKDAGKLTMGQPLVILA |
| | PHAVEALVKQPPDRWLSNARMTHYQAMLLDTDRVQFGPVVALNPATLLPLPEEGAPHDCLE |
| | ILAETHGTRPDLTDQPIPDADHTWYTDGSSFLQEGQRKAGAAVTTETEVIWAGALPAGTSAQ |
| | RAELIALTQALKMAEGKRLNVYTDSRYAFATAHIHGEIYRRRGWLTSEGREIKNKSEILALLK |
| | ALFLPKRLSIIHCLGHQKGDSAEARGNRLADQAAREAAIKTPPDTSTLL (SEQ ID NO: 18161) |
| MLVBM_ | LGIEDEYRLHETSTEPDVSLGSTWLSDFPQAWAETGGMGLAVRQAPLIIPLKATSTPVSIQQYP |
| Q7SVK7_ | MSHEARLGIKPHIQRLLDQGILVPCQSPWNTPLLPVKKPGTNDYRPVQDLREVNKRVEDIHPT |
| 3mutA_ | VPNPYNLLSGLPPSHQWYTVLDLKDAFFCLRLHPTSQPLFAFEWRDPGMGISGQLTWTRLPQ |
| WS | GFKNSPTLFNEALHRDLADFRIQHPDLILLQYVDDILLAATSELDCQQGTRALLQTLGDLGYR |
| | ASAKKAQICQKQVKYLGYLLREGQRWLTEARKETVMGQPVPKTPRQLREFLGKAGFCRLFIP |
| | GFAEMAAPLYPLTKPGTLFSWGPDQQKAYQEIKQALLTAPALGLPDLTKPFELFVDEKQGYA |
| | KGVLTQKLGPWRRPVAYLSKKLDPVAAGWPPCLRMVAAIAVLTKDAGKLTMGQPLVILAP |
| | HAVEALVKQPPDRWLSNARMTHYQAMLLDTDRVQFGPVVALNPATLLPLPEEGAPHDCLEI |
| | LAETHGTRPDLTDQPIPDADHTWYTDGSSFLQEGQRKAGAAVTTETEVIWAGALPAGTSAQR |
| | AELIALTQALKMAEGKRLNVYTDSRYAFATAHIHGEIYRRRGWLTSEGREIKNKSEILALLKA |
| | LFLPKRLSIIHCLGHQKGDSAEARGNRLADQAAREAAIKTPPDTSTLLI (SEQ ID NO: 18162) |
| MLVBM_ | LGIEDEYRLHETSTEPDVSLGSTWLSDFPQAWAETGGMGLAVRQAPLIIPLKATSTPVSIQQYP |
| Q7SVK7_ | MSHEARLGIKPHIQRLLDQGILVPCQSPWNTPLLPVKKPGTNDYRPVQDLREVNKRVEDIHPT |
| 3mutA_ | VPNPYNLLSGLPPSHQWYTVLDLKDAFFCLRLHPTSQPLFAFEWRDPGMGISGQLTWTRLPQ |
| WS | GFKNSPTLFNEALHRDLADFRIQHPDLILLQYVDDILLAATSELDCQQGTRALLQTLGDLGYR |
| | ASAKKAQICQKQVKYLGYLLREGQRWLTEARKETVMGQPVPKTPRQLREFLGKAGFCRLFIP |
| | GFAEMAAPLYPLTKPGTLFSWGPDQQKAYQEIKQALLTAPALGLPDLTKPFELFVDEKQGYA |
| | KGVLTQKLGPWRRPVAYLSKKLDPVAAGWPPCLRMVAAIAVLTKDAGKLTMGQPLVILAP |
| | HAVEALVKQPPDRWLSNARMTHYQAMLLDTDRVQFGPVVALNPATLLPLPEEGAPHDCLEI |
| | LAETHGTRPDLTDQPIPDADHTWYTDGSSFLQEGQRKAGAAVTTETEVIWAGALPAGTSAQR |
| | AELIALTQALKMAEGKRLNVYTDSRYAFATAHIHGEIYRRRGWLTSEGREIKNKSEILALLKA |
| | LFLPKRLSIIHCLGHQKGDSAEARGNRLADQAAREAAIKTPPDTSTLLI (SEQ ID NO: 18162) |
| MLVCB_ | TLNIEDEYRLHETSKEPDVSLGSTWLSDFPQAWAETGGMGLAVRQAPLIIPLKATSTPVSIKQ |
| P08361 | YPMSQEARLGIKPHIQRLLDQGILVPCQSPWNTPLLPVKKPGTNDYRPVQDLREVNKRVEDIH |
| | PTVPNPYNLLSGLPPSHQWYTVLDLKDAFFCLRLHPTSQPLFAFEWRDPEMGISGQLTWTRLP |
| | QGFKNSPTLFDEALHRDLAGFRIQHPDLILLQYVDDLLLAATSELDCQQGTRALLQTLGDLGY |
| | RASAKKAQICQKQVKYLGYLLKEGQRWLTEARKETVMGQPIPKTPRQLREFLGTAGFCRLWI |
| | PGFAEMAAPLYPLTKTGTLFNWGPDQQKAFQEIKQALLTAPALGLPDLTKPFELFVDEKQGY |
| | AKGVLTQKLGPWRRPVAYLSKKLDPVAAGWPPCLRMVAAIAVLTKDAGKLTMGQPLVILA |
| | PHAVEALVKQPPDRWLSNARMTHYQALLLDTDRVQFGPVVALNPATLLPLPEEGLQHDCLD |
| | ILAEAHGTRSDLMDQPLPDADHTWYTDGSSFLQEGQRKAGAAVTTETEVIWARALPAGTSA |
| | QRAELIALTQALKMAEGKKLNVYTDSRYAFATAHIHGEIYRRRGLLTSEGKEIKNKDEILALL |
| | KALFLPKRLSIIHCPGHQKGNSAEARGNRMADQAAREVATRETPETSTLL (SEQ ID NO: |
| | 18163) |
| MLVCB_ | TLNIEDEYRLHETSKEPDVSLGSTWLSDFPQAWAETGGMGLAVRQAPLIIPLKATSTPVSIKQ |
| P08361_ | YPMSQEARLGIKPHIQRLLDQGILVPCQSPWNTPLLPVKKPGTNDYRPVQDLREVNKRVEDIH |
| 3mut | PTVPNPYNLLSGLPPSHQWYTVLDLKDAFFCLRLHPTSQPLFAFEWRDPEMGISGQLTWTRLP |
| | QGFKNSPTLFNEALHRDLAGFRIQHPDLILLQYVDDLLLAATSELDCQQGTRALLQTLGDLGY |
| | RASAKKAQICQKQVKYLGYLLKEGQRWLTEARKETVMGQPIPKTPRQLREFLGTAGFCRLWI |
| | PGFAEMAAPLYPLTKPGTLFNWGPDQQKAFQEIKQALLTAPALGLPDLTKPFELFVDEKQGY |
| | AKGVLTQKLGPWRRPVAYLSKKLDPVAAGWPPCLRMVAAIAVLTKDAGKLTMGQPLVILA |
| | PHAVEALVKQPPDRWLSNARMTHYQALLLDTDRVQFGPVVALNPATLLPLPEEGLQHDCLD |
| | ILAEAHGTRSDLMDQPLPDADHTWYTDGSSFLQEGQRKAGAAVTTETEVIWARALPAGTSA |
| | QRAELIALTQALKMAEGKKLNVYTDSRYAFATAHIHGEIYRRRGWLTSEGKEIKNKDEILAL |
| | LKALFLPKRLSIIHCPGHQKGNSAEARGNRMADQAAREVATRETPETSTLL (SEQ ID NO: |
| | 18164) |
| MLVCB_ | TLNIEDEYRLHETSKEPDVSLGSTWLSDFPQAWAETGGMGLAVRQAPLIIPLKATSTPVSIKQ |
| P08361_ | YPMSQEARLGIKPHIQRLLDQGILVPCQSPWNTPLLPVKKPGTNDYRPVQDLREVNKRVEDIH |
| 3mutA | PTVPNPYNLLSGLPPSHQWYTVLDLKDAFFCLRLHPTSQPLFAFEWRDPEMGISGQLTWTRLP |
| | QGFKNSPTLFNEALHRDLAGFRIQHPDLILLQYVDDLLLAATSELDCQQGTRALLQTLGDLGY |
| | RASAKKAQICQKQVKYLGYLLKEGQRWLTEARKETVMGQPIPKTPRQLREFLGKAGFCRLFI |
| | PGFAEMAAPLYPLTKPGTLFNWGPDQQKAFQEIKQALLTAPALGLPDLTKPFELFVDEKQGY |
| | AKGVLTQKLGPWRRPVAYLSKKLDPVAAGWPPCLRMVAAIAVLTKDAGKLTMGQPLVILA |
| | PHAVEALVKQPPDRWLSNARMTHYQALLLDTDRVQFGPVVALNPATLLPLPEEGLQHDCLD |
| | ILAEAHGTRSDLMDQPLPDADHTWYTDGSSFLQEGQRKAGAAVTTETEVIWARALPAGTSA |
| | QRAELIALTQALKMAEGKKLNVYTDSRYAFATAHIHGEIYRRRGWLTSEGKEIKNKDEILAL |
| | LKALFLPKRLSIIHCPGHQKGNSAEARGNRMADQAAREVATRETPETSTLL (SEQ ID NO: |
| | 18165) |
| MLVF5_ | TLNIEDEYRLHETSKGPDVPLGSTWLSDFPQAWAETGGMGLAFRQAPLIISLKATSTPVSIKQY |
| P26810 | PMSQEARLGIKPHIQRLLDQGILVPCQSPWNTPLLPVKKPGTNDYRPVQDLREVNKRVEDIHP |
| | TVPNPYNLLSGLPPSHQWYTVLDLKDAFFCLRLHPTSQSLFAFEWKDPEMGISGQLTWTRLP |
| | QGFKNSPTLFDEALHRDLADFRIQHPDLILLQYVDDLLLAATSELDCQQGTRALLQTLGDLGY |
| | RASAKKAQICQKQVKYLGYLLKEGQRWLTEARKETVMGQPTPKTPRQLREFLGTAGLCRLW |
| | IPGFAEMAAPLYPLTKTGTLFKWGPDQQKAYQEIKQALLTAPALGLPDLTKPFELFVDEKQG |
| | YAKGVLTQKLGPWRRPVAYLSKKLDPVAAGWPPCLRMVAAIAVLTKDVGKLTMGQPLVIL |
| | APHAVEALVKQPPDRWLSNARMTHYQALLLDTDRVQFGPIVALNPATLLPLPEEGLQHDCL |
| | DILAEAHGTRPDLTDQPLPDADHTWYTDGSSFLQEGQRRAGAAVTTETEVIWAKALPAGTSA |
| | QRAELIALTQALKMAAGKKLNVYTDSRYAFATAHIHGEIYRRRGLLTSEGKEIKNKDEILALL |
| | KALFLPKRLSIIHCPGHQKGNHAEARGNRMADQAAREVATRETPETSTLL (SEQ ID NO: |
| | 18166) |
| MLVF5_ | TLNIEDEYRLHETSKGPDVPLGSTWLSDFPQAWAETGGMGLAFRQAPLIISLKATSTPVSIKQY |
| P26810_ | PMSQEARLGIKPHIQRLLDQGILVPCQSPWNTPLLPVKKPGTNDYRPVQDLREVNKRVEDIHP |
| 3mut | TVPNPYNLLSGLPPSHQWYTVLDLKDAFFCLRLHPTSQSLFAFEWKDPEMGISGQLTWTRLP |
| | QGFKNSPTLFNEALHRDLADFRIQHPDLILLQYVDDLLLAATSELDCQQGTRALLQTLGDLGY |
| | RASAKKAQICQKQVKYLGYLLKEGQRWLTEARKETVMGQPTPKTPRQLREFLGTAGLCRLW |
| | IPGFAEMAAPLYPLTKPGTLFKWGPDQQKAYQEIKQALLTAPALGLPDLTKPFELFVDEKQG |
| | YAKGVLTQKLGPWRRPVAYLSKKLDPVAAGWPPCLRMVAAIAVLTKDVGKLTMGQPLVIL |
| | APHAVEALVKQPPDRWLSNARMTHYQALLLDTDRVQFGPIVALNPATLLPLPEEGLQHDCL |
| | DILAEAHGTRPDLTDQPLPDADHTWYTDGSSFLQEGQRRAGAAVTTETEVIWAKALPAGTSA |
| | QRAELIALTQALKMAAGKKLNVYTDSRYAFATAHIHGEIYRRRGWLTSEGKEIKNKDEILAL |
| | LKALFLPKRLSIIHCPGHQKGNHAEARGNRMADQAAREVATRETPETSTLL (SEQ ID NO: |
| | 18167) |
| MLVF5_ | TLNIEDEYRLHETSKGPDVPLGSTWLSDFPQAWAETGGMGLAFRQAPLIISLKATSTPVSIKQY |
| P26810_ | PMSQEARLGIKPHIQRLLDQGILVPCQSPWNTPLLPVKKPGTNDYRPVQDLREVNKRVEDIHP |
| 3mutA | TVPNPYNLLSGLPPSHQWYTVLDLKDAFFCLRLHPTSQSLFAFEWKDPEMGISGQLTWTRLP |
| | QGFKNSPTLFNEALHRDLADFRIQHPDLILLQYVDDLLLAATSELDCQQGTRALLQTLGDLGY |
| | RASAKKAQICQKQVKYLGYLLKEGQRWLTEARKETVMGQPTPKTPRQLREFLGKAGLCRLF |
| | IPGFAEMAAPLYPLTKPGTLFKWGPDQQKAYQEIKQALLTAPALGLPDLTKPFELFVDEKQG |
| | YAKGVLTQKLGPWRRPVAYLSKKLDPVAAGWPPCLRMVAAIAVLTKDVGKLTMGQPLVIL |
| | APHAVEALVKQPPDRWLSNARMTHYQALLLDTDRVQFGPIVALNPATLLPLPEEGLQHDCL |
| | DILAEAHGTRPDLTDQPLPDADHTWYTDGSSFLQEGQRRAGAAVTTETEVIWAKALPAGTSA |
| | QRAELIALTQALKMAAGKKLNVYTDSRYAFATAHIHGEIYRRRGWLTSEGKEIKNKDEILAL |
| | LKALFLPKRLSIIHCPGHQKGNHAEARGNRMADQAAREVATRETPETSTLL (SEQ ID NO: |
| | 18168) |
| MLVFF_ | TLNIEDEYRLHETSKGPDVPLGSTWLSDFPQAWAETGGMGLAVRQAPLIIPLKATSTPVSIKQ |
| P26809_ | YPMSQEARLGIKPHIQRLLDQGILVPCQSPWNTPLLPVKKPGTNDYRPVQDLREVNKRVEDIH |
| 3mut | PTVPNPYNLLSGLPPSHQWYTVLDLKDAFFCLRLHPTSQSLFAFEWRDPEMGISGQLTWTRLP |
| | QGFKNSPTLFNEALHRDLADFRIQHPDLILLQYVDDLLLAATSELDCQQGTRALLQTLGDLGY |
| | RASAKKAQICQKQVKYLGYLLKEGQRWLTEARKETVMGQPTPKTPRQLREFLGTAGFCRLW |
| | IPGFAEMAAPLYPLTKPGTLFEWGPDQQKAYQEIKQALLTAPALGLPDLTKPFELFVDEKQGY |
| | AKGVLTQKLGPWRRPVAYLSKKLDPVAAGWPPCLRMVAAIAVLTKDAGKLTMGQPLVILA |
| | PHAVEALVKQPPDRWLSNARMTHYQALLLDTDRVQFGPIVALNPATLLPLPEEGLQHDCLDI |
| | LAEAHGTRPDLTDQPLPDADHTWYTDGSSFLQEGQRKAGAAVTTETEVVWAKALPAGTSA |
| | QRAELIALTQALKMAEGKKLNVYTDSRYAFATAHIHGEIYRRRGWLTSEGKEIKNKDEILAL |
| | LKALFLPKRLSIIHCPGHQKGNRAEARGNRMADQAAREVATRETPETSTLL (SEQ ID NO: |
| | 18169) |
| MLVFF_ | TLNIEDEYRLHETSKGPDVPLGSTWLSDFPQAWAETGGMGLAVRQAPLIIPLKATSTPVSIKQ |
| P26809_ | YPMSQEARLGIKPHIQRLLDQGILVPCQSPWNTPLLPVKKPGTNDYRPVQDLREVNKRVEDIH |
| 3mutA | PTVPNPYNLLSGLPPSHQWYTVLDLKDAFFCLRLHPTSQSLFAFEWRDPEMGISGQLTWTRLP |
| | QGFKNSPTLFNEALHRDLADFRIQHPDLILLQYVDDLLLAATSELDCQQGTRALLQTLGDLGY |
| | RASAKKAQICQKQVKYLGYLLKEGQRWLTEARKETVMGQPTPKTPRQLREFLGKAGFCRLFI |
| | PGFAEMAAPLYPLTKPGTLFEWGPDQQKAYQEIKQALLTAPALGLPDLTKPFELFVDEKQGY |
| | AKGVLTQKLGPWRRPVAYLSKKLDPVAAGWPPCLRMVAAIAVLTKDAGKLTMGQPLVILA |
| | PHAVEALVKQPPDRWLSNARMTHYQALLLDTDRVQFGPIVALNPATLLPLPEEGLQHDCLDI |
| | LAEAHGTRPDLTDQPLPDADHTWYTDGSSFLQEGQRKAGAAVTTETEVVWAKALPAGTSA |
| | QRAELIALTQALKMAEGKKLNVYTDSRYAFATAHIHGEIYRRRGWLTSEGKEIKNKDEILAL |
| | LKALFLPKRLSIIHCPGHQKGNRAEARGNRMADQAAREVATRETPETSTLL (SEQ ID NO: |
| | 18170) |
| MLVMS_ | TLNIEDEHRLHETSKEPDVSLGSTWLSDFPQAWAETGGMGLAVRQAPLIIPLKATSTPVSIKQ |
| P03355 | YPMSQEARLGIKPHIQRLLDQGILVPCQSPWNTPLLPVKKPGTNDYRPVQDLREVNKRVEDIH |
| | PTVPNPYNLLSGLPPSHQWYTVLDLKDAFFCLRLHPTSQPLFAFEWRDPEMGISGQLTWTRLP |
| | QGFKNSPTLFDEALHRDLADFRIQHPDLILLQYVDDLLLAATSELDCQQGTRALLQTLGNLGY |
| | RASAKKAQICQKQVKYLGYLLKEGQRWLTEARKETVMGQPTPKTPRQLREFLGTAGFCRLW |
| | IPGFAEMAAPLYPLTKTGTLFNWGPDQQKAYQEIKQALLTAPALGLPDLTKPFELFVDEKQG |
| | YAKGVLTQKLGPWRRPVAYLSKKLDPVAAGWPPCLRMVAAIAVLTKDAGKLTMGQPLVIL |
| | APHAVEALVKQPPDRWLSNARMTHYQALLLDTDRVQFGPVVALNPATLLPLPEEGLQHNCL |
| | DILAEAHGTRPDLTDQPLPDADHTWYTDGSSLLQEGQRKAGAAVTTETEVIWAKALPAGTS |
| | AQRAELIALTQALKMAEGKKLNVYTDSRYAFATAHIHGEIYRRRGLLTSEGKEIKNKDEILAL |
| | LKALFLPKRLSIIHCPGHQKGHSAEARGNRMADQAARKAAITETPDTSTLL (SEQ ID NO: 3) |
| MLVMS_ | TLNIEDEHRLHETSKEPDVSLGSTWLSDFPQAWAETGGMGLAVRQAPLIIPLKATSTPVSIKQ |
| P03355 | YPMSQEARLGIKPHIQRLLDQGILVPCQSPWNTPLLPVKKPGTNDYRPVQDLREVNKRVEDIH |
| | PTVPNPYNLLSGLPPSHQWYTVLDLKDAFFCLRLHPTSQPLFAFEWRDPEMGISGQLTWTRLP |
| | QGFKNSPTLFDEALHRDLADFRIQHPDLILLQYVDDLLLAATSELDCQQGTRALLQTLGNLGY |
| | RASAKKAQICQKQVKYLGYLLKEGQRWLTEARKETVMGQPTPKTPRQLREFLGTAGFCRLW |
| | IPGFAEMAAPLYPLTKTGTLFNWGPDQQKAYQEIKQALLTAPALGLPDLTKPFELFVDEKQG |
| | YAKGVLTQKLGPWRRPVAYLSKKLDPVAAGWPPCLRMVAAIAVLTKDAGKLTMGQPLVIL |
| | APHAVEALVKQPPDRWLSNARMTHYQALLLDTDRVQFGPVVALNPATLLPLPEEGLQHNCL |
| | DILAEAHGTRPDLTDQPLPDADHTWYTDGSSLLQEGQRKAGAAVTTETEVIWAKALPAGTS |
| | AQRAELIALTQALKMAEGKKLNVYTDSRYAFATAHIHGEIYRRRGLLTSEGKEIKNKDEILAL |
| | LKALFLPKRLSIIHCPGHQKGHSAEARGNRMADQAARKAAITETPDTSTLL (SEQ ID NO: 3) |
| MLVMS_ | TLNIEDEHRLHETSKEPDVSLGSTWLSDFPQAWAETGGMGLAVRQAPLIIPLKATSTPVSIKQ |
| P03355_ | YPMSQEARLGIKPHIQRLLDQGILVPCQSPWNTPLLPVKKPGTNDYRPVQDLREVNKRVEDIH |
| 3mut | PTVPNPYNLLSGLPPSHQWYTVLDLKDAFFCLRLHPTSQPLFAFEWRDPEMGISGQLTWTRLP |
| | QGFKNSPTLFNEALHRDLADFRIQHPDLILLQYVDDLLLAATSELDCQQGTRALLQTLGNLGY |
| | RASAKKAQICQKQVKYLGYLLKEGQRWLTEARKETVMGQPTPKTPRQLREFLGTAGFCRLW |
| | IPGFAEMAAPLYPLTKPGTLFNWGPDQQKAYQEIKQALLTAPALGLPDLTKPFELFVDEKQG |
| | YAKGVLTQKLGPWRRPVAYLSKKLDPVAAGWPPCLRMVAAIAVLTKDAGKLTMGQPLVIL |
| | APHAVEALVKQPPDRWLSNARMTHYQALLLDTDRVQFGPVVALNPATLLPLPEEGLQHNCL |
| | DILAEAHGTRPDLTDQPLPDADHTWYTDGSSLLQEGQRKAGAAVTTETEVIWAKALPAGTS |
| | AQRAELIALTQALKMAEGKKLNVYTDSRYAFATAHIHGEIYRRRGWLTSEGKEIKNKDEILA |
| | LLKALFLPKRLSIIHCPGHQKGHSAEARGNRMADQAARKAAITETPDTSTLL (SEQ ID NO: |
| | 18171) |
| MLVMS_ | TLNIEDEHRLHETSKEPDVSLGSTWLSDFPQAWAETGGMGLAVRQAPLIIPLKATSTPVSIKQ |
| P03355_ | YPMSQEARLGIKPHIQRLLDQGILVPCQSPWNTPLLPVKKPGTNDYRPVQDLREVNKRVEDIH |
| 3mut | PTVPNPYNLLSGLPPSHQWYTVLDLKDAFFCLRLHPTSQPLFAFEWRDPEMGISGQLTWTRLP |
| | QGFKNSPTLFNEALHRDLADFRIQHPDLILLQYVDDLLLAATSELDCQQGTRALLQTLGNLGY |
| | RASAKKAQICQKQVKYLGYLLKEGQRWLTEARKETVMGQPTPKTPRQLREFLGTAGFCRLW |
| | IPGFAEMAAPLYPLTKPGTLFNWGPDQQKAYQEIKQALLTAPALGLPDLTKPFELFVDEKQG |
| | YAKGVLTQKLGPWRRPVAYLSKKLDPVAAGWPPCLRMVAAIAVLTKDAGKLTMGQPLVIL |
| | APHAVEALVKQPPDRWLSNARMTHYQALLLDTDRVQFGPVVALNPATLLPLPEEGLQHNCL |
| | DILAEAHGTRPDLTDQPLPDADHTWYTDGSSLLQEGQRKAGAAVTTETEVIWAKALPAGTS |
| | AQRAELIALTQALKMAEGKKLNVYTDSRYAFATAHIHGEIYRRRGWLTSEGKEIKNKDEILA |
| | LLKALFLPKRLSIIHCPGHQKGHSAEARGNRMADQAARKAAITETPDTSTLL (SEQ ID NO: |
| | 18171) |
| MLVMS_ | TLNIEDEHRLHETSKEPDVSLGSTWLSDFPQAWAETGGMGLAVRQAPLIIPLKATSTPVSIKQ |
| P03355_ | YPMSQEARLGIKPHIQRLLDQGILVPCQSPWNTPLLPVKKPGTNDYRPVQDLREVNKRVEDIH |
| 3mutA_ | PTVPNPYNLLSGLPPSHQWYTVLDLKDAFFCLRLHPTSQPLFAFEWRDPEMGISGQLTWTRLP |
| WS | QGFKNSPTLFNEALHRDLADFRIQHPDLILLQYVDDLLLAATSELDCQQGTRALLQTLGNLGY |
| | RASAKKAQICQKQVKYLGYLLKEGQRWLTEARKETVMGQPTPKTPRQLREFLGKAGFCRLFI |
| | PGFAEMAAPLYPLTKPGTLFNWGPDQQKAYQEIKQALLTAPALGLPDLTKPFELFVDEKQGY |
| | AKGVLTQKLGPWRRPVAYLSKKLDPVAAGWPPCLRMVAAIAVLTKDAGKLTMGQPLVILA |
| | PHAVEALVKQPPDRWLSNARMTHYQALLLDTDRVQFGPVVALNPATLLPLPEEGLQHNCLD |
| | ILAEAHGTRPDLTDQPLPDADHTWYTDGSSLLQEGQRKAGAAVTTETEVIWAKALPAGTSA |
| | QRAELIALTQALKMAEGKKLNVYTDSRYAFATAHIHGEIYRRRGWLTSEGKEIKNKDEILAL |
| | LKALFLPKRLSIIHCPGHQKGHSAEARGNRMADQAARKAAITETPDTSTLL (SEQ ID NO: |
| | 16707) |
| MLVMS_ | TLNIEDEHRLHETSKEPDVSLGSTWLSDFPQAWAETGGMGLAVRQAPLIIPLKATSTPVSIKQ |
| P03355_ | YPMSQEARLGIKPHIQRLLDQGILVPCQSPWNTPLLPVKKPGTNDYRPVQDLREVNKRVEDIH |
| 3mutA_WS | PTVPNPYNLLSGLPPSHQWYTVLDLKDAFFCLRLHPTSQPLFAFEWRDPEMGISGQLTWTRLP |
| | QGFKNSPTLFNEALHRDLADFRIQHPDLILLQYVDDLLLAATSELDCQQGTRALLQTLGNLGY |
| | RASAKKAQICQKQVKYLGYLLKEGQRWLTEARKETVMGQPTPKTPRQLREFLGKAGFCRLFI |
| | PGFAEMAAPLYPLTKPGTLFNWGPDQQKAYQEIKQALLTAPALGLPDLTKPFELFVDEKQGY |
| | AKGVLTQKLGPWRRPVAYLSKKLDPVAAGWPPCLRMVAAIAVLTKDAGKLTMGQPLVILA |
| | PHAVEALVKQPPDRWLSNARMTHYQALLLDTDRVQFGPVVALNPATLLPLPEEGLQHNCLD |
| | ILAEAHGTRPDLTDQPLPDADHTWYTDGSSLLQEGQRKAGAAVTTETEVIWAKALPAGTSA |
| | QRAELIALTQALKMAEGKKLNVYTDSRYAFATAHIHGEIYRRRGWLTSEGKEIKNKDEILAL |
| | LKALFLPKRLSIIHCPGHQKGHSAEARGNRMADQAARKAAITETPDTSTLL (SEQ ID NO: |
| | 16707) |
| MLVMS_ | TLNIEDEYRLHETSKEPDVSLGSTWLSDFPQAWAETGGMGLAVRQAPLIIPLKATSTPVSIKQ |
| P03355_ | YPMSQEARLGIKPHIQRLLDQGILVPCQSPWNTPLLPVKKPGTNDYRPVQDLREVNKRVEDIH |
| PLV919 | PTVPNPYNLLSGLPPSHQWYTVLDLKDAFFCLRLHPTSQPLFAFEWRDPEMGISGQLTWTRLP |
| | QGFKNSPTLFNEALHRDLADFRIQHPDLILLQYVDDLLLAATSELDCQQGTRALLQTLGNLGY |
| | RASAKKAQICQKQVKYLGYLLKEGQRWLTEARKETVMGQPTPKTPRQLREFLGKAGFCRLFI |
| | PGFAEMAAPLYPLTKPGTLFNWGPDQQKAYQEIKQALLTAPALGLPDLTKPFELFVDEKQGY |
| | AKGVLTQKLGPWRRPVAYLSKKLDPVAAGWPPCLRMVAAIAVLTKDAGKLTMGQPLVILA |
| | PHAVEALVKQPPDRWLSNARMTHYQALLLDTDRVQFGPVVALNPATLLPLPEEGLQHNCLD |
| | ILAEAHGTRPDLTDQPLPDADHTWYTDGSSLLQEGQRKAGAAVTTETEVIWAKALPAGTSA |
| | QRAELIALTQALKMAEGKKLNVYTDSRYAFATAHIHGEIYRRRGWLTSEGKEIKNKDEILAL |
| | LKALFLPKRLSIIHCPGHQKGHSAEARGNRMADQAARKAAITETPDTSTLLIENSSPSGGSKRT |
| | ADGSEFE (SEQ ID NO: 18172) |
| MLVMS_ | TLNIEDEYRLHETSKEPDVSLGSTWLSDFPQAWAETGGMGLAVRQAPLIIPLKATSTPVSIKQ |
| P03355_ | YPMSQEARLGIKPHIQRLLDQGILVPCQSPWNTPLLPVKKPGTNDYRPVQDLREVNKRVEDIH |
| PLV919 | PTVPNPYNLLSGLPPSHQWYTVLDLKDAFFCLRLHPTSQPLFAFEWRDPEMGISGQLTWTRLP |
| | QGFKNSPTLFNEALHRDLADFRIQHPDLILLQYVDDLLLAATSELDCQQGTRALLQTLGNLGY |
| | RASAKKAQICQKQVKYLGYLLKEGQRWLTEARKETVMGQPTPKTPRQLREFLGKAGFCRLFI |
| | PGFAEMAAPLYPLTKPGTLFNWGPDQQKAYQEIKQALLTAPALGLPDLTKPFELFVDEKQGY |
| | AKGVLTQKLGPWRRPVAYLSKKLDPVAAGWPPCLRMVAAIAVLTKDAGKLTMGQPLVILA |
| | PHAVEALVKQPPDRWLSNARMTHYQALLLDTDRVQFGPVVALNPATLLPLPEEGLQHNCLD |
| | ILAEAHGTRPDLTDQPLPDADHTWYTDGSSLLQEGQRKAGAAVTTETEVIWAKALPAGTSA |
| | QRAELIALTQALKMAEGKKLNVYTDSRYAFATAHIHGEIYRRRGWLTSEGKEIKNKDEILAL |
| | LKALFLPKRLSIIHCPGHQKGHSAEARGNRMADQAARKAAITETPDTSTLLIENSSPSGGSKRT |
| | ADGSEFE (SEQ ID NO: 18172) |
| MLVRD_ | TLNIEDEYRLHEISTEPDVSPGSTWLSDFPQAWAETGGMGLAVRQAPLIIPLKATSTPVSIKQY |
| P11227 | PMSQEAKLGIKPHIQRLLDQGILVPCQSPWNTPLLPVKKPGTNDYRPVQGLREVNKRVEDIHP |
| | TVPNPYNLLSGLPTSHRWYTVLDLKDAFFCLRLHPTSQPLFASEWRDPGMGISGQLTWTRLP |
| | QGFKNSPTLFDEALHRGLADFRIQHPDLILLQYVDDLLLAATSELDCQQGTRALLKTLGNLGY |
| | RASAKKAQICQKQVKYLGYLLREGQRWLTEARKETVMGQPTPKTPRQLREFLGTAGFCRLW |
| | IPRFAEMAAPLYPLTKTGTLFNWGPDQQKAYHEIKQALLTAPALGLPDLTKPFELFVDEKQG |
| | YAKGVLTQKLGPWRRPVAYLSKKLDPVAAGWPPCLRMVAAIAVLTKDAGKLTMGQPLVIL |
| | APHAVEALVKQPPDRWLSNARMTHYQAMLLDTDRVQFGPVVALNPATLLPLPEEGAPHDCL |
| | EILAETHGTEPDLTDQPIPDADHTWYTDGSSFLQEGQRKAGAAVTTETEVIWARALPAGTSA |
| | QRAELIALTQALKMAEGKRLNVYTDSRYAFATAHIHGEIYKRRGLLTSEGREIKNKSEILALL |
| | KALFLPKRLSIIHCLGHQKGDSAEARGNRLADQAAREAAIKTPPDTSTLL (SEQ ID NO: 18173) |
| MLVRD_ | TLNIEDEYRLHEISTEPDVSPGSTWLSDFPQAWAETGGMGLAVRQAPLIIPLKATSTPVSIKQY |
| P11227_ | PMSQEAKLGIKPHIQRLLDQGILVPCQSPWNTPLLPVKKPGTNDYRPVQGLREVNKRVEDIHP |
| 3mut | TVPNPYNLLSGLPTSHRWYTVLDLKDAFFCLRLHPTSQPLFASEWRDPGMGISGQLTWTRLP |
| | QGFKNSPTLFNEALHRGLADFRIQHPDLILLQYVDDLLLAATSELDCQQGTRALLKTLGNLGY |
| | RASAKKAQICQKQVKYLGYLLREGQRWLTEARKETVMGQPTPKTPRQLREFLGTAGFCRLW |
| | IPRFAEMAAPLYPLTKPGTLFNWGPDQQKAYHEIKQALLTAPALGLPDLTKPFELFVDEKQG |
| | YAKGVLTQKLGPWRRPVAYLSKKLDPVAAGWPPCLRMVAAIAVLTKDAGKLTMGQPLVIL |
| | APHAVEALVKQPPDRWLSNARMTHYQAMLLDTDRVQFGPVVALNPATLLPLPEEGAPHDCL |
| | EILAETHGTEPDLTDQPIPDADHTWYTDGSSFLQEGQRKAGAAVTTETEVIWARALPAGTSA |
| | QRAELIALTQALKMAEGKRLNVYTDSRYAFATAHIHGEIYKRRGWLTSEGREIKNKSEILALL |
| | KALFLPKRLSIIHCLGHQKGDSAEARGNRLADQAAREAAIKTPPDTSTLL (SEQ ID NO: 18174) |
| MMTVB_ | WVQEISDSRPMLHIYLNGRRFLGLLNTGADKTCIAGRDWPANWPIHQTESSLQGLGMACGV |
| P03365 | ARSSQPLRWQHEDKSGIIHPFVIPTLPFTLWGRDIMKDIKVRLMTDSPDDSQDLMIGAIESNLF |
| | ADQISWKSDQPVWLNQWPLKQEKLQALQQLVTEQLQLGHLEESNSPWNTPVFVIKKKSGK |
| | WRLLQDLRAVNATMHDMGALQPGLPSPVAVPKGWEIIIIDLQDCFFNIKLHPEDCKRFAFSVP |
| | SPNFKRPYQRFQWKVLPQGMKNSPTLCQKFVDKAILTVRDKYQDSYIVHYMDDILLAHPSRS |
| | IVDEILTSMIQALNKHGLVVSTEKIQKYDNLKYLGTHIQGDSVSYQKLQIRTDKLRTLNDFQK |
| | LLGNINWIRPFLKLTTGELKPLFEILNGDSNPISTRKLTPEACKALQLMNERLSTARVKRLDLS |
| | QPWSLCILKTEYTPTACLWQDGVVEWIHLPHISPKVITPYDIFCTQLIIKGRHRSKELFSKDPDY |
| | IVVPYTKVQFDLLLQEKEDWPISLLGFLGEVHFHLPKDPLLTFTLQTAIIFPHMTSTTPLEKGIVI |
| | FTDGSANGRSVTYIQGREPIIKENTQNTAQQAEIVAVITAFEEVSQPFNLYTDSKYVTGLFPEIE |
| | TATLSPRTKIYTELKHLQRLIHKRQEKFYIGHIRGHTGLPGPLAQGNAYADSLTRILT (SEQ ID |
| | NO: 18175) |
| MMTVB_ | WVQEISDSRPMLHIYLNGRRFLGLLNTGADKTCIAGRDWPANWPIHQTESSLQGLGMACGV |
| P03365 | ARSSQPLRWQHEDKSGIIHPFVIPTLPFTLWGRDIMKDIKVRLMTDSPDDSQDLMIGAIESNLF |
| | ADQISWKSDQPVWLNQWPLKQEKLQALQQLVTEQLQLGHLEESNSPWNTPVFVIKKKSGK |
| | WRLLQDLRAVNATMHDMGALQPGLPSPVAVPKGWEIIIIDLQDCFFNIKLHPEDCKRFAFSVP |
| | SPNFKRPYQRFQWKVLPQGMKNSPTLCQKFVDKAILTVRDKYQDSYIVHYMDDILLAHPSRS |
| | IVDEILTSMIQALNKHGLVVSTEKIQKYDNLKYLGTHIQGDSVSYQKLQIRTDKLRTLNDFQK |
| | LLGNINWIRPFLKLTTGELKPLFEILNGDSNPISTRKLTPEACKALQLMNERLSTARVKRLDLS |
| | QPWSLCILKTEYTPTACLWQDGVVEWIHLPHISPKVITPYDIFCTQLIIKGRHRSKELFSKDPDY |
| | IVVPYTKVQFDLLLQEKEDWPISLLGFLGEVHFHLPKDPLLTFTLQTAIIFPHMTSTTPLEKGIVI |
| | FTDGSANGRSVTYIQGREPIIKENTQNTAQQAEIVAVITAFEEVSQPFNLYTDSKYVTGLFPEIE |
| | TATLSPRTKIYTELKHLQRLIHKRQEKFYIGHIRGHTGLPGPLAQGNAYADSLTRILT (SEQ ID |
| | NO: 18175) |
| MMTVB_ | WVQEISDSRPMLHIYLNGRRFLGLLNTGADKTCIAGRDWPANWPIHQTESSLQGLGMACGV |
| P03365_ | ARSSQPLRWQHEDKSGIIHPFVIPTLPFTLWGRDIMKDIKVRLMTDSPDDSQDLMIGAIESNLF |
| 2mut | ADQISWKSDQPVWLNQWPLKQEKLQALQQLVTEQLQLGHLEESNSPWNTPVFVIKKKSGK |
| | WRLLQDLRAVNATMHDMGALQPGLPSPVAVPKGWEIIIIDLQDCFFNIKLHPEDCKRFAFSVP |
| | SPNFKRPYQRFQWKVLPQGMKNSPTLCQKFVDKAILTVRDKYQDSYIVHYMDDILLAHPSRS |
| | IVDEILTSMIQALNKHGLVVSTEKIQKYDNLKYLGTHIQGDSVSYQKLQIRTDKLRTLNDFQK |
| | LLGNINWIRPFLKLTTGELKPLFEILNPDSNPISTRKLTPEACKALQLMNERLSTARVKRLDLS |
| | QPWSLCILKTEYTPTACLWQDGVVEWIHLPHISPKVITPYDIFCTQLIIKGRHRSKELFSKDPDY |
| | IVVPYTKVQFDLLLQEKEDWPISLLGFLGEVHFHLPKDPLLTFTLQTAIIFPHMTSTTPLEKGIVI |
| | FTDGSANGRSVTYIQGREPIIKENTQNTAQQAEIVAVITAFEEVSQPFNLYTDSKYVTGLFPEIE |
| | TATLSPRTKIYTELKHLQRLIHKRQEKFYIGHIRGHTGLPGPLAQGNAYADSLTRILT (SEQ ID |
| | NO: 18176) |
| MMTVB_ | VQEISDSRPMLHIYLNGRRFLGLLDTGADKTCIAGRDWPANWPIHQTESSLQGLGMACGVAR |
| P03365_ | SSQPLRWQHEDKSGIIHPFVIPTLPFTLWGRDIMKDIKVRLMTDSPDDSQDLMIGAIESNLFAD |
| 2mut_WS | QISWKSDQPVWLNQWPLKQEKLQALQQLVTEQLQLGHLEESNSPWNTPVFVIKKKSGKWRL |
| | LQDLRAVNATMHDMGALQPGLPSPVAVPKGWEIIIIDLQDCFFNIKLHPEDCKRFAFSVPSPNF |
| | KRPYQRFQWKVLPQGMKNSPTLCQKFVDKAILTVRDKYQDSYIVHYMDDILLAHPSRSIVDE |
| | ILTSMIQALNKHGLVVSTEKIQKYDNLKYLGTHIQGDSVSYQKLQIRTDKLRTLNDFQKLLGN |
| | INWIRPFLKLTTGELKPLFEILNPDSNPISTRKLTPEACKALQLMNERLSTARVKRLDLSQPWS |
| | LCILKTEYTPTACLWQDGVVEWIHLPHISPKVITPYDIFCTQLIIKGRHRSKELFSKDPDYIVVP |
| | YTKVQFDLLLQEKEDWPISLLGFLGEVHFHLPKDPLLTFTLQTAIIFPHMTSTTPLEKGIVIFTD |
| | GSANGRSVTYIQGREPIIKENTQNTAQQAEIVAVITAFEEVSQPFNLYTDSKYVTGLFPEIETAT |
| | LSPRTKIYTELKHLQRLIHKRQEKFYIGHIRGHTGLPGPLAQGNAYADSLTRILTA (SEQ ID |
| | NO: 18177) |
| MMTVB_ | VQEISDSRPMLHIYLNGRRFLGLLDTGADKTCIAGRDWPANWPIHQTESSLQGLGMACGVAR |
| P03365_ | SSQPLRWQHEDKSGIIHPFVIPTLPFTLWGRDIMKDIKVRLMTDSPDDSQDLMIGAIESNLFAD |
| 2mut_WS | QISWKSDQPVWLNQWPLKQEKLQALQQLVTEQLQLGHLEESNSPWNTPVFVIKKKSGKWRL |
| | LQDLRAVNATMHDMGALQPGLPSPVAVPKGWEIIIIDLQDCFFNIKLHPEDCKRFAFSVPSPNF |
| | KRPYQRFQWKVLPQGMKNSPTLCQKFVDKAILTVRDKYQDSYIVHYMDDILLAHPSRSIVDE |
| | ILTSMIQALNKHGLVVSTEKIQKYDNLKYLGTHIQGDSVSYQKLQIRTDKLRTLNDFQKLLGN |
| | INWIRPFLKLTTGELKPLFEILNPDSNPISTRKLTPEACKALQLMNERLSTARVKRLDLSQPWS |
| | LCILKTEYTPTACLWQDGVVEWIHLPHISPKVITPYDIFCTQLIIKGRHRSKELFSKDPDYIVVP |
| | YTKVQFDLLLQEKEDWPISLLGFLGEVHFHLPKDPLLTFTLQTAIIFPHMTSTTPLEKGIVIFTD |
| | GSANGRSVTYIQGREPIIKENTQNTAQQAEIVAVITAFEEVSQPFNLYTDSKYVTGLFPEIETAT |
| | LSPRTKIYTELKHLQRLIHKRQEKFYIGHIRGHTGLPGPLAQGNAYADSLTRILTA (SEQ ID |
| | NO: 18177) |
| MMTVB_ | WVQEISDSRPMLHIYLNGRRFLGLLNTGADKTCIAGRDWPANWPIHQTESSLQGLGMACGV |
| P03365_ | ARSSQPLRWQHEDKSGIIHPFVIPTLPFTLWGRDIMKDIKVRLMTDSPDDSQDLMIGAIESNLF |
| 2mutB | ADQISWKSDQPVWLNQWPLKQEKLQALQQLVTEQLQLGHLEESNSPWNTPVFVIKKKSGK |
| | WRLLQDLRAVNATMHDMGALQPGLPSPVAPPKGWEIIIIDLQDCFFNIKLHPEDCKRFAFSVP |
| | SPNFKRPYQRFQWKVLPQGMKNSPTLCQKFVDKAILTVRDKYQDSYIVHYMDDILLAHPSRS |
| | IVDEILTSMIQALNKHGLVVSTEKIQKYDNLKYLGTHIQGDSVSYQKLQIRTDKLRTLNDFQK |
| | LLGNINWIRPFLKLTTGELKPLFEILNPDSNPISTRKLTPEACKALQLMNERLSTARVKRLDLS |
| | QPWSLCILKTEYTPTACLWQDGVVEWIHLPHISPKVITPYDIFCTQLIIKGRHRSKELFSKDPDY |
| | IVVPYTKVQFDLLLQEKEDWPISLLGFLGEVHFHLPKDPLLTFTLQTAIIFPHMTSTTPLEKGIVI |
| | FTDGSANGRSVTYIQGREPIIKENTQNTAQQAEIVAVITAFEEVSQPFNLYTDSKYVTGLFPEIE |
| | TATLSPRTKIYTELKHLQRLIHKRQEKFYIGHIRGHTGLPGPLAQGNAYADSLTRILT (SEQ ID |
| | NO: 18178) |
| MMTVB_ | WVQEISDSRPMLHIYLNGRRFLGLLNTGADKTCIAGRDWPANWPIHQTESSLQGLGMACGV |
| P03365_ | ARSSQPLRWQHEDKSGIIHPFVIPTLPFTLWGRDIMKDIKVRLMTDSPDDSQDLMIGAIESNLF |
| 2mutB | ADQISWKSDQPVWLNQWPLKQEKLQALQQLVTEQLQLGHLEESNSPWNTPVFVIKKKSGK |
| | WRLLQDLRAVNATMHDMGALQPGLPSPVAPPKGWEIIIIDLQDCFFNIKLHPEDCKRFAFSVP |
| | SPNFKRPYQRFQWKVLPQGMKNSPTLCQKFVDKAILTVRDKYQDSYIVHYMDDILLAHPSRS |
| | IVDEILTSMIQALNKHGLVVSTEKIQKYDNLKYLGTHIQGDSVSYQKLQIRTDKLRTLNDFQK |
| | LLGNINWIRPFLKLTTGELKPLFEILNPDSNPISTRKLTPEACKALQLMNERLSTARVKRLDLS |
| | QPWSLCILKTEYTPTACLWQDGVVEWIHLPHISPKVITPYDIFCTQLIIKGRHRSKELFSKDPDY |
| | IVVPYTKVQFDLLLQEKEDWPISLLGFLGEVHFHLPKDPLLTFTLQTAIIFPHMTSTTPLEKGIVI |
| | FTDGSANGRSVTYIQGREPIIKENTQNTAQQAEIVAVITAFEEVSQPFNLYTDSKYVTGLFPEIE |
| | TATLSPRTKIYTELKHLQRLIHKRQEKFYIGHIRGHTGLPGPLAQGNAYADSLTRILT (SEQ ID |
| | NO: 18178) |
| MMTVB_ | VQEISDSRPMLHIYLNGRRFLGLLDTGADKTCIAGRDWPANWPIHQTESSLQGLGMACGVAR |
| P03365_ | SSQPLRWQHEDKSGIIHPFVIPTLPFTLWGRDIMKDIKVRLMTDSPDDSQDLMIGAIESNLFAD |
| 2mutB_WS | QISWKSDQPVWLNQWPLKQEKLQALQQLVTEQLQLGHLEESNSPWNTPVFVIKKKSGKWRL |
| | LQDLRAVNATMHDMGALQPGLPSPPAVPKGWEIIIIDLQDCFFNIKLHPEDCKRFAFSVPSPNF |
| | KRPYQRFQWKVLPQGMKNSPTLCQKFVDKAILTVRDKYQDSYIVHYMDDILLAHPSRSIVDE |
| | ILTSMIQALNKHGLVVSTEKIQKYDNLKYLGTHIQGDSVSYQKLQIRTDKLRTLNDFQKLLGN |
| | INWIRPFLKLTTGELKPLFEILNPDSNPISTRKLTPEACKALQLMNERLSTARVKRLDLSQPWS |
| | LCILKTEYTPTACLWQDGVVEWIHLPHISPKVITPYDIFCTQLIIKGRHRSKELFSKDPDYIVVP |
| | YTKVQFDLLLQEKEDWPISLLGFLGEVHFHLPKDPLLTFTLQTAIIFPHMTSTTPLEKGIVIFTD |
| | GSANGRSVTYIQGREPIIKENTQNTAQQAEIVAVITAFEEVSQPFNLYTDSKYVTGLFPEIETAT |
| | LSPRTKIYTELKHLQRLIHKRQEKFYIGHIRGHTGLPGPLAQGNAYADSLTRILTA (SEQ ID |
| | NO: 18179) |
| MMTVB_ | VQEISDSRPMLHIYLNGRRFLGLLDTGADKTCIAGRDWPANWPIHQTESSLQGLGMACGVAR |
| P03365_ | SSQPLRWQHEDKSGIIHPFVIPTLPFTLWGRDIMKDIKVRLMTDSPDDSQDLMIGAIESNLFAD |
| 2mutB_WS | QISWKSDQPVWLNQWPLKQEKLQALQQLVTEQLQLGHLEESNSPWNTPVFVIKKKSGKWRL |
| | LQDLRAVNATMHDMGALQPGLPSPPAVPKGWEIIIIDLQDCFFNIKLHPEDCKRFAFSVPSPNF |
| | KRPYQRFQWKVLPQGMKNSPTLCQKFVDKAILTVRDKYQDSYIVHYMDDILLAHPSRSIVDE |
| | ILTSMIQALNKHGLVVSTEKIQKYDNLKYLGTHIQGDSVSYQKLQIRTDKLRTLNDFQKLLGN |
| | INWIRPFLKLTTGELKPLFEILNPDSNPISTRKLTPEACKALQLMNERLSTARVKRLDLSQPWS |
| | LCILKTEYTPTACLWQDGVVEWIHLPHISPKVITPYDIFCTQLIIKGRHRSKELFSKDPDYIVVP |
| | YTKVQFDLLLQEKEDWPISLLGFLGEVHFHLPKDPLLTFTLQTAIIFPHMTSTTPLEKGIVIFTD |
| | GSANGRSVTYIQGREPIIKENTQNTAQQAEIVAVITAFEEVSQPFNLYTDSKYVTGLFPEIETAT |
| | LSPRTKIYTELKHLQRLIHKRQEKFYIGHIRGHTGLPGPLAQGNAYADSLTRILTA (SEQ ID |
| | NO: 18179) |
| MMTVB_ | VQEISDSRPMLHIYLNGRRFLGLLDTGADKTCIAGRDWPANWPIHQTESSLQGLGMACGVAR |
| P03365_WS | SSQPLRWQHEDKSGIIHPFVIPTLPFTLWGRDIMKDIKVRLMTDSPDDSQDLMIGAIESNLFAD |
| | QISWKSDQPVWLNQWPLKQEKLQALQQLVTEQLQLGHLEESNSPWNTPVFVIKKKSGKWRL |
| | LQDLRAVNATMHDMGALQPGLPSPVAVPKGWEIIIIDLQDCFFNIKLHPEDCKRFAFSVPSPNF |
| | KRPYQRFQWKVLPQGMKNSPTLCQKFVDKAILTVRDKYQDSYIVHYMDDILLAHPSRSIVDE |
| | ILTSMIQALNKHGLVVSTEKIQKYDNLKYLGTHIQGDSVSYQKLQIRTDKLRTLNDFQKLLGN |
| | INWIRPFLKLTTGELKPLFEILNGDSNPISTRKLTPEACKALQLMNERLSTARVKRLDLSQPWS |
| | LCILKTEYTPTACLWQDGVVEWIHLPHISPKVITPYDIFCTQLIIKGRHRSKELFSKDPDYIVVP |
| | YTKVQFDLLLQEKEDWPISLLGFLGEVHFHLPKDPLLTFTLQTAIIFPHMTSTTPLEKGIVIFTD |
| | GSANGRSVTYIQGREPIIKENTQNTAQQAEIVAVITAFEEVSQPFNLYTDSKYVTGLFPEIETAT |
| | LSPRTKIYTELKHLQRLIHKRQEKFYIGHIRGHTGLPGPLAQGNAYADSLTRILTA (SEQ ID |
| | NO: 18180) |
| MMTVB_ | VQEISDSRPMLHIYLNGRRFLGLLDTGADKTCIAGRDWPANWPIHQTESSLQGLGMACGVAR |
| P03365_WS | SSQPLRWQHEDKSGIIHPFVIPTLPFTLWGRDIMKDIKVRLMTDSPDDSQDLMIGAIESNLFAD |
| | QISWKSDQPVWLNQWPLKQEKLQALQQLVTEQLQLGHLEESNSPWNTPVFVIKKKSGKWRL |
| | LQDLRAVNATMHDMGALQPGLPSPVAVPKGWEIIIIDLQDCFFNIKLHPEDCKRFAFSVPSPNF |
| | KRPYQRFQWKVLPQGMKNSPTLCQKFVDKAILTVRDKYQDSYIVHYMDDILLAHPSRSIVDE |
| | ILTSMIQALNKHGLVVSTEKIQKYDNLKYLGTHIQGDSVSYQKLQIRTDKLRTLNDFQKLLGN |
| | INWIRPFLKLTTGELKPLFEILNGDSNPISTRKLTPEACKALQLMNERLSTARVKRLDLSQPWS |
| | LCILKTEYTPTACLWQDGVVEWIHLPHISPKVITPYDIFCTQLIIKGRHRSKELFSKDPDYIVVP |
| | YTKVQFDLLLQEKEDWPISLLGFLGEVHFHLPKDPLLTFTLQTAIIFPHMTSTTPLEKGIVIFTD |
| | GSANGRSVTYIQGREPIIKENTQNTAQQAEIVAVITAFEEVSQPFNLYTDSKYVTGLFPEIETAT |
| | LSPRTKIYTELKHLQRLIHKRQEKFYIGHIRGHTGLPGPLAQGNAYADSLTRILTA (SEQ ID |
| | NO: 18180) |
| MMTVB_ | GRDIMKDIKVRLMTDSPDDSQDLMIGAIESNLFADQISWKSDQPVWLNQWPLKQEKLQALQ |
| P03365- | QLVTEQLQLGHLEESNSPWNTPVFVIKKKSGKWRLLQDLRAVNATMHDMGALQPGLPSPVA |
| Pro | VPKGWEIIIIDLQDCFFNIKLHPEDCKRFAFSVPSPNFKRPYQRFQWKVLPQGMKNSPTLCQKF |
| | VDKAILTVRDKYQDSYIVHYMDDILLAHPSRSIVDEILTSMIQALNKHGLVVSTEKIQKYDNL |
| | KYLGTHIQGDSVSYQKLQIRTDKLRTLNDFQKLLGNINWIRPFLKLTTGELKPLFEILNGDSNP |
| | ISTRKLTPEACKALQLMNERLSTARVKRLDLSQPWSLCILKTEYTPTACLWQDGVVEWIHLP |
| | HISPKVITPYDIFCTQLIIKGRHRSKELFSKDPDYIVVPYTKVQFDLLLQEKEDWPISLLGFLGE |
| | VHFHLPKDPLLTFTLQTAIIFPHMTSTTPLEKGIVIFTDGSANGRSVTYIQGREPIIKENTQNTAQ |
| | QAEIVAVITAFEEVSQPFNLYTDSKYVTGLFPEIETATLSPRTKIYTELKHLQRLIHKRQEKFYI |
| | GHIRGHTGLPGPLAQGNAYADSLTRILT (SEQ ID NO: 18181) |
| MMTVB_ | GRDIMKDIKVRLMTDSPDDSQDLMIGAIESNLFADQISWKSDQPVWLNQWPLKQEKLQALQ |
| P03365- | QLVTEQLQLGHLEESNSPWNTPVFVIKKKSGKWRLLQDLRAVNATMHDMGALQPGLPSPVA |
| Pro | VPKGWEIIIIDLQDCFFNIKLHPEDCKRFAFSVPSPNFKRPYQRFQWKVLPQGMKNSPTLCQKF |
| | VDKAILTVRDKYQDSYIVHYMDDILLAHPSRSIVDEILTSMIQALNKHGLVVSTEKIQKYDNL |
| | KYLGTHIQGDSVSYQKLQIRTDKLRTLNDFQKLLGNINWIRPFLKLTTGELKPLFEILNGDSNP |
| | ISTRKLTPEACKALQLMNERLSTARVKRLDLSQPWSLCILKTEYTPTACLWQDGVVEWIHLP |
| | HISPKVITPYDIFCTQLIIKGRHRSKELFSKDPDYIVVPYTKVQFDLLLQEKEDWPISLLGFLGE |
| | VHFHLPKDPLLTFTLQTAIIFPHMTSTTPLEKGIVIFTDGSANGRSVTYIQGREPIIKENTQNTAQ |
| | QAEIVAVITAFEEVSQPFNLYTDSKYVTGLFPEIETATLSPRTKIYTELKHLQRLIHKRQEKFYI |
| | GHIRGHTGLPGPLAQGNAYADSLTRILT (SEQ ID NO: 18181) |
| MMTVB_ | GRDIMKDIKVRLMTDSPDDSQDLMIGAIESNLFADQISWKSDQPVWLNQWPLKQEKLQALQ |
| P03365- | QLVTEQLQLGHLEESNSPWNTPVFVIKKKSGKWRLLQDLRAVNATMHDMGALQPGLPSPVA |
| Pro_2mut | VPKGWEIIIIDLQDCFFNIKLHPEDCKRFAFSVPSPNFKRPYQRFQWKVLPQGMKNSPTLCQKF |
| | VDKAILTVRDKYQDSYIVHYMDDILLAHPSRSIVDEILTSMIQALNKHGLVVSTEKIQKYDNL |
| | KYLGTHIQGDSVSYQKLQIRTDKLRTLNDFQKLLGNINWIRPFLKLTTGELKPLFEILNPDSNPI |
| | STRKLTPEACKALQLMNERLSTARVKRLDLSQPWSLCILKTEYTPTACLWQDGVVEWIHLPH |
| | ISPKVITPYDIFCTQLIIKGRHRSKELFSKDPDYIVVPYTKVQFDLLLQEKEDWPISLLGFLGEV |
| | HFHLPKDPLLTFTLQTAIIFPHMTSTTPLEKGIVIFTDGSANGRSVTYIQGREPIIKENTQNTAQQ |
| | AEIVAVITAFEEVSQPFNLYTDSKYVTGLFPEIETATLSPRTKIYTELKHLQRLIHKRQEKFYIG |
| | HIRGHTGLPGPLAQGNAYADSLTRILT (SEQ ID NO: 18182) |
| MMTVB_ | GRDIMKDIKVRLMTDSPDDSQDLMIGAIESNLFADQISWKSDQPVWLNQWPLKQEKLQALQ |
| P03365- | QLVTEQLQLGHLEESNSPWNTPVFVIKKKSGKWRLLQDLRAVNATMHDMGALQPGLPSPVA |
| Pro_2mut | VPKGWEIIIIDLQDCFFNIKLHPEDCKRFAFSVPSPNFKRPYQRFQWKVLPQGMKNSPTLCQKF |
| | VDKAILTVRDKYQDSYIVHYMDDILLAHPSRSIVDEILTSMIQALNKHGLVVSTEKIQKYDNL |
| | KYLGTHIQGDSVSYQKLQIRTDKLRTLNDFQKLLGNINWIRPFLKLTTGELKPLFEILNPDSNPI |
| | STRKLTPEACKALQLMNERLSTARVKRLDLSQPWSLCILKTEYTPTACLWQDGVVEWIHLPH |
| | ISPKVITPYDIFCTQLIIKGRHRSKELFSKDPDYIVVPYTKVQFDLLLQEKEDWPISLLGFLGEV |
| | HFHLPKDPLLTFTLQTAIIFPHMTSTTPLEKGIVIFTDGSANGRSVTYIQGREPIIKENTQNTAQQ |
| | AEIVAVITAFEEVSQPFNLYTDSKYVTGLFPEIETATLSPRTKIYTELKHLQRLIHKRQEKFYIG |
| | HIRGHTGLPGPLAQGNAYADSLTRILT (SEQ ID NO: 18182) |
| MMTVB_ | GRDIMKDIKVRLMTDSPDDSQDLMIGAIESNLFADQISWKSDQPVWLNQWPLKQEKLQALQ |
| P03365- | QLVTEQLQLGHLEESNSPWNTPVFVIKKKSGKWRLLQDLRAVNATMHDMGALQPGLPSPVA |
| Pro_2mutB | PPKGWEIIIIDLQDCFFNIKLHPEDCKRFAFSVPSPNFKRPYQRFQWKVLPQGMKNSPTLCQKF |
| | VDKAILTVRDKYQDSYIVHYMDDILLAHPSRSIVDEILTSMIQALNKHGLVVSTEKIQKYDNL |
| | KYLGTHIQGDSVSYQKLQIRTDKLRTLNDFQKLLGNINWIRPFLKLTTGELKPLFEILNPDSNPI |
| | STRKLTPEACKALQLMNERLSTARVKRLDLSQPWSLCILKTEYTPTACLWQDGVVEWIHLPH |
| | ISPKVITPYDIFCTQLIIKGRHRSKELFSKDPDYIVVPYTKVQFDLLLQEKEDWPISLLGFLGEV |
| | HFHLPKDPLLTFTLQTAIIFPHMTSTTPLEKGIVIFTDGSANGRSVTYIQGREPIIKENTQNTAQQ |
| | AEIVAVITAFEEVSQPFNLYTDSKYVTGLFPEIETATLSPRTKIYTELKHLQRLIHKRQEKFYIG |
| | HIRGHTGLPGPLAQGNAYADSLTRILT (SEQ ID NO: 18183) |
| MMTVB_ | GRDIMKDIKVRLMTDSPDDSQDLMIGAIESNLFADQISWKSDQPVWLNQWPLKQEKLQALQ |
| P03365- | QLVTEQLQLGHLEESNSPWNTPVFVIKKKSGKWRLLQDLRAVNATMHDMGALQPGLPSPVA |
| Pro_2mutB | PPKGWEIIIIDLQDCFFNIKLHPEDCKRFAFSVPSPNFKRPYQRFQWKVLPQGMKNSPTLCQKF |
| | VDKAILTVRDKYQDSYIVHYMDDILLAHPSRSIVDEILTSMIQALNKHGLVVSTEKIQKYDNL |
| | KYLGTHIQGDSVSYQKLQIRTDKLRTLNDFQKLLGNINWIRPFLKLTTGELKPLFEILNPDSNPI |
| | STRKLTPEACKALQLMNERLSTARVKRLDLSQPWSLCILKTEYTPTACLWQDGVVEWIHLPH |
| | ISPKVITPYDIFCTQLIIKGRHRSKELFSKDPDYIVVPYTKVQFDLLLQEKEDWPISLLGFLGEV |
| | HFHLPKDPLLTFTLQTAIIFPHMTSTTPLEKGIVIFTDGSANGRSVTYIQGREPIIKENTQNTAQQ |
| | AEIVAVITAFEEVSQPFNLYTDSKYVTGLFPEIETATLSPRTKIYTELKHLQRLIHKRQEKFYIG |
| | HIRGHTGLPGPLAQGNAYADSLTRILT (SEQ ID NO: 18183) |
| MPMV_ | LTAAIDILAPQQCAEPITWKSDEPVWVDQWPLTNDKLAAAQQLVQEQLEAGHITESSSPWNT |
| P07572 | PIFVIKKKSGKWRLLQDLRAVNATMVLMGALQPGLPSPVAIPQGYLKIIIDLKDCFFSIPLHPS |
| | DQKRFAFSLPSTNFKEPMQRFQWKVLPQGMANSPTLCQKYVATAIHKVRHAWKQMYIIHY |
| | MDDILIAGKDGQQVLQCFDQLKQELTAAGLHIAPEKVQLQDPYTYLGFELNGPKITNQKAVI |
| | RKDKLQTLNDFQKLLGDINWLRPYLKLTTGDLKPLFDTLKGDSDPNSHRSLSKEALASLEKV |
| | ETAIAEQFVTHINYSLPLIFLIFNTALTPTGLFWQDNPIMWIHLPASPKKVLLPYYDAIADLIILG |
| | RDHSKKYFGIEPSTIIQPYSKSQIDWLMQNTEMWPIACASFVGILDNHYPPNKLIQFCKLHTFV |
| | FPQIISKTPLNNALLVFTDGSSTGMAAYTLTDTTIKFQTNLNSAQLVELQALIAVLSAFPNQPL |
| | NIYTDSAYLAHSIPLLETVAQIKHISETAKLFLQCQQLIYNRSIPFYIGHVRAHSGLPGPIAQGN |
| | QRADLATKIVASNINT (SEQ ID NO: 18184) |
| MPMV_ | LTAAIDILAPQQCAEPITWKSDEPVWVDQWPLTNDKLAAAQQLVQEQLEAGHITESSSPWNT |
| P07572_ | PIFVIKKKSGKWRLLQDLRAVNATMVLMGALQPGLPSPVAPPQGYLKIIIDLKDCFFSIPLHPS |
| 2mutB | DQKRFAFSLPSTNFKEPMQRFQWKVLPQGMANSPTLCQKYVATAIHKVRHAWKQMYIIHY |
| | MDDILIAGKDGQQVLQCFDQLKQELTAAGLHIAPEKVQLQDPYTYLGFELNGPKITNQKAVI |
| | RKDKLQTLNDFQKLLGDINWLRPYLKLTTGDLKPLFDTLKPDSDPNSHRSLSKEALASLEKVE |
| | TAIAEQFVTHINYSLPLIFLIFNTALTPTGLFWQDNPIMWIHLPASPKKVLLPYYDAIADLIILGR |
| | DHSKKYFGIEPSTIIQPYSKSQIDWLMQNTEMWPIACASFVGILDNHYPPNKLIQFCKLHTFVF |
| | PQIISKTPLNNALLVFTDGSSTGMAAYTLTDTTIKFQTNLNSAQLVELQALIAVLSAFPNQPLNI |
| | YTDSAYLAHSIPLLETVAQIKHISETAKLFLQCQQLIYNRSIPFYIGHVRAHSGLPGPIAQGNQR |
| | ADLATKIVASNINT (SEQ ID NO: 18185) |
| PERV_ | TLQLDDEYRLYSPLVKPDQNIQFWLEQFPQAWAETAGMGLAKQVPPQVIQLKASATPVSVR |
| Q4VFZ2 | QYPLSKEAQEGIRPHVQRLIQQGILVPVQSPWNTPLLPVRKPGTNDYRPVQDLREVNKRVQDI |
| | HPTVPNPYNLLCALPPQRSWYTVLDLKDAFFCLRLHPTSQPLFAFEWRDPGTGRTGQLTWTR |
| | LPQGFKNSPTIFDEALHRDLANFRIQHPQVTLLQYVDDLLLAGATKQDCLEGTKALLLELSDL |
| | GYRASAKKAQICRREVTYLGYSLRDGQRWLTEARKKTVVQIPAPTTAKQVREFLGTAGFCRL |
| | WIPGFATLAAPLYPLTKEKGEFSWAPEHQKAFDAIKKALLSAPALALPDVTKPFTLYVDERK |
| | GVARGVLTQTLGPWRRPVAYLSKKLDPVASGWPVCLKAIAAVAILVKDADKLTLGQNITVIA |
| | PHALENIVRQPPDRWMTNARMTHYQSLLLTERVTFAPPAALNPATLLPEETDEPVTHDCHQL |
| | LIEETGVRKDLTDIPLTGEVLTWFTDGSSYVVEGKRMAGAAVVDGTRTIWASSLPEGTSAQK |
| | AELMALTQALRLAEGKSINIYTDSRYAFATAHVHGAIYKQRGLLTSAGREIKNKEEILSLLEA |
| | LHLPKRLAIIHCPGHQKAKDPISRGNQMADRVAKQAAQGVNLL (SEQ ID NO: 18186) |
| PERV_ | TLQLDDEYRLYSPLVKPDQNIQFWLEQFPQAWAETAGMGLAKQVPPQVIQLKASATPVSVR |
| Q4VFZ2 | QYPLSKEAQEGIRPHVQRLIQQGILVPVQSPWNTPLLPVRKPGTNDYRPVQDLREVNKRVQDI |
| | HPTVPNPYNLLCALPPQRSWYTVLDLKDAFFCLRLHPTSQPLFAFEWRDPGTGRTGQLTWTR |
| | LPQGFKNSPTIFDEALHRDLANFRIQHPQVTLLQYVDDLLLAGATKQDCLEGTKALLLELSDL |
| | GYRASAKKAQICRREVTYLGYSLRDGQRWLTEARKKTVVQIPAPTTAKQVREFLGTAGFCRL |
| | WIPGFATLAAPLYPLTKEKGEFSWAPEHQKAFDAIKKALLSAPALALPDVTKPFTLYVDERK |
| | GVARGVLTQTLGPWRRPVAYLSKKLDPVASGWPVCLKAIAAVAILVKDADKLTLGQNITVIA |
| | PHALENIVRQPPDRWMTNARMTHYQSLLLTERVTFAPPAALNPATLLPEETDEPVTHDCHQL |
| | LIEETGVRKDLTDIPLTGEVLTWFTDGSSYVVEGKRMAGAAVVDGTRTIWASSLPEGTSAQK |
| | AELMALTQALRLAEGKSINIYTDSRYAFATAHVHGAIYKQRGLLTSAGREIKNKEEILSLLEA |
| | LHLPKRLAIIHCPGHQKAKDPISRGNQMADRVAKQAAQGVNLL (SEQ ID NO: 18186) |
| PERV_ | TLQLDDEYRLYSPLVKPDQNIQFWLEQFPQAWAETAGMGLAKQVPPQVIQLKASATPVSVR |
| Q4VFZ2_ | QYPLSKEAQEGIRPHVQRLIQQGILVPVQSPWNTPLLPVRKPGTNDYRPVQDLREVNKRVQDI |
| 3mut | HPTVPNPYNLLCALPPQRSWYTVLDLKDAFFCLRLHPTSQPLFAFEWRDPGTGRTGQLTWTR |
| | LPQGFKNSPTIFNEALHRDLANFRIQHPQVTLLQYVDDLLLAGATKQDCLEGTKALLLELSDL |
| | GYRASAKKAQICRREVTYLGYSLRDGQRWLTEARKKTVVQIPAPTTAKQVREFLGTAGFCRL |
| | WIPGFATLAAPLYPLTKPKGEFSWAPEHQKAFDAIKKALLSAPALALPDVTKPFTLYVDERKG |
| | VARGVLTQTLGPWRRPVAYLSKKLDPVASGWPVCLKAIAAVAILVKDADKLTLGQNITVIAP |
| | HALENIVRQPPDRWMTNARMTHYQSLLLTERVTFAPPAALNPATLLPEETDEPVTHDCHQLL |
| | IEETGVRKDLTDIPLTGEVLTWFTDGSSYVVEGKRMAGAAVVDGTRTIWASSLPEGTSAQKA |
| | ELMALTQALRLAEGKSINIYTDSRYAFATAHVHGAIYKQRGWLTSAGREIKNKEEILSLLEAL |
| | HLPKRLAIIHCPGHQKAKDPISRGNQMADRVAKQAAQGVNLL (SEQ ID NO: 18187) |
| PERV_ | TLQLDDEYRLYSPLVKPDQNIQFWLEQFPQAWAETAGMGLAKQVPPQVIQLKASATPVSVR |
| Q4VFZ2_ | QYPLSKEAQEGIRPHVQRLIQQGILVPVQSPWNTPLLPVRKPGTNDYRPVQDLREVNKRVQDI |
| 3mut | HPTVPNPYNLLCALPPQRSWYTVLDLKDAFFCLRLHPTSQPLFAFEWRDPGTGRTGQLTWTR |
| | LPQGFKNSPTIFNEALHRDLANFRIQHPQVTLLQYVDDLLLAGATKQDCLEGTKALLLELSDL |
| | GYRASAKKAQICRREVTYLGYSLRDGQRWLTEARKKTVVQIPAPTTAKQVREFLGTAGFCRL |
| | WIPGFATLAAPLYPLTKPKGEFSWAPEHQKAFDAIKKALLSAPALALPDVTKPFTLYVDERKG |
| | VARGVLTQTLGPWRRPVAYLSKKLDPVASGWPVCLKAIAAVAILVKDADKLTLGQNITVIAP |
| | HALENIVRQPPDRWMTNARMTHYQSLLLTERVTFAPPAALNPATLLPEETDEPVTHDCHQLL |
| | IEETGVRKDLTDIPLTGEVLTWFTDGSSYVVEGKRMAGAAVVDGTRTIWASSLPEGTSAQKA |
| | ELMALTQALRLAEGKSINIYTDSRYAFATAHVHGAIYKQRGWLTSAGREIKNKEEILSLLEAL |
| | HLPKRLAIIHCPGHQKAKDPISRGNQMADRVAKQAAQGVNLL (SEQ ID NO: 18187) |
| PERV_ | LDDEYRLYSPLVKPDQNIQFWLEQFPQAWAETAGMGLAKQVPPQVIQLKASATPVSVRQYP |
| Q4VFZ2_ | LSKEAQEGIRPHVQRLIQQGILVPVQSPWNTPLLPVRKPGTNDYRPVQDLREVNKRVQDIHPT |
| 3mutA_WS | VPNPYNLLCALPPQRSWYTVLDLKDAFFCLRLHPTSQPLFAFEWRDPGTGRTGQLTWTRLPQ |
| | GFKNSPTIFNEALHRDLANFRIQHPQVTLLQYVDDLLLAGATKQDCLEGTKALLLELSDLGYR |
| | ASAKKAQICRREVTYLGYSLRDGQRWLTEARKKTVVQIPAPTTAKQVREFLGKAGFCRLFIP |
| | GFATLAAPLYPLTKPKGEFSWAPEHQKAFDAIKKALLSAPALALPDVTKPFTLYVDERKGVA |
| | RGVLTQTLGPWRRPVAYLSKKLDPVASGWPVCLKAIAAVAILVKDADKLTLGQNITVIAPHA |
| | LENIVRQPPDRWMTNARMTHYQSLLLTERVTFAPPAALNPATLLPEETDEPVTHDCHQLLIEE |
| | TGVRKDLTDIPLTGEVLTWFTDGSSYVVEGKRMAGAAVVDGTRTIWASSLPEGTSAQKAEL |
| | MALTQALRLAEGKSINIYTDSRYAFATAHVHGAIYKQRGWLTSAGREIKNKEEILSLLEALHL |
| | PKRLAIIHCPGHQKAKDPISRGNQMADRVAKQAAQGVNLLP (SEQ ID NO: 18188) |
| PERV_ | LDDEYRLYSPLVKPDQNIQFWLEQFPQAWAETAGMGLAKQVPPQVIQLKASATPVSVRQYP |
| Q4VFZ2_ | LSKEAQEGIRPHVQRLIQQGILVPVQSPWNTPLLPVRKPGTNDYRPVQDLREVNKRVQDIHPT |
| 3mutA_WS | VPNPYNLLCALPPQRSWYTVLDLKDAFFCLRLHPTSQPLFAFEWRDPGTGRTGQLTWTRLPQ |
| | GFKNSPTIFNEALHRDLANFRIQHPQVTLLQYVDDLLLAGATKQDCLEGTKALLLELSDLGYR |
| | ASAKKAQICRREVTYLGYSLRDGQRWLTEARKKTVVQIPAPTTAKQVREFLGKAGFCRLFIP |
| | GFATLAAPLYPLTKPKGEFSWAPEHQKAFDAIKKALLSAPALALPDVTKPFTLYVDERKGVA |
| | RGVLTQTLGPWRRPVAYLSKKLDPVASGWPVCLKAIAAVAILVKDADKLTLGQNITVIAPHA |
| | LENIVRQPPDRWMTNARMTHYQSLLLTERVTFAPPAALNPATLLPEETDEPVTHDCHQLLIEE |
| | TGVRKDLTDIPLTGEVLTWFTDGSSYVVEGKRMAGAAVVDGTRTIWASSLPEGTSAQKAEL |
| | MALTQALRLAEGKSINIYTDSRYAFATAHVHGAIYKQRGWLTSAGREIKNKEEILSLLEALHL |
| | PKRLAIIHCPGHQKAKDPISRGNQMADRVAKQAAQGVNLLP (SEQ ID NO: 18188) |
| SFV1_ | MDPLQLLQPLEAEIKGTKLKAHWNSGATITCVPEAFLEDERPIQTMLIKTIHGEKQQDVYYLT |
| P23074 | FKVQGRKVEAEVLASPYDYILLNPSDVPWLMKKPLQLTVLVPLHEYQERLLQQTALPKEQKE |
| | LLQKLFLKYDALWQHWENQVGHRRIKPHNIATGTLAPRPQKQYPINPKAKPSIQIVIDDLLKQ |
| | GVLIQQNSTMNTPVYPVPKPDGKWRMVLDYREVNKTIPLIAAQNQHSAGILSSIYRGKYKTT |
| | LDLTNGFWAHPITPESYWLTAFTWQGKQYCWTRLPQGFLNSPALFTADVVDLLKEIPNVQA |
| | YVDDIYISHDDPQEHLEQLEKIFSILLNAGYVVSLKKSEIAQREVEFLGFNITKEGRGLTDTFKQ |
| | KLLNITPPKDLKQLQSILGLLNFARNFIPNYSELVKPLYTIVANANGKFISWTEDNSNQLQHIIS |
| | VLNQADNLEERNPETRLIIKVNSSPSAGYIRYYNEGSKRPIMYVNYIFSKAEAKFTQTEKLLTT |
| | MHKGLIKAMDLAMGQEILVYSPIVSMTKIQRTPLPERKALPVRWITWMTYLEDPRIQFHYDK |
| | SLPELQQIPNVTEDVIAKTKHPSEFAMVFYTDGSAIKHPDVNKSHSAGMGIAQVQFIPEYKIVH |
| | QWSIPLGDHTAQLAEIAAVEFACKKALKISGPVLIVTDSFYVAESANKELPYWKSNGFLNNK |
| | KKPLRHVSKWKSIAECLQLKPDIIIMHEKGHQQPMTTLHTEGNNLADKLATQGSYVVH (SEQ |
| | ID NO: 18189) |
| SFV1_ | MDPLQLLQPLEAEIKGTKLKAHWNSGATITCVPEAFLEDERPIQTMLIKTIHGEKQQDVYYLT |
| P23074_ | FKVQGRKVEAEVLASPYDYILLNPSDVPWLMKKPLQLTVLVPLHEYQERLLQQTALPKEQKE |
| 2mut | LLQKLFLKYDALWQHWENQVGHRRIKPHNIATGTLAPRPQKQYPINPKAKPSIQIVIDDLLKQ |
| | GVLIQQNSTMNTPVYPVPKPDGKWRMVLDYREVNKTIPLIAAQNQHSAGILSSIYRGKYKTT |
| | LDLTNGFWAHPITPESYWLTAFTWQGKQYCWTRLPQGFLNSPALFNADVVDLLKEIPNVQA |
| | YVDDIYISHDDPQEHLEQLEKIFSILLNAGYVVSLKKSEIAQREVEFLGFNITKEGRGLTDTFKQ |
| | KLLNITPPKDLKQLQSILGLLNFARNFIPNYSELVKPLYTIVAPANGKFISWTEDNSNQLQHIIS |
| | VLNQADNLEERNPETRLIIKVNSSPSAGYIRYYNEGSKRPIMYVNYIFSKAEAKFTQTEKLLTT |
| | MHKGLIKAMDLAMGQEILVYSPIVSMTKIQRTPLPERKALPVRWITWMTYLEDPRIQFHYDK |
| | SLPELQQIPNVTEDVIAKTKHPSEFAMVFYTDGSAIKHPDVNKSHSAGMGIAQVQFIPEYKIVH |
| | QWSIPLGDHTAQLAEIAAVEFACKKALKISGPVLIVTDSFYVAESANKELPYWKSNGFLNNK |
| | KKPLRHVSKWKSIAECLQLKPDIIIMHEKGHQQPMTTLHTEGNNLADKLATQGSYVVH (SEQ |
| | ID NO: 18190) |
| SFV1_ | MDPLQLLQPLEAEIKGTKLKAHWNSGATITCVPEAFLEDERPIQTMLIKTIHGEKQQDVYYLT |
| P23074_ | FKVQGRKVEAEVLASPYDYILLNPSDVPWLMKKPLQLTVLVPLHEYQERLLQQTALPKEQKE |
| 2mutA | LLQKLFLKYDALWQHWENQVGHRRIKPHNIATGTLAPRPQKQYPINPKAKPSIQIVIDDLLKQ |
| | GVLIQQNSTMNTPVYPVPKPDGKWRMVLDYREVNKTIPLIAAQNQHSAGILSSIYRGKYKTT |
| | LDLTNGFWAHPITPESYWLTAFTWQGKQYCWTRLPQGFLNSPALFNADVVDLLKEIPNVQA |
| | YVDDIYISHDDPQEHLEQLEKIFSILLNAGYVVSLKKSEIAQREVEFLGFNITKEGRGLTDTFKQ |
| | KLLNITPPKDLKQLQSILGKLNFARNFIPNYSELVKPLYTIVAPANGKFISWTEDNSNQLQHIIS |
| | VLNQADNLEERNPETRLIIKVNSSPSAGYIRYYNEGSKRPIMYVNYIFSKAEAKFTQTEKLLTT |
| | MHKGLIKAMDLAMGQEILVYSPIVSMTKIQRTPLPERKALPVRWITWMTYLEDPRIQFHYDK |
| | SLPELQQIPNVTEDVIAKTKHPSEFAMVFYTDGSAIKHPDVNKSHSAGMGIAQVQFIPEYKIVH |
| | QWSIPLGDHTAQLAEIAAVEFACKKALKISGPVLIVTDSFYVAESANKELPYWKSNGFLNNK |
| | KKPLRHVSKWKSIAECLQLKPDIIIMHEKGHQQPMTTLHTEGNNLADKLATQGSYVVH (SEQ |
| | ID NO: 18191) |
| SFV1_ | VPWLMKKPLQLTVLVPLHEYQERLLQQTALPKEQKELLQKLFLKYDALWQHWENQVGHRR |
| P23074- | IKPHNIATGTLAPRPQKQYPINPKAKPSIQIVIDDLLKQGVLIQQNSTMNTPVYPVPKPDGKWR |
| Pro | MVLDYREVNKTIPLIAAQNQHSAGILSSIYRGKYKTTLDLTNGFWAHPITPESYWLTAFTWQG |
| | KQYCWTRLPQGFLNSPALFTADVVDLLKEIPNVQAYVDDIYISHDDPQEHLEQLEKIFSILLNA |
| | GYVVSLKKSEIAQREVEFLGFNITKEGRGLTDTFKQKLLNITPPKDLKQLQSILGLLNFARNFIP |
| | NYSELVKPLYTIVANANGKFISWTEDNSNQLQHIISVLNQADNLEERNPETRLIIKVNSSPSAG |
| | YIRYYNEGSKRPIMYVNYIFSKAEAKFTQTEKLLTTMHKGLIKAMDLAMGQEILVYSPIVSMT |
| | KIQRTPLPERKALPVRWITWMTYLEDPRIQFHYDKSLPELQQIPNVTEDVIAKTKHPSEFAMV |
| | FYTDGSAIKHPDVNKSHSAGMGIAQVQFIPEYKIVHQWSIPLGDHTAQLAEIAAVEFACKKAL |
| | KISGPVLIVTDSFYVAESANKELPYWKSNGFLNNKKKPLRHVSKWKSIAECLQLKPDIIIMHE |
| | KGHQQPMTTLHTEGNNLADKLATQGSYVVH (SEQ ID NO: 18192) |
| SFV1_ | VPWLMKKPLQLTVLVPLHEYQERLLQQTALPKEQKELLQKLFLKYDALWQHWENQVGHRR |
| P23074- | IKPHNIATGTLAPRPQKQYPINPKAKPSIQIVIDDLLKQGVLIQQNSTMNTPVYPVPKPDGKWR |
| Pro_2mut | MVLDYREVNKTIPLIAAQNQHSAGILSSIYRGKYKTTLDLTNGFWAHPITPESYWLTAFTWQG |
| | KQYCWTRLPQGFLNSPALFNADVVDLLKEIPNVQAYVDDIYISHDDPQEHLEQLEKIFSILLN |
| | AGYVVSLKKSEIAQREVEFLGFNITKEGRGLTDTFKQKLLNITPPKDLKQLQSILGLLNFARNF |
| | IPNYSELVKPLYTIVAPANGKFISWTEDNSNQLQHIISVLNQADNLEERNPETRLIIKVNSSPSA |
| | GYIRYYNEGSKRPIMYVNYIFSKAEAKFTQTEKLLTTMHKGLIKAMDLAMGQEILVYSPIVSM |
| | TKIQRTPLPERKALPVRWITWMTYLEDPRIQFHYDKSLPELQQIPNVTEDVIAKTKHPSEFAM |
| | VFYTDGSAIKHPDVNKSHSAGMGIAQVQFIPEYKIVHQWSIPLGDHTAQLAEIAAVEFACKKA |
| | LKISGPVLIVTDSFYVAESANKELPYWKSNGFLNNKKKPLRHVSKWKSIAECLQLKPDIIIMHE |
| | KGHQQPMTTLHTEGNNLADKLATQGSYVVH (SEQ ID NO: 18193) |
| SFV1_ | VPWLMKKPLQLTVLVPLHEYQERLLQQTALPKEQKELLQKLFLKYDALWQHWENQVGHRR |
| P23074- | IKPHNIATGTLAPRPQKQYPINPKAKPSIQIVIDDLLKQGVLIQQNSTMNTPVYPVPKPDGKWR |
| Pro_2mutA | MVLDYREVNKTIPLIAAQNQHSAGILSSIYRGKYKTTLDLTNGFWAHPITPESYWLTAFTWQG |
| | KQYCWTRLPQGFLNSPALFNADVVDLLKEIPNVQAYVDDIYISHDDPQEHLEQLEKIFSILLN |
| | AGYVVSLKKSEIAQREVEFLGFNITKEGRGLTDTFKQKLLNITPPKDLKQLQSILGKLNFARNF |
| | IPNYSELVKPLYTIVAPANGKFISWTEDNSNQLQHIISVLNQADNLEERNPETRLIIKVNSSPSA |
| | GYIRYYNEGSKRPIMYVNYIFSKAEAKFTQTEKLLTTMHKGLIKAMDLAMGQEILVYSPIVSM |
| | TKIQRTPLPERKALPVRWITWMTYLEDPRIQFHYDKSLPELQQIPNVTEDVIAKTKHPSEFAM |
| | VFYTDGSAIKHPDVNKSHSAGMGIAQVQFIPEYKIVHQWSIPLGDHTAQLAEIAAVEFACKKA |
| | LKISGPVLIVTDSFYVAESANKELPYWKSNGFLNNKKKPLRHVSKWKSIAECLQLKPDIIIMHE |
| | KGHQQPMTTLHTEGNNLADKLATQGSYVVH (SEQ ID NO: 18194) |
| SFV3L_ | MDPLQLLQPLEAEIKGTKLKAHWNSGATITCVPQAFLEEEVPIKNIWIKTIHGEKEQPVYYLTF |
| P27401 | KIQGRKVEAEVISSPYDYILVSPSDIPWLMKKPLQLTTLVPLQEYEERLLKQTMLTGSYKEKL |
| | QSLFLKYDALWQHWENQVGHRRIKPHHIATGTVNPRPQKQYPINPKAKASIQTVINDLLKQG |
| | VLIQQNSIMNTPVYPVPKPDGKWRMVLDYREVNKTIPLIAAQNQHSAGILSSIFRGKYKTTLD |
| | LSNGFWAHSITPESYWLTAFTWLGQQYCWTRLPQGFLNSPALFTADVVDLLKEVPNVQVYV |
| | DDIYISHDDPREHLEQLEKVFSLLLNAGYVVSLKKSEIAQHEVEFLGFNITKEGRGLTETFKQK |
| | LLNITPPRDLKQLQSILGLLNFARNFIPNFSELVKPLYNIIATANGKYITWTTDNSQQLQNIISML |
| | NSAENLEERNPEVRLIMKVNTSPSAGYIRFYNEFAKRPIMYLNYVYTKAEVKFTNTEKLLTTI |
| | HKGLIKALDLGMGQEILVYSPIVSMTKIQKTPLPERKALPIRWITWMSYLEDPRIQFHYDKTLP |
| | ELQQVPTVTDDIIAKIKHPSEFSMVFYTDGSAIKHPNVNKSHNAGMGIAQVQFKPEFTVINTW |
| | SIPLGDHTAQLAEVAAVEFACKKALKIDGPVLIVTDSFYVAESVNKELPYWQSNGFFNNKKK |
| | PLKHVSKWKSIADCIQLKPDIIIIHEKGHQPTASTFHTEGNNLADKLATQGSYVVN (SEQ ID |
| | NO: 18195) |
| SFV3L_ | MDPLQLLQPLEAEIKGTKLKAHWNSGATITCVPQAFLEEEVPIKNIWIKTIHGEKEQPVYYLTF |
| P27401_ | KIQGRKVEAEVISSPYDYILVSPSDIPWLMKKPLQLTTLVPLQEYEERLLKQTMLTGSYKEKL |
| 2mut | QSLFLKYDALWQHWENQVGHRRIKPHHIATGTVNPRPQKQYPINPKAKASIQTVINDLLKQG |
| | VLIQQNSIMNTPVYPVPKPDGKWRMVLDYREVNKTIPLIAAQNQHSAGILSSIFRGKYKTTLD |
| | LSNGFWAHSITPESYWLTAFTWLGQQYCWTRLPQGFLNSPALFNADVVDLLKEVPNVQVYV |
| | DDIYISHDDPREHLEQLEKVFSLLLNAGYVVSLKKSEIAQHEVEFLGFNITKEGRGLTETFKQK |
| | LLNITPPRDLKQLQSILGLLNFARNFIPNFSELVKPLYNIIATAPGKYITWTTDNSQQLQNIISML |
| | NSAENLEERNPEVRLIMKVNTSPSAGYIRFYNEFAKRPIMYLNYVYTKAEVKFTNTEKLLTTI |
| | HKGLIKALDLGMGQEILVYSPIVSMTKIQKTPLPERKALPIRWITWMSYLEDPRIQFHYDKTLP |
| | ELQQVPTVTDDIIAKIKHPSEFSMVFYTDGSAIKHPNVNKSHNAGMGIAQVQFKPEFTVINTW |
| | SIPLGDHTAQLAEVAAVEFACKKALKIDGPVLIVTDSFYVAESVNKELPYWQSNGFFNNKKK |
| | PLKHVSKWKSIADCIQLKPDIIIIHEKGHQPTASTFHTEGNNLADKLATQGSYVVN (SEQ ID |
| | NO: 18196) |
| SFV3L_ | MDPLQLLQPLEAEIKGTKLKAHWNSGATITCVPQAFLEEEVPIKNIWIKTIHGEKEQPVYYLTF |
| P27401_ | KIQGRKVEAEVISSPYDYILVSPSDIPWLMKKPLQLTTLVPLQEYEERLLKQTMLTGSYKEKL |
| 2mutA | QSLFLKYDALWQHWENQVGHRRIKPHHIATGTVNPRPQKQYPINPKAKASIQTVINDLLKQG |
| | VLIQQNSIMNTPVYPVPKPDGKWRMVLDYREVNKTIPLIAAQNQHSAGILSSIFRGKYKTTLD |
| | LSNGFWAHSITPESYWLTAFTWLGQQYCWTRLPQGFLNSPALFNADVVDLLKEVPNVQVYV |
| | DDIYISHDDPREHLEQLEKVFSLLLNAGYVVSLKKSEIAQHEVEFLGFNITKEGRGLTETFKQK |
| | LLNITPPRDLKQLQSILGKLNFARNFIPNFSELVKPLYNIIATAPGKYITWTTDNSQQLQNIISML |
| | NSAENLEERNPEVRLIMKVNTSPSAGYIRFYNEFAKRPIMYLNYVYTKAEVKFTNTEKLLTTI |
| | HKGLIKALDLGMGQEILVYSPIVSMTKIQKTPLPERKALPIRWITWMSYLEDPRIQFHYDKTLP |
| | ELQQVPTVTDDIIAKIKHPSEFSMVFYTDGSAIKHPNVNKSHNAGMGIAQVQFKPEFTVINTW |
| | SIPLGDHTAQLAEVAAVEFACKKALKIDGPVLIVTDSFYVAESVNKELPYWQSNGFFNNKKK |
| | PLKHVSKWKSIADCIQLKPDIIIIHEKGHQPTASTFHTEGNNLADKLATQGSYVVN (SEQ ID |
| | NO: 18197) |
| SFV3L_ | IPWLMKKPLQLTTLVPLQEYEERLLKQTMLTGSYKEKLQSLFLKYDALWQHWENQVGHRRI |
| P27401- | KPHHIATGTVNPRPQKQYPINPKAKASIQTVINDLLKQGVLIQQNSIMNTPVYPVPKPDGKWR |
| Pro | MVLDYREVNKTIPLIAAQNQHSAGILSSIFRGKYKTTLDLSNGFWAHSITPESYWLTAFTWLG |
| | QQYCWTRLPQGFLNSPALFTADVVDLLKEVPNVQVYVDDIYISHDDPREHLEQLEKVFSLLL |
| | NAGYVVSLKKSEIAQHEVEFLGFNITKEGRGLTETFKQKLLNITPPRDLKQLQSILGLLNFARN |
| | FIPNFSELVKPLYNIIATANGKYITWTTDNSQQLQNIISMLNSAENLEERNPEVRLIMKVNTSPS |
| | AGYIRFYNEFAKRPIMYLNYVYTKAEVKFTNTEKLLTTIHKGLIKALDLGMGQEILVYSPIVS |
| | MTKIQKTPLPERKALPIRWITWMSYLEDPRIQFHYDKTLPELQQVPTVTDDIIAKIKHPSEFSM |
| | VFYTDGSAIKHPNVNKSHNAGMGIAQVQFKPEFTVINTWSIPLGDHTAQLAEVAAVEFACKK |
| | ALKIDGPVLIVTDSFYVAESVNKELPYWQSNGFFNNKKKPLKHVSKWKSIADCIQLKPDIIIIH |
| | EKGHQPTASTFHTEGNNLADKLATQGSYVVN (SEQ ID NO: 18198) |
| SFV3L_ | IPWLMKKPLQLTTLVPLQEYEERLLKQTMLTGSYKEKLQSLFLKYDALWQHWENQVGHRRI |
| P27401- | KPHHIATGTVNPRPQKQYPINPKAKASIQTVINDLLKQGVLIQQNSIMNTPVYPVPKPDGKWR |
| Pro_2mut | MVLDYREVNKTIPLIAAQNQHSAGILSSIFRGKYKTTLDLSNGFWAHSITPESYWLTAFTWLG |
| | QQYCWTRLPQGFLNSPALFNADVVDLLKEVPNVQVYVDDIYISHDDPREHLEQLEKVFSLLL |
| | NAGYVVSLKKSEIAQHEVEFLGFNITKEGRGLTETFKQKLLNITPPRDLKQLQSILGLLNFARN |
| | FIPNFSELVKPLYNIIATAPGKYITWTTDNSQQLQNIISMLNSAENLEERNPEVRLIMKVNTSPS |
| | AGYIRFYNEFAKRPIMYLNYVYTKAEVKFTNTEKLLTTIHKGLIKALDLGMGQEILVYSPIVS |
| | MTKIQKTPLPERKALPIRWITWMSYLEDPRIQFHYDKTLPELQQVPTVTDDIIAKIKHPSEFSM |
| | VFYTDGSAIKHPNVNKSHNAGMGIAQVQFKPEFTVINTWSIPLGDHTAQLAEVAAVEFACKK |
| | ALKIDGPVLIVTDSFYVAESVNKELPYWQSNGFFNNKKKPLKHVSKWKSIADCIQLKPDIIIIH |
| | EKGHQPTASTFHTEGNNLADKLATQGSYVVN (SEQ ID NO: 18199) |
| SFV3L_ | IPWLMKKPLQLTTLVPLQEYEERLLKQTMLTGSYKEKLQSLFLKYDALWQHWENQVGHRRI |
| P27401- | KPHHIATGTVNPRPQKQYPINPKAKASIQTVINDLLKQGVLIQQNSIMNTPVYPVPKPDGKWR |
| Pro_2mutA | MVLDYREVNKTIPLIAAQNQHSAGILSSIFRGKYKTTLDLSNGFWAHSITPESYWLTAFTWLG |
| | QQYCWTRLPQGFLNSPALFNADVVDLLKEVPNVQVYVDDIYISHDDPREHLEQLEKVFSLLL |
| | NAGYVVSLKKSEIAQHEVEFLGFNITKEGRGLTETFKQKLLNITPPRDLKQLQSILGKLNFARN |
| | FIPNFSELVKPLYNIIATAPGKYITWTTDNSQQLQNIISMLNSAENLEERNPEVRLIMKVNTSPS |
| | AGYIRFYNEFAKRPIMYLNYVYTKAEVKFTNTEKLLTTIHKGLIKALDLGMGQEILVYSPIVS |
| | MTKIQKTPLPERKALPIRWITWMSYLEDPRIQFHYDKTLPELQQVPTVTDDIIAKIKHPSEFSM |
| | VFYTDGSAIKHPNVNKSHNAGMGIAQVQFKPEFTVINTWSIPLGDHTAQLAEVAAVEFACKK |
| | ALKIDGPVLIVTDSFYVAESVNKELPYWQSNGFFNNKKKPLKHVSKWKSIADCIQLKPDIIIIH |
| | EKGHQPTASTFHTEGNNLADKLATQGSYVVN (SEQ ID NO: 18200) |
| SFVCP_ | MNPLQLLQPLPAEVKGTKLLAHWNSGATITCIPESFLEDEQPIKQTLIKTIHGEKQQNVYYLTF |
| Q87040 | KVKGRKVEAEVIASPYEYILLSPTDVPWLTQQPLQLTILVPLQEYQDRILNKTALPEEQKQQL |
| | KALFTKYDNLWQHWENQVGHRKIRPHNIATGDYPPRPQKQYPINPKAKPSIQIVIDDLLKQG |
| | VLTPQNSTMNTPVYPVPKPDGRWRMVLDYREVNKTIPLTAAQNQHSAGILATIVRQKYKTTL |
| | DLANGFWAHPITPDSYWLTAFTWQGKQYCWTRLPQGFLNSPALFTADAVDLLKEVPNVQV |
| | YVDDIYLSHDNPHEHIQQLEKVFQILLQAGYVVSLKKSEIGQRTVEFLGFNITKEGRGLTDTFK |
| | TKLLNVTPPKDLKQLQSILGLLNFARNFIPNFAELVQTLYNLIASSKGKYIEWTEDNTKQLNK |
| | VIEALNTASNLEERLPDQRLVIKVNTSPSAGYVRYYNESGKKPIMYLNYVFSKAELKFSMLEK |
| | LLTTMHKALIKAMDLAMGQEILVYSPIVSMTKIQKTPLPERKALPIRWITWMTYLEDPRIQFH |
| | YDKTLPELKHIPDVYTSSIPPLKHPSQYEGVFCTDGSAIKSPDPTKSNNAGMGIVHAIYNPEYKI |
| | LNQWSIPLGHHTAQMAEIAAVEFACKKALKVPGPVLVITDSFYVAESANKELPYWKSNGFVN |
| | NKKEPLKHISKWKSIAECLSIKPDITIQHEKGHQPINTSIHTEGNALADKLATQGSYVVN (SEQ |
| | ID NO: 18201) |
| SFVCP_ | MNPLQLLQPLPAEVKGTKLLAHWNSGATITCIPESFLEDEQPIKQTLIKTIHGEKQQNVYYLTF |
| Q87040_ | KVKGRKVEAEVIASPYEYILLSPTDVPWLTQQPLQLTILVPLQEYQDRILNKTALPEEQKQQL |
| 2mut | KALFTKYDNLWQHWENQVGHRKIRPHNIATGDYPPRPQKQYPINPKAKPSIQIVIDDLLKQG |
| | VLTPQNSTMNTPVYPVPKPDGRWRMVLDYREVNKTIPLTAAQNQHSAGILATIVRQKYKTTL |
| | DLANGFWAHPITPDSYWLTAFTWQGKQYCWTRLPQGFLNSPALFNADAVDLLKEVPNVQV |
| | YVDDIYLSHDNPHEHIQQLEKVFQILLQAGYVVSLKKSEIGQRTVEFLGFNITKEGRGLTDTFK |
| | TKLLNVTPPKDLKQLQSILGLLNFARNFIPNFAELVQTLYNLIASSPGKYIEWTEDNTKQLNKV |
| | IEALNTASNLEERLPDQRLVIKVNTSPSAGYVRYYNESGKKPIMYLNYVFSKAELKFSMLEKL |
| | LTTMHKALIKAMDLAMGQEILVYSPIVSMTKIQKTPLPERKALPIRWITWMTYLEDPRIQFHY |
| | DKTLPELKHIPDVYTSSIPPLKHPSQYEGVFCTDGSAIKSPDPTKSNNAGMGIVHAIYNPEYKIL |
| | NQWSIPLGHHTAQMAEIAAVEFACKKALKVPGPVLVITDSFYVAESANKELPYWKSNGFVN |
| | NKKEPLKHISKWKSIAECLSIKPDITIQHEKGHQPINTSIHTEGNALADKLATQGSYVVN (SEQ |
| | ID NO: 18202) |
| SFVCP_ | MNPLQLLQPLPAEVKGTKLLAHWNSGATITCIPESFLEDEQPIKQTLIKTIHGEKQQNVYYLTF |
| Q87040_ | KVKGRKVEAEVIASPYEYILLSPTDVPWLTQQPLQLTILVPLQEYQDRILNKTALPEEQKQQL |
| 2mutA | KALFTKYDNLWQHWENQVGHRKIRPHNIATGDYPPRPQKQYPINPKAKPSIQIVIDDLLKQG |
| | VLTPQNSTMNTPVYPVPKPDGRWRMVLDYREVNKTIPLTAAQNQHSAGILATIVRQKYKTTL |
| | DLANGFWAHPITPDSYWLTAFTWQGKQYCWTRLPQGFLNSPALFNADAVDLLKEVPNVQV |
| | YVDDIYLSHDNPHEHIQQLEKVFQILLQAGYVVSLKKSEIGQRTVEFLGFNITKEGRGLTDTFK |
| | TKLLNVTPPKDLKQLQSILGKLNFARNFIPNFAELVQTLYNLIASSPGKYIEWTEDNTKQLNK |
| | VIEALNTASNLEERLPDQRLVIKVNTSPSAGYVRYYNESGKKPIMYLNYVFSKAELKFSMLEK |
| | LLTTMHKALIKAMDLAMGQEILVYSPIVSMTKIQKTPLPERKALPIRWITWMTYLEDPRIQFH |
| | YDKTLPELKHIPDVYTSSIPPLKHPSQYEGVFCTDGSAIKSPDPTKSNNAGMGIVHAIYNPEYKI |
| | LNQWSIPLGHHTAQMAEIAAVEFACKKALKVPGPVLVITDSFYVAESANKELPYWKSNGFVN |
| | NKKEPLKHISKWKSIAECLSIKPDITIQHEKGHQPINTSIHTEGNALADKLATQGSYVVN (SEQ |
| | ID NO: 18203) |
| SFVCP_ | VPWLTQQPLQLTILVPLQEYQDRILNKTALPEEQKQQLKALFTKYDNLWQHWENQVGHRKI |
| Q87040- | RPHNIATGDYPPRPQKQYPINPKAKPSIQIVIDDLLKQGVLTPQNSTMNTPVYPVPKPDGRWR |
| Pro | MVLDYREVNKTIPLTAAQNQHSAGILATIVRQKYKTTLDLANGFWAHPITPDSYWLTAFTWQ |
| | GKQYCWTRLPQGFLNSPALFTADAVDLLKEVPNVQVYVDDIYLSHDNPHEHIQQLEKVFQIL |
| | LQAGYVVSLKKSEIGQRTVEFLGFNITKEGRGLTDTFKTKLLNVTPPKDLKQLQSILGLLNFA |
| | RNFIPNFAELVQTLYNLIASSKGKYIEWTEDNTKQLNKVIEALNTASNLEERLPDQRLVIKVNT |
| | SPSAGYVRYYNESGKKPIMYLNYVFSKAELKFSMLEKLLTTMHKALIKAMDLAMGQEILVY |
| | SPIVSMTKIQKTPLPERKALPIRWITWMTYLEDPRIQFHYDKTLPELKHIPDVYTSSIPPLKHPS |
| | QYEGVFCTDGSAIKSPDPTKSNNAGMGIVHAIYNPEYKILNQWSIPLGHHTAQMAEIAAVEFA |
| | CKKALKVPGPVLVITDSFYVAESANKELPYWKSNGFVNNKKEPLKHISKWKSIAECLSIKPDI |
| | TIQHEKGHQPINTSIHTEGNALADKLATQGSYVVN (SEQ ID NO: 18204) |
| SFVCP_ | VPWLTQQPLQLTILVPLQEYQDRILNKTALPEEQKQQLKALFTKYDNLWQHWENQVGHRKI |
| Q87040- | RPHNIATGDYPPRPQKQYPINPKAKPSIQIVIDDLLKQGVLTPQNSTMNTPVYPVPKPDGRWR |
| Pro_2mut | MVLDYREVNKTIPLTAAQNQHSAGILATIVRQKYKTTLDLANGFWAHPITPDSYWLTAFTWQ |
| | GKQYCWTRLPQGFLNSPALFNADAVDLLKEVPNVQVYVDDIYLSHDNPHEHIQQLEKVFQIL |
| | LQAGYVVSLKKSEIGQRTVEFLGFNITKEGRGLTDTFKTKLLNVTPPKDLKQLQSILGLLNFA |
| | RNFIPNFAELVQTLYNLIASSPGKYIEWTEDNTKQLNKVIEALNTASNLEERLPDQRLVIKVNT |
| | SPSAGYVRYYNESGKKPIMYLNYVFSKAELKFSMLEKLLTTMHKALIKAMDLAMGQEILVY |
| | SPIVSMTKIQKTPLPERKALPIRWITWMTYLEDPRIQFHYDKTLPELKHIPDVYTSSIPPLKHPS |
| | QYEGVFCTDGSAIKSPDPTKSNNAGMGIVHAIYNPEYKILNQWSIPLGHHTAQMAEIAAVEFA |
| | CKKALKVPGPVLVITDSFYVAESANKELPYWKSNGFVNNKKEPLKHISKWKSIAECLSIKPDI |
| | TIQHEKGHQPINTSIHTEGNALADKLATQGSYVVN (SEQ ID NO: 18205) |
| SFVCP_ | VPWLTQQPLQLTILVPLQEYQDRILNKTALPEEQKQQLKALFTKYDNLWQHWENQVGHRKI |
| Q87040- | RPHNIATGDYPPRPQKQYPINPKAKPSIQIVIDDLLKQGVLTPQNSTMNTPVYPVPKPDGRWR |
| Pro_2mutA | MVLDYREVNKTIPLTAAQNQHSAGILATIVRQKYKTTLDLANGFWAHPITPDSYWLTAFTWQ |
| | GKQYCWTRLPQGFLNSPALFNADAVDLLKEVPNVQVYVDDIYLSHDNPHEHIQQLEKVFQIL |
| | LQAGYVVSLKKSEIGQRTVEFLGFNITKEGRGLTDTFKTKLLNVTPPKDLKQLQSILGKLNFA |
| | RNFIPNFAELVQTLYNLIASSPGKYIEWTEDNTKQLNKVIEALNTASNLEERLPDQRLVIKVNT |
| | SPSAGYVRYYNESGKKPIMYLNYVFSKAELKFSMLEKLLTTMHKALIKAMDLAMGQEILVY |
| | SPIVSMTKIQKTPLPERKALPIRWITWMTYLEDPRIQFHYDKTLPELKHIPDVYTSSIPPLKHPS |
| | QYEGVFCTDGSAIKSPDPTKSNNAGMGIVHAIYNPEYKILNQWSIPLGHHTAQMAEIAAVEFA |
| | CKKALKVPGPVLVITDSFYVAESANKELPYWKSNGFVNNKKEPLKHISKWKSIAECLSIKPDI |
| | TIQHEKGHQPINTSIHTEGNALADKLATQGSYVVN (SEQ ID NO: 18206) |
| SMRVH_ | PRSRAIDIPVPHADKISWKITDPVWVDQWPLTYEKTLAAIALVQEQLAAGHIEPTNSPWNTPIF |
| P03364 | IIKKKSGSWRLLQDLRAVNKVMVPMGALQPGLPSPVAIPLNYHKIVIDLKDCFFTIPLHPEDRP |
| | YFAFSVPQINFQSPMPRYQWKVLPQGMANSPTLCQKFVAAAIAPVRSQWPEAYILHYMDDIL |
| | LACDSAEAAKACYAHIISCLTSYGLKIAPDKVQVSEPFSYLGFELHHQQVFTPRVCLKTDHLK |
| | TLNDFQKLLGDIQWLRPYLKLPTSALVPLNNILKGDPNPLSVRALTPEAKQSLALINKAIQNQS |
| | VQQISYNLPLVLLLLPTPHTPTAVFWQPNGTDPTKNGSPLLWLHLPASPSKVLLTYPSLLAMLI |
| | IKGRYTGRQLFGRDPHSIIIPYTQDQLTWLLQTSDEWAIALSSFTGDIDNHYPSDPVIQFAKLH |
| | QFIFPKITKCAPIPQATLVFTDGSSNGIAAYVIDNQPISIKSPYLSAQLVELYAILQVFTVLAHQP |
| | FNLYTDSAYIAQSVPLLETVPFIKSSTNATPLFSKLQQLILNRQHPFFIGHLRAHLNLPGPLAEG |
| | NALADAATQIFPIISD (SEQ ID NO: 18207) |
| SMRVH_ | PRSRAIDIPVPHADKISWKITDPVWVDQWPLTYEKTLAAIALVQEQLAAGHIEPTNSPWNTPIF |
| P03364_ | IIKKKSGSWRLLQDLRAVNKVMVPMGALQPGLPSPVAIPLNYHKIVIDLKDCFFTIPLHPEDRP |
| 2mut | YFAFSVPQINFQSPMPRYQWKVLPQGMANSPTLCQKFVAAAIAPVRSQWPEAYILHYMDDIL |
| | LACDSAEAAKACYAHIISCLTSYGLKIAPDKVQVSEPFSYLGFELHHQQVFTPRVCLKTDHLK |
| | TLNDFQKLLGDIQWLRPYLKLPTSALVPLNNILKPDPNPLSVRALTPEAKQSLALINKAIQNQS |
| | VQQISYNLPLVLLLLPTPHTPTAVFWQPNGTDPTKNGSPLLWLHLPASPSKVLLTYPSLLAMLI |
| | IKGRYTGRQLFGRDPHSIIIPYTQDQLTWLLQTSDEWAIALSSFTGDIDNHYPSDPVIQFAKLH |
| | QFIFPKITKCAPIPQATLVFTDGSSNGIAAYVIDNQPISIKSPYLSAQLVELYAILQVFTVLAHQP |
| | FNLYTDSAYIAQSVPLLETVPFIKSSTNATPLFSKLQQLILNRQHPFFIGHLRAHLNLPGPLAEG |
| | NALADAATQIFPIISD (SEQ ID NO: 18208) |
| SMRVH_ | PRSRAIDIPVPHADKISWKITDPVWVDQWPLTYEKTLAAIALVQEQLAAGHIEPTNSPWNTPIF |
| P03364_ | IIKKKSGSWRLLQDLRAVNKVMVPMGALQPGLPSPVAPPLNYHKIVIDLKDCFFTIPLHPEDR |
| 2mutB | PYFAFSVPQINFQSPMPRYQWKVLPQGMANSPTLCQKFVAAAIAPVRSQWPEAYILHYMDDI |
| | LLACDSAEAAKACYAHIISCLTSYGLKIAPDKVQVSEPFSYLGFELHHQQVFTPRVCLKTDHL |
| | KTLNDFQKLLGDIQWLRPYLKLPTSALVPLNNILKPDPNPLSVRALTPEAKQSLALINKAIQNQ |
| | SVQQISYNLPLVLLLLPTPHTPTAVFWQPNGTDPTKNGSPLLWLHLPASPSKVLLTYPSLLAM |
| | LIIKGRYTGRQLFGRDPHSIIIPYTQDQLTWLLQTSDEWAIALSSFTGDIDNHYPSDPVIQFAKL |
| | HQFIFPKITKCAPIPQATLVFTDGSSNGIAAYVIDNQPISIKSPYLSAQLVELYAILQVFTVLAHQ |
| | PFNLYTDSAYIAQSVPLLETVPFIKSSTNATPLFSKLQQLILNRQHPFFIGHLRAHLNLPGPLAE |
| | GNALADAATQIFPIISD (SEQ ID NO: 18209) |
| SRV2_ | LATAVDILAPQRYADPITWKSDEPVWVDQWPLTQEKLAAAQQLVQEQLQAGHIIESNSPWN |
| P51517 | TPIFVIKKKSGKWRLLQDLRAVNATMVLMGALQPGLPSPVAIPQGYFKIVIDLKDCFFTIPLQP |
| | VDQKRFAFSLPSTNFKQPMKRYQWKVLPQGMANSPTLCQKYVAAAIEPVRKSWAQMYIIHY |
| | MDDILIAGKLGEQVLQCFAQLKQALTTTGLQIAPEKVQLQDPYTYLGFQINGPKITNQKAVIR |
| | RDKLQTLNDFQKLLGDINWLRPYLHLTTGDLKPLFDILKGDSNPNSPRSLSEAALASLQKVET |
| | AIAEQFVTQIDYTQPLTFLIFNTTLTPTGLFWQNNPVMWVHLPASPKKVLLPYYDAIADLIILG |
| | RDNSKKYFGLEPSTIIQPYSKSQIHWLMQNTETWPIACASYAGNIDNHYPPNKLIQFCKLHAV |
| | VFPRIISKTPLDNALLVFTDGSSTGIAAYTFEKTTVRFKTSHTSAQLVELQALIAVLSAFPHRAL |
| | NVYTDSAYLAHSIPLLETVSHIKHISDTAKFFLQCQQLIYNRSIPFYLGHIRAHSGLPGPLSQGN |
| | HITDLATKVVATTLTT (SEQ ID NO: 18210) |
| SRV2_ | LATAVDILAPQRYADPITWKSDEPVWVDQWPLTQEKLAAAQQLVQEQLQAGHIIESNSPWN |
| P51517_ | TPIFVIKKKSGKWRLLQDLRAVNATMVLMGALQPGLPSPVAPPQGYFKIVIDLKDCFFTIPLQP |
| 2mutB | VDQKRFAFSLPSTNFKQPMKRYQWKVLPQGMANSPTLCQKYVAAAIEPVRKSWAQMYIIHY |
| | MDDILIAGKLGEQVLQCFAQLKQALTTTGLQIAPEKVQLQDPYTYLGFQINGPKITNQKAVIR |
| | RDKLQTLNDFQKLLGDINWLRPYLHLTTGDLKPLFDILKGDSNPNSPRSLSEAALASLQKVET |
| | AIAEQFVTQIDYTQPLTFLIFNTTLTPTGLFWQNNPVMWVHLPASPKKVLLPYYDAIADLIILG |
| | RDNSKKYFGLEPSTIIQPYSKSQIHWLMQNTETWPIACASYAGNIDNHYPPNKLIQFCKLHAV |
| | VFPRIISKTPLDNALLVFTDGSSTGIAAYTFEKTTVRFKTSHTSAQLVELQALIAVLSAFPHRAL |
| | NVYTDSAYLAHSIPLLETVSHIKHISDTAKFFLQCQQLIYNRSIPFYLGHIRAHSGLPGPLSQGN |
| | HITDLATKVVATTLTT (SEQ ID NO: 18211) |
| WDSV_ | SCQTKNTLNIDEYLLQFPDQLWASLPTDIGRMLVPPITIKIKDNASLPSIRQYPLPKDKTEGLRP |
| O92815 | LISSLENQGILIKCHSPCNTPIFPIKKAGRDEYRMIHDLRAINNIVAPLTAVVASPTTVLSNLAPS |
| | LHWFTVIDLSNAFFSVPIHKDSQYLFAFTFEGHQYTWTVLPQGFIHSPTLFSQALYQSLHKIKF |
| | KISSEICIYMDDVLIASKDRDTNLKDTAVMLQHLASEGHKVSKKKLQLCQQEVVYLGQLLTP |
| | EGRKILPDRKVTVSQFQQPTTIRQIRAFLGLVGYCRHWIPEFSIHSKFLEKQLKKDTAEPFQLD |
| | DQQVEAFNKLKHAITTAPVLVVPDPAKPFQLYTSHSEHASIAVLTQKHAGRTRPIAFLSSKFD |
| | AIESGLPPCLKACASIHRSLTQADSFILGAPLIIYTTHAICTLLQRDRSQLVTASRFSKWEADLL |
| | RPELTFVACSAVSPAHLYMQSCENNIPPHDCVLLTHTISRPRPDLSDLPIPDPDMTLFSDGSYTT |
| | GRGGAAVVMHRPVTDDFIIIHQQPGGASAQTAELLALAAACHLATDKTVNIYTDSRYAYGV |
| | VHDFGHLWMHRGFVTSAGTPIKNHKEIEYLLKQIMKPKQVSVIKIEAHTKGVSMEVRGNAA |
| | ADEAAKNAVFLVQR (SEQ ID NO: 18212) |
| WDSV_ | SCQTKNTLNIDEYLLQFPDQLWASLPTDIGRMLVPPITIKIKDNASLPSIRQYPLPKDKTEGLRP |
| O92815_ | LISSLENQGILIKCHSPCNTPIFPIKKAGRDEYRMIHDLRAINNIVAPLTAVVASPTTVLSNLAPS |
| 2mut | LHWFTVIDLSNAFFSVPIHKDSQYLFAFTFEGHQYTWTVLPQGFIHSPTLFNQALYQSLHKIKF |
| | KISSEICIYMDDVLIASKDRDTNLKDTAVMLQHLASEGHKVSKKKLQLCQQEVVYLGQLLTP |
| | EGRKILPDRKVTVSQFQQPTTIRQIRAFLGLVGYCRHWIPEFSIHSKFLEKQLKPDTAEPFQLD |
| | DQQVEAFNKLKHAITTAPVLVVPDPAKPFQLYTSHSEHASIAVLTQKHAGRTRPIAFLSSKFD |
| | AIESGLPPCLKACASIHRSLTQADSFILGAPLIIYTTHAICTLLQRDRSQLVTASRFSKWEADLL |
| | RPELTFVACSAVSPAHLYMQSCENNIPPHDCVLLTHTISRPRPDLSDLPIPDPDMTLFSDGSYTT |
| | GRGGAAVVMHRPVTDDFIIIHQQPGGASAQTAELLALAAACHLATDKTVNIYTDSRYAYGV |
| | VHDFGHLWMHRGFVTSAGTPIKNHKEIEYLLKQIMKPKQVSVIKIEAHTKGVSMEVRGNAA |
| | ADEAAKNAVFLVQR (SEQ ID NO: 18213) |
| WDSV_ | SCQTKNTLNIDEYLLQFPDQLWASLPTDIGRMLVPPITIKIKDNASLPSIRQYPLPKDKTEGLRP |
| O92815_ | LISSLENQGILIKCHSPCNTPIFPIKKAGRDEYRMIHDLRAINNIVAPLTAVVASPTTVLSNLAPS |
| 2mutA | LHWFTVIDLSNAFFSVPIHKDSQYLFAFTFEGHQYTWTVLPQGFIHSPTLFNQALYQSLHKIKF |
| | KISSEICIYMDDVLIASKDRDTNLKDTAVMLQHLASEGHKVSKKKLQLCQQEVVYLGQLLTP |
| | EGRKILPDRKVTVSQFQQPTTIRQIRAFLGKVGYCRHFIPEFSIHSKFLEKQLKPDTAEPFQLDD |
| | QQVEAFNKLKHAITTAPVLVVPDPAKPFQLYTSHSEHASIAVLTQKHAGRTRPIAFLSSKFDAI |
| | ESGLPPCLKACASIHRSLTQADSFILGAPLIIYTTHAICTLLQRDRSQLVTASRFSKWEADLLRP |
| | ELTFVACSAVSPAHLYMQSCENNIPPHDCVLLTHTISRPRPDLSDLPIPDPDMTLFSDGSYTTG |
| | RGGAAVVMHRPVTDDFIIIHQQPGGASAQTAELLALAAACHLATDKTVNIYTDSRYAYGVV |
| | HDFGHLWMHRGFVTSAGTPIKNHKEIEYLLKQIMKPKQVSVIKIEAHTKGVSMEVRGNAAA |
| | DEAAKNAVFLVQR (SEQ ID NO: 18214) |
| WMSV_ | VLNLEEEYRLHEKPVPSSIDPSWLQLFPTVWAERAGMGLANQVPPVVVELRSGASPVAVRQY |
| P03359 | PMSKEAREGIRPHIQRFLDLGVLVPCQSPWNTPLLPVKKPGTNDYRPVQDLREINKRVQDIHP |
| | TVPNPYNLLSSLPPSHTWYSVLDLKDAFFCLKLHPNSQPLFAFEWRDPEKGNTGQLTWTRLP |
| | QGFKNSPTLFDEALHRDLAPFRALNPQVVLLQYVDDLLVAAPTYRDCKEGTQKLLQELSKLG |
| | YRVSAKKAQLCQKEVTYLGYLLKEGKRWLTPARKATVMKIPPPTTPRQVREFLGTAGFCRL |
| | WIPGFASLAAPLYPLTKESIPFIWTEEHQKAFDRIKEALLSAPALALPDLTKPFTLYVDERAGV |
| | ARGVLTQTLGPWRRPVAYLSKKLDPVASGWPTCLKAVAAVALLLKDADKLTLGQNVTVIAS |
| | HSLESIVRQPPDRWMTNARMTHYQSLLLNERVSFAPPAVLNPATLLPVESEATPVHRCSEILA |
| | EETGTRRDLKDQPLPGVPAWYTDGSSFIAEGKRRAGAAIVDGKRTVWASSLPEGTSAQKAEL |
| | VALTQALRLAEGKDINIYTDSRYAFATAHIHGAIYKQRGLLTSAGKDIKNKEEILALLEAIHLP |
| | KRVAIIHCPGHQKGNDPVATGNRRADEAAKQAALSTRVLAETTKP (SEQ ID NO: 18215) |
| WMSV_ | VLNLEEEYRLHEKPVPSSIDPSWLQLFPTVWAERAGMGLANQVPPVVVELRSGASPVAVRQY |
| P03359_ | PMSKEAREGIRPHIQRFLDLGVLVPCQSPWNTPLLPVKKPGTNDYRPVQDLREINKRVQDIHP |
| 3mut | TVPNPYNLLSSLPPSHTWYSVLDLKDAFFCLKLHPNSQPLFAFEWRDPEKGNTGQLTWTRLP |
| | QGFKNSPTLFNEALHRDLAPFRALNPQVVLLQYVDDLLVAAPTYRDCKEGTQKLLQELSKLG |
| | YRVSAKKAQLCQKEVTYLGYLLKEGKRWLTPARKATVMKIPPPTTPRQVREFLGTAGFCRL |
| | WIPGFASLAAPLYPLTKPSIPFIWTEEHQKAFDRIKEALLSAPALALPDLTKPFTLYVDERAGV |
| | ARGVLTQTLGPWRRPVAYLSKKLDPVASGWPTCLKAVAAVALLLKDADKLTLGQNVTVIAS |
| | HSLESIVRQPPDRWMTNARMTHYQSLLLNERVSFAPPAVLNPATLLPVESEATPVHRCSEILA |
| | EETGTRRDLKDQPLPGVPAWYTDGSSFIAEGKRRAGAAIVDGKRTVWASSLPEGTSAQKAEL |
| | VALTQALRLAEGKDINIYTDSRYAFATAHIHGAIYKQRGWLTSAGKDIKNKEEILALLEAIHLP |
| | KRVAIIHCPGHQKGNDPVATGNRRADEAAKQAALSTRVLAETTKP (SEQ ID NO: 18216) |
| WMSV_ | VLNLEEEYRLHEKPVPSSIDPSWLQLFPTVWAERAGMGLANQVPPVVVELRSGASPVAVRQY |
| P03359_ | PMSKEAREGIRPHIQRFLDLGVLVPCQSPWNTPLLPVKKPGTNDYRPVQDLREINKRVQDIHP |
| 3mutA | TVPNPYNLLSSLPPSHTWYSVLDLKDAFFCLKLHPNSQPLFAFEWRDPEKGNTGQLTWTRLP |
| | QGFKNSPTLFNEALHRDLAPFRALNPQVVLLQYVDDLLVAAPTYRDCKEGTQKLLQELSKLG |
| | YRVSAKKAQLCQKEVTYLGYLLKEGKRWLTPARKATVMKIPPPTTPRQVREFLGKAGFCRL |
| | FIPGFASLAAPLYPLTKPSIPFIWTEEHQKAFDRIKEALLSAPALALPDLTKPFTLYVDERAGVA |
| | RGVLTQTLGPWRRPVAYLSKKLDPVASGWPTCLKAVAAVALLLKDADKLTLGQNVTVIASH |
| | SLESIVRQPPDRWMTNARMTHYQSLLLNERVSFAPPAVLNPATLLPVESEATPVHRCSEILAE |
| | ETGTRRDLKDQPLPGVPAWYTDGSSFIAEGKRRAGAAIVDGKRTVWASSLPEGTSAQKAELV |
| | ALTQALRLAEGKDINIYTDSRYAFATAHIHGAIYKQRGWLTSAGKDIKNKEEILALLEAIHLPK |
| | RVAIIHCPGHQKGNDPVATGNRRADEAAKQAALSTRVLAETTKP (SEQ ID NO: 18217) |
| XMRV6_ | TLNIEDEYRLHETSKEPDVPLGSTWLSDFPQAWAETGGMGLAVRQAPLIIPLKATSTPVSIKQ |
| A1Z651 | YPMSQEARLGIKPHIQRLLDQGILVPCQSPWNTPLLPVKKPGTNDYRPVQDLREVNKRVEDIH |
| | PTVPNPYNLLSGLPPSHQWYTVLDLKDAFFCLRLHPTSQPLFAFEWRDPEMGISGQLTWTRLP |
| | QGFKNSPTLFDEALHRDLADFRIQHPDLILLQYVDDLLLAATSEQDCQRGTRALLQTLGNLG |
| | YRASAKKAQICQKQVKYLGYLLKEGQRWLTEARKETVMGQPTPKTPRQLREFLGTAGFCRL |
| | WIPGFAEMAAPLYPLTKTGTLFNWGPDQQKAYQEIKQALLTAPALGLPDLTKPFELFVDEKQ |
| | GYAKGVLTQKLGPWRRPVAYLSKKLDPVAAGWPPCLRMVAAIAVLTKDAGKLTMGQPLVI |
| | LAPHAVEALVKQPPDRWLSNARMTHYQAMLLDTDRVQFGPVVALNPATLLPLPEKEAPHDC |
| | LEILAETHGTRPDLTDQPIPDADYTWYTDGSSFLQEGQRRAGAAVTTETEVIWARALPAGTSA |
| | QRAELIALTQALKMAEGKKLNVYTDSRYAFATAHVHGEIYRRRGLLTSEGREIKNKNEILAL |
| | LKALFLPKRLSIIHCPGHQKGNSAEARGNRMADQAAREAAMKAVLETSTLL (SEQ ID NO: |
| | 18218) |
| XMRV6_ | TLNIEDEYRLHETSKEPDVPLGSTWLSDFPQAWAETGGMGLAVRQAPLIIPLKATSTPVSIKQ |
| A1Z651_ | YPMSQEARLGIKPHIQRLLDQGILVPCQSPWNTPLLPVKKPGTNDYRPVQDLREVNKRVEDIH |
| 3mut | PTVPNPYNLLSGLPPSHQWYTVLDLKDAFFCLRLHPTSQPLFAFEWRDPEMGISGQLTWTRLP |
| | QGFKNSPTLFNEALHRDLADFRIQHPDLILLQYVDDLLLAATSEQDCQRGTRALLQTLGNLG |
| | YRASAKKAQICQKQVKYLGYLLKEGQRWLTEARKETVMGQPTPKTPRQLREFLGTAGFCRL |
| | WIPGFAEMAAPLYPLTKPGTLFNWGPDQQKAYQEIKQALLTAPALGLPDLTKPFELFVDEKQ |
| | GYAKGVLTQKLGPWRRPVAYLSKKLDPVAAGWPPCLRMVAAIAVLTKDAGKLTMGQPLVI |
| | LAPHAVEALVKQPPDRWLSNARMTHYQAMLLDTDRVQFGPVVALNPATLLPLPEKEAPHDC |
| | LEILAETHGTRPDLTDQPIPDADYTWYTDGSSFLQEGQRRAGAAVTTETEVIWARALPAGTSA |
| | QRAELIALTQALKMAEGKKLNVYTDSRYAFATAHVHGEIYRRRGWLTSEGREIKNKNEILAL |
| | LKALFLPKRLSIIHCPGHQKGNSAEARGNRMADQAAREAAMKAVLETSTLL (SEQ ID NO: |
| | 18219) |
| XMRV6_ | TLNIEDEYRLHETSKEPDVPLGSTWLSDFPQAWAETGGMGLAVRQAPLIIPLKATSTPVSIKQ |
| A1Z651_ | YPMSQEARLGIKPHIQRLLDQGILVPCQSPWNTPLLPVKKPGTNDYRPVQDLREVNKRVEDIH |
| 3mutA | PTVPNPYNLLSGLPPSHQWYTVLDLKDAFFCLRLHPTSQPLFAFEWRDPEMGISGQLTWTRLP |
| | QGFKNSPTLFNEALHRDLADFRIQHPDLILLQYVDDLLLAATSEQDCQRGTRALLQTLGNLG |
| | YRASAKKAQICQKQVKYLGYLLKEGQRWLTEARKETVMGQPTPKTPRQLREFLGKAGFCRL |
| | FIPGFAEMAAPLYPLTKPGTLFNWGPDQQKAYQEIKQALLTAPALGLPDLTKPFELFVDEKQG |
| | YAKGVLTQKLGPWRRPVAYLSKKLDPVAAGWPPCLRMVAAIAVLTKDAGKLTMGQPLVIL |
| | APHAVEALVKQPPDRWLSNARMTHYQAMLLDTDRVQFGPVVALNPATLLPLPEKEAPHDCL |
| | EILAETHGTRPDLTDQPIPDADYTWYTDGSSFLQEGQRRAGAAVTTETEVIWARALPAGTSA |
| | QRAELIALTQALKMAEGKKLNVYTDSRYAFATAHVHGEIYRRRGWLTSEGREIKNKNEILAL |
| | LKALFLPKRLSIIHCPGHQKGNSAEARGNRMADQAAREAAMKAVLETSTLL (SEQ ID NO: |
| | 18220) |

[0720] In some embodiments, reverse transcriptase domains are modified, for example by site-specific mutation. In some embodiments, reverse transcriptase domains are engineered to have improved properties, e.g. SuperScript IV (SSIV) reverse transcriptase derived from the MMLV RT. In some embodiments, the reverse transcriptase domain may be engineered to have lower error rates, e.g., as described in WO2001068895, incorporated herein by reference. In some embodiments, the reverse transcriptase domain may be engineered to be more thermostable. In some embodiments, the reverse transcriptase domain may be engineered to be more processive. In some embodiments, the reverse transcriptase domain may be engineered to have tolerance to inhibitors. In some embodiments, the reverse transcriptase domain may be engineered to be faster. In some embodiments, the reverse transcriptase domain may be engineered to better tolerate modified nucleotides in the RNA template. In some embodiments, the reverse transcriptase domain may be engineered to insert modified DNA nucleotides. In some embodiments, the reverse transcriptase domain is engineered to bind a template RNA. In some embodiments, one or more mutations are chosen from D200N, L603W, T330P, D524G, E562Q, D583N, P51L, S67R, E67K, T197A, H204R, E302K, F309N, W313F, L435G, N454K, H594Q, L671P, E69K, or D653N in the RT domain of murine leukemia virus reverse transcriptase or a corresponding mutation at a corresponding position of another RT domain.

[0721] In some embodiments, an RT domain (e.g., as listed in Table 6) comprises one or more mutations as listed in Table 2 below. In some embodiment, an RT domain as listed in Table 6 comprises one, two, three, four, five, or six of the mutations listed in the corresponding row of Table 2 below.

TABLE 2
Exemplary RT domain mutations (relative to corresponding wild-
type sequences as listed in the corresponding row of Table 6)

| RT Domain Name | Mutation(s) | | | | | |
|---|---|---|---|---|---|---|
| AVIRE_P03360 | | | | | | |
| AVIRE_P03360_3mut | D200N | G330P | L605W | | | |
| AVIRE_P03360_3mutA | D200N | G330P | L605W | T306K | W313F | |
| BAEVM_P10272 | | | | | | |
| BAEVM_P10272_3mut | D198N | E328P | L602W | | | |
| BAEVM_P10272_3mutA | D198N | E328P | L602W | T304K | W311F | |
| BLVAU_P25059 | | | | | | |
| BLVAU_P25059_2mut | E159Q | G286P | | | | |
| BLVJ_P03361 | | | | | | |
| BLVJ_P03361_2mut | E159Q | L524W | | | | |
| BLVJ_P03361_2mutB | E159Q | L524W | I97P | | | |
| FFV_O93209 | D21N | | | | | |
| FFV_O93209_2mut | D21N | T293N | T419P | | | |
| FFV_O93209_2mutA | D21N | T293N | T419P | L393K | | |
| FFV_O93209-Pro | | | | | | |
| FFV_O93209-Pro_2mut | T207N | T333P | | | | |
| FFV_O93209-Pro_2mutA | T207N | T333P | L307K | | | |
| FLV_P10273 | | | | | | |
| FLV_P10273_3mut | D199N | L602W | | | | |
| FLV_P10273_3mutA | D199N | L602W | T305K | W312F | | |
| FOAMV_P14350 | D24N | | | | | |
| FOAMV_P14350_2mut | D24N | T296N | S420P | | | |
| FOAMV_P14350_2mutA | D24N | T296N | S420P | L396K | | |
| FOAMV_P14350-Pro | | | | | | |
| FOAMV_P14350-Pro_2mut | T207N | S331P | | | | |
| FOAMV_P14350-Pro_2mutA | T207N | S331P | L307K | | | |
| GALV_P21414 | | | | | | |
| GALV_P21414_3mut | D198N | E328P | L600W | | | |
| GALV_P21414_3mutA | D198N | E328P | L600W | T304K | W311F | |
| HTL1A_P03362 | | | | | | |
| HTL1A_P03362_2mut | E152Q | R279P | | | | |
| HTL1A_P03362_2mutB | E152Q | R279P | L90P | | | |
| HTL1C_P14078 | | | | | | |
| HTL1C_P14078_2mut | E152Q | R279P | | | | |
| HTL1L_P0C211 | | | | | | |
| HTL1L_P0C211_2mut | E149Q | L527W | | | | |
| HTL1L_P0C211_2mutB | E149Q | L527W | L87P | | | |
| HTL32_Q0R5R2 | | | | | | |
| HTL32_Q0R5R2_2mut | E149Q | L526W | | | | |
| HTL32_Q0R5R2_2mutB | E149Q | L526W | L87P | | | |
| HTL3P_Q4U0X6 | | | | | | |
| HTL3P_Q4U0X6_2mut | E149Q | L526W | | | | |
| HTL3P_Q4U0X6_2mutB | E149Q | L526W | L87P | | | |
| HTLV2_P03363_2mut | E147Q | G274P | | | | |
| JSRV_P31623 | | | | | | |
| JSRV_P31623_2mutB | A100P | | | | | |
| KORV_Q9TTC1 | D32N | | | | | |
| KORV_Q9TTC1_3mut | D32N | D322N | E452P | L724W | | |
| KORV_Q9TTC1_3mutA | D32N | D322N | E452P | L724W | T428K | W435F |
| KORV_Q9TTC1-Pro | | | | | | |
| KORV_Q9TTC1-Pro_3mut | D231N | E361P | L633W | | | |
| KORV_Q9TTC1-Pro_3mutA | D231N | E361P | L633W | T337K | W344F | |
| MLVAV_P03356 | | | | | | |
| MLVAV_P03356_3mut | D200N | T330P | L603W | | | |
| MLVAV_P03356_3mutA | D200N | T330P | L603W | T306K | W313F | |
| MLVBM_Q7SVK7 | | | | | | |
| MLVBM_Q7SVK7 | | | | | | |
| MLVBM_Q7SVK7_3mut | D200N | T330P | L603W | | | |
| MLVBM_Q7SVK7_3mut | D200N | T330P | L603W | | | |
| MLVBM_Q7SVK7_3mutA_WS | D199N | T329P | L602W | T305K | W312F | |
| MLVBM_Q7SVK7_3mutA_WS | D199N | T329P | L602W | T305K | W312F | |
| MLVCB_P08361 | | | | | | |
| MLVCB_P08361_3mut | D200N | T330P | L603W | | | |
| MLVCB_P08361_3mutA | D200N | T330P | L603W | T306K | W313F | |
| MLVF5_P26810 | | | | | | |
| MLVF5_P26810_3mut | D200N | T330P | L603W | | | |
| MLVF5_P26810_3mutA | D200N | T330P | L603W | T306K | W313F | |
| MLVFF_P26809_3mut | D200N | T330P | L603W | | | |
| MLVFF_P26809_3mutA | D200N | T330P | L603W | T306K | W313F | |
| MLVMS_P03355 | | | | | | |
| MLVMS_P03355 | | | | | | |
| MLVMS_P03355_3mut | D200N | T330P | L603W | | | |
| MLVMS_P03355_3mut | D200N | T330P | L603W | | | |
| MLVMS_P03355_3mutA_WS | D200N | T330P | L603W | T306K | W313F | |
| MLVMS_P03355_3mutA_WS | D200N | T330P | L603W | T306K | W313F | |
| MLVMS_P03355_PLV919 | D200N | T330P | L603W | T306K | W313F | H8Y |
| MLVMS_P03355_PLV919 | D200N | T330P | L603W | T306K | W313F | H8Y |
| MLVRD_P11227 | | | | | | |
| MLVRD_P11227_3mut | D200N | T330P | L603W | | | |
| MMTVB_P03365 | D26N | | | | | |
| MMTVB_P03365 | D26N | | | | | |
| MMTVB_P03365_2mut | D26N | G401P | | | | |
| MMTVB_P03365_2mut_WS | G400P | | | | | |
| MMTVB_P03365_2mut_WS | G400P | | | | | |
| MMTVB_P03365_2mutB | D26N | G401P | V215P | | | |
| MMTVB_P03365_2mutB | D26N | G401P | V215P | | | |
| MMTVB_P03365_2mutB_WS | G400P | V212P | | | | |
| MMTVB_P03365_2mutB_WS | G400P | V212P | | | | |
| MMTVB_P03365_WS | | | | | | |
| MMTVB_P03365_WS | | | | | | |
| MMTVB_P03365-Pro | | | | | | |
| MMTVB_P03365-Pro | | | | | | |
| MMTVB_P03365-Pro_2mut | G309P | | | | | |
| MMTVB_P03365-Pro_2mut | G309P | | | | | |
| MMTVB_P03365-Pro_2mutB | G309P | V123P | | | | |
| MMTVB_P03365-Pro_2mutB | G309P | V123P | | | | |
| MPMV_P07572 | | | | | | |
| MPMV_P07572_2mutB | G289P | I103P | | | | |
| PERV_Q4VFZ2 | | | | | | |
| PERV_Q4VFZ2 | | | | | | |
| PERV_Q4VFZ2_3mut | D199N | E329P | L602W | | | |
| PERV_Q4VFZ2_3mut | D199N | E329P | L602W | | | |
| PERV_Q4VFZ2_3mutA_WS | D196N | E326P | L599W | T302K | W309F | |
| PERV_Q4VFZ2_3mutA_WS | D196N | E326P | L599W | T302K | W309F | |
| SFV1_P23074 | D24N | | | | | |
| SFV1_P23074_2mut | D24N | T296N | N420P | | | |
| SFV1_P23074_2mutA | D24N | T296N | N420P | L396K | | |
| SFV1_P23074-Pro | | | | | | |
| SFV1_P23074-Pro_2mut | T207N | N331P | | | | |
| SFV1_P23074-Pro_2mutA | T207N | N331P | L307K | | | |
| SFV3L_P27401 | D24N | | | | | |
| SFV3L_P27401_2mut | D24N | T296N | N422P | | | |
| SFV3L_P27401_2mutA | D24N | T296N | N422P | L396K | | |
| SFV3L_P27401-Pro | | | | | | |
| SFV3L_P27401-Pro_2mut | T307N | N333P | | | | |
| SFV3L_P27401-Pro_2mutA | T307N | N333P | L307K | | | |
| SFVCP_Q87040 | D24N | | | | | |
| SFVCP_Q87040_2mut | D24N | T296N | K422P | | | |
| SFVCP_Q87040_2mutA | D24N | T296N | K422P | L396K | | |
| SFVCP_Q87040-Pro | | | | | | |
| SFVCP_Q87040-Pro_2mut | T207N | K333P | | | | |
| SFVCP_Q87040-Pro_2mutA | T207N | K333P | L307K | | | |
| SMRVH_P03364 | | | | | | |
| SMRVH_P03364_2mut | G288P | | | | | |
| SMRVH_P03364_2mutB | G288P | I102P | | | | |
| SRV2_P51517 | | | | | | |
| SRV2_P51517_2mutB | I103P | | | | | |
| WDSV_O92815 | | | | | | |
| WDSV_O92815_2mut | S183N | K312P | | | | |
| WDSV_O92815_2mutA | S183N | K312P | L288K | W295F | | |
| WMSV_P03359 | | | | | | |
| WMSV_P03359_3mut | D198N | E328P | L600W | | | |
| WMSV_P03359_3mutA | D198N | E328P | L600W | T304K | W311F | |
| XMRV6_A1Z651 | | | | | | |
| XMRV6_A1Z651_3mut | D200N | T330P | L603W | | | |
| XMRV6_A1Z651_3mutA | D200N | T330P | L603W | T306K | W313F | |

[0722] In some embodiments, a gene modifying polypeptide comprises the RT domain from a retroviral reverse transcriptase, e.g., a wild-type M-MLV RT, e.g., comprising the following sequence:

M-MLV (WT):
(SEQ ID NO: 2)
TLNIEDEYRLHETSKEPDVSLGSTWLSDFPQAWAETGGMGLAVRQAPLIIPLKATSTPVSIKQYP
MSQEARLGIKPHIQRLLDQGILVPCQSPWNTPLLPVKKPGTNDYRPVQDLREVNKRVEDIHPTVP
NPYNLLSGLPPSHQWYTVLDLKDAFFCLRLHPTSQPLFAFEWRDPEMGISGQLTWTRLPQGFKN
SPTLFDEALHRDLADFRIQHPDLILLQYVDDLLLAATSELDCQQGTRALLQTLGNLGYRASAKKA
QICQKQVKYLGYLLKEGQRWLTEARKETVMGQPTPKTPRQLREFLGTAGFCRLWIPGFAEMAA
PLYPLTKTGTLFNWGPDQQKAYQEIKQALLTAPALGLPDLTKPFELFVDEKQGYAKGVLTQKLG
PWRRPVAYLSKKLDPVAAGWPPCLRMVAAIAVLTKDAGKLTMGQPLVILAPHAVEALVKQPPD
RWLSNARMTHYQALLLDTDRVQFGPVVALNPATLLPLPEEGLQHNCLDILAEAHGTRPDLTDQP
LPDADHTWYTDGSSLLQEGQRKAGAAVTTETEVIWAKALPAGTSAQRAELIALTQALKMAEGK
KLNVYTDSRYAFATAHIHGEIYRRRGLLTSEGKEIKNKDEILALLKALFLPKRLSIIHCPGHQKGH
SAEARGNRMADQAARKAAITETPDTSTLLI

[0723] In some embodiments, a gene modifying polypeptide comprises the RT domain from a retroviral reverse transcriptase, e.g., an M-MLV RT, e.g., comprising the following sequence:

(SEQ ID NO: 3)
TLNIEDEHRLHETSKEPDVSLGSTWLSDFPQAWAETGGMGLAVRQAPLIIPLKATSTPVSIKQYP
MSQEARLGIKPHIQRLLDQGILVPCQSPWNTPLLPVKKPGTNDYRPVQDLREVNKRVEDIHPTVP
NPYNLLSGLPPSHQWYTVLDLKDAFFCLRLHPTSQPLFAFEWRDPEMGISGQLTWTRLPQGFKN
SPTLFDEALHRDLADFRIQHPDLILLQYVDDLLLAATSELDCQQGTRALLQTLGNLGYRASAKKA
QICQKQVKYLGYLLKEGQRWLTEARKETVMGQPTPKTPRQLREFLGTAGFCRLWIPGFAEMAA
PLYPLTKTGTLFNWGPDQQKAYQEIKQALLTAPALGLPDLTKPFELFVDEKQGYAKGVLTQKLG
PWRRPVAYLSKKLDPVAAGWPPCLRMVAAIAVLTKDAGKLTMGQPLVILAPHAVEALVKQPPD
RWLSNARMTHYQALLLDTDRVQFGPVVALNPATLLPLPEEGLQHNCLDILAEAHGTRPDLTDQP
LPDADHTWYTDGSSLLQEGQRKAGAAVTTETEVIWAKALPAGTSAQRAELIALTQALKMAEGK
KLNVYTDSRYAFATAHIHGEIYRRRGLLTSEGKEIKNKDEILALLKALFLPKRLSIIHCPGHQKGH
SAEARGNRMADQAARKAAITETPDTSTLL

[0724] In some embodiments, a gene modifying polypeptide comprises the RT domain from a retroviral reverse transcriptase comprising the sequence of amino acids 659-1329 of NP_057933. In embodiments, the gene modifying polypeptide further comprises one additional amino acid at the N-terminus of the sequence of amino acids 659-1329 of NP_057933, e.g., as shown below:

(SEQ ID NO: 4)
TLNIEDEHRLHETSKEPDVSLGSTWLSDFPQAWAETGGMGLAVRQAPLIIPLKATSTPVSIKQYP
MSQEARLGIKPHIQRLLDQGILVPCQSPWNTPLLPVKKPGTNDYRPVQDLREVNKRVEDIHPT
VPNPYNLLSGLPPSHQWYTVLDLKDAFFCLRLHPTSQPLFAFEWRDPEMGISGQLTWTRLP
QGFKNSPTLFDEALHRDLADFRIQHPDLILLQYVDDLLLAATSELDCQQGTRALLQTLGNL
GYRASAKKAQICQKQVKYLGYLLKEGQRWLTEARKETVMGQPTPKTPRQLREFLGTAGFCRL
WIPGFAEMAAPLYPLTKTGTLFNWGPDQQKAYQEIKQALLTAPALGLPDLTKPFELFVDEKQGY
AKGVLTQKLGPWRRPVAYLSKKLDPVAAGWPPCLRMVAAIAVLTKDAGKLTMGQPLVILAPH
AVEALVKQPPDRWLSNARMTHYQALLLDTDRVQFGPVVALNPATLLPLPEEGLQHNCLDILAE
AHGTRPDLTDQPLPDADHTWYTDGSSLLQEGQRKAGAAVTTETEVIWAKALPAGTSAQRAELI
ALTQALKMAEGKKLNVYTDSRYAFATAHIHGEIYRRRGLLTSEGKEIKNKDEILALLKALFLPKR
LSIIHCPGHQKGHSAEARGNRMADQAARKAA

Core RT (bold), annotated per above
RNAseH (underlined), annotated per above

[0725] In embodiments, the gene modifying polypeptide further comprises one additional amino acid at the C-terminus of the sequence of amino acids 659-1329 of NP_057933. In embodiments, the gene modifying polypeptide comprises an RNaseH1 domain (e.g., amino acids 1178-1318 of NP_057933).

[0726] In some embodiments, a retroviral reverse transcriptase domain, e.g., M-MLV RT, may comprise one or more mutations from a wild-type sequence that may improve features of the RT, e.g., thermostability, processivity, and/or template binding. In some embodiments, an M-MLV RT domain comprises, relative to the M-MLV (WT) sequence above, one or more mutations, e.g., selected from D200N, L603W, T330P, T306K, W313F, D524G, E562Q, D583N, P51L, S67R, E67K, T197A, H204R, E302K, F309N, L435G, N454K, H594Q, D653N, R110S, K103L, e.g., a combination of mutations, such as D200N, L603W, and T330P, optionally further including T306K and W313F. In some embodiments, an M-MLV RT used herein comprises the mutations D200N, L603W, T330P, T306K and W313F. In embodiments, the mutant M-MLV RT comprises the following amino acid sequence:

M-MLV (PE2):
(SEQ ID NO: 5)
TLNIEDEYRLHETSKEPDVSLGSTWLSDFPQAWAETGGMGLAVRQAPLIIPLKATSTPVSIKQYP
MSQEARLGIKPHIQRLLDQGILVPCQSPWNTPLLPVKKPGTNDYRPVQDLREVNKRVEDIHPTVP
NPYNLLSGLPPSHQWYTVLDLKDAFFCLRLHPTSQPLFAFEWRDPEMGISGQLTWTRLPQGFKN
SPTLFNEALHRDLADFRIQHPDLILLQYVDDLLLAATSELDCQQGTRALLQTLGNLGYRASAKKA
QICQKQVKYLGYLLKEGQRWLTEARKETVMGQPTPKTPRQLREFLGKAGFCRLFIPGFAEMAAP
LYPLTKPGTLFNWGPDQQKAYQEIKQALLTAPALGLPDLTKPFELFVDEKQGYAKGVLTQKLGP
WRRPVAYLSKKLDPVAAGWPPCLRMVAAIAVLTKDAGKLTMGQPLVILAPHAVEALVKQPPDR
WLSNARMTHYQALLLDTDRVQFGPVVALNPATLLPLPEEGLQHNCLDILAEAHGTRPDLTDQPL
PDADHTWYTDGSSLLQEGQRKAGAAVTTETEVIWAKALPAGTSAQRAELIALTQALKMAEGKK
LNVYTDSRYAFATAHIHGEIYRRRGWLTSEGKEIKNKDEILALLKALFLPKRLSIIHCPGHQKGHS
AEARGNRMADQAARKAAITETPDTSTLLI

[0727] In some embodiments, a writing domain (e.g., RT domain) comprises an RNA-binding domain, e.g., that specifically binds to an RNA sequence. In some embodiments, a template RNA comprises an RNA sequence that is specifically bound by the RNA-binding domain of the writing domain.

[0728] In some embodiments, the reverse transcription domain only recognizes and reverse transcribes a specific template, e.g., a template RNA of the system. In some embodiments, the template comprises a sequence or structure that enables recognition and reverse transcription by a reverse transcription domain. In some embodiments, the template comprises a sequence or structure that enables association with an RNA-binding domain of a polypeptide component of a genome engineering system described herein. In some embodiments, the genome engineering system reverse preferably transcribes a template comprising an association sequence over a template lacking an association sequence.

[0729] The writing domain may also comprise DNA-dependent DNA polymerase activity, e.g., comprise enzymatic activity capable of writing DNA into the genome from a template DNA sequence. In some embodiments, DNA-dependent DNA polymerization is employed to complete second-strand synthesis of a target site edit. In some embodiments, the DNA-dependent DNA polymerase activity is provided by a DNA polymerase domain in the polypeptide. In some embodiments, the DNA-dependent DNA polymerase activity is provided by a reverse transcriptase domain that is also capable of DNA-dependent DNA polymerization, e.g., second-strand synthesis. In some embodiments, the DNA-dependent DNA polymerase activity is provided by a second polypeptide of the system. In some embodiments, the DNA-dependent DNA polymerase activity is provided by an endogenous host cell polymerase that is optionally recruited to the target site by a component of the genome engineering system.

[0730] In some embodiments, the reverse transcriptase domain has a lower probability of premature termination rate (P_{off}) in vitro relative to a reference reverse transcriptase domain. In some embodiments, the reference reverse transcriptase domain is a viral reverse transcriptase domain, e.g., the RT domain from M-MLV.

[0731] In some embodiments, the reverse transcriptase domain has a lower probability of premature termination rate (P_{off}) in vitro of less than about 5×10⁻³/nt, 5×10⁻⁴/nt, or 5×10⁻⁶/nt, e.g., as measured on a 1094 nt RNA. In embodiments, the in vitro premature termination rate is determined as described in Bibillo and Eickbush (2002) J Biol Chem 277(38):34836-34845 (incorporated by reference herein its entirety).

[0732] In some embodiments, the reverse transcriptase domain is able to complete at least about 30% or 50% of integrations in cells. The percent of complete integrations can be measured by dividing the number of substantially full-length integration events (e.g., genomic sites that comprise at least 98% of the expected integrated sequence) by the number of total (including substantially full-length and partial) integration events in a population of cells. In embodiments, the integrations in cells is determined (e.g., across the integration site) using long-read amplicon sequencing, e.g., as described in Karst et al. (2020) bioRxiv doi.org/10.1101/645903 (incorporated by reference herein in its entirety).

[0733] In some embodiments, an integration event results in a perfect editing event, e.g., wherein the resultant edited sequence perfectly matches a desired expected edited sequence. In embodiments, whether an integration event results in a perfectly edited sequence is determined by identifying a perfectly edited read using next-generation sequencing (e.g., from amplicon sequencing, e.g., as described herein). In embodiments, a perfectly edited read is a read that indicates that the edit contains the desired correct insertion size; optionally such a perfectly edited read may include one or more “N” base calls (i.e., wherein no clear base identification was made at certain sequence positions). In embodiments, a perfectly edited read includes up to 1%, up to 5%, up to 10%, up to 15%, up to 20%, up to 25%, up to 30%, up to 35%, or up to 40% “N” base calls (e.g., base calls that do not result in a read of non-identity relative to the desired expected edited sequence). In embodiments, a perfectly edited read is a read that indicates that the edit has 100% sequence identity to the desired expected edited sequence.

[0734] In some embodiments, a gene modifying system as described herein (e.g., comprising a template RNA or gene modifying polypeptide as described herein) induces insertions at two copies of a target locus in a cell. In some embodiments, a gene modifying system as described herein (e.g., comprising a template RNA or gene modifying polypeptide as described herein) induces insertions at two copies of a target locus in at least about 4%, 5%, 6%, 7%, 8%, 9%, 10%, 11%, 12%, 13%, 14%, 15%, 20%, 21%, 22%, 23%, 24%, 25%, 30%, 35%, 36%, 37%, 38%, 39%, or 40% of cells in a population of cells. In some embodiments, a gene modifying system as described herein (e.g., comprising a template RNA or gene modifying polypeptide as described herein) induces insertions at two copies of a target locus in at least about 1%, 2%, 3%, 4%, 5%, 6%, 7%, 8%, 9%, 10%, 11%, 12%, 13%, 14%, 15%, 20%, 21%, 22%, 23%, 24%, 25%, 30%, 35%, 36%, 37%, 38%, 39%, or 40% of cells comprising at least one edit induced by the gene modifying system. In certain embodiments, the insertions at the two copies of the target locus share at least 65%, 70%, 75%, 80%, 85%, 90%, 95%, 96%, 97%, 98%, 99%, or 100% sequence identity. In certain embodiments, the insertions at the two copies of the target locus have 100% sequence identity. In certain embodiments, the insertions at the two copies of the target locus have about the same length. In certain embodiments, the insertions at the two copies of the target locus include no more than 1, 2, 3, 4, 5, 6, 7, 8, 9, 10, 15, 20, 25, 30, 35, 40, 45, or 50 positions of non-identity relative to each other.

[0735] In embodiments, quantifying integrations in cells comprises counting the fraction of integrations that contain at least about 75%, 80%, 85%, 90%, 95%, 96%, 97%, 98%, 99%, or 100% of the DNA sequence corresponding to the template RNA (e.g., a template RNA having a length of at least 0.05, 0.1, 0.5, 0.6, 0.7, 0.8, 0.9, 1, 1.5, 2, 3, 4, or 5 kb, e.g., a length between 0.5-0.6, 0.6-0.7, 0.7-0.8, 0.8-0.9, 1.0-1.2, 1.2-1.4, 1.4-1.6, 1.6-1.8, 1.8-2.0, 2-3, 3-4, or 4-5 kb).

[0736] In some embodiments, the reverse transcriptase domain is capable of polymerizing dNTPs in vitro. In embodiments, the reverse transcriptase domain is capable of polymerizing dNTPs in vitro at a rate between 0.1-50 nt/sec (e.g., between 0.1-1, 1-10, or 10-50 nt/sec). In embodiments, polymerization of dNTPs by the reverse transcriptase domain is measured by a single-molecule assay, e.g., as described in Schwartz and Quake (2009) PNAS 106(48):20294-20299 (incorporated by reference in its entirety).

[0737] In some embodiments, the reverse transcriptase domain has an in vitro error rate (e.g., misincorporation of nucleotides) of between 1×10⁻³-1×10⁻⁴ or 1×10⁻⁴-1×10⁻⁵ substitutions/nt, e.g., as described in Yasukawa et al. (2017) Biochem Biophys Res Commun 492(2):147-153 (incorporated herein by reference in its entirety). In some embodiments, the reverse transcriptase domain has an error rate (e.g., misincorporation of nucleotides) in cells (e.g., HEK293T cells) of between 1×10⁻³-110⁻⁴ or 1×10⁻⁴-1×10⁻⁵ substitutions/nt, e.g., by long-read amplicon sequencing, e.g., as described in Karst et al. (2020) bioRxiv doi.org/10.1101/645903 (incorporated by reference herein in its entirety).

[0738] In some embodiments, the reverse transcriptase domain is capable of performing reverse transcription of a target RNA in vitro. In some embodiments, the reverse transcriptase requires a primer of at least 3 nucleotides to initiate reverse transcription of a template. In some embodiments, reverse transcription of the target RNA is determined by detection of cDNA from the target RNA (e.g., when provided with a ssDNA primer, e.g., which anneals to the target with at least 3, 4, 5, 6, 7, 8, 9, or 10 nt at the 3′ end), e.g., as described in Bibillo and Eickbush (2002) J Biol Chem 277(38):34836-34845 (incorporated herein by reference in its entirety).

[0739] In some embodiments, the reverse transcriptase domain performs reverse transcription at least 5 or 10 times more efficiently (e.g., by cDNA production), e.g., when converting its RNA template to cDNA, for example, as compared to an RNA template lacking the protein binding motif (e.g., a 3′ UTR). In embodiments, efficiency of reverse transcription is measured as described in Yasukawa et al. (2017) Biochem Biophys Res Commun 492(2):147-153 (incorporated by reference herein in its entirety).

[0740] In some embodiments, the reverse transcriptase domain specifically binds a specific RNA template with higher frequency (e.g., about 5 or 10-fold higher frequency) than any endogenous cellular RNA, e.g., when expressed in cells (e.g., HEK293T cells). In embodiments, frequency of specific binding between the reverse transcriptase domain and the template RNA are measured by CLIP-seq, e.g., as described in Lin and Miles (2019) Nucleic Acids Res 47(11):5490-5501 (incorporated herein by reference in its entirety).

### Template Nucleic Acid Binding Domain

[0741] The gene modifying polypeptide typically contains regions capable of associating with the template nucleic acid (e.g., template RNA). In some embodiments, the template nucleic acid binding domain is an RNA binding domain. In some embodiments, the RNA binding domain is a modular domain that can associate with RNA molecules containing specific signatures, e.g., structural motifs. In other embodiments, the template nucleic acid binding domain (e.g., RNA binding domain) is contained within the reverse transcription domain, e.g., the reverse transcriptase-derived component has a known signature for RNA preference.

[0742] In other embodiments, the template nucleic acid binding domain (e.g., RNA binding domain) is contained within the target DNA binding domain. For example, in some embodiments, the DNA binding domain is a CRISPR-associated protein that recognizes the structure of a template nucleic acid (e.g., template RNA) comprising a gRNA. In some embodiments, a gene modifying polypeptide comprises a DNA-binding domain comprising a CRISPR-associated protein that associates with a gRNA scaffold that allows the DNA-binding domain to bind a target genomic DNA sequence. In some embodiments, the gRNA scaffold and gRNA spacer is comprised within the template nucleic acid (e.g., template RNA), thus the DNA-binding domain is also the template nucleic acid binding domain. In some embodiments, the polypeptide possesses RNA binding function in multiple domains, e.g., can bind a gRNA structure in a CRISPR-associated DNA binding domain and an additional sequence or structure in a reverse transcriptase domain.

[0743] In some embodiments, the RNA binding domain is capable of binding to a template RNA with greater affinity than a reference RNA binding domain. In some embodiments, the reference RNA binding domain is an RNA binding domain from Cas9 of S. pyogenes. In some embodiments, the RNA binding domain is capable of binding to a template RNA with an affinity between 100 pM-10 nM (e.g., between 100 pM-1 nM or 1 nM-10 nM). In some embodiments, the affinity of a RNA binding domain for its template RNA is measured in vitro, e.g., by thermophoresis, e.g., as described in Asmari et al. Methods 146:107-119 (2018) (incorporated by reference herein in its entirety). In some embodiments, the affinity of a RNA binding domain for its template RNA is measured in cells (e.g., by FRET or CLIP-Seq).

[0744] In some embodiments, the RNA binding domain is associated with the template RNA in vitro at a frequency at least about 5-fold or 10-fold higher than with a scrambled RNA. In some embodiments, the frequency of association between the RNA binding domain and the template RNA or scrambled RNA is measured by CLIP-seq, e.g., as described in Lin and Miles (2019) Nucleic Acids Res 47(11):5490-5501 (incorporated by reference herein in its entirety). In some embodiments, the RNA binding domain is associated with the template RNA in cells (e.g., in HEK293T cells) at a frequency at least about 5-fold or 10-fold higher than with a scrambled RNA. In some embodiments, the frequency of association between the RNA binding domain and the template RNA or scrambled RNA is measured by CLIP-seq, e.g., as described in Lin and Miles (2019), supra.

### RNA Binding Domains (RBDs)

[0745] In some embodiments, a gene modifying polypeptide as described herein comprises an RNA binding domain (RBD). In some embodiments, a gene modifying polypeptide as described herein comprises an RBD comprising the amino acid sequence of an RBD as listed in Table 31, or an amino acid sequence having at least 75%, 80%, 85%, 90%, 95%, 96%, 97%, 98%, or 99% identity thereto. In some embodiments, the RBD of a gene modifying polypeptide as described herein binds to an RNA binding partner, e.g., as listed in Table 31. In embodiments, the RBD comprises the amino acid sequence of an RBD as listed in any one row of Table 31, or an amino acid sequence having at least 75%, 80%, 85%, 90%, 95%, 96%, 97%, 98%, or 99% identity thereto, and binds to the RNA binding partner listed in the same row of Table 31. In embodiments, the RBD comprises, in N-terminal to C-terminal direction, a first amino acid sequence according to SEQ ID NO: 18003, an alanine residue, and a second amino acid sequence according to SEQ ID NO: 18003.

TABLE 31
Exemplary RNA binding domain sequences

| | RNA | | |
|---|---|---|---|
| | binding | | SEQ ID |
| Name | partner | Amino Acid sequence | NO: |
| MCP_v1 | MS2 | MASNFTQFVLVDNGGTGDVTVAPSNFANGIAEWISSNSRSQAY | 18001 |
| | | KVTCSVRQSSAQNRKYTIKVEVPKGAWRSYLNMELTIPIFATN | |
| | | SDCELIVKAMQGLLKDGNPIPSAIAANSGIYGSGRA | |
| MCP_v1.1 | MS2 | MASNFTQFVLVDNGGTGDVTVAPSNFANGIAEWISSNSRSQAY | 18002 |
| | | KVTCSVRQSSAQNRKYTIKVEVPKGAWRSYLNMELTIPIFATN | |
| | | SDCELIVKAMQGLLKDGNPIPSAIAANSGIY | |
| MCP_v1 + | MS2 | NFTQFVLVDNGGTGDVTVAPSNFANGIAEWISSNSRSQAYKVT | 18003 |
| altered dimer | | CSVRQSSAQNRKYTIKVEVPKGAWRSYLNMELTIPIFATNSDC | |
| junction | | ELIVKAMQGLLKDGNPIPSAIAANSGIY | |
| MCP_v2 | MS2 | MASNFTQFVLVDNGGTGDVTVAPSNFANGVAEWISSNSRSQAY | 18004 |
| | | KVTCSVRQSSAQKRKYTIKVEVPKVATQTVGGVELPVAAWRSY | |
| | | LNMELTIPIFATNSDCELIVKAMQGLLKDGNPIPSAIAANSGL | |
| | | Y | |
| 2MCP with | MS2 | MASNFTQFVLVDNGGTGDVTVAPSNFANGIAEWISSNSRSQAY | 18005 |
| altered dimer | | KVTCSVRQSSAQNRKYTIKVEVPKGAWRSYLNMELTIPIFATNSD | |
| junction. | | CELIVKAMQGLLKDGNPIPSAIAANSGIYANFTQFVLVDNGGTG | |
| Alanine at | | DVTVAPSNFANGIAEWISSNSRSQAYKVTCSVRQSSAQNRKYTI | |
| junction is | | KVEVPKGAWRSYLNMELTIPIFATNSDCELIVKAMQGLLKDGNP | |
| underlined. | | IPSAIAANSGIY | |
| 4MCP with | MS2 | MASNFTQFVLVDNGGTGDVTVAPSNFANGIAEWISSNSRSQAY | 18006 |
| altered dimer | | KVTCSVRQSSAQNRKYTIKVEVPKGAWRSYLNMELTIPIFATNSD | |
| junction. | | CELIVKAMQGLLKDGNPIPSAIAANSGIYANFTQFVLVDNGGTG | |
| Alanine at | | DVTVAPSNFANGIAEWISSNSRSQAYKVTCSVRQSSAQNRKYTI | |
| junction is | | KVEVPKGAWRSYLNMELTIPIFATNSDCELIVKAMQGLLKDGNP | |
| underlined | | IPSAIAANSGIYGGGSGGGSGGGSGGGSMASNFTQFVLVDNGG | |
| and linker is | | TGDVTVAPSNFANGIAEWISSNSRSQAYKVTCSVRQSSAQNRKY | |
| italicized. | | TIKVEVPKGAWRSYLNMELTIPIFATNSDCELIVKAMQGLLKDGN | |
| | | PIPSAIAANSGIYANFTQFVLVDNGGTGDVTVAPSNFANGIAEW | |
| | | ISSNSRSQAYKVTCSVRQSSAQNRKYTIKVEVPKGAWRSYLNME | |
| | | LTIPIFATNSDCELIVKAMQGLLKDGNPIPSAIAANSGIY | |
| PCP | PP7 | MGSMSKTIVLSVGEATRTLTEIQSTADRQIFEEKVGPLVGRLR | 18007 |
| | | LTASLRQNGAKTAYRVNLKLDQADVVDSGLPKVRYTQVWSHDV | |
| | | TIVANSTEASRKSLYDLTKSLVATSQVEDLVVNLVPLGRGSGR | |
| | | A | |
| PCP_v1.1 | PP7 | MSKTIVLSVGEATRTLTEIQSTADRQIFEEKVGPLVGRLRLTA | 18008 |
| | | SLRQNGAKTAYRVNLKLDQADVVDSGLPKVRYTQVWSHDVTIV | |
| | | ANSTEASRKSLYDLTKSLVATSQVEDLVVNLVPLGRGSGRA | |
| Com | com | MGSMKSIRCKNCNKLLFKADSFDHIEIRCPRCKRHIIMLNACE | 18009 |
| | | HPTEKHCGKREKITHSDETVRYGSGRA | |
| Com_v1.1 | com | MKSIRCKNCNKLLFKADSFDHIEIRCPRCKRHIIMLNACEHPT | 18010 |
| | | EKHCGKREKITHSDETVRYGSGRA | |
| LS4 | LS4-1, | YVRFEVPEDMQNEALSLLEKVRESGKVKKGTNRTTHAVYRGLA | 18011 |
| | CS1 | KLVYIAEDVDPPEIVAHLPLLCEEKNVPYIYVKSKNDLGRAVG | |
| | | GWPIGASAAIINEGELRKELGSLVEKIKGLQKRSHMHLE | |
| LS12 | LS12-1, | YVRFEVPEDMQNEALSLLEKVRESGKVKKGTNSTTLAVSRGLA | 18012 |
| | CS2 | KLVYIAEDVDPPEIVAHLPLLCEEKNVPYIYVKSKNDLGRAVG | |
| | | RVYPGASAAIINEGELRKELGSLVEKIKGLQKRSHMHLE | |
| lambdaN | BoxB | MDAQTRRRERRAEKQAQWKAAN | 18013 |
| (1-22) | | | |
| L7Ae | Kt | MYVRFEVPEDMQNEALSLLEKVRESGKVKKGTNETTKAVERGL | 18014 |
| | | AKLVYIAEDVDPPEIVAHLPLLCEEKNVPYIYVKSKNDLGRAV | |
| | | GIEVPCASAAIINEGELRKELGSLVEKIKGLQK | |
| L7Ae | Kt | YVRFEVPEDMQNEALSLLEKVRESGKVKKGTNETTKAVERGLA | 18015 |
| | | KLVYIAEDVDPPEIVAHLPLLCEEKNVPYIYVKSKNDLGRAVG | |
| | | IEVPCASAAIINEGELRKELGSLVEKIKGLQKRSHMHLE | |

### Endonuclease Domains and DNA Binding Domains

[0746] In some embodiments, a gene modifying polypeptide possesses the function of DNA target site cleavage via an endonuclease domain. In some embodiments, a gene modifying polypeptide comprises a DNA binding domain, e.g., for binding to a target nucleic acid. In some embodiments, a domain (e.g., a Cas domain) of the gene modifying polypeptide comprises two or more smaller domains, e.g., a DNA binding domain and an endonuclease domain. It is understood that when a DNA binding domain (e.g., a Cas domain) is said to bind to a target nucleic acid sequence, in some embodiments, the binding is mediated by a gRNA.

[0747] In some embodiments, a domain has two functions. For example, in some embodiments, the endonuclease domain is also a DNA-binding domain. In some embodiments, the endonuclease domain is also a template nucleic acid (e.g., template RNA) binding domain. For example, in some embodiments, a polypeptide comprises a CRISPR-associated endonuclease domain that binds a template RNA comprising a gRNA, binds a target DNA sequence (e.g., with complementarity to a portion of the gRNA), and cuts the target DNA sequence. In some embodiments, an endonuclease domain or endonuclease/DNA-binding domain from a heterologous source can be used or can be modified (e.g., by insertion, deletion, or substitution of one or more residues) in a gene modifying system described herein.

[0748] In some embodiments, a nucleic acid encoding the endonuclease domain or endonuclease/DNA binding domain is altered from its natural sequence to have altered codon usage, e.g. improved for human cells. In some embodiments, the endonuclease element is a heterologous endonuclease element, such as a Cas endonuclease (e.g., Cas9), a type-II restriction endonuclease (e.g., Fok1), a meganuclease (e.g., I-SceI), or other endonuclease domain.

[0749] In certain aspects, the DNA-binding domain of a gene modifying polypeptide described herein is selected, designed, or constructed for binding to a desired host DNA target sequence. In certain embodiments, the DNA-binding domain of the polypeptide is a heterologous DNA-binding element. In some embodiments the heterologous DNA binding element is a zinc-finger element or a TAL effector element, e.g., a zinc-finger or TAL polypeptide or functional fragment thereof. In some embodiments the heterologous DNA binding element is a sequence-guided DNA binding element, such as Cas9, Cpf1, or other CRISPR-related protein that has been altered to have no endonuclease activity. In some embodiments the heterologous DNA binding element retains endonuclease activity. In some embodiments, the heterologous DNA binding element retains partial endonuclease activity to cleave ssDNA, e.g., possesses nickase activity. In specific embodiments, the heterologous DNA-binding domain can be any one or more of Cas9, TAL domain, ZF domain, Myb domain, combinations thereof, or multiples thereof.

[0750] In some embodiments, DNA-binding domains are modified, for example by site-specific mutation, increasing or decreasing DNA-binding elements (for example, number and/or specificity of zinc fingers), etc., to alter DNA-binding specificity and affinity. In some embodiments a nucleic acid sequence encoding the DNA binding domain is altered from its natural sequence to have altered codon usage, e.g. improved for human cells. In embodiments, the DNA binding domain comprises one or more modifications relative to a wild-type DNA binding domain, e.g., a modification via directed evolution, e.g., phage-assisted continuous evolution (PACE).

[0751] In some embodiments, the DNA binding domain comprises a meganuclease domain (e.g., as described herein, e.g., in the endonuclease domain section), or a functional fragment thereof. In some embodiments, the meganuclease domain possesses endonuclease activity, e.g., double-strand cleavage and/or nickase activity. In other embodiments, the meganuclease domain has reduced activity, e.g., lacks endonuclease activity, e.g., the meganuclease is catalytically inactive. In some embodiments, a catalytically inactive meganuclease is used as a DNA binding domain, e.g., as described in Fonfara et al. Nucleic Acids Res 40(2):847-860 (2012), incorporated herein by reference in its entirety.

[0752] In some embodiments, a gene modifying polypeptide comprises a modification to a DNA-binding domain, e.g., relative to the wild-type polypeptide. In some embodiments, the DNA-binding domain comprises an addition, deletion, replacement, or modification to the amino acid sequence of the original DNA-binding domain. In some embodiments, the DNA-binding domain is modified to include a heterologous functional domain that binds specifically to a target nucleic acid (e.g., DNA) sequence of interest. In some embodiments, the functional domain replaces at least a portion (e.g., the entirety of) the prior DNA-binding domain of the polypeptide. In some embodiments, the functional domain comprises a zinc finger (e.g., a zinc finger that specifically binds to the target nucleic acid (e.g., DNA) sequence of interest. In some embodiments, the functional domain comprises a Cas domain (e.g., a Cas domain that specifically binds to the target nucleic acid (e.g., DNA) sequence of interest. In some embodiments, the Cas domain comprises a Cas9 or a mutant or variant thereof (e.g., as described herein). In embodiments, the Cas domain is associated with a guide RNA (gRNA), e.g., as described herein. In embodiments, the Cas domain is directed to a target nucleic acid (e.g., DNA) sequence of interest by the gRNA. In embodiments, the Cas domain is encoded in the same nucleic acid (e.g., RNA) molecule as the gRNA. In embodiments, the Cas domain is encoded in a different nucleic acid (e.g., RNA) molecule from the gRNA.

[0753] In some embodiments, the DNA binding domain is capable of binding to a target sequence (e.g., a dsDNA target sequence) with greater affinity than a reference DNA binding domain. In some embodiments, the reference DNA binding domain is a DNA binding domain from Cas9 of S. pyogenes. In some embodiments, the DNA binding domain is capable of binding to a target sequence (e.g., a dsDNA target sequence) with an affinity between 100 pM-10 nM (e.g., between 100 pM-1 nM or 1 nM-10 nM).

[0754] In some embodiments, the affinity of a DNA binding domain for its target sequence (e.g., dsDNA target sequence) is measured in vitro, e.g., by thermophoresis, e.g., as described in Asmari et al. Methods 146:107-119 (2018) (incorporated by reference herein in its entirety).

[0755] In embodiments, the DNA binding domain is capable of binding to its target sequence (e.g., dsDNA target sequence), e.g, with an affinity between 100 pM-10 nM (e.g., between 100 pM-1 nM or 1 nM-10 nM) in the presence of a molar excess of scrambled sequence competitor dsDNA, e.g., of about 100-fold molar excess.

[0756] In some embodiments, the DNA binding domain is found associated with its target sequence (e.g., dsDNA target sequence) more frequently than any other sequence in the genome of a target cell, e.g., human target cell, e.g., as measured by ChIP-seq (e.g., in HEK293T cells), e.g., as described in He and Pu (2010) Curr. Protoc Mol Biol Chapter 21 (incorporated herein by reference in its entirety). In some embodiments, the DNA binding domain is found associated with its target sequence (e.g., dsDNA target sequence) at least about 5-fold or 10-fold, more frequently than any other sequence in the genome of a target cell, e.g., as measured by ChIP-seq (e.g., in HEK293T cells), e.g., as described in He and Pu (2010), supra.

[0757] In some embodiments, the endonuclease domain has nickase activity and cleaves one strand of a target DNA. In some embodiments, nickase activity reduces the formation of double-stranded breaks at the target site. In some embodiments, the endonuclease domain creates a staggered nick structure in the first and second strands of a target DNA. In some embodiments, a staggered nick structure generates free 3′ overhangs at the target site. In some embodiments, free 3′ overhangs at the target site improve editing efficiency, e.g., by enhancing access and annealing of a 3′ homology region of a template nucleic acid. In some embodiments, a staggered nick structure reduces the formation of double-stranded breaks at the target site.

[0758] In some embodiments, the endonuclease domain cleaves both strands of a target DNA, e.g., results in blunt-end cleavage of a target with no ssDNA overhangs on either side of the cut-site. The amino acid sequence of an endonuclease domain of a gene modifying system described herein may be at least about 50%, at least about 60%, at least about 70%, at least about 80%, at least about 85%, at least about 90%, at least about 95%, at least about 96%, at least about 97%, at least about 98%, at least about 99% identical to the amino acid sequence of an endonuclease domain described herein, e.g., an endonuclease domain as described herein.

[0759] In certain embodiments, the heterologous endonuclease is Fok1 or a functional fragment thereof. In certain embodiments, the heterologous endonuclease is a Holliday junction resolvase or homolog thereof, such as the Holliday junction resolving enzyme from Sulfolobus solfataricus-Ssol Hje (Govindaraju et al., Nucleic Acids Research 44:7, 2016). In certain embodiments, the heterologous endonuclease is the endonuclease of the large fragment of a spliceosomal protein, such as Prp8 (Mahbub et al., Mobile DNA 8:16, 2017). In certain embodiments, the heterologous endonuclease is derived from a CRISPR-associated protein, e.g., Cas9. In certain embodiments, the heterologous endonuclease is engineered to have only ssDNA cleavage activity, e.g., only nickase activity, e.g., be a Cas9 nickase, e.g., SpCas9 with D10A, H840A, or N863A mutations. Table 8 provides exemplary Cas proteins and mutations associated with nickase activity. In still other embodiments, homologous endonuclease domains are modified, for example by site-specific mutation, to alter DNA endonuclease activity. In still other embodiments, endonuclease domains are modified to reduce DNA-sequence specificity, e.g., by truncation to remove domains that confer DNA-sequence specificity or mutation to inactivate regions conferring DNA-sequence specificity.

[0760] In some embodiments, the endonuclease domain has nickase activity and does not form double-stranded breaks. In some embodiments, the endonuclease domain forms single-stranded breaks at a higher frequency than double-stranded breaks, e.g., at least 90%, 95%, 96%, 97%, 98%, or 99% of the breaks are single-stranded breaks, or less than 10%, 5%, 4%, 3%, 2%, or 1% of the breaks are double-stranded breaks. In some embodiments, the endonuclease forms substantially no double-stranded breaks. In some embodiments, the endonuclease does not form detectable levels of double-stranded breaks.

[0761] In some embodiments, the endonuclease domain has nickase activity that nicks the target site DNA of the first strand; e.g., in some embodiments, the endonuclease domain cuts the genomic DNA of the target site near to the site of alteration on the strand that will be extended by the writing domain. In some embodiments, the endonuclease domain has nickase activity that nicks the target site DNA of the first strand and does not nick the target site DNA of the second strand. For example, when a polypeptide comprises a CRISPR-associated endonuclease domain having nickase activity, in some embodiments, said CRISPR-associated endonuclease domain nicks the target site DNA strand containing the PAM site (e.g., and does not nick the target site DNA strand that does not contain the PAM site). As a further example, when a polypeptide comprises a CRISPR-associated endonuclease domain having nickase activity, in some embodiments, said CRISPR-associated endonuclease domain nicks the target site DNA strand not containing the PAM site (e.g., and does not nick the target site DNA strand that contains the PAM site).

[0762] In some other embodiments, the endonuclease domain has nickase activity that nicks the target site DNA of the first strand and the second strand. Without wishing to be bound by theory, after a writing domain (e.g., RT domain) of a polypeptide described herein polymerizes (e.g., reverse transcribes) from the heterologous object sequence of a template nucleic acid (e.g., template RNA), the cellular DNA repair machinery must repair the nick on the first DNA strand. The target site DNA now contains two different sequences for the first DNA strand: one corresponding to the original genomic DNA (e.g., having a free 5′ end) and a second corresponding to that polymerized from the heterologous object sequence (e.g., having a free 3′ end). It is thought that the two different sequences equilibrate with one another, first one hybridizing the second strand, then the other, and which sequence the cellular DNA repair apparatus incorporates into its repaired target site may be a stochastic process. Without wishing to be bound by theory, it is thought that introducing an additional nick to the second-strand may bias the cellular DNA repair machinery to adopt the heterologous object sequence-based sequence more frequently than the original genomic sequence (Anzalone et al. Nature 576:149-157 (2019)). In some embodiments, the additional nick is positioned at least 10, 15, 20, 25, 30, 35, 40, 45, 50, 55, 60, 65, 70, 75, 80, 85, 90, 95, 100, 105, 110, 115, 120, 125, 130, 135, 140, 145, or 150 nucleotides 5′ or 3′ of the target site modification (e.g., the insertion, deletion, or substitution) or to the nick on the first strand.

[0763] Alternatively or additionally, without wishing to be bound by theory, it is thought that an additional nick to the second strand may promote second-strand synthesis. In some embodiments, where the gene modifying system has inserted or substituted a portion of the first strand, synthesis of a new sequence corresponding to the insertion/substitution in the second strand is necessary.

[0764] In some embodiments, the polypeptide comprises a single domain having endonuclease activity (e.g., a single endonuclease domain) and said domain nicks both the first strand and the second strand. For example, in such an embodiment the endonuclease domain may be a CRISPR-associated endonuclease domain, and the template nucleic acid (e.g., template RNA) comprises a gRNA spacer that directs nicking of the first strand and an additional gRNA spacer that directs nicking of the second strand. In some embodiments, the polypeptide comprises a plurality of domains having endonuclease activity, and a first endonuclease domain nicks the first strand and a second endonuclease domain nicks the second strand (optionally, the first endonuclease domain does not (e.g., cannot) nick the second strand and the second endonuclease domain does not (e.g., cannot) nick the first strand).

[0765] In some embodiments, the endonuclease domain is capable of nicking a first strand and a second strand. In some embodiments, the first and second strand nicks occur at the same position in the target site but on opposite strands. In some embodiments, the second strand nick occurs in a staggered location, e.g., upstream or downstream, from the first nick. In some embodiments, the endonuclease domain generates a target site deletion if the second strand nick is upstream of the first strand nick. In some embodiments, the endonuclease domain generates a target site duplication if the second strand nick is downstream of the first strand nick. In some embodiments, the endonuclease domain generates no duplication and/or deletion if the first and second strand nicks occur in the same position of the target site.

[0766] In some embodiments, the endonuclease domain has altered activity depending on protein conformation or RNA-binding status, e.g., which promotes the nicking of the first or second strand (e.g., as described in Christensen et al. PNAS 2006; incorporated by reference herein in its entirety).

[0767] In some embodiments, the endonuclease domain comprises a meganuclease, or a functional fragment thereof. In some embodiments, the endonuclease domain comprises a homing endonuclease, or a functional fragment thereof. In some embodiments, the endonuclease domain comprises a meganuclease from the LAGLIDADG (SEQ ID NO: 18221), GIY-YIG, HNH, His-Cys Box, or PD-(D/E) XK families, or a functional fragment or variant thereof, e.g., which possess conserved amino acid motifs, e.g., as indicated in the family names. In some embodiments, the endonuclease domain comprises a meganuclease, or fragment thereof, chosen from, e.g., I-SmaMI (Uniprot F7WD42), I-SceI (Uniprot P03882), I-Anil (Uniprot P03880), I-DmoI (Uniprot P21505), I-CreI (Uniprot P05725), I-TevI (Uniprot P13299), I-OnuI (Uniprot Q4VWW5), or I-BmoI (Uniprot Q9ANR6). In some embodiments, the meganuclease is naturally monomeric, e.g., I-SceI, I-TevI, or dimeric, e.g., I-CreI, in its functional form. For example, the LAGLIDADG meganucleases (SEQ ID NO: 18221) with a single copy of the LAGLIDADG motif (SEQ ID NO: 18221) generally form homodimers, whereas members with two copies of the LAGLIDADG motif (SEQ ID NO: 18221) are generally found as monomers. In some embodiments, a meganuclease that normally forms as a dimer is expressed as a fusion, e.g., the two subunits are expressed as a single ORF and, optionally, connected by a linker, e.g., an I-CreI dimer fusion (Rodriguez-Fornes et al. Gene Therapy 2020; incorporated by reference herein in its entirety). In some embodiments, a meganuclease, or a functional fragment thereof, is altered to favor nickase activity for one strand of a double-stranded DNA molecule, e.g., I-SceI (K122I and/or K223I) (Niu et al. J Mol Biol 2008), I-Anil (K227M) (McConnell Smith et al. PNAS 2009), I-DmoI (Q42A and/or K120M) (Molina et al. J Biol Chem 2015). In some embodiments, a meganuclease or functional fragment thereof possessing this preference for single-strand cleavage is used as an endonuclease domain, e.g., with nickase activity. In some embodiments, an endonuclease domain comprises a meganuclease, or a functional fragment thereof, which naturally targets or is engineered to target a safe harbor site, e.g., an I-CreI targeting SH6 site (Rodriguez-Fornes et al., supra). In some embodiments, an endonuclease domain comprises a meganuclease, or a functional fragment thereof, with a sequence tolerant catalytic domain, e.g., I-TevI recognizing the minimal motif CNNNG (Kleinstiver et al. PNAS 2012). In some embodiments, a target sequence tolerant catalytic domain is fused to a DNA binding domain, e.g., to direct activity, e.g., by fusing I-TevI to: (i) zinc fingers to create Tev-ZFEs (Kleinstiver et al. PNAS 2012), (ii) other meganucleases to create MegaTevs (Wolfs et al. Nucleic Acids Res 2014), and/or (iii) Cas9 to create TevCas9 (Wolfs et al. PNAS 2016).

[0768] In some embodiments, the endonuclease domain comprises a restriction enzyme, e.g., a Type IIS or Type IIP restriction enzyme. In some embodiments, the endonuclease domain comprises a Type IIS restriction enzyme, e.g., FokI, or a fragment or variant thereof. In some embodiments, the endonuclease domain comprises a Type IIP restriction enzyme, e.g., PvuII, or a fragment or variant thereof. In some embodiments, a dimeric restriction enzyme is expressed as a fusion such that it functions as a single chain, e.g., a FokI dimer fusion (Minczuk et al. Nucleic Acids Res 36(12):3926-3938 (2008)).

[0769] The use of additional endonuclease domains is described, for example, in Guha and Edgell Int J Mol Sci 18(22):2565 (2017), which is incorporated herein by reference in its entirety.

[0770] In some embodiments, a gene modifying polypeptide comprises a modification to an endonuclease domain, e.g., relative to a wild-type Cas protein. In some embodiments, the endonuclease domain comprises an addition, deletion, replacement, or modification to the amino acid sequence of the wild-type Cas protein. In some embodiments, the endonuclease domain is modified to include a heterologous functional domain that binds specifically to and/or induces endonuclease cleavage of a target nucleic acid (e.g., DNA) sequence of interest. In some embodiments, the endonuclease domain comprises a zinc finger. In embodiments, the endonuclease domain comprising the Cas domain is associated with a guide RNA (gRNA), e.g., as described herein. In some embodiments, the endonuclease domain is modified to include a functional domain that does not target a specific target nucleic acid (e.g., DNA) sequence. In embodiments, the endonuclease domain comprises a Fok1 domain.

[0771] In some embodiments, the endonuclease domain is associated with the target dsDNA in vitro at a frequency at least about 5-fold or 10-fold higher than with a scrambled dsDNA. In some embodiments, the endonuclease domain is associated with the target dsDNA in vitro at a frequency at least about 5-fold or 10-fold higher than with a scrambled dsDNA, e.g., in a cell (e.g., a HEK293T cell). In some embodiments, the frequency of association between the endonuclease domain and the target DNA or scrambled DNA is measured by ChIP-seq, e.g., as described in He and Pu (2010) Curr. Protoc Mol Biol Chapter 21 (incorporated by reference herein in its entirety).

[0772] In some embodiments, the endonuclease domain can catalyze the formation of a nick at a target sequence, e.g., to an increase of at least about 5-fold or 10-fold relative to a non-target sequence (e.g., relative to any other genomic sequence in the genome of the target cell). In some embodiments, the level of nick formation is determined using NickSeq, e.g., as described in Elacqua et al. (2019) bioRxiv doi.org/10.1101/867937 (incorporated herein by reference in its entirety).

[0773] In some embodiments, the endonuclease domain is capable of nicking DNA in vitro. In embodiments, the nick results in an exposed base. In embodiments, the exposed base can be detected using a nuclease sensitivity assay, e.g., as described in Chaudhry and Weinfeld (1995) Nucleic Acids Res 23(19):3805-3809 (incorporated by reference herein in its entirety). In embodiments, the level of exposed bases (e.g., detected by the nuclease sensitivity assay) is increased by at least 10%, 50%, or more relative to a reference endonuclease domain. In some embodiments, the reference endonuclease domain is an endonuclease domain from Cas9 of S. pyogenes.

[0774] In some embodiments, the endonuclease domain is capable of nicking DNA in a cell. In embodiments, the endonuclease domain is capable of nicking DNA in a HEK293T cell. In embodiments, an unrepaired nick that undergoes replication in the absence of Rad51 results in increased NHEJ rates at the site of the nick, which can be detected, e.g., by using a Rad51 inhibition assay, e.g., as described in Bothmer et al. (2017) Nat Commun 8:13905 (incorporated by reference herein in its entirety). In embodiments, NHEJ rates are increased above 0-5%. In embodiments, NHEJ rates are increased to 20-70% (e.g., between 30%-60% or 40-50%), e.g., upon Rad51 inhibition.

[0775] In some embodiments, the endonuclease domain releases the target after cleavage. In some embodiments, release of the target is indicated indirectly by assessing for multiple turnovers by the enzyme, e.g., as described in Yourik at al. RNA 25(1):35-44 (2019) (incorporated herein by reference in its entirety) and shown in FIG. 2. In some embodiments, the kexₚ of an endonuclease domain is 1×10⁻³-1×10⁻⁵ min-1 as measured by such methods.

[0776] In some embodiments, the endonuclease domain has a catalytic efficiency (k_{cat}/Kₘ) greater than about 1×10⁸ s⁻¹ M⁻¹ in vitro. In embodiments, the endonuclease domain has a catalytic efficiency greater than about 1×10⁵, 1×10⁶, 1×10⁷, or 1×10⁸, s⁻¹ M⁻¹ in vitro. In embodiments, catalytic efficiency is determined as described in Chen et al. (2018) Science 360(6387):436-439 (incorporated herein by reference in its entirety). In some embodiments, the endonuclease domain has a catalytic efficiency (k_{cat}/Kₘ) greater than about 1×10⁸ s⁻¹ M⁻¹ in cells. In embodiments, the endonuclease domain has a catalytic efficiency greater than about 1×10⁵, 1×10⁶, 1×10⁷, or 1×10⁸ s⁻¹ M⁻¹ in cells.

### Gene Modifying Polypeptides Comprising Cas Domains

[0777] In some embodiments, a gene modifying polypeptide described herein comprises a Cas domain. In some embodiments, the Cas domain can direct the gene modifying polypeptide to a target site specified by a gRNA spacer, thereby modifying a target nucleic acid sequence in “cis”. In some embodiments, a gene modifying polypeptide is fused to a Cas domain. In some embodiments, a gene modifying polypeptide comprises a CRISPR/Cas domain (also referred to herein as a CRISPR-associated protein). In some embodiments, a CRISPR/Cas domain comprises a protein involved in the clustered regulatory interspaced short palindromic repeat (CRISPR) system, e.g., a Cas protein, and optionally binds a guide RNA, e.g., single guide RNA (sgRNA).

[0778] CRISPR systems are adaptive defense systems originally discovered in bacteria and archaea. CRISPR systems use RNA-guided nucleases termed CRISPR-associated or “Cas” endonucleases (e. g., Cas9 or Cpf1) to cleave foreign DNA. For example, in a typical CRISPR-Cas system, an endonuclease is directed to a target nucleotide sequence (e. g., a site in the genome that is to be sequence-edited) by sequence-specific, non-coding “guide RNAs” that target single- or double-stranded DNA sequences. Three classes (I-III) of CRISPR systems have been identified. The class II CRISPR systems use a single Cas endonuclease (rather than multiple Cas proteins). One class II CRISPR system includes a type II Cas endonuclease such as Cas9, a CRISPR RNA (“crRNA”), and a trans-activating crRNA (“tracrRNA”). The crRNA contains a “spacer” sequence, a typically about 20-nucleotide RNA sequence that corresponds to a target DNA sequence (“protospacer”). In the wild-type system, and in some engineered systems, crRNA also contains a region that binds to the tracrRNA to form a partially double-stranded structure that is cleaved by RNase III, resulting in a crRNA/tracrRNA hybrid molecule. A crRNA/tracrRNA hybrid then directs the Cas endonuclease to recognize and cleave a target DNA sequence. A target DNA sequence is generally adjacent to a “protospacer adjacent motif” (“PAM”) that is specific for a given Cas endonuclease and required for cleavage activity at a target site matching the spacer of the crRNA. CRISPR endonucleases identified from various prokaryotic species have unique PAM sequence requirements, e.g., as listed for exemplary Cas enzymes in Table 7; examples of PAM sequences include 5′-NGG (Streptococcus pyogenes), 5′-NNAGAA (Streptococcus thermophilus CRISPR1), 5′-NGGNG (Streptococcus thermophilus CRISPR3), and 5′-NNNGATT (Neisseria meningiditis). Some endonucleases, e.g., Cas9 endonucleases, are associated with G-rich PAM sites, e. g., 5′-NGG, and perform blunt-end cleaving of the target DNA at a location 3 nucleotides upstream from (5′ from) the PAM site. Another class II CRISPR system includes the type V endonuclease Cpf1, which is smaller than Cas9; examples include AsCpf1 (from Acidaminococcus sp.) and LbCpf1 (from Lachnospiraceae sp.). Cpf1-associated CRISPR arrays are processed into mature crRNAs without the requirement of a tracrRNA; in other words, a Cpf1 system, in some embodiments, comprises only Cpf1 nuclease and a crRNA to cleave a target DNA sequence. Cpf1 endonucleases, are typically associated with T-rich PAM sites, e. g., 5′-TTN. Cpf1 can also recognize a 5′-CTA PAM motif. Cpf1 typically cleaves a target DNA by introducing an offset or staggered double-strand break with a 4- or 5-nucleotide 5′ overhang, for example, cleaving a target DNA with a 5-nucleotide offset or staggered cut located 18 nucleotides downstream from (3′ from) from a PAM site on the coding strand and 23 nucleotides downstream from the PAM site on the complimentary strand; the 5-nucleotide overhang that results from such offset cleavage allows more precise genome editing by DNA insertion by homologous recombination than by insertion at blunt-end cleaved DNA. See, e.g., Zetsche et al. (2015) Cell, 163:759-771.

[0779] A variety of CRISPR associated (Cas) genes or proteins can be used in the technologies provided by the present disclosure and the choice of Cas protein will depend upon the particular conditions of the method. Specific examples of Cas proteins include class II systems including Cas1, Cas2, Cas3, Cas4, Cas5, Cas6, Cas7, Cas8, Cas9, Cas10, Cpf1, C2C1, or C2C3. In some embodiments, a Cas protein, e.g., a Cas9 protein, may be from any of a variety of prokaryotic species. In some embodiments a particular Cas protein, e.g., a particular Cas9 protein, is selected to recognize a particular protospacer-adjacent motif (PAM) sequence. In some embodiments, a DNA-binding domain or endonuclease domain includes a sequence targeting polypeptide, such as a Cas protein, e.g., Cas9. In certain embodiments a Cas protein, e.g., a Cas9 protein, may be obtained from a bacteria or archaea or synthesized using known methods. In certain embodiments, a Cas protein may be from a gram-positive bacteria or a gram-negative bacteria. In certain embodiments, a Cas protein may be from a Streptococcus (e.g., a S. pyogenes, or a S. thermophilus), a Francisella (e.g., an F. novicida), a Staphylococcus (e.g., an S. aureus), an Acidaminococcus (e.g., an Acidaminococcus sp. BV3L6), a Neisseria (e.g., an N. meningitidis), a Cryptococcus, a Corynebacterium, a Haemophilus, a Eubacterium, a Pasteurella, a Prevotella, a Veillonella, or a Marinobacter.

[0780] In some embodiments, a gene modifying polypeptide may comprise the amino acid sequence of SEQ ID NO: 4000 below, or a sequence having at least 70%, 75%, 80%, 85%, 90%, 95%, 96%, 97%, 98%, 99% identity thereto. In embodiments, the amino acid sequence of SEQ ID NO: 4000 below, or the sequence having at least 70%, 75%, 80%, 85%, 90%, 95%, 96%, 97%, 98%, 99% identity thereto, is positioned at the N-terminal end of the gene modifying polypeptide. In embodiments, the amino acid sequence of SEQ ID NO: 4000 below, or the sequence having at least 70%, 75%, 80%, 85%, 90%, 95%, 96%, 97%, 98%, 99% identity thereto, is positioned within 1, 2, 3, 4, 5, 6, 7, 8, 9, 10, 15, 20, 25, or 30 amino acids of the N-terminal end of the gene modifying polypeptide.

Exemplary N-terminal NLS-Cas9 domain
(SEQ ID NO: 4000)
MPAAKRVKLDGGDKKYSIGLDIGTNSVGWAVITDEYKVPSKKFKVLGNTDRHSIKKNLIGALLF
DSGETAEATRLKRTARRRYTRRKNRICYLQEIFSNEMAKVDDSFFHRLEESFLVEEDKKHERHP
IFGNIVDEVAYHEKYPTIYHLRKKLVDSTDKADLRLIYLALAHMIKFRGHFLIEGDLNPDNSDV
DKLFIQLVQTYNQLFEENPINASGVDAKAILSARLSKSRRLENLIAQLPGEKKNGLFGNLIALS
LGLTPNFKSNFDLAEDAKLQLSKDTYDDDLDNLLAQIGDQYADLFLAAKNLSDAILLSDILRVN
TEITKAPLSASMIKRYDEHHQDLTLLKALVRQQLPEKYKEIFFDQSKNGYAGYIDGGASQEEFY
KFIKPILEKMDGTEELLVKLNREDLLRKQRTFDNGSIPHQIHLGELHAILRRQEDFYPFLKDNR
EKIEKILTFRIPYYVGPLARGNSRFAWMTRKSEETITPWNFEEVVDKGASAQSFIERMTNFDKN
LPNEKVLPKHSLLYEYFTVYNELTKVKYVTEGMRKPAFLSGEQKKAIVDLLFKTNRKVTVKQLK
EDYFKKIECFDSVEISGVEDRFNASLGTYHDLLKIIKDKDFLDNEENEDILEDIVLTLTLFEDR
EMIEERLKTYAHLFDDKVMKQLKRRRYTGWGRLSRKLINGIRDKQSGKTILDFLKSDGFANRNF
MQLIHDDSLTFKEDIQKAQVSGQGDSLHEHIANLAGSPAIKKGILQTVKVVDELVKVMGRHKPE
NIVIEMARENQTTQKGQKNSRERMKRIEEGIKELGSQILKEHPVENTQLQNEKLYLYYLQNGRD
MYVDQELDINRLSDYDVDHIVPQSFLKDDSIDNKVLTRSDKARGKSDNVPSEEVVKKMKNYWRQ
LLNAKLITQRKFDNLTKAERGGLSELDKAGFIKRQLVETRQITKHVAQILDSRMNTKYDENDKL
IREVKVITLKSKLVSDFRKDFQFYKVREINNYHHAHDAYLNAVVGTALIKKYPKLESEFVYGDY
KVYDVRKMIAKSEQEIGKATAKYFFYSNIMNFFKTEITLANGEIRKRPLIETNGETGEIVWDKG
RDFATVRKVLSMPQVNIVKKTEVQTGGFSKESILPKRNSDKLIARKKDWDPKKYGGFDSPTVAY
SVLVVAKVEKGKSKKLKSVKELLGITIMERSSFEKNPIDFLEAKGYKEVKKDLIIKLPKYSLFE
LENGRKRMLASAGELQKGNELALPSKYVNFLYLASHYEKLKGSPEDNEQKQLFVEQHKHYLDEI
IEQISEFSKRVILADANLDKVLSAYNKHRDKPIREQAENIIHLFTLTNLGAPAAFKYFDTTIDR
KRYTSTKEVLDATLIHQSITGLYETRIDLSQLGGDGG

[0781] In some embodiments, a gene modifying polypeptide may comprise the amino acid sequence of SEQ ID NO: 4001 below, or a sequence having at least 70%, 75%, 80%, 85%, 90%, 95%, 96%, 97%, 98%, 99% identity thereto. In embodiments, the amino acid sequence of SEQ ID NO: 4001 below, or the sequence having at least 70%, 75%, 80%, 85%, 90%, 95%, 96%, 97%, 98%, 99% identity thereto, is positioned at the C-terminal end of the gene modifying polypeptide. In embodiments, the amino acid sequence of SEQ ID NO: 4001 below, or the sequence having at least 70%, 75%, 80%, 85%, 90%, 95%, 96%, 97%, 98%, 99% identity thereto, is positioned within 1, 2, 3, 4, 5, 6, 7, 8, 9, 10, 15, 20, 25, or 30 amino acids of the C-terminal end of the gene modifying polypeptide.

Exemplary C-terminal sequence comprising an NLS
(SEQ ID NO: 4001)
AGKRTADGSEFEKRTADGSEFESPKKKAKVE
Exemplary benchmarking sequence
(SEQ ID NO: 4002)
MPAAKRVKLDGGDKKYSIGLDIGTNSVGWAVITDEYKVPSKKFKVLGNTDRHSIKKNLIGALLF
DSGETAEATRLKRTARRRYTRRKNRICYLQEIFSNEMAKVDDSFFHRLEESFLVEEDKKHERHP
IFGNIVDEVAYHEKYPTIYHLRKKLVDSTDKADLRLIYLALAHMIKFRGHFLIEGDLNPDNSDV
DKLFIQLVQTYNQLFEENPINASGVDAKAILSARLSKSRRLENLIAQLPGEKKNGLFGNLIALS
LGLTPNFKSNFDLAEDAKLQLSKDTYDDDLDNLLAQIGDQYADLFLAAKNLSDAILLSDILRVN
TEITKAPLSASMIKRYDEHHQDLTLLKALVRQQLPEKYKEIFFDQSKNGYAGYIDGGASQEEFY
KFIKPILEKMDGTEELLVKLNREDLLRKQRTFDNGSIPHQIHLGELHAILRRQEDFYPFLKDNR
EKIEKILTFRIPYYVGPLARGNSRFAWMTRKSEETITPWNFEEVVDKGASAQSFIERMTNFDKN
LPNEKVLPKHSLLYEYFTVYNELTKVKYVTEGMRKPAFLSGEQKKAIVDLLFKTNRKVTVKQLK
EDYFKKIECFDSVEISGVEDRFNASLGTYHDLLKIIKDKDFLDNEENEDILEDIVLTLTLFEDR
EMIEERLKTYAHLFDDKVMKQLKRRRYTGWGRLSRKLINGIRDKQSGKTILDFLKSDGFANRNF
MQLIHDDSLTFKEDIQKAQVSGQGDSLHEHIANLAGSPAIKKGILQTVKVVDELVKVMGRHKPE
NIVIEMARENQTTQKGQKNSRERMKRIEEGIKELGSQILKEHPVENTQLQNEKLYLYYLQNGRD
MYVDQELDINRLSDYDVDHIVPQSFLKDDSIDNKVLTRSDKARGKSDNVPSEEVVKKMKNYWRQ
LLNAKLITQRKFDNLTKAERGGLSELDKAGFIKRQLVETRQITKHIVAQILDSRMNTKYDENDKL
IREVKVITLKSKLVSDFRKDFQFYKVREINNYHHAHDAYLNAVVGTALIKKYPKLESEFVYGDY
KVYDVRKMIAKSEQEIGKATAKYFFYSNIMNFFKTEITLANGEIRKRPLIETNGETGEIVWDKG
RDFATVRKVLSMPQVNIVKKTEVQTGGFSKESILPKRNSDKLIARKKDWDPKKYGGFDSPTVAY
SVLVVAKVEKGKSKKLKSVKELLGITIMERSSFEKNPIDFLEAKGYKEVKKDLIIKLPKYSLFE
LENGRKRMLASAGELQKGNELALPSKYVNFLYLASHYEKLKGSPEDNEQKQLFVEQHKHYLDEI
IEQISEFSKRVILADANLDKVLSAYNKHRDKPIREQAENIIHLFTLTNLGAPAAFKYFDTTIDR
KRYTSTKEVLDATLIHQSITGLYETRIDLSQLGGDGGSGGSSGGSSGSETPGTSESATPESSGG
SSGGSSGGTLNIEDEYRLHETSKEPDVSLGSTWLSDFPQAWAETGGMGLAVRQAPLIIPLKATS
TPVSIKQYPMSQEARLGIKPHIQRLLDQGILVPCQSPWNTPLLPVKKPGTNDYRPVQDLREVNK
RVEDIHPTVPNPYNLLSGLPPSHQWYTVLDLKDAFFCLRLHPTSQPLFAFEWRDPEMGISGQLT
WTRLPQGFKNSPTLFNEALHRDLADFRIQHPDLILLQYVDDLLLAATSELDCQQGTRALLQTLG
NLGYRASAKKAQICQKQVKYLGYLLKEGQRWLTEARKETVMGQPTPKTPRQLREFLGKAGFCRL
FIPGFAEMAAPLYPLTKPGTLFNWGPDQQKAYQEIKQALLTAPALGLPDLTKPFELFVDEKQGY
AKGVLTQKLGPWRRPVAYLSKKLDPVAAGWPPCLRMVAAIAVLTKDAGKLTMGQPLVILAPHAV
EALVKQPPDRWLSNARMTHYQALLLDTDRVQFGPVVALNPATLLPLPEEGLQHNCLDILAEAHG
TRPDLTDQPLPDADHTWYTDGSSLLQEGQRKAGAAVTTETEVIWAKALPAGTSAQRAELIALTQ
ALKMAEGKKLNVYTDSRYAFATAHIHGEIYRRRGWLTSEGKEIKNKDEILALLKALFLPKRLSI
IHCPGHQKGHSAEARGNRMADQAARKAAITETPDTSTLLIENSSPSGGSKRTADGSEFEAGKRT
ADGSEFEKRTADGSEFESPKKKAKVE

[0782] In some embodiments, a gene modifying polypeptide may comprise a Cas domain as listed in Table 7 or 8, or a functional fragment thereof, or a sequence having at least 70%, 75%, 80%, 85%, 90%, 95%, 96%, 97%, 98%, 99% identity thereto.

TABLE 7
CRISPR/Cas Proteins, Species, and Mutations

| | | | | | Mutations | Mutations |
|---|---|---|---|---|---|---|
| | | | | | to alter | to make |
| | | | # of | | PAM | catalytically |
| Name | Enzyme | Species | AAs | PAM | recognition | dead |
| FnCas9 | Cas9 | Francisella | 1629 | 5′-NGG-3′ | Wt | D11A/H969A/ |
| | | novicida | | | | N995A |
| FnCas9 | Cas9 | Francisella | 1629 | 5′-YG-3′ | E1369R/E1449H/ | D11A/H969A/ |
| RHA | | novicida | | | R1556A | N995A |
| SaCas9 | Cas9 | Staphylococcus | 1053 | 5′- | Wt | D10A/H557A |
| | | aureus | | NNGRRT-3′ | | |
| SaCas9 | Cas9 | Staphylococcus | 1053 | 5′- | E782K/N968K/ | D10A/H557A |
| KKH | | aureus | | NNNRRT-3′ | R1015H | |
| SpCas9 | Cas9 | Streptococcuss | 1368 | 5′-NGG-3′ | Wt | D10A/D839A/ |
| | | pyogenes | | | | H840A/N863A |
| SpCas9 | Cas9 | Streptococcuss | 1368 | 5′-NGA-3′ | D1135V/R1335Q/ | D10A/D839A/ |
| VQR | | pyogenes | | | T1337R | H840A/N863A |
| AsCpf1 | Cpf1 | Acidaminococcus | 1307 | 5′-TYCV-3′ | S542R/K607R | E993A |
| RR | | sp. BV3L6 | | | | |
| AsCpf1 | Cpf1 | Acidaminococcus | 1307 | 5′-TATV-3′ | S542R/K548V/ | E993A |
| RVR | | sp. BV3L6 | | | N552R | |
| FnCpf1 | Cpf1 | Francisella | 1300 | 5′-NTTN-3′ | Wt | D917A/E1006A/ |
| | | novicida | | | | D1255A |
| NmCas9 | Cas9 | Neisseria | 1082 | 5′- | Wt | D16A/D587A/ |
| | | meningitidis | | NNNGATT-3′ | | H588A/N611A |

TABLE 8
Amino Acid Sequences of CRISPR/Cas Proteins, Species, and Mutations

| | Parental | | Nickase | Nickase | Nickase |
|---|---|---|---|---|---|
| Variant | Host(s) | Protein Sequence | (HNH) | (HNH) | (RuvC) |
| Nme2Cas9 | Neisseria | MAAFKPNPINYILGLDIGIASVGWAMVEIDEEENPIRLIDLGVRVFERAEVPK | N611A | H588A | D16A |
| | meningitidis | TGDSLAMARRLARSVRRLTRRRAHRLLRARRLLKREGVLQAADFDENGLIKS | | | |
| | | LPNTPWQLRAAALDRKLTPLEWSAVLLHLIKHRGYLSQRKNEGETADKELG | | | |
| | | ALLKGVANNAHALQTGDFRTPAELALNKFEKESGHIRNQRGDYSHTFSRKD | | | |
| | | LQAELILLFEKQKEFGNPHVSGGLKEGIETLLMTQRPALSGDAVQKMLGHCT | | | |
| | | FEPAEPKAAKNTYTAERFIWLTKLNNLRILEQGSERPLTDTERATLMDEPYRK | | | |
| | | SKLTYAQARKLLGLEDTAFFKGLRYGKDNAEASTLMEMKAYHAISRALEKEG | | | |
| | | LKDKKSPLNLSSELQDEIGTAFSLFKTDEDITGRLKDRVQPEILEALLKHISFDKF | | | |
| | | VQISLKALRRIVPLMEQGKRYDEACAEIYGDHYGKKNTEEKIYLPPIPADEIRN | | | |
| | | PVVLRALSQARKVINGVVRRYGSPARIHIETAREVGKSFKDRKEIEKRQEENR | | | |
| | | KDREKAAAKFREYFPNFVGEPKSKDILKLRLYEQQHGKCLYSGKEINLVRLNE | | | |
| | | KGYVEIDHALPFSRTWDDSFNNKVLVLGSENQNKGNQTPYEYFNGKDNSR | | | |
| | | EWQEFKARVETSRFPRSKKQRILLQKFDEDGFKECNLNDTRYVNRFLCQFVA | | | |
| | | DHILLTGKGKRRVFASNGQITNLLRGFWGLRKVRAENDRHHALDAVVVACS | | | |
| | | TVAMQQKITRFVRYKEMNAFDGKTIDKETGKVLHQKTHFPQPWEFFAQEV | | | |
| | | MIRVFGKPDGKPEFEEADTPEKLRTLLAEKLSSRPEAVHEYVTPLFVSRAPNR | | | |
| | | KMSGAHKDTLRSAKRFVKHNEKISVKRVWLTEIKLADLENMVNYKNGREIEL | | | |
| | | YEALKARLEAYGGNAKQAFDPKDNPFYKKGGQLVKAVRVEKTQESGVLLNK | | | |
| | | KNAYTIADNGDMVRVDVFCKVDKKGKNQYFIVPIYAWQVAENILPDIDCKG | | | |
| | | YRIDDSYTFCFSLHKYDLIAFQKDEKSKVEFAYYINCDSSNGRFYLAWHDKGS | | | |
| | | KEQQFRISTQNLVLIQKYQVNELGKEIRPCRLKKRPPVR (SEQ ID NO: | | | |
| | | 18222) | | | |
| PpnCas9 | Pasteurella | MQNNPLNYILGLDLGIASIGWAVVEIDEESSPIRLIDVGVRTFERAEVAKTGE | N605A | H582A | D13A |
| | pneumotropica | SLALSRRLARSSRRLIKRRAERLKKAKRLLKAEKILHSIDEKLPINVWQLRVKGL | | | |
| | | KEKLERQEWAAVLLHLSKHRGYLSQRKNEGKSDNKELGALLSGIASNHQML | | | |
| | | QSSEYRTPAEIAVKKFQVEEGHIRNQRGSYTHTFSRLDLLAEMELLFQRQAEL | | | |
| | | GNSYTSTTLLENLTALLMWQKPALAGDAILKMLGKCTFEPSEYKAAKNSYSA | | | |
| | | ERFVWLTKLNNLRILENGTERALNDNERFALLEQPYEKSKLTYAQVRAMLAL | | | |
| | | SDNAIFKGVRYLGEDKKTVESKTTLIEMKFYHQIRKTLGSAELKKEWNELKGN | | | |
| | | SDLLDEIGTAFSLYKTDDDICRYLEGKLPERVLNALLENLNFDKFIQLSLKALHQ | | | |
| | | ILPLMLQGQRYDEAVSAIYGDHYGKKSTETTRLLPTIPADEIRNPVVLRTLTQA | | | |
| | | RKVINAVVRLYGSPARIHIETAREVGKSYQDRKKLEKQQEDNRKQRESAVKK | | | |
| | | FKEMFPHFVGEPKGKDILKMRLYELQQAKCLYSGKSLELHRLLEKGYVEVDH | | | |
| | | ALPFSRTWDDSFNNKVLVLANENQNKGNLTPYEWLDGKNNSERWQHFVV | | | |
| | | RVQTSGFSYAKKQRILNHKLDEKGFIERNLNDTRYVARFLCNFIADNMLLVG | | | |
| | | KGKRNVFASNGQITALLRHRWGLQKVREQNDRHHALDAVVVACSTVAMQ | | | |
| | | QKITRFVRYNEGNVFSGERIDRETGEIIPLHFPSPWAFFKENVEIRIFSENPKLE | | | |
| | | LENRLPDYPQYNHEWVQPLFVSRMPTRKMTGQGHMETVKSAKRLNEGLS | | | |
| | | VLKVPLTQLKLSDLERMVNRDREIALYESLKARLEQFGNDPAKAFAEPFYKKG | | | |
| | | GALVKAVRLEQTQKSGVLVRDGNGVADNASMVRVDVFTKGGKYFLVPIYT | | | |
| | | WQVAKGILPNRAATQGKDENDWDIMDEMATFQFSLCQNDLIKLVTKKKTI | | | |
| | | FGYFNGLNRATSNINIKEHDLDKSKGKLGIYLEVGVKLAISLEKYQVDELGKNI | | | |
| | | RPCRPTKRQHVR (SEQ ID NO: 18223) | | | |
| SauCas9 | Staphylococcus | MKRNYILGLDIGITSVGYGIIDYETRDVIDAGVRLFKEANVENNEGRRSKRGA | N580A | H557A | D10A |
| | aureus | RRLKRRRRHRIQRVKKLLFDYNLLTDHSELSGINPYEARVKGLSQKLSEEEFSA | | | |
| | | ALLHLAKRRGVHNVNEVEEDTGNELSTKEQISRNSKALEEKYVAELQLERLKK | | | |
| | | DGEVRGSINRFKTSDYVKEAKQLLKVQKAYHQLDQSFIDTYIDLLETRRTYYE | | | |
| | | GPGEGSPFGWKDIKEWYEMLMGHCTYFPEELRSVKYAYNADLYNALNDLN | | | |
| | | NLVITRDENEKLEYYEKFQIIENVFKQKKKPTLKQIAKEILVNEEDIKGYRVTST | | | |
| | | GKPEFTNLKVYHDIKDITARKEIIENAELLDQIAKILTIYQSSEDIQEELTNLNSE | | | |
| | | LTQEEIEQISNLKGYTGTHNLSLKAINLILDELWHTNDNQIAIFNRLKLVPKKV | | | |
| | | DLSQQKEIPTTLVDDFILSPVVKRSFIQSIKVINAIIKKYGLPNDIIIELAREKNSK | | | |
| | | DAQKMINEMQKRNRQTNERIEEIIRTTGKENAKYLIEKIKLHDMQEGKCLYS | | | |
| | | LEAIPLEDLLNNPFNYEVDHIIPRSVSFDNSFNNKVLVKQEENSKKGNRTPFQ | | | |
| | | YLSSSDSKISYETFKKHILNLAKGKGRISKTKKEYLLEERDINRFSVQKDFINRNL | | | |
| | | VDTRYATRGLMNLLRSYFRVNNLDVKVKSINGGFTSFLRRKWKFKKERNKG | | | |
| | | YKHHAEDALIIANADFIFKEWKKLDKAKKVMENQMFEEKQAESMPEIETEQ | | | |
| | | EYKEIFITPHQIKHIKDFKDYKYSHRVDKKPNRELINDTLYSTRKDDKGNTLIVN | | | |
| | | NLNGLYDKDNDKLKKLINKSPEKLLMYHHDPQTYQKLKLIMEQYGDEKNPL | | | |
| | | YKYYEETGNYLTKYSKKDNGPVIKKIKYYGNKLNAHLDITDDYPNSRNKVVKL | | | |
| | | SLKPYRFDVYLDNGVYKFVTVKNLDVIKKENYYEVNSKCYEEAKKLKKISNQA | | | |
| | | EFIASFYNNDLIKINGELYRVIGVNNDLLNRIEVNMIDITYREYLENMNDKRPP | | | |
| | | RIIKTIASKTQSIKKYSTDILGNLYEVKSKKHPQIIKKG (SEQ ID NO: 18224) | | | |
| SauCas9- | Staphylococcus | MKRNYILGLDIGITSVGYGIIDYETRDVIDAGVRLFKEANVENNEGRRSKRGA | N580A | H557A | D10A |
| KKH | aureus | RRLKRRRRHRIQRVKKLLFDYNLLTDHSELSGINPYEARVKGLSQKLSEEEFSA | | | |
| | | ALLHLAKRRGVHNVNEVEEDTGNELSTKEQISRNSKALEEKYVAELQLERLKK | | | |
| | | DGEVRGSINRFKTSDYVKEAKQLLKVQKAYHQLDQSFIDTYIDLLETRRTYYE | | | |
| | | GPGEGSPFGWKDIKEWYEMLMGHCTYFPEELRSVKYAYNADLYNALNDLN | | | |
| | | NLVITRDENEKLEYYEKFQIIENVFKQKKKPTLKQIAKEILVNEEDIKGYRVTST | | | |
| | | GKPEFTNLKVYHDIKDITARKEIIENAELLDQIAKILTIYQSSEDIQEELTNLNSE | | | |
| | | LTQEEIEQISNLKGYTGTHNLSLKAINLILDELWHTNDNQIAIFNRLKLVPKKV | | | |
| | | DLSQQKEIPTTLVDDFILSPVVKRSFIQSIKVINAIIKKYGLPNDIIIELAREKNSK | | | |
| | | DAQKMINEMQKRNRQTNERIEEIIRTTGKENAKYLIEKIKLHDMQEGKCLYS | | | |
| | | LEAIPLEDLLNNPFNYEVDHIIPRSVSFDNSFNNKVLVKQEENSKKGNRTPFQ | | | |
| | | YLSSSDSKISYETFKKHILNLAKGKGRISKTKKEYLLEERDINRFSVQKDFINRNL | | | |
| | | VDTRYATRGLMNLLRSYFRVNNLDVKVKSINGGFTSFLRRKWKFKKERNKG | | | |
| | | YKHHAEDALIIANADFIFKEWKKLDKAKKVMENQMFEEKQAESMPEIETEQ | | | |
| | | EYKEIFITPHQIKHIKDFKDYKYSHRVDKKPNRKLINDTLYSTRKDDKGNTLIV | | | |
| | | NNLNGLYDKDNDKLKKLINKSPEKLLMYHHDPQTYQKLKLIMEQYGDEKNP | | | |
| | | LYKYYEETGNYLTKYSKKDNGPVIKKIKYYGNKLNAHLDITDDYPNSRNKVVK | | | |
| | | LSLKPYRFDVYLDNGVYKFVTVKNLDVIKKENYYEVNSKCYEEAKKLKKISNQ | | | |
| | | AEFIASFYKNDLIKINGELYRVIGVNNDLLNRIEVNMIDITYREYLENMNDKRP | | | |
| | | PHIIKTIASKTQSIKKYSTDILGNLYEVKSKKHPQIIKKG (SEQ ID NO: 18225) | | | |
| SauriCas9 | Staphylococcus | MQENQQKQNYILGLDIGITSVGYGLIDSKTREVIDAGVRLFPEADSENNSNR | N588A | H565A | D15A |
| | auricularis | RSKRGARRLKRRRIHRLNRVKDLLADYQMIDLNNVPKSTDPYTIRVKGLREPL | | | |
| | | TKEEFAIALLHIAKRRGLHNISVSMGDEEQDNELSTKQQLQKNAQQLQDKY | | | |
| | | VCELQLERLTNINKVRGEKNRFKTEDFVKEVKQLCETQRQYHNIDDQFIQQY | | | |
| | | IDLVSTRREYFEGPGNGSPYGWDGDLLKWYEKLMGRCTYFPEELRSVKYAYS | | | |
| | | ADLFNALNDLNNLVVTRDDNPKLEYYEKYHIIENVFKQKKNPTLKQIAKEIGV | | | |
| | | QDYDIRGYRITKSGKPQFTSFKLYHDLKNIFEQAKYLEDVEMLDEIAKILTIYQ | | | |
| | | DEISIKKALDQLPELLTESEKSQIAQLTGYTGTHRLSLKCIHIVIDELWESPENQ | | | |
| | | MEIFTRLNLKPKKVEMSEIDSIPTTLVDEFILSPVVKRAFIQSIKVINAVINRFGL | | | |
| | | PEDIIIELAREKNSKDRRKFINKLQKQNEATRKKIEQLLAKYGNTNAKYMIEKI | | | |
| | | KLHDMQEGKCLYSLEAIPLEDLLSNPTHYEVDHIIPRSVSFDNSLNNKVLVKQ | | | |
| | | SENSKKGNRTPYQYLSSNESKISYNQFKQHILNLSKAKDRISKKKRDMLLEER | | | |
| | | DINKFEVQKEFINRNLVDTRYATRELSNLLKTYFSTHDYAVKVKTINGGFTNH | | | |
| | | LRKVWDFKKHRNHGYKHHAEDALVIANADFLFKTHKALRRTDKILEQPGLE | | | |
| | | VNDTTVKVDTEEKYQELFETPKQVKNIKQFRDFKYSHRVDKKPNRQLINDTL | | | |
| | | YSTREIDGETYVVQTLKDLYAKDNEKVKKLFTERPQKILMYQHDPKTFEKLM | | | |
| | | TILNQYAEAKNPLAAYYEDKGEYVTKYAKKGNGPAIHKIKYIDKKLGSYLDVS | | | |
| | | NKYPETQNKLVKLSLKSFRFDIYKCEQGYKMVSIGYLDVLKKDNYYYIPKDKYE | | | |
| | | AEKQKKKIKESDLFVGSFYYNDLIMYEDELFRVIGVNSDINNLVELNMVDITY | | | |
| | | KDFCEVNNVTGEKRIKKTIGKRVVLIEKYTTDILGNLYKTPLPKKPQLIFKRGEL | | | |
| | | (SEQ ID NO: 18226) | | | |
| SauriCas9- | Staphylococcus | MQENQQKQNYILGLDIGITSVGYGLIDSKTREVIDAGVRLFPEADSENNSNR | N588A | H565A | D15A |
| KKH | auricularis | RSKRGARRLKRRRIHRLNRVKDLLADYQMIDLNNVPKSTDPYTIRVKGLREPL | | | |
| | | TKEEFAIALLHIAKRRGLHNISVSMGDEEQDNELSTKQQLQKNAQQLQDKY | | | |
| | | VCELQLERLTNINKVRGEKNRFKTEDFVKEVKQLCETQRQYHNIDDQFIQQY | | | |
| | | IDLVSTRREYFEGPGNGSPYGWDGDLLKWYEKLMGRCTYFPEELRSVKYAYS | | | |
| | | ADLFNALNDLNNLVVTRDDNPKLEYYEKYHIIENVFKQKKNPTLKQIAKEIGV | | | |
| | | QDYDIRGYRITKSGKPQFTSFKLYHDLKNIFEQAKYLEDVEMLDEIAKILTIYQ | | | |
| | | DEISIKKALDQLPELLTESEKSQIAQLTGYTGTHRLSLKCIHIVIDELWESPENQ | | | |
| | | MEIFTRLNLKPKKVEMSEIDSIPTTLVDEFILSPVVKRAFIQSIKVINAVINRFGL | | | |
| | | PEDIIIELAREKNSKDRRKFINKLQKQNEATRKKIEQLLAKYGNTNAKYMIEKI | | | |
| | | KLHDMQEGKCLYSLEAIPLEDLLSNPTHYEVDHIIPRSVSFDNSLNNKVLVKQ | | | |
| | | SENSKKGNRTPYQYLSSNESKISYNQFKQHILNLSKAKDRISKKKRDMLLEER | | | |
| | | DINKFEVQKEFINRNLVDTRYATRELSNLLKTYFSTHDYAVKVKTINGGFTNH | | | |
| | | LRKVWDFKKHRNHGYKHHAEDALVIANADFLFKTHKALRRTDKILEQPGLE | | | |
| | | VNDTTVKVDTEEKYQELFETPKQVKNIKQFRDFKYSHRVDKKPNRKLINDTL | | | |
| | | YSTREIDGETYVVQTLKDLYAKDNEKVKKLFTERPQKILMYQHDPKTFEKLM | | | |
| | | TILNQYAEAKNPLAAYYEDKGEYVTKYAKKGNGPAIHKIKYIDKKLGSYLDVS | | | |
| | | NKYPETQNKLVKLSLKSFRFDIYKCEQGYKMVSIGYLDVLKKDNYYYIPKDKYE | | | |
| | | AEKQKKKIKESDLFVGSFYKNDLIMYEDELFRVIGVNSDINNLVELNMVDITY | | | |
| | | KDFCEVNNVTGEKHIKKTIGKRVVLIEKYTTDILGNLYKTPLPKKPQLIFKRGEL | | | |
| | | (SEQ ID NO: 18227) | | | |
| ScaCas9- | Streptococcus | MEKKYSIGLDIGTNSVGWAVITDDYKVPSKKFKVLGNTNRKSIKKNLMGALL | N872A | H849A | D10A |
| Sc++ | canis | FDSGETAEATRLKRTARRRYTRRKNRIRYLQEIFANEMAKLDDSFFQRLEESF | | | |
| | | LVEEDKKNERHPIFGNLADEVAYHRNYPTIYHLRKKLADSPEKADLRLIYLALA | | | |
| | | HIIKFRGHFLIEGKLNAENSDVAKLFYQLIQTYNQLFEESPLDEIEVDAKGILSA | | | |
| | | RLSKSKRLEKLIAVFPNEKKNGLFGNIIALALGLTPNFKSNFDLTEDAKLQLSKD | | | |
| | | TYDDDLDELLGQIGDQYADLFSAAKNLSDAILLSDILRSNSEVTKAPLSASMV | | | |
| | | KRYDEHHQDLALLKTLVRQQFPEKYAEIFKDDTKNGYAGYVGADKKLRKRS | | | |
| | | GKLATEEEFYKFIKPILEKMDGAEELLAKLNRDDLLRKQRTFDNGSIPHQIHLK | | | |
| | | ELHAILRRQEEFYPFLKENREKIEKILTFRIPYYVGPLARGNSRFAWLTRKSEEA | | | |
| | | ITPWNFEEVVDKGASAQSFIERMTNFDEQLPNKKVLPKHSLLYEYFTVYNEL | | | |
| | | TKVKYVTERMRKPEFLSGEQKKAIVDLLFKTNRKVTVKQLKEDYFKKIECFDS | | | |
| | | VEIIGVEDRFNASLGTYHDLLKIIKDKDFLDNEENEDILEDIVLTLTLFEDREMIE | | | |
| | | ERLKTYAHLFDDKVMKQLKRRHYTGWGRLSRKMINGIRDKQSGKTILDFLKS | | | |
| | | DGFSNRNFMQLIHDDSLTFKEEIEKAQVSGQGDSLHEQIADLAGSPAIKKGIL | | | |
| | | QTVKIVDELVKVMGHKPENIVIEMARENQTTTKGLQQSRERKKRIEEGIKELE | | | |
| | | SQILKENPVENTQLQNEKLYLYYLQNGRDMYVDQELDINRLSDYDVDHIVP | | | |
| | | QSFIKDDSIDNKVLTRSVENRGKSDNVPSEEVVKKMKNYWRQLLNAKLITQ | | | |
| | | RKFDNLTKAERGGLSEADKAGFIKRQLVETRQITKHVARILDSRMNTKRDKN | | | |
| | | DKPIREVKVITLKSKLVSDFRKDFQLYKVRDINNYHHAHDAYLNAVVGTALIK | | | |
| | | KYPKLESEFVYGDYKVYDVRKMIAKSEQEIGKATAKRFFYSNIMNFFKTEVKL | | | |
| | | ANGEIRKRPLIETNGETGEVVWNKEKDFATVRKVLAMPQVNIVKKTEVQTG | | | |
| | | GFSKESILSKRESAKLIPRKKGWDTRKYGGFGSPTVAYSILVVAKVEKGKAKKL | | | |
| | | KSVKVLVGITIMEKGSYEKDPIGFLEAKGYKDIKKELIFKLPKYSLFELENGRRR | | | |
| | | MLASAKELQKANELVLPQHLVRLLYYTQNISATTGSNNLGYIEQHREEFKEIF | | | |
| | | EKIIDFSEKYILKNKVNSNLKSSFDEQFAVSDSILLSNSFVSLLKYTSFGASGGFT | | | |
| | | FLDLDVKQGRLRYQTVTEVLDATLIYQSITGLYETRTDLSQLGGD (SEQ ID | | | |
| | | NO: 18228) | | | |
| SpyCas9 | Streptococcus | MDKKYSIGLDIGTNSVGWAVITDEYKVPSKKFKVLGNTDRHSIKKNLIGALLF | N863A | H840A | D10A |
| | pyogenes | DSGETAEATRLKRTARRRYTRRKNRICYLQEIFSNEMAKVDDSFFHRLEESFL | | | |
| | | VEEDKKHERHPIFGNIVDEVAYHEKYPTIYHLRKKLVDSTDKADLRLIYLALAH | | | |
| | | MIKFRGHFLIEGDLNPDNSDVDKLFIQLVQTYNQLFEENPINASGVDAKAILS | | | |
| | | ARLSKSRRLENLIAQLPGEKKNGLFGNLIALSLGLTPNFKSNFDLAEDAKLQLS | | | |
| | | KDTYDDDLDNLLAQIGDQYADLFLAAKNLSDAILLSDILRVNTEITKAPLSAS | | | |
| | | MIKRYDEHHQDLTLLKALVRQQLPEKYKEIFFDQSKNGYAGYIDGGASQEEF | | | |
| | | YKFIKPILEKMDGTEELLVKLNREDLLRKQRTFDNGSIPHQIHLGELHAILRRQ | | | |
| | | EDFYPFLKDNREKIEKILTFRIPYYVGPLARGNSRFAWMTRKSEETITPWNFE | | | |
| | | EVVDKGASAQSFIERMTNFDKNLPNEKVLPKHSLLYEYFTVYNELTKVKYVTE | | | |
| | | GMRKPAFLSGEQKKAIVDLLFKTNRKVTVKQLKEDYFKKIECFDSVEISGVED | | | |
| | | RFNASLGTYHDLLKIIKDKDFLDNEENEDILEDIVLTLTLFEDREMIEERLKTYA | | | |
| | | HLFDDKVMKQLKRRRYTGWGRLSRKLINGIRDKQSGKTILDFLKSDGFANR | | | |
| | | NFMQLIHDDSLTFKEDIQKAQVSGQGDSLHEHIANLAGSPAIKKGILQTVKV | | | |
| | | VDELVKVMGRHKPENIVIEMARENQTTQKGQKNSRERMKRIEEGIKELGSQ | | | |
| | | ILKEHPVENTQLQNEKLYLYYLQNGRDMYVDQELDINRLSDYDVDHIVPQSF | | | |
| | | LKDDSIDNKVLTRSDKNRGKSDNVPSEEVVKKMKNYWRQLLNAKLITQRKF | | | |
| | | DNLTKAERGGLSELDKAGFIKRQLVETRQITKHVAQILDSRMNTKYDENDKLI | | | |
| | | REVKVITLKSKLVSDFRKDFQFYKVREINNYHHAHDAYLNAVVGTALIKKYPK | | | |
| | | LESEFVYGDYKVYDVRKMIAKSEQEIGKATAKYFFYSNIMNFFKTEITLANGEI | | | |
| | | RKRPLIETNGETGEIVWDKGRDFATVRKVLSMPQVNIVKKTEVQTGGFSKES | | | |
| | | ILPKRNSDKLIARKKDWDPKKYGGFDSPTVAYSVLVVAKVEKGKSKKLKSVKE | | | |
| | | LLGITIMERSSFEKNPIDFLEAKGYKEVKKDLIIKLPKYSLFELENGRKRMLASA | | | |
| | | GELQKGNELALPSKYVNFLYLASHYEKLKGSPEDNEQKQLFVEQHKHYLDEII | | | |
| | | EQISEFSKRVILADANLDKVLSAYNKHRDKPIREQAENIIHLFTLTNLGAPAAF | | | |
| | | KYFDTTIDRKRYTSTKEVLDATLIHQSITGLYETRIDLSQLGGD (SEQ ID NO: | | | |
| | | 18229) | | | |
| SpyCas9- | Streptococcus | MDKKYSIGLDIGTNSVGWAVITDEYKVPSKKFKVLGNTDRHSIKKNLIGALLF | N863A | H840A | D10A |
| NG | pyogenes | DSGETAEATRLKRTARRRYTRRKNRICYLQEIFSNEMAKVDDSFFHRLEESFL | | | |
| | | VEEDKKHERHPIFGNIVDEVAYHEKYPTIYHLRKKLVDSTDKADLRLIYLALAH | | | |
| | | MIKFRGHFLIEGDLNPDNSDVDKLFIQLVQTYNQLFEENPINASGVDAKAILS | | | |
| | | ARLSKSRRLENLIAQLPGEKKNGLFGNLIALSLGLTPNFKSNFDLAEDAKLQLS | | | |
| | | KDTYDDDLDNLLAQIGDQYADLFLAAKNLSDAILLSDILRVNTEITKAPLSAS | | | |
| | | MIKRYDEHHQDLTLLKALVRQQLPEKYKEIFFDQSKNGYAGYIDGGASQEEF | | | |
| | | YKFIKPILEKMDGTEELLVKLNREDLLRKQRTFDNGSIPHQIHLGELHAILRRQ | | | |
| | | EDFYPFLKDNREKIEKILTFRIPYYVGPLARGNSRFAWMTRKSEETITPWNFE | | | |
| | | EVVDKGASAQSFIERMTNFDKNLPNEKVLPKHSLLYEYFTVYNELTKVKYVTE | | | |
| | | GMRKPAFLSGEQKKAIVDLLFKTNRKVTVKQLKEDYFKKIECFDSVEISGVED | | | |
| | | RFNASLGTYHDLLKIIKDKDFLDNEENEDILEDIVLTLTLFEDREMIEERLKTYA | | | |
| | | HLFDDKVMKQLKRRRYTGWGRLSRKLINGIRDKQSGKTILDFLKSDGFANR | | | |
| | | NFMQLIHDDSLTFKEDIQKAQVSGQGDSLHEHIANLAGSPAIKKGILQTVKV | | | |
| | | VDELVKVMGRHKPENIVIEMARENQTTQKGQKNSRERMKRIEEGIKELGSQ | | | |
| | | ILKEHPVENTQLQNEKLYLYYLQNGRDMYVDQELDINRLSDYDVDHIVPQSF | | | |
| | | LKDDSIDNKVLTRSDKNRGKSDNVPSEEVVKKMKNYWRQLLNAKLITQRKF | | | |
| | | DNLTKAERGGLSELDKAGFIKRQLVETRQITKHVAQILDSRMNTKYDENDKLI | | | |
| | | REVKVITLKSKLVSDFRKDFQFYKVREINNYHHAHDAYLNAVVGTALIKKYPK | | | |
| | | LESEFVYGDYKVYDVRKMIAKSEQEIGKATAKYFFYSNIMNFFKTEITLANGEI | | | |
| | | RKRPLIETNGETGEIVWDKGRDFATVRKVLSMPQVNIVKKTEVQTGGFSKES | | | |
| | | IRPKRNSDKLIARKKDWDPKKYGGFVSPTVAYSVLVVAKVEKGKSKKLKSVKE | | | |
| | | LLGITIMERSSFEKNPIDFLEAKGYKEVKKDLIIKLPKYSLFELENGRKRMLASA | | | |
| | | RFLQKGNELALPSKYVNFLYLASHYEKLKGSPEDNEQKQLFVEQHKHYLDEII | | | |
| | | EQISEFSKRVILADANLDKVLSAYNKHRDKPIREQAENIIHLFTLTNLGAPRAF | | | |
| | | KYFDTTIDRKVYRSTKEVLDATLIHQSITGLYETRIDLSQLGGD (SEQ ID NO: | | | |
| | | 18230) | | | |
| SpyCas9- | Streptococcus | MDKKYSIGLDIGTNSVGWAVITDEYKVPSKKFKVLGNTDRHSIKKNLIGALLF | N863A | H840A | D10A |
| SpRY | pyogenes | DSGETAERTRLKRTARRRYTRRKNRICYLQEIFSNEMAKVDDSFFHRLEESFL | | | |
| | | VEEDKKHERHPIFGNIVDEVAYHEKYPTIYHLRKKLVDSTDKADLRLIYLALAH | | | |
| | | MIKFRGHFLIEGDLNPDNSDVDKLFIQLVQTYNQLFEENPINASGVDAKAILS | | | |
| | | ARLSKSRRLENLIAQLPGEKKNGLFGNLIALSLGLTPNFKSNFDLAEDAKLQLS | | | |
| | | KDTYDDDLDNLLAQIGDQYADLFLAAKNLSDAILLSDILRVNTEITKAPLSAS | | | |
| | | MIKRYDEHHQDLTLLKALVRQQLPEKYKEIFFDQSKNGYAGYIDGGASQEEF | | | |
| | | YKFIKPILEKMDGTEELLVKLNREDLLRKQRTFDNGSIPHQIHLGELHAILRRQ | | | |
| | | EDFYPFLKDNREKIEKILTFRIPYYVGPLARGNSRFAWMTRKSEETITPWNFE | | | |
| | | EVVDKGASAQSFIERMTNFDKNLPNEKVLPKHSLLYEYFTVYNELTKVKYVTE | | | |
| | | GMRKPAFLSGEQKKAIVDLLFKTNRKVTVKQLKEDYFKKIECFDSVEISGVED | | | |
| | | RFNASLGTYHDLLKIIKDKDFLDNEENEDILEDIVLTLTLFEDREMIEERLKTYA | | | |
| | | HLFDDKVMKQLKRRRYTGWGRLSRKLINGIRDKQSGKTILDFLKSDGFANR | | | |
| | | NFMQLIHDDSLTFKEDIQKAQVSGQGDSLHEHIANLAGSPAIKKGILQTVKV | | | |
| | | VDELVKVMGRHKPENIVIEMARENQTTQKGQKNSRERMKRIEEGIKELGSQ | | | |
| | | ILKEHPVENTQLQNEKLYLYYLQNGRDMYVDQELDINRLSDYDVDHIVPQSF | | | |
| | | LKDDSIDNKVLTRSDKNRGKSDNVPSEEVVKKMKNYWRQLLNAKLITQRKF | | | |
| | | DNLTKAERGGLSELDKAGFIKRQLVETRQITKHVAQILDSRMNTKYDENDKLI | | | |
| | | REVKVITLKSKLVSDFRKDFQFYKVREINNYHHAHDAYLNAVVGTALIKKYPK | | | |
| | | LESEFVYGDYKVYDVRKMIAKSEQEIGKATAKYFFYSNIMNFFKTEITLANGEI | | | |
| | | RKRPLIETNGETGEIVWDKGRDFATVRKVLSMPQVNIVKKTEVQTGGFSKES | | | |
| | | IRPKRNSDKLIARKKDWDPKKYGGFLWPTVAYSVLVVAKVEKGKSKKLKSVK | | | |
| | | ELLGITIMERSSFEKNPIDFLEAKGYKEVKKDLIIKLPKYSLFELENGRKRMLAS | | | |
| | | AKQLQKGNELALPSKYVNFLYLASHYEKLKGSPEDNEQKQLFVEQHKHYLDE | | | |
| | | IIEQISEFSKRVILADANLDKVLSAYNKHRDKPIREQAENIIHLFTLTRLGAPRAF | | | |
| | | KYFDTTIDPKQYRSTKEVLDATLIHQSITGLYETRIDLSQLGGD (SEQ ID NO: | | | |
| | | 18231) | | | |
| St1Cas9 | Streptococcus | MSDLVLGLDIGIGSVGVGILNKVTGEIIHKNSRIFPAAQAENNLVRRTNRQG | N622A | H599A | D9A |
| | thermophilus | RRLARRKKHRRVRLNRLFEESGLITDFTKISINLNPYQLRVKGLTDELSNEELFI | | | |
| | | ALKNMVKHRGISYLDDASDDGNSSVGDYAQIVKENSKQLETKTPGQIQLER | | | |
| | | YQTYGQLRGDFTVEKDGKKHRLINVFPTSAYRSEALRILQTQQEFNPQITDEF | | | |
| | | INRYLEILTGKRKYYHGPGNEKSRTDYGRYRTSGETLDNIFGILIGKCTFYPDEF | | | |
| | | RAAKASYTAQEFNLLNDLNNLTVPTETKKLSKEQKNQIINYVKNEKAMGPAK | | | |
| | | LFKYIAKLLSCDVADIKGYRIDKSGKAEIHTFEAYRKMKTLETLDIEQMDRETL | | | |
| | | DKLAYVLTLNTEREGIQEALEHEFADGSFSQKQVDELVQFRKANSSIFGKGW | | | |
| | | HNFSVKLMMELIPELYETSEEQMTILTRLGKQKTTSSSNKTKYIDEKLLTEEIY | | | |
| | | NPVVAKSVRQAIKIVNAAIKEYGDFDNIVIEMARETNEDDEKKAIQKIQKAN | | | |
| | | KDEKDAAMLKAANQYNGKAELPHSVFHGHKQLATKIRLWHQQGERCLYT | | | |
| | | GKTISIHDLINNSNQFEVDHILPLSITFDDSLANKVLVYATANQEKGQRTPYQ | | | |
| | | ALDSMDDAWSFRELKAFVRESKTLSNKKKEYLLTEEDISKFDVRKKFIERNLV | | | |
| | | DTRYASRVVLNALQEHFRAHKIDTKVSVVRGQFTSQLRRHWGIEKTRDTYH | | | |
| | | HHAVDALIIAASSQLNLWKKQKNTLVSYSEDQLLDIETGELISDDEYKESVFK | | | |
| | | APYQHFVDTLKSKEFEDSILFSYQVDSKFNRKISDATIYATRQAKVGKDKADE | | | |
| | | TYVLGKIKDIYTQDGYDAFMKIYKKDKSKFLMYRHDPQTFEKVIEPILENYPN | | | |
| | | KQINEKGKEVPCNPFLKYKEEHGYIRKYSKKGNGPEIKSLKYYDSKLGNHIDIT | | | |
| | | PKDSNNKVVLQSVSPWRADVYFNKTTGKYEILGLKYADLQFEKGTGTYKISQ | | | |
| | | EKYNDIKKKEGVDSDSEFKFTLYKNDLLLVKDTETKEQQLFRFLSRTMPKQKH | | | |
| | | YVELKPYDKQKFEGGEALIKVLGNVANSGQCKKGLGKSNISIYKVRTDVLGN | | | |
| | | QHIIKNEGDKPKLDF (SEQ ID NO: 18232) | | | |
| BlatCas9 | Brevibacillus | MAYTMGIDVGIASCGWAIVDLERQRIIDIGVRTFEKAENPKNGEALAVPRRE | N607A | H584A | D8A |
| | laterosporus | ARSSRRRLRRKKHRIERLKHMFVRNGLAVDIQHLEQTLRSQNEIDVWQLRV | | | |
| | | DGLDRMLTQKEWLRVLIHLAQRRGFQSNRKTDGSSEDGQVLVNVTENDRL | | | |
| | | MEEKDYRTVAEMMVKDEKFSDHKRNKNGNYHGVVSRSSLLVEIHTLFETQ | | | |
| | | RQHHNSLASKDFELEYVNIWSAQRPVATKDQIEKMIGTCTFLPKEKRAPKAS | | | |
| | | WHFQYFMLLQTINHIRITNVQGTRSLNKEEIEQVVNMALTKSKVSYHDTRKI | | | |
| | | LDLSEEYQFVGLDYGKEDEKKKVESKETIIKLDDYHKLNKIFNEVELAKGETWE | | | |
| | | ADDYDTVAYALTFFKDDEDIRDYLQNKYKDSKNRLVKNLANKEYTNELIGKV | | | |
| | | STLSFRKVGHLSLKALRKIIPFLEQGMTYDKACQAAGFDFQGISKKKRSVVLP | | | |
| | | VIDQISNPVVNRALTQTRKVINALIKKYGSPETIHIETARELSKTFDERKNITKD | | | |
| | | YKENRDKNEHAKKHLSELGIINPTGLDIVKYKLWCEQQGRCMYSNQPISFER | | | |
| | | LKESGYTEVDHIIPYSRSMNDSYNNRVLVMTRENREKGNQTPFEYMGNDT | | | |
| | | QRWYEFEQRVTTNPQIKKEKRQNLLLKGFTNRRELEMLERNLNDTRYITKYL | | | |
| | | SHFISTNLEFSPSDKKKKVVNTSGRITSHLRSRWGLEKNRGQNDLHHAMDAI | | | |
| | | VIAVTSDSFIQQVTNYYKRKERRELNGDDKFPLPWKFFREEVIARLSPNPKEQ | | | |
| | | IEALPNHFYSEDELADLQPIFVSRMPKRSITGEAHQAQFRRVVGKTKEGKNIT | | | |
| | | AKKTALVDISYDKNGDFNMYGRETDPATYEAIKERYLEFGGNVKKAFSTDLH | | | |
| | | KPKKDGTKGPLIKSVRIMENKTLVHPVNKGKGVVYNSSIVRTDVFQRKEKYY | | | |
| | | LLPVYVTDVTKGKLPNKVIVAKKGYHDWIEVDDSFTFLFSLYPNDLIFIRQNPK | | | |
| | | KKISLKKRIESHSISDSKEVQEIHAYYKGVDSSTAAIEFIIHDGSYYAKGVGVQN | | | |
| | | LDCFEKYQVDILGNYFKVKGEKRLELETSDSNHKGKDVNSIKSTSR (SEQ ID | | | |
| | | NO: 18233) | | | |
| cCas9-v16 | Staphylococcus | MKRNYILGLDIGITSVGYGIIDYETRDVIDAGVRLFKEANVENNEGRRSKRGA | N580A | H557A | D10A |
| | aureus | RRLKRRRRHRIQRVKKLLFDYNLLTDHSELSGINPYEARVKGLSQKLSEEEFSA | | | |
| | | ALLHLAKRRGVHNVNEVEEDTGNELSTKEQISRNSKALEEKYVAELQLERLKK | | | |
| | | DGEVRGSINRFKTSDYVKEAKQLLKVQKAYHQLDQSFIDTYIDLLETRRTYYE | | | |
| | | GPGEGSPFGWKDIKEWYEMLMGHCTYFPEELRSVKYAYNADLYNALNDLN | | | |
| | | NLVITRDENEKLEYYEKFQIIENVFKQKKKPTLKQIAKEILVNEEDIKGYRVTST | | | |
| | | GKPEFTNLKVYHDIKDITARKEIIENAELLDQIAKILTIYQSSEDIQEELTNLNSE | | | |
| | | LTQEEIEQISNLKGYTGTHNLSLKAINLILDELWHTNDNQIAIFNRLKLVPKKV | | | |
| | | DLSQQKEIPTTLVDDFILSPVVKRSFIQSIKVINAIIKKYGLPNDIIIELAREKNSK | | | |
| | | DAQKMINEMQKRNRQTNERIEEIIRTTGKENAKYLIEKIKLHDMQEGKCLYS | | | |
| | | LEAIPLEDLLNNPFNYEVDHIIPRSVSFDNSFNNKVLVKQEENSKKGNRTPFQ | | | |
| | | YLSSSDSKISYETFKKHILNLAKGKGRISKTKKEYLLEERDINRFSVQKDFINRNL | | | |
| | | VDTRYATRGLMNLLRSYFRVNNLDVKVKSINGGFTSFLRRKWKFKKERNKG | | | |
| | | YKHHAEDALIIANADFIFKEWKKLDKAKKVMENQMFEEKQAESMPEIETEQ | | | |
| | | EYKEIFITPHQIKHIKDFKDYKYSHRVDKKPNRKLINDTLYSTRKDDKGNTLIV | | | |
| | | NNLNGLYDKDNDKLKKLINKSPEKLLMYHHDPQTYQKLKLIMEQYGDEKNP | | | |
| | | LYKYYEETGNYLTKYSKKDNGPVIKKIKYYGNKLNAHLDITDDYPNSRNKVVK | | | |
| | | LSLKPYRFDVYLDNGVYKFVTVKNLDVIKKENYYEVNSKCYEEAKKLKKISNQ | | | |
| | | AEFIASFYKNDLIKINGELYRVIGVNSDKNNLIEVNMIDITYREYLENMNDKRP | | | |
| | | PHIIKTIASKTQSIKKYSTDILGNLYEVKSKKHPQIIKKG (SEQ ID NO: 18234) | | | |
| cCas9-v17 | Staphylococcus | MKRNYILGLDIGITSVGYGIIDYETRDVIDAGVRLFKEANVENNEGRRSKRGA | N580A | H557A | D10A |
| | aureus | RRLKRRRRHRIQRVKKLLFDYNLLTDHSELSGINPYEARVKGLSQKLSEEEFSA | | | |
| | | ALLHLAKRRGVHNVNEVEEDTGNELSTKEQISRNSKALEEKYVAELQLERLKK | | | |
| | | DGEVRGSINRFKTSDYVKEAKQLLKVQKAYHQLDQSFIDTYIDLLETRRTYYE | | | |
| | | GPGEGSPFGWKDIKEWYEMLMGHCTYFPEELRSVKYAYNADLYNALNDLN | | | |
| | | NLVITRDENEKLEYYEKFQIIENVFKQKKKPTLKQIAKEILVNEEDIKGYRVTST | | | |
| | | GKPEFTNLKVYHDIKDITARKEIIENAELLDQIAKILTIYQSSEDIQEELTNLNSE | | | |
| | | LTQEEIEQISNLKGYTGTHNLSLKAINLILDELWHTNDNQIAIFNRLKLVPKKV | | | |
| | | DLSQQKEIPTTLVDDFILSPVVKRSFIQSIKVINAIIKKYGLPNDIIIELAREKNSK | | | |
| | | DAQKMINEMQKRNRQTNERIEEIIRTTGKENAKYLIEKIKLHDMQEGKCLYS | | | |
| | | LEAIPLEDLLNNPFNYEVDHIIPRSVSFDNSFNNKVLVKQEENSKKGNRTPFQ | | | |
| | | YLSSSDSKISYETFKKHILNLAKGKGRISKTKKEYLLEERDINRFSVQKDFINRNL | | | |
| | | VDTRYATRGLMNLLRSYFRVNNLDVKVKSINGGFTSFLRRKWKFKKERNKG | | | |
| | | YKHHAEDALIIANADFIFKEWKKLDKAKKVMENQMFEEKQAESMPEIETEQ | | | |
| | | EYKEIFITPHQIKHIKDFKDYKYSHRVDKKPNRKLINDTLYSTRKDDKGNTLIV | | | |
| | | NNLNGLYDKDNDKLKKLINKSPEKLLMYHHDPQTYQKLKLIMEQYGDEKNP | | | |
| | | LYKYYEETGNYLTKYSKKDNGPVIKKIKYYGNKLNAHLDITDDYPNSRNKVVK | | | |
| | | LSLKPYRFDVYLDNGVYKFVTVKNLDVIKKENYYEVNSKCYEEAKKLKKISNQ | | | |
| | | AEFIASFYKNDLIKINGELYRVIGVNNSTRNIVELNMIDITYREYLENMNDKRP | | | |
| | | PHIIKTIASKTQSIKKYSTDILGNLYEVKSKKHPQIIKKG (SEQ ID NO: 18235) | | | |
| cCas9-v21 | Staphylococcus | MKRNYILGLDIGITSVGYGIIDYETRDVIDAGVRLFKEANVENNEGRRSKRGA | N580A | H557A | D10A |
| | aureus | RRLKRRRRHRIQRVKKLLFDYNLLTDHSELSGINPYEARVKGLSQKLSEEEFSA | | | |
| | | ALLHLAKRRGVHNVNEVEEDTGNELSTKEQISRNSKALEEKYVAELQLERLKK | | | |
| | | DGEVRGSINRFKTSDYVKEAKQLLKVQKAYHQLDQSFIDTYIDLLETRRTYYE | | | |
| | | GPGEGSPFGWKDIKEWYEMLMGHCTYFPEELRSVKYAYNADLYNALNDLN | | | |
| | | NLVITRDENEKLEYYEKFQIIENVFKQKKKPTLKQIAKEILVNEEDIKGYRVTST | | | |
| | | GKPEFTNLKVYHDIKDITARKEIIENAELLDQIAKILTIYQSSEDIQEELTNLNSE | | | |
| | | LTQEEIEQISNLKGYTGTHNLSLKAINLILDELWHTNDNQIAIFNRLKLVPKKV | | | |
| | | DLSQQKEIPTTLVDDFILSPVVKRSFIQSIKVINAIIKKYGLPNDIIIELAREKNSK | | | |
| | | DAQKMINEMQKRNRQTNERIEEIIRTTGKENAKYLIEKIKLHDMQEGKCLYS | | | |
| | | LEAIPLEDLLNNPFNYEVDHIIPRSVSFDNSFNNKVLVKQEENSKKGNRTPFQ | | | |
| | | YLSSSDSKISYETFKKHILNLAKGKGRISKTKKEYLLEERDINRFSVQKDFINRNL | | | |
| | | VDTRYATRGLMNLLRSYFRVNNLDVKVKSINGGFTSFLRRKWKFKKERNKG | | | |
| | | YKHHAEDALIIANADFIFKEWKKLDKAKKVMENQMFEEKQAESMPEIETEQ | | | |
| | | EYKEIFITPHQIKHIKDFKDYKYSHRVDKKPNRKLINDTLYSTRKDDKGNTLIV | | | |
| | | NNLNGLYDKDNDKLKKLINKSPEKLLMYHHDPQTYQKLKLIMEQYGDEKNP | | | |
| | | LYKYYEETGNYLTKYSKKDNGPVIKKIKYYGNKLNAHLDITDDYPNSRNKVVK | | | |
| | | LSLKPYRFDVYLDNGVYKFVTVKNLDVIKKENYYEVNSKCYEEAKKLKKISNQ | | | |
| | | AEFIASFYKNDLIKINGELYRVIGVNSDDRNIIELNMIDITYREYLENMNDKRP | | | |
| | | PHIIKTIASKTQSIKKYSTDILGNLYEVKSKKHPQIIKKG (SEQ ID NO: 18236) | | | |
| cCas9-v42 | Staphylococcus | MKRNYILGLDIGITSVGYGIIDYETRDVIDAGVRLFKEANVENNEGRRSKRGA | N580A | H557A | D10A |
| | aureus | RRLKRRRRHRIQRVKKLLFDYNLLTDHSELSGINPYEARVKGLSQKLSEEEFSA | | | |
| | | ALLHLAKRRGVHNVNEVEEDTGNELSTKEQISRNSKALEEKYVAELQLERLKK | | | |
| | | DGEVRGSINRFKTSDYVKEAKQLLKVQKAYHQLDQSFIDTYIDLLETRRTYYE | | | |
| | | GPGEGSPFGWKDIKEWYEMLMGHCTYFPEELRSVKYAYNADLYNALNDLN | | | |
| | | NLVITRDENEKLEYYEKFQIIENVFKQKKKPTLKQIAKEILVNEEDIKGYRVTST | | | |
| | | GKPEFTNLKVYHDIKDITARKEIIENAELLDQIAKILTIYQSSEDIQEELTNLNSE | | | |
| | | LTQEEIEQISNLKGYTGTHNLSLKAINLILDELWHTNDNQIAIFNRLKLVPKKV | | | |
| | | DLSQQKEIPTTLVDDFILSPVVKRSFIQSIKVINAIIKKYGLPNDIIIELAREKNSK | | | |
| | | DAQKMINEMQKRNRQTNERIEEIIRTTGKENAKYLIEKIKLHDMQEGKCLYS | | | |
| | | LEAIPLEDLLNNPFNYEVDHIIPRSVSFDNSFNNKVLVKQEENSKKGNRTPFQ | | | |
| | | YLSSSDSKISYETFKKHILNLAKGKGRISKTKKEYLLEERDINRFSVQKDFINRNL | | | |
| | | VDTRYATRGLMNLLRSYFRVNNLDVKVKSINGGFTSFLRRKWKFKKERNKG | | | |
| | | YKHHAEDALIIANADFIFKEWKKLDKAKKVMENQMFEEKQAESMPEIETEQ | | | |
| | | EYKEIFITPHQIKHIKDFKDYKYSHRVDKKPNRKLINDTLYSTRKDDKGNTLIV | | | |
| | | NNLNGLYDKDNDKLKKLINKSPEKLLMYHHDPQTYQKLKLIMEQYGDEKNP | | | |
| | | LYKYYEETGNYLTKYSKKDNGPVIKKIKYYGNKLNAHLDITDDYPNSRNKVVK | | | |
| | | LSLKPYRFDVYLDNGVYKFVTVKNLDVIKKENYYEVNSKCYEEAKKLKKISNQ | | | |
| | | AEFIASFYKNDLIKINGELYRVIGVNNNRLNKIELNMIDITYREYLENMNDKRP | | | |
| | | PHIIKTIASKTQSIKKYSTDILGNLYEVKSKKHPQIIKKG (SEQ ID NO: 18237) | | | |
| CdiCas9 | Corynebacterium | MKYHVGIDVGTFSVGLAAIEVDDAGMPIKTLSLVSHIHDSGLDPDEIKSAVT | N597A | H573A | D8A |
| | diphtheriae | RLASSGIARRTRRLYRRKRRRLQQLDKFIQRQGWPVIELEDYSDPLYPWKVR | | | |
| | | AELAASYIADEKERGEKLSVALRHIARHRGWRNPYAKVSSLYLPDGPSDAFK | | | |
| | | AIREEIKRASGQPVPETATVGQMVTLCELGTLKLRGEGGVLSARLQQSDYAR | | | |
| | | EIQEICRMQEIGQELYRKIIDVVFAAESPKGSASSRVGKDPLQPGKNRALKAS | | | |
| | | DAFQRYRIAALIGNLRVRVDGEKRILSVEEKNLVFDHLVNLTPKKEPEWVTIA | | | |
| | | EILGIDRGQLIGTATMTDDGERAGARPPTHDTNRSIVNSRIAPLVDWWKTA | | | |
| | | SALEQHAMVKALSNAEVDDFDSPEGAKVQAFFADLDDDVHAKLDSLHLPV | | | |
| | | GRAAYSEDTLVRLTRRMLSDGVDLYTARLQEFGIEPSWTPPTPRIGEPVGNP | | | |
| | | AVDRVLKTVSRWLESATKTWGAPERVIIEHVREGFVTEKRAREMDGDMRR | | | |
| | | RAARNAKLFQEMQEKLNVQGKPSRADLWRYQSVQRQNCQCAYCGSPITF | | | |
| | | SNSEMDHIVPRAGQGSTNTRENLVAVCHRCNQSKGNTPFAIWAKNTSIEG | | | |
| | | VSVKEAVERTRHWVTDTGMRSTDFKKFTKAVVERFQRATMDEEIDARSME | | | |
| | | SVAWMANELRSRVAQHFASHGTTVRVYRGSLTAEARRASGISGKLKFFDGV | | | |
| | | GKSRLDRRHHAIDAAVIAFTSDYVAETLAVRSNLKQSQAHRQEAPQWREFT | | | |
| | | GKDAEHRAAWRVWCQKMEKLSALLTEDLRDDRVVVMSNVRLRLGNGSA | | | |
| | | HKETIGKLSKVKLSSQLSVSDIDKASSEALWCALTREPGFDPKEGLPANPERHI | | | |
| | | RVNGTHVYAGDNIGLFPVSAGSIALRGGYAELGSSFHHARVYKITSGKKPAF | | | |
| | | AMLRVYTIDLLPYRNQDLFSVELKPQTMSMRQAEKKLRDALATGNAEYLG | | | |
| | | WLVVDDELVVDTSKIATDQVKAVEAELGTIRRWRVDGFFSPSKLRLRPLQM | | | |
| | | SKEGIKKESAPELSKIIDRPGWLPAVNKLFSDGNVTVVRRDSLGRVRLESTAH | | | |
| | | LPVTWKVQ (SEQ ID NO: 18238) | | | |
| CjeCas9 | Campylobacter | MARILAFDIGISSIGWAFSENDELKDCGVRIFTKVENPKTGESLALPRRLARSA | N582A | H559A | D8A |
| | jejuni | RKRLARRKARLNHLKHLIANEFKLNYEDYQSFDESLAKAYKGSLISPYELRFRA | | | |
| | | LNELLSKQDFARVILHIAKRRGYDDIKNSDDKEKGAILKAIKQNEEKLANYQS | | | |
| | | VGEYLYKEYFQKFKENSKEFTNVRNKKESYERCIAQSFLKDELKLIFKKQREFG | | | |
| | | FSFSKKFEEEVLSVAFYKRALKDFSHLVGNCSFFTDEKRAPKNSPLAFMFVAL | | | |
| | | TRIINLLNNLKNTEGILYTKDDLNALLNEVLKNGTLTYKQTKKLLGLSDDYEFK | | | |
| | | GEKGTYFIEFKKYKEFIKALGEHNLSQDDLNEIAKDITLIKDEIKLKKALAKYDLN | | | |
| | | QNQIDSLSKLEFKDHLNISFKALKLVTPLMLEGKKYDEACNELNLKVAINEDK | | | |
| | | KDFLPAFNETYYKDEVTNPVVLRAIKEYRKVLNALLKKYGKVHKINIELAREVG | | | |
| | | KNHSQRAKIEKEQNENYKAKKDAELECEKLGLKINSKNILKLRLFKEQKEFCAY | | | |
| | | SGEKIKISDLQDEKMLEIDHIYPYSRSFDDSYMNKVLVFTKQNQEKLNQTPFE | | | |
| | | AFGNDSAKWQKIEVLAKNLPTKKQKRILDKNYKDKEQKNFKDRNLNDTRYI | | | |
| | | ARLVLNYTKDYLDFLPLSDDENTKLNDTQKGSKVHVEAKSGMLTSALRHTW | | | |
| | | GFSAKDRNNHLHHAIDAVIIAYANNSIVKAFSDFKKEQESNSAELYAKKISELD | | | |
| | | YKNKRKFFEPFSGFRQKVLDKIDEIFVSKPERKKPSGALHEETFRKEEEFYQSY | | | |
| | | GGKEGVLKALELGKIRKVNGKIVKNGDMFRVDIFKHKKTNKFYAVPIYTMDF | | | |
| | | ALKVLPNKAVARSKKGEIKDWILMDENYEFCFSLYKDSLILIQTKDMQEPEFV | | | |
| | | YYNAFTSSTVSLIVSKHDNKFETLSKNQKILFKNANEKEVIAKSIGIQNLKVFEK | | | |
| | | YIVSALGEVTKAEFRQREDFKK (SEQ ID NO: 18239) | | | |
| GeoCas9 | Geobacillus | MRYKIGLDIGITSVGWAVMNLDIPRIEDLGVRIFDRAENPQTGESLALPRRLA | N605A | H582A | D8A |
| | stearothermo- | RSARRRLRRRKHRLERIRRLVIREGILTKEELDKLFEEKHEIDVWQLRVEALDR | | | |
| | philus | KLNNDELARVLLHLAKRRGFKSNRKSERSNKENSTMLKHIEENRAILSSYRTV | | | |
| | | GEMIVKDPKFALHKRNKGENYTNTIARDDLEREIRLIFSKQREFGNMSCTEEF | | | |
| | | ENEYITIWASQRPVASKDDIEKKVGFCTFEPKEKRAPKATYTFQSFIAWEHIN | | | |
| | | KLRLISPSGARGLTDEERRLLYEQAFQKNKITYHDIRTLLHLPDDTYFKGIVYDR | | | |
| | | GESRKQNENIRFLELDAYHQIRKAVDKVYGKGKSSSFLPIDFDTFGYALTLFKD | | | |
| | | DADIHSYLRNEYEQNGKRMPNLANKVYDNELIEELLNLSFTKFGHLSLKALRS | | | |
| | | ILPYMEQGEVYSSACERAGYTFTGPKKKQKTMLLPNIPPIANPVVMRALTQA | | | |
| | | RKVVNAIIKKYGSPVSIHIELARDLSQTFDERRKTKKEQDENRKKNETAIRQL | | | |
| | | MEYGLTLNPTGHDIVKFKLWSEQNGRCAYSLQPIEIERLLEPGYVEVDHVIPY | | | |
| | | SRSLDDSYTNKVLVLTRENREKGNRIPAEYLGVGTERWQQFETFVLTNKQFS | | | |
| | | KKKRDRLLRLHYDENEETEFKNRNLNDTRYISRFFANFIREHLKFAESDDKQK | | | |
| | | VYTVNGRVTAHLRSRWEFNKNREESDLHHAVDAVIVACTTPSDIAKVTAFY | | | |
| | | QRREQNKELAKKTEPHFPQPWPHFADELRARLSKHPKESIKALNLGNYDDQ | | | |
| | | KLESLQPVFVSRMPKRSVTGAAHQETLRRYVGIDERSGKIQTVVKTKLSEIKL | | | |
| | | DASGHFPMYGKESDPRTYEAIRQRLLEHNNDPKKAFQEPLYKPKKNGEPGP | | | |
| | | VIRTVKIIDTKNQVIPLNDGKTVAYNSNIVRVDVFEKDGKYYCVPVYTMDIM | | | |
| | | KGILPNKAIEPNKPYSEWKEMTEDYTFRFSLYPNDLIRIELPREKTVKTAAGEE | | | |
| | | INVKDVFVYYKTIDSANGGLELISHDHRFSLRGVGSRTLKRFEKYQVDVLGNI | | | |
| | | YKVRGEKRVGLASSAHSKPGKTIRPLQSTRD (SEQ ID NO: 18240) | | | |
| iSpyMacCas9 | Streptococcus | MDKKYSIGLDIGTNSVGWAVITDEYKVPSKKFKVLGNTDRHSIKKNLIGALLF | N863A | H840A | D10A |
| | spp. | DSGETAEATRLKRTARRRYTRRKNRICYLQEIFSNEMAKVDDSFFHRLEESFL | | | |
| | | VEEDKKHERHPIFGNIVDEVAYHEKYPTIYHLRKKLVDSTDKADLRLIYLALAH | | | |
| | | MIKFRGHFLIEGDLNPDNSDVDKLFIQLVQTYNQLFEENPINASGVDAKAILS | | | |
| | | ARLSKSRKLENLIAQLPGEKKNGLFGNLIALSLGLTPNFKSNFDLAEDAKLQLS | | | |
| | | KDTYDDDLDNLLAQIGDQYADLFLAAKNLSDAILLSDILRVNTEITKAPLSAS | | | |
| | | MIKRYDEHHQDLTLLKALVRQQLPEKYKEIFFDQSKNGYAGYIDGGASQEEF | | | |
| | | YKFIKPILEKMDGTEELLVKLKREDLLRKQRTFDNGSIPHQIHLGELHAILRRQ | | | |
| | | EDFYPFLKDNREKIEKILTFRIPYYVGPLARGNSRFAWMTRKSEETITPWNFE | | | |
| | | EVVDKGASAQSFIERMTNFDKNLPNEKVLPKHSLLYEYFTVYNELTKVKYVTE | | | |
| | | GMRKPAFLSGEQKKAIVDLLFKTNRKVTVKQLKEDYFKKIECFDSVEISGVED | | | |
| | | RFNASLGTYHDLLKIIKDKDFLDNEENEDILEDIVLTLTLFEDREMIEERLKTYA | | | |
| | | HLFDDKVMKQLKRRRYTGWGRLSRKLINGIRDKQSGKTILDFLKSDGFANR | | | |
| | | NFMQLIHDDSLTFKEDIQKAQVSGQGDSLHEHIANLAGSPAIKKGILQTVKV | | | |
| | | VDELVKVMGRHKPENIVIEMARENQTTQKGQKNSRERMKRIEEGIKELGSQ | | | |
| | | ILKEHPVENTQLQNEKLYLYYLQNGRDMYVDQELDINRLSDYDVDHIVPQSF | | | |
| | | LKDDSIDNKVLTRSDKNRGKSDNVPSEEVVKKMKNYWRQLLNAKLITQRKF | | | |
| | | DNLTKAERGGLSELDKAGFIKRQLVETRQITKHVAQILDSRMNTKYDENDKLI | | | |
| | | REVKVITLKSKLVSDFRKDFQFYKVREINNYHHAHDAYLNAVVGTALIKKYPK | | | |
| | | LESEFVYGDYKVYDVRKMIAKSEQEIGKATAKYFFYSNIMNFFKTEITLANGEI | | | |
| | | RKRPLIETNGETGEIVWDKGRDFATVRKVLSMPQVNIVKKTEIQTVGQNGG | | | |
| | | LFDDNPKSPLEVTPSKLVPLKKELNPKKYGGYQKPTTAYPVLLITDTKQLIPISV | | | |
| | | MNKKQFEQNPVKFLRDRGYQQVGKNDFIKLPKYTLVDIGDGIKRLWASSKEI | | | |
| | | HKGNQLVVSKKSQILLYHAHHLDSDLSNDYLQNHNQQFDVLFNEIISFSKKC | | | |
| | | KLGKEHIQKIENVYSNKKNSASIEELAESFIKLLGFTQLGATSPFNFLGVKLNQ | | | |
| | | KQYKGKKDYILPCTEGTLIRQSITGLYETRVDLSKIGEDSGGSGGSKRTADGSE | | | |
| | | FES (SEQ ID NO: 18241) | | | |
| NmeCas9 | Neisseria | MAAFKPNSINYILGLDIGIASVGWAMVEIDEEENPIRLIDLGVRVFERAEVPK | N611A | H588A | D16A |
| | meningitidis | TGDSLAMARRLARSVRRLTRRRAHRLLRTRRLLKREGVLQAANFDENGLIKS | | | |
| | | LPNTPWQLRAAALDRKLTPLEWSAVLLHLIKHRGYLSQRKNEGETADKELG | | | |
| | | ALLKGVAGNAHALQTGDFRTPAELALNKFEKESGHIRNQRSDYSHTFSRKDL | | | |
| | | QAELILLFEKQKEFGNPHVSGGLKEGIETLLMTQRPALSGDAVQKMLGHCTF | | | |
| | | EPAEPKAAKNTYTAERFIWLTKLNNLRILEQGSERPLTDTERATLMDEPYRKS | | | |
| | | KLTYAQARKLLGLEDTAFFKGLRYGKDNAEASTLMEMKAYHAISRALEKEGL | | | |
| | | KDKKSPLNLSPELQDEIGTAFSLFKTDEDITGRLKDRIQPEILEALLKHISFDKFV | | | |
| | | QISLKALRRIVPLMEQGKRYDEACAEIYGDHYGKKNTEEKIYLPPIPADEIRNP | | | |
| | | VVLRALSQARKVINGVVRRYGSPARIHIETAREVGKSFKDRKEIEKRQEENRK | | | |
| | | DREKAAAKFREYFPNFVGEPKSKDILKLRLYEQQHGKCLYSGKEINLGRLNEK | | | |
| | | GYVEIDHALPFSRTWDDSFNNKVLVLGSENQNKGNQTPYEYFNGKDNSRE | | | |
| | | WQEFKARVETSRFPRSKKQRILLQKFDEDGFKERNLNDTRYVNRFLCQFVA | | | |
| | | DRMRLTGKGKKRVFASNGQITNLLRGFWGLRKVRAENDRHHALDAVVVA | | | |
| | | CSTVAMQQKITRFVRYKEMNAFDGKTIDKETGEVLHQKTHFPQPWEFFAQ | | | |
| | | EVMIRVFGKPDGKPEFEEADTLEKLRTLLAEKLSSRPEAVHEYVTPLFVSRAP | | | |
| | | NRKMSGQGHMETVKSAKRLDEGVSVLRVPLTQLKLKDLEKMVNREREPKL | | | |
| | | YEALKARLEAHKDDPAKAFAEPFYKYDKAGNRTQQVKAVRVEQVQKTGVW | | | |
| | | VRNHNGIADNATMVRVDVFEKGDKYYLVPIYSWQVAKGILPDRAVVQGKD | | | |
| | | EEDWQLIDDSFNFKFSLHPNDLVEVITKKARMFGYFASCHRGTGNINIRIHD | | | |
| | | LDHKIGKNGILEGIGVKTALSFQKYQIDELGKEIRPCRLKKRPPVR (SEQ ID | | | |
| | | NO: 18242) | | | |
| ScaCas9 | Streptococcus | MEKKYSIGLDIGTNSVGWAVITDDYKVPSKKFKVLGNTNRKSIKKNLMGALL | N872A | H849A | D10A |
| | canis | FDSGETAEATRLKRTARRRYTRRKNRIRYLQEIFANEMAKLDDSFFQRLEESF | | | |
| | | LVEEDKKNERHPIFGNLADEVAYHRNYPTIYHLRKKLADSPEKADLRLIYLALA | | | |
| | | HIIKFRGHFLIEGKLNAENSDVAKLFYQLIQTYNQLFEESPLDEIEVDAKGILSA | | | |
| | | RLSKSKRLEKLIAVFPNEKKNGLFGNIIALALGLTPNFKSNFDLTEDAKLQLSKD | | | |
| | | TYDDDLDELLGQIGDQYADLFSAAKNLSDAILLSDILRSNSEVTKAPLSASMV | | | |
| | | KRYDEHHQDLALLKTLVRQQFPEKYAEIFKDDTKNGYAGYVGIGIKHRKRTT | | | |
| | | KLATQEEFYKFIKPILEKMDGAEELLAKLNRDDLLRKQRTFDNGSIPHQIHLKE | | | |
| | | LHAILRRQEEFYPFLKENREKIEKILTFRIPYYVGPLARGNSRFAWLTRKSEEAI | | | |
| | | TPWNFEEVVDKGASAQSFIERMTNFDEQLPNKKVLPKHSLLYEYFTVYNELT | | | |
| | | KVKYVTERMRKPEFLSGEQKKAIVDLLFKTNRKVTVKQLKEDYFKKIECFDSV | | | |
| | | EIIGVEDRFNASLGTYHDLLKIIKDKDFLDNEENEDILEDIVLTLTLFEDREMIEE | | | |
| | | RLKTYAHLFDDKVMKQLKRRHYTGWGRLSRKMINGIRDKQSGKTILDFLKS | | | |
| | | DGFSNRNFMQLIHDDSLTFKEEIEKAQVSGQGDSLHEQIADLAGSPAIKKGIL | | | |
| | | QTVKIVDELVKVMGHKPENIVIEMARENQTTTKGLQQSRERKKRIEEGIKELE | | | |
| | | SQILKENPVENTQLQNEKLYLYYLQNGRDMYVDQELDINRLSDYDVDHIVP | | | |
| | | QSFIKDDSIDNKVLTRSVENRGKSDNVPSEEVVKKMKNYWRQLLNAKLITQ | | | |
| | | RKFDNLTKAERGGLSEADKAGFIKRQLVETRQITKHVARILDSRMNTKRDKN | | | |
| | | DKPIREVKVITLKSKLVSDFRKDFQLYKVRDINNYHHAHDAYLNAVVGTALIK | | | |
| | | KYPKLESEFVYGDYKVYDVRKMIAKSEQEIGKATAKRFFYSNIMNFFKTEVKL | | | |
| | | ANGEIRKRPLIETNGETGEVVWNKEKDFATVRKVLAMPQVNIVKKTEVQTG | | | |
| | | GFSKESILSKRESAKLIPRKKGWDTRKYGGFGSPTVAYSILVVAKVEKGKAKKL | | | |
| | | KSVKVLVGITIMEKGSYEKDPIGFLEAKGYKDIKKELIFKLPKYSLFELENGRRR | | | |
| | | MLASATELQKANELVLPQHLVRLLYYTQNISATTGSNNLGYIEQHREEFKEIF | | | |
| | | EKIIDFSEKYILKNKVNSNLKSSFDEQFAVSDSILLSNSFVSLLKYTSFGASGGFT | | | |
| | | FLDLDVKQGRLRYQTVTEVLDATLIYQSITGLYETRTDLSQLGGD (SEQ ID | | | |
| | | NO: 18243) | | | |
| ScaCas9- | Streptococcus | MEKKYSIGLDIGTNSVGWAVITDDYKVPSKKFKVLGNTNRKSIKKNLMGALL | N872A | H849A | D10A |
| HiFi-Sc++ | canis | FDSGETAEATRLKRTARRRYTRRKNRIRYLQEIFANEMAKLDDSFFQRLEESF | | | |
| | | LVEEDKKNERHPIFGNLADEVAYHRNYPTIYHLRKKLADSPEKADLRLIYLALA | | | |
| | | HIIKFRGHFLIEGKLNAENSDVAKLFYQLIQTYNQLFEESPLDEIEVDAKGILSA | | | |
| | | RLSKSKRLEKLIAVFPNEKKNGLFGNIIALALGLTPNFKSNFDLTEDAKLQLSKD | | | |
| | | TYDDDLDELLGQIGDQYADLFSAAKNLSDAILLSDILRSNSEVTKAPLSASMV | | | |
| | | KRYDEHHQDLALLKTLVRQQFPEKYAEIFKDDTKNGYAGYVGADKKLRKRS | | | |
| | | GKLATEEEFYKFIKPILEKMDGAEELLAKLNRDDLLRKQRTFDNGSIPHQIHLK | | | |
| | | ELHAILRRQEEFYPFLKENREKIEKILTFRIPYYVGPLARGNSRFAWLTRKSEEA | | | |
| | | ITPWNFEEVVDKGASAQSFIERMTNFDEQLPNKKVLPKHSLLYEYFTVYNEL | | | |
| | | TKVKYVTERMRKPEFLSGEQKKAIVDLLFKTNRKVTVKQLKEDYFKKIECFDS | | | |
| | | VEIIGVEDRFNASLGTYHDLLKIIKDKDFLDNEENEDILEDIVLTLTLFEDREMIE | | | |
| | | ERLKTYAHLFDDKVMKQLKRRHYTGWGRLSRKMINGIRDKQSGKTILDFLKS | | | |
| | | DGFSNANFMQLIHDDSLTFKEEIEKAQVSGQGDSLHEQIADLAGSPAIKKGIL | | | |
| | | QTVKIVDELVKVMGHKPENIVIEMARENQTTTKGLQQSRERKKRIEEGIKELE | | | |
| | | SQILKENPVENTQLQNEKLYLYYLQNGRDMYVDQELDINRLSDYDVDHIVP | | | |
| | | QSFIKDDSIDNKVLTRSVENRGKSDNVPSEEVVKKMKNYWRQLLNAKLITQ | | | |
| | | RKFDNLTKAERGGLSEADKAGFIKRQLVETRQITKHVARILDSRMNTKRDKN | | | |
| | | DKPIREVKVITLKSKLVSDFRKDFQLYKVRDINNYHHAHDAYLNAVVGTALIK | | | |
| | | KYPKLESEFVYGDYKVYDVRKMIAKSEQEIGKATAKRFFYSNIMNFFKTEVKL | | | |
| | | ANGEIRKRPLIETNGETGEVVWNKEKDFATVRKVLAMPQVNIVKKTEVQTG | | | |
| | | GFSKESILSKRESAKLIPRKKGWDTRKYGGFGSPTVAYSILVVAKVEKGKAKKL | | | |
| | | KSVKVLVGITIMEKGSYEKDPIGFLEAKGYKDIKKELIFKLPKYSLFELENGRRR | | | |
| | | MLASAKELQKANELVLPQHLVRLLYYTQNISATTGSNNLGYIEQHREEFKEIF | | | |
| | | EKIIDFSEKYILKNKVNSNLKSSFDEQFAVSDSILLSNSFVSLLKYTSFGASGGFT | | | |
| | | FLDLDVKQGRLRYQTVTEVLDATLIYQSITGLYETRTDLSQLGGD (SEQ ID | | | |
| | | NO: 18244) | | | |
| SpyCas9- | Streptococcus | MDKKYSIGLDIGTNSVGWAVITDEYKVPSKKFKVLGNTDRHSIKKNLIGALLF | N863A | H840A | D10A |
| 3var-NRRH | pyogenes | DSGETAEATRLKRTARRRYTRRKNRICYLQEIFSNEMAKVDDSFFHRLEESFL | | | |
| | | VEEDKKHERHPIFGNIVDEVAYHEKYPTIYHLRKKLVDSTDKADLRLIYLALAH | | | |
| | | MIKFRGHFLIEGDLNPDNSDVDKLFIQLVQTYNQLFEENPINASGVDAKAILS | | | |
| | | ARLSKSRRLENLIAQLPGEKKNGLFGNLIALSLGLTPNFKSNFDLAEDAKLQLS | | | |
| | | KDTYDDDLDNLLAQIGDQYADLFLAAKNLSDAILLSDILRVNTEITKAPLSAS | | | |
| | | MVKRYDEHHQDLTLLKALVRQQLPEKYKEIFFDQSKNGYAGYIDGGASQEE | | | |
| | | FYKFIKPILEKMDGTEELLVKLNREDLLRKQRTFDNGIIPHQIHLGELHAILRRQ | | | |
| | | GDFYPFLKDNREKIEKILTFRIPYYVGPLARGNSRFAWMTRKSEETITPWNFE | | | |
| | | EVVDKGASAQSFIERMTNFDKNLPNEKVLPKHSLLYEYFTVYNELTKVKYVTE | | | |
| | | GMRKPAFLSGEQKKAIVDLLFKTNRKVTVKQLKEDYFKKIECFDSVEISGVED | | | |
| | | RFNASLGTYHDLLKIIKDKDFLDNEENEDILEDIVLTLTLFEDREMIEERLKTYA | | | |
| | | HLFDDKVMKQLKRLRYTGWGRLSRKLINGIRDKQSGKTILDFLKSDGFANRN | | | |
| | | FMQLIHDDSLTFKEDIQKAQVSGQGDSLHEHIANLAGSPAIKKGILQTVKVV | | | |
| | | DELVKVMGGHKPENIVIEMARENQTTQKGQKNSRERMKRIEEGIKELGSQI | | | |
| | | LKEHPVENTQLQNEKLYLYYLQNGRDMYVDQELDINRLSDYDVDHIVPQSF | | | |
| | | LKDDSIDNKVLTRSDKNRGKSDNVPSEEVVKKMKNYWRQLLNAKLITQRKF | | | |
| | | DNLTKAERGGLSELDKAGFIKRQLVETRQITKHVAQILDSRMNTKYDENDKLI | | | |
| | | REVKVITLKSKLVSDFRKDFQFYKVREINNYHHAHDAYLNAVVGTALIKKYPK | | | |
| | | LESEFVYGDYKVYDVRKMIAKSEQEIGKATAKYFFYSNIMNFFKTEITLANGEI | | | |
| | | RKRPLIETNGETGEIVWDKGRDFATVRKVLSMPQVNIVKKTEVQTGGFSKES | | | |
| | | ILPKGNSDKLIARKKDWDPKKYGGFNSPTAAYSVLVVAKVEKGKSKKLKSVK | | | |
| | | ELLGITIMERSSFEKNPIGFLEAKGYKEVKKDLIIKLPKYSLFELENGRKRMLAS | | | |
| | | AGVLHKGNELALPSKYVNFLYLASHYEKLKGSPEDNEQKQLFVEQHKHYLDE | | | |
| | | IIEQISEFSKRVILADANLDKVLSAYNKHRDKPIREQAENIIHLFTLTNLGVPAA | | | |
| | | FKYFDTTIDKKRYTSTKEVLDATLIHQSITGLYETRIDLSQLGGD (SEQ ID NO: | | | |
| | | 18245) | | | |
| SpyCas9- | Streptococcus | MDKKYSIGLDIGTNSVGWAVITDEYKVPSKKFKVLGNTDRHSIKKNLIGALLF | N863A | H840A | D10A |
| 3var-NRTH | pyogenes | DSGETAEATRLKRTARRRYTRRKNRICYLQEIFSNEMAKVDDSFFHRLEESFL | | | |
| | | VEEDKKHERHPIFGNIVDEVAYHEKYPTIYHLRKKLVDSTDKADLRLIYLALAH | | | |
| | | MIKFRGHFLIEGDLNPDNSDVDKLFIQLVQTYNQLFEENPINASGVDAKAILS | | | |
| | | ARLSKSRRLENLIAQLPGEKKNGLFGNLIALSLGLTPNFKSNFDLAEDAKLQLS | | | |
| | | KDTYDDDLDNLLAQIGDQYADLFLAAKNLSDAILLSDILRVNTEITKAPLSAS | | | |
| | | MVKRYDEHHQDLTLLKALVRQQLPEKYKEIFFDQSKNGYAGYIDGGASQEE | | | |
| | | FYKFIKPILEKMDGTEELLVKLNREDLLRKQRTFDNGIIPHQIHLGELHAILRRQ | | | |
| | | GDFYPFLKDNREKIEKILTFRIPYYVGPLARGNSRFAWMTRKSEETITPWNFE | | | |
| | | EVVDKGASAQSFIERMTNFDKNLPNEKVLPKHSLLYEYFTVYNELTKVKYVTE | | | |
| | | GMRKPAFLSGEQKKAIVDLLFKTNRKVTVKQLKEDYFKKIECFDSVEISGVED | | | |
| | | RFNASLGTYHDLLKIIKDKDFLDNEENEDILEDIVLTLTLFEDREMIEERLKTYA | | | |
| | | HLFDDKVMKQLKRLRYTGWGRLSRKLINGIRDKQSGKTILDFLKSDGFANRN | | | |
| | | FMQLIHDDSLTFKEDIQKAQVSGQGDSLHEHIANLAGSPAIKKGILQTVKVV | | | |
| | | DELVKVMGGHKPENIVIEMARENQTTQKGQKNSRERMKRIEEGIKELGSQI | | | |
| | | LKEHPVENTQLQNEKLYLYYLQNGRDMYVDQELDINRLSDYDVDHIVPQSF | | | |
| | | LKDDSIDNKVLTRSDKNRGKSDNVPSEEVVKKMKNYWRQLLNAKLITQRKF | | | |
| | | DNLTKAERGGLSELDKAGFIKRQLVETRQITKHVAQILDSRMNTKYDENDKLI | | | |
| | | REVKVITLKSKLVSDFRKDFQFYKVREINNYHHAHDAYLNAVVGTALIKKYPK | | | |
| | | LESEFVYGDYKVYDVRKMIAKSEQEIGKATAKYFFYSNIMNFFKTEITLANGEI | | | |
| | | RKRPLIETNGETGEIVWDKGRDFATVRKVLSMPQVNIVKKTEVQTGGFSKES | | | |
| | | ILPKGNSDKLIARKKDWDPKKYGGFNSPTVAYSVLVVAKVEKGKSKKLKSVK | | | |
| | | ELLGITIMERSSFEKNPIGFLEAKGYKEVKKDLIIKLPKYSLFELENGRKRMLAS | | | |
| | | ASVLHKGNELALPSKYVNFLYLASHYEKLKGSSEDNKQKQLFVEQHKHYLDEI | | | |
| | | IEQISEFSKRVILADANLDKVLSAYNKHRDKPIREQAENIIHLFTLTNLGASAAF | | | |
| | | KYFDTTIGRKLYTSTKEVLDATLIHQSITGLYETRIDLSQLGGD (SEQ ID NO: | | | |
| | | 18246) | | | |
| SpyCas9- | Streptococcus | MDKKYSIGLDIGTNSVGWAVITDEYKVPSKKFKVLGNTDRHSIKKNLIGALLF | N863A | H840A | D10A |
| 3var-NRCH | pyogenes | DSGETAEATRLKRTARRRYTRRKNRICYLQEIFSNEMAKVDDSFFHRLEESFL | | | |
| | | VEEDKKHERHPIFGNIVDEVAYHEKYPTIYHLRKKLVDSTDKADLRLIYLALAH | | | |
| | | MIKFRGHFLIEGDLNPDNSDVDKLFIQLVQTYNQLFEENPINASGVDAKAILS | | | |
| | | ARLSKSRRLENLIAQLPGEKKNGLFGNLIALSLGLTPNFKSNFDLAEDAKLQLS | | | |
| | | KDTYDDDLDNLLAQIGDQYADLFLAAKNLSDAILLSDILRVNTEITKAPLSAS | | | |
| | | MVKRYDEHHQDLTLLKALVRQQLPEKYKEIFFDQSKNGYAGYIDGGASQEE | | | |
| | | FYKFIKPILEKMDGTEELLVKLNREDLLRKQRTFDNGIIPHQIHLGELHAILRRQ | | | |
| | | GDFYPFLKDNREKIEKILTFRIPYYVGPLARGNSRFAWMTRKSEETITPWNFE | | | |
| | | EVVDKGASAQSFIERMTNFDKNLPNEKVLPKHSLLYEYFTVYNELTKVKYVTE | | | |
| | | GMRKPAFLSGEQKKAIVDLLFKTNRKVTVKQLKEDYFKKIECFDSVEISGVED | | | |
| | | RFNASLGTYHDLLKIIKDKDFLDNEENEDILEDIVLTLTLFEDREMIEERLKTYA | | | |
| | | HLFDDKVMKQLKRLRYTGWGRLSRKLINGIRDKQSGKTILDFLKSDGFANRN | | | |
| | | FMQLIHDDSLTFKEDIQKAQVSGQGDSLHEHIANLAGSPAIKKGILQTVKVV | | | |
| | | DELVKVMGGHKPENIVIEMARENQTTQKGQKNSRERMKRIEEGIKELGSQI | | | |
| | | LKEHPVENTQLQNEKLYLYYLQNGRDMYVDQELDINRLSDYDVDHIVPQSF | | | |
| | | LKDDSIDNKVLTRSDKNRGKSDNVPSEEVVKKMKNYWRQLLNAKLITQRKF | | | |
| | | DNLTKAERGGLSELDKAGFIKRQLVETRQITKHVAQILDSRMNTKYDENDKLI | | | |
| | | REVKVITLKSKLVSDFRKDFQFYKVREINNYHHAHDAYLNAVVGTALIKKYPK | | | |
| | | LESEFVYGDYKVYDVRKMIAKSEQEIGKATAKYFFYSNIMNFFKTEITLANGEI | | | |
| | | RKRPLIETNGETGEIVWDKGRDFATVRKVLSMPQVNIVKKTEVQTGGFSKES | | | |
| | | ILPKGNSDKLIARKKDWDPKKYGGFNSPTVAYSVLVVAKVEKGKSKKLKSVK | | | |
| | | ELLGITIMERSSFEKNPIDFLEAKGYKEVKKDLIIKLPKYSLFELENGRKRMLAS | | | |
| | | AGVLQKGNELALPSKYVNFLYLASHYEKLKGSPEDNEQKQLFVEQHKHYLDE | | | |
| | | IIEQISEFSKRVILADANLDKVLSAYNKHRDKPIREQAENIIHLFTLTNLGAPAA | | | |
| | | FKYFDTTINRKQYNTTKEVLDATLIRQSITGLYETRIDLSQLGGD (SEQ ID NO: | | | |
| | | 18247) | | | |
| SpyCas9- | Streptococcus | MDKKYSIGLDIGTNSVGWAVITDEYKVPSKKFKVLGNTDRHSIKKNLIGALLF | N863A | H840A | D10A |
| HF1 | pyogenes | DSGETAEATRLKRTARRRYTRRKNRICYLQEIFSNEMAKVDDSFFHRLEESFL | | | |
| | | VEEDKKHERHPIFGNIVDEVAYHEKYPTIYHLRKKLVDSTDKADLRLIYLALAH | | | |
| | | MIKFRGHFLIEGDLNPDNSDVDKLFIQLVQTYNQLFEENPINASGVDAKAILS | | | |
| | | ARLSKSRRLENLIAQLPGEKKNGLFGNLIALSLGLTPNFKSNFDLAEDAKLQLS | | | |
| | | KDTYDDDLDNLLAQIGDQYADLFLAAKNLSDAILLSDILRVNTEITKAPLSAS | | | |
| | | MIKRYDEHHQDLTLLKALVRQQLPEKYKEIFFDQSKNGYAGYIDGGASQEEF | | | |
| | | YKFIKPILEKMDGTEELLVKLNREDLLRKQRTFDNGSIPHQIHLGELHAILRRQ | | | |
| | | EDFYPFLKDNREKIEKILTFRIPYYVGPLARGNSRFAWMTRKSEETITPWNFE | | | |
| | | EVVDKGASAQSFIERMTNFDKNLPNEKVLPKHSLLYEYFTVYNELTKVKYVTE | | | |
| | | GMRKPAFLSGEQKKAIVDLLFKTNRKVTVKQLKEDYFKKIECFDSVEISGVED | | | |
| | | RFNASLGTYHDLLKIIKDKDFLDNEENEDILEDIVLTLTLFEDREMIEERLKTYA | | | |
| | | HLFDDKVMKQLKRRRYTGWGRLSRKLINGIRDKQSGKTILDFLKSDGFANR | | | |
| | | NFMQLIHDDSLTFKEDIQKAQVSGQGDSLHEHIANLAGSPAIKKGILQTVKV | | | |
| | | VDELVKVMGRHKPENIVIEMARENQTTQKGQKNSRERMKRIEEGIKELGSQ | | | |
| | | ILKEHPVENTQLQNEKLYLYYLQNGRDMYVDQELDINRLSDYDVDHIVPQSF | | | |
| | | LKDDSIDNKVLTRSDKNRGKSDNVPSEEVVKKMKNYWRQLLNAKLITQRKF | | | |
| | | DNLTKAERGGLSELDKAGFIKRQLVETRQITKHVAQILDSRMNTKYDENDKLI | | | |
| | | REVKVITLKSKLVSDFRKDFQFYKVREINNYHHAHDAYLNAVVGTALIKKYPK | | | |
| | | LESEFVYGDYKVYDVRKMIAKSEQEIGKATAKYFFYSNIMNFFKTEITLANGEI | | | |
| | | RKRPLIETNGETGEIVWDKGRDFATVRKVLSMPQVNIVKKTEVQTGGFSKES | | | |
| | | ILPKRNSDKLIARKKDWDPKKYGGFDSPTVAYSVLVVAKVEKGKSKKLKSVKE | | | |
| | | LLGITIMERSSFEKNPIDFLEAKGYKEVKKDLIIKLPKYSLFELENGRKRMLASA | | | |
| | | GELQKGNELALPSKYVNFLYLASHYEKLKGSPEDNEQKQLFVEQHKHYLDEII | | | |
| | | EQISEFSKRVILADANLDKVLSAYNKHRDKPIREQAENIIHLFTLTNLGAPAAF | | | |
| | | KYFDTTIDRKRYTSTKEVLDATLIHQSITGLYETRIDLSQLGGD (SEQ ID NO: | | | |
| | | 18229) | | | |
| SpyCas9- | Streptococcus | MDKKYSIGLDIGTNSVGWAVITDEYKVPSKKFKVLGNTDRHSIKKNLIGALLF | N863A | H840A | D10A |
| QQR1 | pyogenes | DSGETAEATRLKRTARRRYTRRKNRICYLQEIFSNEMAKVDDSFFHRLEESFL | | | |
| | | VEEDKKHERHPIFGNIVDEVAYHEKYPTIYHLRKKLVDSTDKADLRLIYLALAH | | | |
| | | MIKFRGHFLIEGDLNPDNSDVDKLFIQLVQTYNQLFEENPINASGVDAKAILS | | | |
| | | ARLSKSRRLENLIAQLPGEKKNGLFGNLIALSLGLTPNFKSNFDLAEDAKLQLS | | | |
| | | KDTYDDDLDNLLAQIGDQYADLFLAAKNLSDAILLSDILRVNTEITKAPLSAS | | | |
| | | MIKRYDEHHQDLTLLKALVRQQLPEKYKEIFFDQSKNGYAGYIDGGASQEEF | | | |
| | | YKFIKPILEKMDGTEELLVKLNREDLLRKQRTFDNGSIPHQIHLGELHAILRRQ | | | |
| | | EDFYPFLKDNREKIEKILTFRIPYYVGPLARGNSRFAWMTRKSEETITPWNFE | | | |
| | | EVVDKGASAQSFIERMTNFDKNLPNEKVLPKHSLLYEYFTVYNELTKVKYVTE | | | |
| | | GMRKPAFLSGEQKKAIVDLLFKTNRKVTVKQLKEDYFKKIECFDSVEISGVED | | | |
| | | RFNASLGTYHDLLKIIKDKDFLDNEENEDILEDIVLTLTLFEDREMIEERLKTYA | | | |
| | | HLFDDKVMKQLKRRRYTGWGRLSRKLINGIRDKQSGKTILDFLKSDGFANR | | | |
| | | NFMQLIHDDSLTFKEDIQKAQVSGQGDSLHEHIANLAGSPAIKKGILQTVKV | | | |
| | | VDELVKVMGRHKPENIVIEMARENQTTQKGQKNSRERMKRIEEGIKELGSQ | | | |
| | | ILKEHPVENTQLQNEKLYLYYLQNGRDMYVDQELDINRLSDYDVDHIVPQSF | | | |
| | | LKDDSIDNKVLTRSDKNRGKSDNVPSEEVVKKMKNYWRQLLNAKLITQRKF | | | |
| | | DNLTKAERGGLSELDKAGFIKRQLVETRQITKHVAQILDSRMNTKYDENDKLI | | | |
| | | REVKVITLKSKLVSDFRKDFQFYKVREINNYHHAHDAYLNAVVGTALIKKYPK | | | |
| | | LESEFVYGDYKVYDVRKMIAKSEQEIGKATAKYFFYSNIMNFFKTEITLANGEI | | | |
| | | RKRPLIETNGETGEIVWDKGRDFATVRKVLSMPQVNIVKKTEVQTGGFSKES | | | |
| | | ILPKRNSDKLIARKKDWDPKKYGGFDSPTVAYSVLVVAKVEKGKSKKLKSVKE | | | |
| | | LLGITIMERSSFEKNPIDFLEAKGYKEVKKDLIIKLPKYSLFELENGRKRMLASA | | | |
| | | RELQKGNELALPSKYVNFLYLASHYEKLKGSPEDNEQKQLFVEQHKHYLDEII | | | |
| | | EQISEFSKRVILADAQLDKVLSAYNKHRDKPIREQAENIIHLFTLTNLGAPAAF | | | |
| | | KYFDTTFKQKQYRSTKEVLDATLIHQSITGLYETRIDLSQLGGD (SEQ ID NO: | | | |
| | | 18248) | | | |
| SpyCas9- | Streptococcus | MDKKYSIGLDIGTNSVGWAVITDEYKVPSKKFKVLGNTDRHSIKKNLIGALLF | N863A | H840A | D10A |
| SpG | pyogenes | DSGETAEATRLKRTARRRYTRRKNRICYLQEIFSNEMAKVDDSFFHRLEESFL | | | |
| | | VEEDKKHERHPIFGNIVDEVAYHEKYPTIYHLRKKLVDSTDKADLRLIYLALAH | | | |
| | | MIKFRGHFLIEGDLNPDNSDVDKLFIQLVQTYNQLFEENPINASGVDAKAILS | | | |
| | | ARLSKSRRLENLIAQLPGEKKNGLFGNLIALSLGLTPNFKSNFDLAEDAKLQLS | | | |
| | | KDTYDDDLDNLLAQIGDQYADLFLAAKNLSDAILLSDILRVNTEITKAPLSAS | | | |
| | | MIKRYDEHHQDLTLLKALVRQQLPEKYKEIFFDQSKNGYAGYIDGGASQEEF | | | |
| | | YKFIKPILEKMDGTEELLVKLNREDLLRKQRTFDNGSIPHQIHLGELHAILRRQ | | | |
| | | EDFYPFLKDNREKIEKILTFRIPYYVGPLARGNSRFAWMTRKSEETITPWNFE | | | |
| | | EVVDKGASAQSFIERMTNFDKNLPNEKVLPKHSLLYEYFTVYNELTKVKYVTE | | | |
| | | GMRKPAFLSGEQKKAIVDLLFKTNRKVTVKQLKEDYFKKIECFDSVEISGVED | | | |
| | | RFNASLGTYHDLLKIIKDKDFLDNEENEDILEDIVLTLTLFEDREMIEERLKTYA | | | |
| | | HLFDDKVMKQLKRRRYTGWGRLSRKLINGIRDKQSGKTILDFLKSDGFANR | | | |
| | | NFMQLIHDDSLTFKEDIQKAQVSGQGDSLHEHIANLAGSPAIKKGILQTVKV | | | |
| | | VDELVKVMGRHKPENIVIEMARENQTTQKGQKNSRERMKRIEEGIKELGSQ | | | |
| | | ILKEHPVENTQLQNEKLYLYYLQNGRDMYVDQELDINRLSDYDVDHIVPQSF | | | |
| | | LKDDSIDNKVLTRSDKNRGKSDNVPSEEVVKKMKNYWRQLLNAKLITQRKF | | | |
| | | DNLTKAERGGLSELDKAGFIKRQLVETRQITKHVAQILDSRMNTKYDENDKLI | | | |
| | | REVKVITLKSKLVSDFRKDFQFYKVREINNYHHAHDAYLNAVVGTALIKKYPK | | | |
| | | LESEFVYGDYKVYDVRKMIAKSEQEIGKATAKYFFYSNIMNFFKTEITLANGEI | | | |
| | | RKRPLIETNGETGEIVWDKGRDFATVRKVLSMPQVNIVKKTEVQTGGFSKES | | | |
| | | ILPKRNSDKLIARKKDWDPKKYGGFLWPTVAYSVLVVAKVEKGKSKKLKSVK | | | |
| | | ELLGITIMERSSFEKNPIDFLEAKGYKEVKKDLIIKLPKYSLFELENGRKRMLAS | | | |
| | | AKQLQKGNELALPSKYVNFLYLASHYEKLKGSPEDNEQKQLFVEQHKHYLDE | | | |
| | | IIEQISEFSKRVILADANLDKVLSAYNKHRDKPIREQAENIIHLFTLTNLGAPAA | | | |
| | | FKYFDTTIDRKQYRSTKEVLDATLIHQSITGLYETRIDLSQLGGD (SEQ ID NO: | | | |
| | | 18249) | | | |
| SpyCas9- | Streptococcus | MDKKYSIGLDIGTNSVGWAVITDEYKVPSKKFKVLGNTDRHSIKKNLIGALLF | N863A | H840A | D10A |
| VQR | pyogenes | DSGETAEATRLKRTARRRYTRRKNRICYLQEIFSNEMAKVDDSFFHRLEESFL | | | |
| | | VEEDKKHERHPIFGNIVDEVAYHEKYPTIYHLRKKLVDSTDKADLRLIYLALAH | | | |
| | | MIKFRGHFLIEGDLNPDNSDVDKLFIQLVQTYNQLFEENPINASGVDAKAILS | | | |
| | | ARLSKSRRLENLIAQLPGEKKNGLFGNLIALSLGLTPNFKSNFDLAEDAKLQLS | | | |
| | | KDTYDDDLDNLLAQIGDQYADLFLAAKNLSDAILLSDILRVNTEITKAPLSAS | | | |
| | | MIKRYDEHHQDLTLLKALVRQQLPEKYKEIFFDQSKNGYAGYIDGGASQEEF | | | |
| | | YKFIKPILEKMDGTEELLVKLNREDLLRKQRTFDNGSIPHQIHLGELHAILRRQ | | | |
| | | EDFYPFLKDNREKIEKILTFRIPYYVGPLARGNSRFAWMTRKSEETITPWNFE | | | |
| | | EVVDKGASAQSFIERMTNFDKNLPNEKVLPKHSLLYEYFTVYNELTKVKYVTE | | | |
| | | GMRKPAFLSGEQKKAIVDLLFKTNRKVTVKQLKEDYFKKIECFDSVEISGVED | | | |
| | | RFNASLGTYHDLLKIIKDKDFLDNEENEDILEDIVLTLTLFEDREMIEERLKTYA | | | |
| | | HLFDDKVMKQLKRRRYTGWGRLSRKLINGIRDKQSGKTILDFLKSDGFANR | | | |
| | | NFMQLIHDDSLTFKEDIQKAQVSGQGDSLHEHIANLAGSPAIKKGILQTVKV | | | |
| | | VDELVKVMGRHKPENIVIEMARENQTTQKGQKNSRERMKRIEEGIKELGSQ | | | |
| | | ILKEHPVENTQLQNEKLYLYYLQNGRDMYVDQELDINRLSDYDVDHIVPQSF | | | |
| | | LKDDSIDNKVLTRSDKNRGKSDNVPSEEVVKKMKNYWRQLLNAKLITQRKF | | | |
| | | DNLTKAERGGLSELDKAGFIKRQLVETRQITKHVAQILDSRMNTKYDENDKLI | | | |
| | | REVKVITLKSKLVSDFRKDFQFYKVREINNYHHAHDAYLNAVVGTALIKKYPK | | | |
| | | LESEFVYGDYKVYDVRKMIAKSEQEIGKATAKYFFYSNIMNFFKTEITLANGEI | | | |
| | | RKRPLIETNGETGEIVWDKGRDFATVRKVLSMPQVNIVKKTEVQTGGFSKES | | | |
| | | ILPKRNSDKLIARKKDWDPKKYGGFVSPTVAYSVLVVAKVEKGKSKKLKSVKE | | | |
| | | LLGITIMERSSFEKNPIDFLEAKGYKEVKKDLIIKLPKYSLFELENGRKRMLASA | | | |
| | | GELQKGNELALPSKYVNFLYLASHYEKLKGSPEDNEQKQLFVEQHKHYLDEII | | | |
| | | EQISEFSKRVILADANLDKVLSAYNKHRDKPIREQAENIIHLFTLTNLGAPAAF | | | |
| | | KYFDTTIDRKQYRSTKEVLDATLIHQSITGLYETRIDLSQLGGD (SEQ ID NO: | | | |
| | | 18250) | | | |
| SpyCas9- | Streptococcus | MDKKYSIGLDIGTNSVGWAVITDEYKVPSKKFKVLGNTDRHSIKKNLIGALLF | N863A | H840A | D10A |
| VRER | pyogenes | DSGETAEATRLKRTARRRYTRRKNRICYLQEIFSNEMAKVDDSFFHRLEESFL | | | |
| | | VEEDKKHERHPIFGNIVDEVAYHEKYPTIYHLRKKLVDSTDKADLRLIYLALAH | | | |
| | | MIKFRGHFLIEGDLNPDNSDVDKLFIQLVQTYNQLFEENPINASGVDAKAILS | | | |
| | | ARLSKSRRLENLIAQLPGEKKNGLFGNLIALSLGLTPNFKSNFDLAEDAKLQLS | | | |
| | | KDTYDDDLDNLLAQIGDQYADLFLAAKNLSDAILLSDILRVNTEITKAPLSAS | | | |
| | | MIKRYDEHHQDLTLLKALVRQQLPEKYKEIFFDQSKNGYAGYIDGGASQEEF | | | |
| | | YKFIKPILEKMDGTEELLVKLNREDLLRKQRTFDNGSIPHQIHLGELHAILRRQ | | | |
| | | EDFYPFLKDNREKIEKILTFRIPYYVGPLARGNSRFAWMTRKSEETITPWNFE | | | |
| | | EVVDKGASAQSFIERMTNFDKNLPNEKVLPKHSLLYEYFTVYNELTKVKYVTE | | | |
| | | GMRKPAFLSGEQKKAIVDLLFKTNRKVTVKQLKEDYFKKIECFDSVEISGVED | | | |
| | | RFNASLGTYHDLLKIIKDKDFLDNEENEDILEDIVLTLTLFEDREMIEERLKTYA | | | |
| | | HLFDDKVMKQLKRRRYTGWGRLSRKLINGIRDKQSGKTILDFLKSDGFANR | | | |
| | | NFMQLIHDDSLTFKEDIQKAQVSGQGDSLHEHIANLAGSPAIKKGILQTVKV | | | |
| | | VDELVKVMGRHKPENIVIEMARENQTTQKGQKNSRERMKRIEEGIKELGSQ | | | |
| | | ILKEHPVENTQLQNEKLYLYYLQNGRDMYVDQELDINRLSDYDVDHIVPQSF | | | |
| | | LKDDSIDNKVLTRSDKNRGKSDNVPSEEVVKKMKNYWRQLLNAKLITQRKF | | | |
| | | DNLTKAERGGLSELDKAGFIKRQLVETRQITKHVAQILDSRMNTKYDENDKLI | | | |
| | | REVKVITLKSKLVSDFRKDFQFYKVREINNYHHAHDAYLNAVVGTALIKKYPK | | | |
| | | LESEFVYGDYKVYDVRKMIAKSEQEIGKATAKYFFYSNIMNFFKTEITLANGEI | | | |
| | | RKRPLIETNGETGEIVWDKGRDFATVRKVLSMPQVNIVKKTEVQTGGFSKES | | | |
| | | ILPKRNSDKLIARKKDWDPKKYGGFVSPTVAYSVLVVAKVEKGKSKKLKSVKE | | | |
| | | LLGITIMERSSFEKNPIDFLEAKGYKEVKKDLIIKLPKYSLFELENGRKRMLASA | | | |
| | | RELQKGNELALPSKYVNFLYLASHYEKLKGSPEDNEQKQLFVEQHKHYLDEII | | | |
| | | EQISEFSKRVILADANLDKVLSAYNKHRDKPIREQAENIIHLFTLTNLGAPAAF | | | |
| | | KYFDTTIDRKEYRSTKEVLDATLIHQSITGLYETRIDLSQLGGD (SEQ ID NO: | | | |
| | | 18251) | | | |
| SpyCas9- | Streptococcus | MDKKYSIGLDIGTNSVGWAVITDEYKVPSKKFKVLGNTDRHSIKKNLIGALLF | N863A | H840A | D10A |
| xCas | pyogenes | DSGETAEATRLKRTARRRYTRRKNRICYLQEIFSNEMAKVDDSFFHRLEESFL | | | |
| | | VEEDKKHERHPIFGNIVDEVAYHEKYPTIYHLRKKLVDSTDKADLRLIYLALAH | | | |
| | | MIKFRGHFLIEGDLNPDNSDVDKLFIQLVQTYNQLFEENPINASGVDAKAILS | | | |
| | | ARLSKSRRLENLIAQLPGEKKNGLFGNLIALSLGLTPNFKSNFDLAEDTKLQLS | | | |
| | | KDTYDDDLDNLLAQIGDQYADLFLAAKNLSDAILLSDILRVNTEITKAPLSAS | | | |
| | | MIKLYDEHHQDLTLLKALVRQQLPEKYKEIFFDQSKNGYAGYIDGGASQEEF | | | |
| | | YKFIKPILEKMDGTEELLVKLNREDLLRKQRTFDNGIIPHQIHLGELHAILRRQE | | | |
| | | DFYPFLKDNREKIEKILTFRIPYYVGPLARGNSRFAWMTRKSEETITPWNFEK | | | |
| | | VVDKGASAQSFIERMTNFDKNLPNEKVLPKHSLLYEYFTVYNELTKVKYVTE | | | |
| | | GMRKPAFLSGDQKKAIVDLLFKTNRKVTVKQLKEDYFKKIECFDSVEISGVED | | | |
| | | RFNASLGTYHDLLKIIKDKDFLDNEENEDILEDIVLTLTLFEDREMIEERLKTYA | | | |
| | | HLFDDKVMKQLKRRRYTGWGRLSRKLINGIRDKQSGKTILDFLKSDGFANR | | | |
| | | NFIQLIHDDSLTFKEDIQKAQVSGQGDSLHEHIANLAGSPAIKKGILQTVKVV | | | |
| | | DELVKVMGRHKPENIVIEMARENQTTQKGQKNSRERMKRIEEGIKELGSQI | | | |
| | | LKEHPVENTQLQNEKLYLYYLQNGRDMYVDQELDINRLSDYDVDHIVPQSF | | | |
| | | LKDDSIDNKVLTRSDKNRGKSDNVPSEEVVKKMKNYWRQLLNAKLITQRKF | | | |
| | | DNLTKAERGGLSELDKAGFIKRQLVETRQITKHVAQILDSRMNTKYDENDKLI | | | |
| | | REVKVITLKSKLVSDFRKDFQFYKVREINNYHHAHDAYLNAVVGTALIKKYPK | | | |
| | | LESEFVYGDYKVYDVRKMIAKSEQEIGKATAKYFFYSNIMNFFKTEITLANGEI | | | |
| | | RKRPLIETNGETGEIVWDKGRDFATVRKVLSMPQVNIVKKTEVQTGGFSKES | | | |
| | | ILPKRNSDKLIARKKDWDPKKYGGFDSPTVAYSVLVVAKVEKGKSKKLKSVKE | | | |
| | | LLGITIMERSSFEKNPIDFLEAKGYKEVKKDLIIKLPKYSLFELENGRKRMLASA | | | |
| | | GVLQKGNELALPSKYVNFLYLASHYEKLKGSPEDNEQKQLFVEQHKHYLDEII | | | |
| | | EQISEFSKRVILADANLDKVLSAYNKHRDKPIREQAENIIHLFTLTNLGAPAAF | | | |
| | | KYFDTTIDRKRYTSTKEVLDATLIHQSITGLYETRIDLSQLGGD (SEQ ID NO: | | | |
| | | 18252) | | | |
| SpyCas9- | Streptococcus | MDKKYSIGLDIGTNSVGWAVITDEYKVPSKKFKVLGNTDRHSIKKNLIGALLF | N863A | H840A | D10A |
| xCas-NG | pyogenes | DSGETAEATRLKRTARRRYTRRKNRICYLQEIFSNEMAKVDDSFFHRLEESFL | | | |
| | | VEEDKKHERHPIFGNIVDEVAYHEKYPTIYHLRKKLVDSTDKADLRLIYLALAH | | | |
| | | MIKFRGHFLIEGDLNPDNSDVDKLFIQLVQTYNQLFEENPINASGVDAKAILS | | | |
| | | ARLSKSRRLENLIAQLPGEKKNGLFGNLIALSLGLTPNFKSNFDLAEDTKLQLS | | | |
| | | KDTYDDDLDNLLAQIGDQYADLFLAAKNLSDAILLSDILRVNTEITKAPLSAS | | | |
| | | MIKLYDEHHQDLTLLKALVRQQLPEKYKEIFFDQSKNGYAGYIDGGASQEEF | | | |
| | | YKFIKPILEKMDGTEELLVKLNREDLLRKQRTFDNGIIPHQIHLGELHAILRRQE | | | |
| | | DFYPFLKDNREKIEKILTFRIPYYVGPLARGNSRFAWMTRKSEETITPWNFEK | | | |
| | | VVDKGASAQSFIERMTNFDKNLPNEKVLPKHSLLYEYFTVYNELTKVKYVTE | | | |
| | | GMRKPAFLSGDQKKAIVDLLFKTNRKVTVKQLKEDYFKKIECFDSVEISGVED | | | |
| | | RFNASLGTYHDLLKIIKDKDFLDNEENEDILEDIVLTLTLFEDREMIEERLKTYA | | | |
| | | HLFDDKVMKQLKRRRYTGWGRLSRKLINGIRDKQSGKTILDFLKSDGFANR | | | |
| | | NFIQLIHDDSLTFKEDIQKAQVSGQGDSLHEHIANLAGSPAIKKGILQTVKVV | | | |
| | | DELVKVMGRHKPENIVIEMARENQTTQKGQKNSRERMKRIEEGIKELGSQI | | | |
| | | LKEHPVENTQLQNEKLYLYYLQNGRDMYVDQELDINRLSDYDVDHIVPQSF | | | |
| | | LKDDSIDNKVLTRSDKNRGKSDNVPSEEVVKKMKNYWRQLLNAKLITQRKF | | | |
| | | DNLTKAERGGLSELDKAGFIKRQLVETRQITKHVAQILDSRMNTKYDENDKLI | | | |
| | | REVKVITLKSKLVSDFRKDFQFYKVREINNYHHAHDAYLNAVVGTALIKKYPK | | | |
| | | LESEFVYGDYKVYDVRKMIAKSEQEIGKATAKYFFYSNIMNFFKTEITLANGEI | | | |
| | | RKRPLIETNGETGEIVWDKGRDFATVRKVLSMPQVNIVKKTEVQTGGFSKES | | | |
| | | IRPKRNSDKLIARKKDWDPKKYGGFVSPTVAYSVLVVAKVEKGKSKKLKSVKE | | | |
| | | LLGITIMERSSFEKNPIDFLEAKGYKEVKKDLIIKLPKYSLFELENGRKRMLASA | | | |
| | | RFLQKGNELALPSKYVNFLYLASHYEKLKGSPEDNEQKQLFVEQHKHYLDEII | | | |
| | | EQISEFSKRVILADANLDKVLSAYNKHRDKPIREQAENIIHLFTLTNLGAPRAF | | | |
| | | KYFDTTIDRKVYRSTKEVLDATLIHQSITGLYETRIDLSQLGGD (SEQ ID NO: | | | |
| | | 18253) | | | |
| St1Cas9- | Streptococcus | MSDLVLGLDIGIGSVGVGILNKVTGEIIHKNSRIFPAAQAENNLVRRTNRQG | N622A | H599A | D9A |
| CNRZ1066 | thermophilus | RRLARRKKHRRVRLNRLFEESGLITDFTKISINLNPYQLRVKGLTDELSNEELFI | | | |
| | | ALKNMVKHRGISYLDDASDDGNSSVGDYAQIVKENSKQLETKTPGQIQLER | | | |
| | | YQTYGQLRGDFTVEKDGKKHRLINVFPTSAYRSEALRILQTQQEFNPQITDEF | | | |
| | | INRYLEILTGKRKYYHGPGNEKSRTDYGRYRTSGETLDNIFGILIGKCTFYPDEF | | | |
| | | RAAKASYTAQEFNLLNDLNNLTVPTETKKLSKEQKNQIINYVKNEKAMGPAK | | | |
| | | LFKYIAKLLSCDVADIKGYRIDKSGKAEIHTFEAYRKMKTLETLDIEQMDRETL | | | |
| | | DKLAYVLTLNTEREGIQEALEHEFADGSFSQKQVDELVQFRKANSSIFGKGW | | | |
| | | HNFSVKLMMELIPELYETSEEQMTILTRLGKQKTTSSSNKTKYIDEKLLTEEIY | | | |
| | | NPVVAKSVRQAIKIVNAAIKEYGDFDNIVIEMARETNEDDEKKAIQKIQKAN | | | |
| | | KDEKDAAMLKAANQYNGKAELPHSVFHGHKQLATKIRLWHQQGERCLYT | | | |
| | | GKTISIHDLINNSNQFEVDHILPLSITFDDSLANKVLVYATANQEKGQRTPYQ | | | |
| | | ALDSMDDAWSFRELKAFVRESKTLSNKKKEYLLTEEDISKFDVRKKFIERNLV | | | |
| | | DTRYASRVVLNALQEHFRAHKIDTKVSVVRGQFTSQLRRHWGIEKTRDTYH | | | |
| | | HHAVDALIIAASSQLNLWKKQKNTLVSYSEEQLLDIETGELISDDEYKESVFKA | | | |
| | | PYQHFVDTLKSKEFEDSILFSYQVDSKFNRKISDATIYATRQAKVGKDKKDET | | | |
| | | YVLGKIKDIYTQDGYDAFMKIYKKDKSKFLMYRHDPQTFEKVIEPILENYPNK | | | |
| | | QMNEKGKEVPCNPFLKYKEEHGYIRKYSKKGNGPEIKSLKYYDSKLLGNPIDI | | | |
| | | TPENSKNKVVLQSLKPWRTDVYFNKATGKYEILGLKYADLQFEKGTGTYKIS | | | |
| | | QEKYNDIKKKEGVDSDSEFKFTLYKNDLLLVKDTETKEQQLFRFLSRTLPKQK | | | |
| | | HYVELKPYDKQKFEGGEALIKVLGNVANGGQCIKGLAKSNISIYKVRTDVLG | | | |
| | | NQHIIKNEGDKPKLDF (SEQ ID NO: 18254) | | | |
| St1Cas9- | Streptococcus | MSDLVLGLDIGIGSVGVGILNKVTGEIIHKNSRIFPAAQAENNLVRRTNRQG | N622A | H599A | D9A |
| LMG1831 | thermophilus | RRLARRKKHRRVRLNRLFEESGLITDFTKISINLNPYQLRVKGLTDELSNEELFI | | | |
| | | ALKNMVKHRGISYLDDASDDGNSSVGDYAQIVKENSKQLETKTPGQIQLER | | | |
| | | YQTYGQLRGDFTVEKDGKKHRLINVFPTSAYRSEALRILQTQQEFNPQITDEF | | | |
| | | INRYLEILTGKRKYYHGPGNEKSRTDYGRYRTSGETLDNIFGILIGKCTFYPDEF | | | |
| | | RAAKASYTAQEFNLLNDLNNLTVPTETKKLSKEQKNQIINYVKNEKAMGPAK | | | |
| | | LFKYIAKLLSCDVADIKGYRIDKSGKAEIHTFEAYRKMKTLETLDIEQMDRETL | | | |
| | | DKLAYVLTLNTEREGIQEALEHEFADGSFSQKQVDELVQFRKANSSIFGKGW | | | |
| | | HNFSVKLMMELIPELYETSEEQMTILTRLGKQKTTSSSNKTKYIDEKLLTEEIY | | | |
| | | NPVVAKSVRQAIKIVNAAIKEYGDFDNIVIEMARETNEDDEKKAIQKIQKAN | | | |
| | | KDEKDAAMLKAANQYNGKAELPHSVFHGHKQLATKIRLWHQQGERCLYT | | | |
| | | GKTISIHDLINNSNQFEVDHILPLSITFDDSLANKVLVYATANQEKGQRTPYQ | | | |
| | | ALDSMDDAWSFRELKAFVRESKTLSNKKKEYLLTEEDISKFDVRKKFIERNLV | | | |
| | | DTRYASRVVLNALQEHFRAHKIDTKVSVVRGQFTSQLRRHWGIEKTRDTYH | | | |
| | | HHAVDALIIAASSQLNLWKKQKNTLVSYSEEQLLDIETGELISDDEYKESVFKA | | | |
| | | PYQHFVDTLKSKEFEDSILFSYQVDSKFNRKISDATIYATRQAKVGKDKKDET | | | |
| | | YVLGKIKDIYTQDGYDAFMKIYKKDKSKFLMYRHDPQTFEKVIEPILENYPNK | | | |
| | | QMNEKGKEVPCNPFLKYKEEHGYIRKYSKKGNGPEIKSLKYYDSKLLGNPIDI | | | |
| | | TPENSKNKVVLQSLKPWRTDVYFNKNTGKYEILGLKYADLQFEKKTGTYKISQ | | | |
| | | EKYNGIMKEEGVDSDSEFKFTLYKNDLLLVKDTETKEQQLFRFLSRTMPNVK | | | |
| | | YYVELKPYSKDKFEKNESLIEILGSADKSGRCIKGLGKSNISIYKVRTDVLGNQH | | | |
| | | IIKNEGDKPKLDF (SEQ ID NO: 18255) | | | |
| St1Cas9- | Streptococcus | MSDLVLGLDIGIGSVGVGILNKVTGEIIHKNSRIFPAAQAENNLVRRTNRQG | N622A | H599A | D9A |
| MTH17CL3 | thermophilus | RRLARRKKHRRVRLNRLFEESGLITDFTKISINLNPYQLRVKGLTDELSNEELFI | | | |
| 96 | | ALKNMVKHRGISYLDDASDDGNSSVGDYAQIVKENSKQLETKTPGQIQLER | | | |
| | | YQTYGQLRGDFTVEKDGKKHRLINVFPTSAYRSEALRILQTQQEFNPQITDEF | | | |
| | | INRYLEILTGKRKYYHGPGNEKSRTDYGRYRTSGETLDNIFGILIGKCTFYPDEF | | | |
| | | RAAKASYTAQEFNLLNDLNNLTVPTETKKLSKEQKNQIINYVKNEKAMGPAK | | | |
| | | LFKYIAKLLSCDVADIKGYRIDKSGKAEIHTFEAYRKMKTLETLDIEQMDRETL | | | |
| | | DKLAYVLTLNTEREGIQEALEHEFADGSFSQKQVDELVQFRKANSSIFGKGW | | | |
| | | HNFSVKLMMELIPELYETSEEQMTILTRLGKQKTTSSSNKTKYIDEKLLTEEIY | | | |
| | | NPVVAKSVRQAIKIVNAAIKEYGDFDNIVIEMARETNEDDEKKAIQKIQKAN | | | |
| | | KDEKDAAMLKAANQYNGKAELPHSVFHGHKQLATKIRLWHQQGERCLYT | | | |
| | | GKTISIHDLINNSNQFEVDHILPLSITFDDSLANKVLVYATANQEKGQRTPYQ | | | |
| | | ALDSMDDAWSFRELKAFVRESKTLSNKKKEYLLTEEDISKFDVRKKFIERNLV | | | |
| | | DTRYASRVVLNALQEHFRAHKIDTKVSVVRGQFTSQLRRHWGIEKTRDTYH | | | |
| | | HHAVDALIIAASSQLNLWKKQKNTLVSYSEDQLLDIETGELISDDEYKESVFK | | | |
| | | APYQHFVDTLKSKEFEDSILFSYQVDSKFNRKISDATIYATRQAKVGKDKADE | | | |
| | | TYVLGKIKDIYTQDGYDAFMKIYKKDKSKFLMYRHDPQTFEKVIEPILENYPN | | | |
| | | KQINEKGKEVPCNPFLKYKEEHGYIRKYSKKGNGPEIKSLKYYDSKLGNHIDIT | | | |
| | | PKDSNNKVVLQSLKPWRTDVYFNKNTGKYEILGLKYSDMQFEKGTGKYSISK | | | |
| | | EQYENIKVREGVDENSEFKFTLYKNDLLLLKDSENGEQILLRFTSRNDTSKHYV | | | |
| | | ELKPYNRQKFEGSEYLIKSLGTVAKGGQCIKGLGKSNISIYKVRTDVLGNQHII | | | |
| | | KNEGDKPKLDF (SEQ ID NO: 18256) | | | |
| St1Cas9- | Streptococcus | MSDLVLGLDIGIGSVGVGILNKVTGEIIHKNSRIFPAAQAENNLVRRTNRQG | N622A | H599A | D9A |
| TH1477 | thermophilus | RRLARRKKHRRVRLNRLFEESGLITDFTKISINLNPYQLRVKGLTDELSNEELFI | | | |
| | | ALKNMVKHRGISYLDDASDDGNSSVGDYAQIVKENSKQLETKTPGQIQLER | | | |
| | | YQTYGQLRGDFTVEKDGKKHRLINVFPTSAYRSEALRILQTQQEFNPQITDEF | | | |
| | | INRYLEILTGKRKYYHGPGNEKSRTDYGRYRTSGETLDNIFGILIGKCTFYPDEF | | | |
| | | RAAKASYTAQEFNLLNDLNNLTVPTETKKLSKEQKNQIINYVKNEKAMGPAK | | | |
| | | LFKYIAKLLSCDVADIKGYRIDKSGKAEIHTFEAYRKMKTLETLDIEQMDRETL | | | |
| | | DKLAYVLTLNTEREGIQEALEHEFADGSFSQKQVDELVQFRKANSSIFGKGW | | | |
| | | HNFSVKLMMELIPELYETSEEQMTILTRLGKQKTTSSSNKTKYIDEKLLTEEIY | | | |
| | | NPVVAKSVRQAIKIVNAAIKEYGDFDNIVIEMARETNEDDEKKAIQKIQKAN | | | |
| | | KDEKDAAMLKAANQYNGKAELPHSVFHGHKQLATKIRLWHQQGERCLYT | | | |
| | | GKTISIHDLINNSNQFEVDHILPLSITFDDSLANKVLVYATANQEKGQRTPYQ | | | |
| | | ALDSMDDAWSFRELKAFVRESKTLSNKKKEYLLTEEDISKFDVRKKFIERNLV | | | |
| | | DTRYASRVVLNALQEHFRAHKIDTKVSVVRGQFTSQLRRHWGIEKTRDTYH | | | |
| | | HHAVDALIIAASSQLNLWKKQKNTLVSYSEDQLLDIETGELISDDEYKESVFK | | | |
| | | APYQHFVDTLKSKEFEDSILFSYQVDSKFNRKISDATIYATRQAKVGKDKADE | | | |
| | | TYVLGKIKDIYTQDGYDAFMKIYKKDKSKFLMYRHDPQTFEKVIEPILENYPN | | | |
| | | KQINEKGKEVPCNPFLKYKEEHGYIRKYSKKGNGPEIKSLKYYDSKLGNHIDIT | | | |
| | | PKDSNNKVVLQSLKPWRTDVYFNKNTGKYEILGLKYSDMQFEKGTGKYSISK | | | |
| | | EQYENIKVREGVDENSEFKFTLYKNDLLLLKDSENGEQILLRFTSRNDTSKHYV | | | |
| | | ELKPYNRQKFEGSEYLIKSLGTVVKGGRCIKGLGKSNISIYKVRTDVLGNQHIIK | | | |
| | | NEGDKPKLDF (SEQ ID NO: 18257) | | | |
| | | MNQKFILGLDIGITSVGYGLIDYETKNIIDAGVRLFPEANVENNEGRRSKRGS | N585A | H562A | D10A |
| | | RRLKRRRIHRLERVKLLLTEYDLINKEQIPTSNNPYQIRVKGLSEILSKDELAIAL | | | |
| sRGN3.1 | Staphylococcus | LHLAKRRGIHNVDVAADKEETASDSLSTKDQINKNAKFLESRYVCELQKERLE | | | |
| | spp. | NEGHVRGVENRFLTKDIVREAKKIIDTQMQYYPEIDETFKEKYISLVETRREYF | | | |
| | | EGPGQGSPFGWNGDLKKWYEMLMGHCTYFPQELRSVKYAYSADLFNALN | | | |
| | | DLNNLIIQRDNSEKLEYHEKYHIIENVFKQKKKPTLKQIAKEIGVNPEDIKGYRI | | | |
| | | TKSGTPEFTSFKLFHDLKKVVKDHAILDDIDLLNQIAEILTIYQDKDSIVAELGQ | | | |
| | | LEYLMSEADKQSISELTGYTGTHSLSLKCMNMIIDELWHSSMNQMEVFTYL | | | |
| | | NMRPKKYELKGYQRIPTDMIDDAILSPVVKRTFIQSINVINKVIEKYGIPEDIIIE | | | |
| | | LARENNSDDRKKFINNLQKKNEATRKRINEIIGQTGNQNAKRIVEKIRLHDQ | | | |
| | | QEGKCLYSLESIPLEDLLNNPNHYEVDHIIPRSVSFDNSYHNKVLVKQSENSK | | | |
| | | KSNLTPYQYFNSGKSKLSYNQFKQHILNLSKSQDRISKKKKEYLLEERDINKFE | | | |
| | | VQKEFINRNLVDTRYATRELTNYLKAYFSANNMNVKVKTINGSFTDYLRKV | | | |
| | | WKFKKERNHGYKHHAEDALIIANADFLFKENKKLKAVNSVLEKPEIETKQLDI | | | |
| | | QVDSEDNYSEMFIIPKQVQDIKDFRNFKYSHRVDKKPNRQLINDTLYSTRKK | | | |
| | | DNSTYIVQTIKDIYAKDNTTLKKQFDKSPEKFLMYQHDPRTFEKLEVIMKQYA | | | |
| | | NEKNPLAKYHEETGEYLTKYSKKNNGPIVKSLKYIGNKLGSHLDVTHQFKSST | | | |
| | | KKLVKLSIKNYRFDVYLTEKGYKFVTIAYLNVFKKDNYYYIPKDKYQELKEKKKI | | | |
| | | KDTDQFIASFYKNDLIKLNGDLYKIIGVNSDDRNIIELDYYDIKYKDYCEINNIK | | | |
| | | GEPRIKKTIGKKTESIEKFTTDVLGNLYLHSTEKAPQLIFKRGL (SEQ ID NO: | | | |
| | | 18258) | | | |
| sRGN3.3 | Staphylococcus | MNQKFILGLDIGITSVGYGLIDYETKNIIDAGVRLFPEANVENNEGRRSKRGS | N585A | H562A | D10A |
| | spp. | RRLKRRRIHRLERVKLLLTEYDLINKEQIPTSNNPYQIRVKGLSEILSKDELAIAL | | | |
| | | LHLAKRRGIHNVDVAADKEETASDSLSTKDQINKNAKFLESRYVCELQKERLE | | | |
| | | NEGHVRGVENRFLTKDIVREAKKIIDTQMQYYPEIDETFKEKYISLVETRREYF | | | |
| | | EGPGQGSPFGWNGDLKKWYEMLMGHCTYFPQELRSVKYAYSADLFNALN | | | |
| | | DLNNLIIQRDNSEKLEYHEKYHIIENVFKQKKKPTLKQIAKEIGVNPEDIKGYRI | | | |
| | | TKSGTPEFTSFKLFHDLKKVVKDHAILDDIDLLNQIAEILTIYQDKDSIVAELGQ | | | |
| | | LEYLMSEADKQSISELTGYTGTHSLSLKCMNMIIDELWHSSMNQMEVFTYL | | | |
| | | NMRPKKYELKGYQRIPTDMIDDAILSPVVKRTFIQSINVINKVIEKYGIPEDIIIE | | | |
| | | LARENNSDDRKKFINNLQKKNEATRKRINEIIGQTGNQNAKRIVEKIRLHDQ | | | |
| | | QEGKCLYSLESIPLEDLLNNPNHYEVDHIIPRSVSFDNSYHNKVLVKQSENSK | | | |
| | | KSNLTPYQYFNSGKSKLSYNQFKQHILNLSKSQDRISKKKKEYLLEERDINKFE | | | |
| | | VQKEFINRNLVDTRYATRELTSYLKAYFSANNMDVKVKTINGSFTNHLRKV | | | |
| | | WRFDKYRNHGYKHHAEDALIIANADFLFKENKKLQNTNKILEKPTIENNTKK | | | |
| | | VTVEKEEDYNNVFETPKLVEDIKQYRDYKFSHRVDKKPNRQLINDTLYSTRM | | | |
| | | KDEHDYIVQTITDIYGKDNTNLKKQFNKNPEKFLMYQNDPKTFEKLSIIMKQ | | | |
| | | YSDEKNPLAKYYEETGEYLTKYSKKNNGPIVKKIKLLGNKVGNHLDVTNKYEN | | | |
| | | STKKLVKLSIKNYRFDVYLTEKGYKFVTIAYLNVFKKDNYYYIPKDKYQELKEKK | | | |
| | | KIKDTDQFIASFYKNDLIKLNGDLYKIIGVNSDDRNIIELDYYDIKYKDYCEINNI | | | |
| | | KGEPRIKKTIGKKTESIEKFTTDVLGNLYLHSTEKAPQLIFKRGL (SEQ ID NO: | | | |
| | | 18259) | | | |

[0783] In some embodiments, a Cas protein requires a protospacer adjacent motif (PAM) to be present in or adjacent to a target DNA sequence for the Cas protein to bind and/or function. In some embodiments, the PAM is or comprises, from 5′ to 3′, NGG, YG, NNGRRT, NNNRRT, NGA, TYCV, TATV, NTTN, or NNNGATT, where N stands for any nucleotide, Y stands for C or T, R stands for A or G, and V stands for A or C or G. In some embodiments, a Cas protein is a protein listed in Table 7 or 8. In some embodiments, a Cas protein comprises one or more mutations altering its PAM. In some embodiments, a Cas protein comprises E1369R, E1449H, and R1556A mutations or analogous substitutions to the amino acids corresponding to said positions. In some embodiments, a Cas protein comprises E782K, N968K, and R1015H mutations or analogous substitutions to the amino acids corresponding to said positions. In some embodiments, a Cas protein comprises D1135V, R1335Q, and T1337R mutations or analogous substitutions to the amino acids corresponding to said positions. In some embodiments, a Cas protein comprises S542R and K607R mutations or analogous substitutions to the amino acids corresponding to said positions. In some embodiments, a Cas protein comprises S542R, K548V, and N552R mutations or analogous substitutions to the amino acids corresponding to said positions. Exemplary advances in the engineering of Cas enzymes to recognize altered PAM sequences are reviewed in Collias et al Nature Communications 12:555 (2021), incorporated herein by reference in its entirety.

[0784] In some embodiments, the Cas protein is catalytically active and cuts one or both strands of the target DNA site. In some embodiments, cutting the target DNA site is followed by formation of an alteration, e.g., an insertion or deletion, e.g., by the cellular repair machinery.

[0785] In some embodiments, the Cas protein is modified to deactivate or partially deactivate the nuclease, e.g., nuclease-deficient Cas9. Whereas wild-type Cas9 generates double-strand breaks (DSBs) at specific DNA sequences targeted by a gRNA, a number of CRISPR endonucleases having modified functionalities are available, for example: a “nickase” version of Cas9 that has been partially deactivated generates only a single-strand break; a catalytically inactive Cas9 (“dCas9”) does not cut target DNA. In some embodiments, dCas9 binding to a DNA sequence may interfere with transcription at that site by steric hindrance. In some embodiments, dCas9 binding to an anchor sequence may interfere with (e.g., decrease or prevent) genomic complex (e.g., ASMC) formation and/or maintenance. In some embodiments, a DNA-binding domain comprises a catalytically inactive Cas9, e.g., dCas9. Many catalytically inactive Cas9 proteins are known in the art. In some embodiments, dCas9 comprises mutations in each endonuclease domain of the Cas protein, e.g., D10A and H840A or N863A mutations. In some embodiments, a catalytically inactive or partially inactive CRISPR/Cas domain comprises a Cas protein comprising one or more mutations, e.g., one or more of the mutations listed in Table 7. In some embodiments, a Cas protein described on a given row of Table 7 comprises one, two, three, or all of the mutations listed in the same row of Table 7. In some embodiments, a Cas protein, e.g., not described in Table 7, comprises one, two, three, or all of the mutations listed in a row of Table 7 or a corresponding mutation at a corresponding site in that Cas protein.

[0786] In some embodiments, a Cas9 derivative with enhanced activity may be used in the gene modification polypeptide. In some embodiments, a Cas9 derivative may comprise mutations that improve activity of the HNH endonuclease domain, e.g., SpyCas9 R221K, N394K, or mutations that improve R-loop formation, e.g., SpyCas9 L1245V, or comprise a combination of such mutations, e.g., SpyCas9 R221K/N394K, SpyCas9 N394K/L1245V, SpyCas9 R221K/L1245V, or SpyCas9 R221K/N394K/L1245V (see, e.g., Spencer and Zhang Sci Rep 7:16836 (2017), the Cas9 derivatives and comprising mutations of which are incorporated herein by reference). In some embodiments, a Cas9 derivative may comprise one or more types of mutations described herein, e.g., PAM-modifying mutations, protein stabilizing mutations, activity enhancing mutations, and/or mutations partially or fully inactivating one or two endonuclease domains relative to the parental enzyme (e.g., one or more mutations to abolish endonuclease activity towards one or both strands of a target DNA, e.g., a nickase or catalytically dead enzyme). In some embodiments, a Cas9 enzyme used in a system described herein may comprise mutations that confer nickase activity toward the enzyme (e.g., SpyCas9 N863A or H840A) in addition to mutations improving catalytic efficiency (e.g., SpyCas9 R221K, N394K, and/or L1245V). In some embodiments, a Cas9 enzyme used in a system described herein is a SpyCas9 enzyme or derivative that further comprises an N863A mutation to confer nickase activity in addition to R221K and N394K mutations to improve catalytic efficiency.

[0787] In some embodiments, a catalytically inactive, e.g., dCas9, or partially deactivated Cas9 protein comprises a D11 mutation (e.g., D11A mutation) or an analogous substitution to the amino acid corresponding to said position. In some embodiments, a catalytically inactive Cas9 protein, e.g., dCas9, or partially deactivated Cas9 protein comprises a H969 mutation (e.g., H969A mutation) or an analogous substitution to the amino acid corresponding to said position. In some embodiments, a catalytically inactive Cas9 protein, e.g., dCas9, or partially deactivated Cas9 protein comprises a N995 mutation (e.g., N995A mutation) or an analogous substitution to the amino acid corresponding to said position. In some embodiments, a catalytically inactive Cas9 protein, e.g., dCas9, comprises mutations at one, two, or three of positions D11, H969, and N995 (e.g., D11A, H969A, and N995A mutations) or analogous substitutions to the amino acids corresponding to said positions.

[0788] In some embodiments, a catalytically inactive Cas9 protein, e.g., dCas9, or partially deactivated Cas9 protein comprises a D10 mutation (e.g., a D10A mutation) or an analogous substitution to the amino acid corresponding to said position. In some embodiments, a catalytically inactive Cas9 protein, e.g., dCas9, or partially deactivated Cas9 protein comprises a H557 mutation (e.g., a H557A mutation) or an analogous substitution to the amino acid corresponding to said position. In some embodiments, a catalytically inactive Cas9 protein, e.g., dCas9, comprises a D10 mutation (e.g., a D10A mutation) and a H557 mutation (e.g., a H557A mutation) or analogous substitutions to the amino acids corresponding to said positions.

[0789] In some embodiments, a catalytically inactive Cas9 protein, e.g., dCas9, or partially deactivated Cas9 protein comprises a D839 mutation (e.g., a D839A mutation) or an analogous substitution to the amino acid corresponding to said position. In some embodiments, a catalytically inactive Cas9 protein, e.g., dCas9, or partially deactivated Cas9 protein comprises a H840 mutation (e.g., a H840A mutation) or an analogous substitution to the amino acid corresponding to said position. In some embodiments, a catalytically inactive Cas9 protein, e.g., dCas9, or partially deactivated Cas9 protein comprises a N863 mutation (e.g., a N863A mutation) or an analogous substitution to the amino acid corresponding to said position. In some embodiments, a catalytically inactive Cas9 protein, e.g., dCas9, comprises a D10 mutation (e.g., D10A), a D839 mutation (e.g., D839A), a H840 mutation (e.g., H840A), and a N863 mutation (e.g., N863A) or analogous substitutions to the amino acids corresponding to said positions.

[0790] In some embodiments, a catalytically inactive Cas9 protein, e.g., dCas9, or partially deactivated Cas9 protein comprises a E993 mutation (e.g., a E993A mutation) or an analogous substitution to the amino acid corresponding to said position.

[0791] In some embodiments, a catalytically inactive Cas9 protein, e.g., dCas9, or partially deactivated Cas9 protein comprises a D917 mutation (e.g., a D917A mutation) or an analogous substitution to the amino acid corresponding to said position. In some embodiments, a catalytically inactive Cas9 protein, e.g., dCas9, or partially deactivated Cas9 protein comprises a a E1006 mutation (e.g., a E1006A mutation) or an analogous substitution to the amino acid corresponding to said position. In some embodiments, a catalytically inactive Cas9 protein, e.g., dCas9, or partially deactivated Cas9 protein comprises a D1255 mutation (e.g., a D1255A mutation) or an analogous substitution to the amino acid corresponding to said position. In some embodiments, a catalytically inactive Cas9 protein, e.g., dCas9, comprises a D917 mutation (e.g., D917A), a E1006 mutation (e.g., E1006A), and a D1255 mutation (e.g., D1255A) or analogous substitutions to the amino acids corresponding to said positions.

[0792] In some embodiments, a catalytically inactive Cas9 protein, e.g., dCas9, or partially deactivated Cas9 protein comprises a D16 mutation (e.g., a D16A mutation) or an analogous substitution to the amino acid corresponding to said position. In some embodiments, a catalytically inactive Cas9 protein, e.g., dCas9, or partially deactivated Cas9 protein comprises a D587 mutation (e.g., a D587A mutation) or an analogous substitution to the amino acid corresponding to said position. In some embodiments, a partially deactivated Cas domain has nickase activity. In some embodiments, a partially deactivated Cas9 domain is a Cas9 nickase domain. In some embodiments, the catalytically inactive Cas domain or dead Cas domain produces no detectable double strand break formation. In some embodiments, a catalytically inactive Cas9 protein, e.g., dCas9, or partially deactivated Cas9 protein comprises a H588 mutation (e.g., a H588A mutation) or an analogous substitution to the amino acid corresponding to said position. In some embodiments, a catalytically inactive Cas9 protein, e.g., dCas9, or partially deactivated Cas9 protein comprises a N611 mutation (e.g., a N611 A mutation) or an analogous substitution to the amino acid corresponding to said position. In some embodiments, a catalytically inactive Cas9 protein, e.g., dCas9, comprises a D16 mutation (e.g., D16A), a D587 mutation (e.g., D587A), a H588 mutation (e.g., H588A), and a N611 mutation (e.g., N611A) or analogous substitutions to the amino acids corresponding to said positions.

[0793] In some embodiments, a DNA-binding domain or endonuclease domain may comprise a Cas molecule comprising or linked (e.g., covalently) to a gRNA (e.g., a template nucleic acid, e.g., template RNA, comprising a gRNA).

[0794] In some embodiments, an endonuclease domain or DNA binding domain comprises a Streptococcus pyogenes Cas9 (SpCas9) or a functional fragment or variant thereof. In some embodiments, the endonuclease domain or DNA binding domain comprises a modified SpCas9. In embodiments, the modified SpCas9 comprises a modification that alters protospacer-adjacent motif (PAM) specificity. In embodiments, the PAM has specificity for the nucleic acid sequence 5′-NGT-3′. In embodiments, the modified SpCas9 comprises one or more amino acid substitutions, e.g., at one or more of positions L1111, D1135, G1218, E1219, A1322, of R1335, e.g., selected from L1111R, D1135V, G1218R, E1219F, A1322R, R1335V. In embodiments, the modified SpCas9 comprises the amino acid substitution T1337R and one or more additional amino acid substitutions, e.g., selected from L1111, D1135L, S1136R, G1218S, E1219V, D1332A, D1332S, D1332T, D1332V, D1332L, D1332K, D1332R, R1335Q, T1337, T1337L, T1337Q, T1337I, T1337V, T1337F, T1337S, T1337N, T1337K, T1337H, T1337Q, and T1337M, or corresponding amino acid substitutions thereto. In embodiments, the modified SpCas9 comprises: (i) one or more amino acid substitutions selected from D1135L, S1136R, G1218S, E1219V, A1322R, R1335Q, and T1337; and (ii) one or more amino acid substitutions selected from L1111R, G1218R, E1219F, D1332A, D1332S, D1332T, D1332V, D1332L, D1332K, D1332R, T1337L, T1337I, T1337V, T1337F, T1337S, T1337N, T1337K, T1337R, T1337H, T1337Q, and T1337M, or corresponding amino acid substitutions thereto.

[0795] In some embodiments, the endonuclease domain or DNA binding domain comprises a Cas domain, e.g., a Cas9 domain. In embodiments, the endonuclease domain or DNA binding domain comprises a nuclease-active Cas domain, a Cas nickase (nCas) domain, or a nuclease-inactive Cas (dCas) domain. In embodiments, the endonuclease domain or DNA binding domain comprises a nuclease-active Cas9 domain, a Cas9 nickase (nCas9) domain, or a nuclease-inactive Cas9 (dCas9) domain. In some embodiments, the endonuclease domain or DNA binding domain comprises a Cas9 domain of Cas9 (e.g., dCas9 and nCas9), Cas12a/Cpf1, Cas12b/C2c1, Cas12c/C2c3, Cas12d/CasY, Cas12e/CasX, Cas12g, Cas12h, or Cas12i. In some embodiments, the endonuclease domain or DNA binding domain comprises a Cas9 (e.g., dCas9 and nCas9), Cas12a/Cpf1, Cas12b/C2c1, Cas12c/C2c3, Cas12d/CasY, Cas12e/CasX, Cas12g, Cas12h, or Cas12i. In some embodiments, the endonuclease domain or DNA binding domain comprises an S. pyogenes or an S. thermophilus Cas9, or a functional fragment thereof. In some embodiments, the endonuclease domain or DNA binding domain comprises a Cas9 sequence, e.g., as described in Chylinski, Rhun, and Charpentier (2013) RNA Biology 10:5, 726-737; incorporated herein by reference. In some embodiments, the endonuclease domain or DNA binding domain comprises the HNH nuclease subdomain and/or the RuvC1 subdomain of a Cas, e.g., Cas9, e.g., as described herein, or a variant thereof. In some embodiments, the endonuclease domain or DNA binding domain comprises Cas12a/Cpf1, Cas12b/C2c1, Cas12c/C2c3, Cas12d/CasY, Cas12e/CasX, Cas12g, Cas12h, or Cas12i. In some embodiments, the endonuclease domain or DNA binding domain comprises a Cas polypeptide (e.g., enzyme), or a functional fragment thereof. In embodiments, the Cas polypeptide (e.g., enzyme) is selected from Cas1, Cas1B, Cas2, Cas3, Cas4, Cas5, Cas5d, Cas5t, Cas5h, Cas5a, Cas6, Cas7, Cas8, Cas8a, Cas8b, Cas8c, Cas9 (e.g., Csn1 or Csx12), Cas10, Cas10d, Cas12a/Cpf1, Cas12b/C2c1, Cas12c/C2c3, Cas12d/CasY, Cas12e/CasX, Cas12g, Cas12h, Cas12i, Csy1, Csy2, Csy3, Csy4, Cse1, Cse2, Cse3, Cse4, Cse5e, Csc1, Csc2, Csa5, Csn1, Csn2, Csm1, Csm2, Csm3, Csm4, Csm5, Csm6, Cmr1, Cmr3, Cmr4, Cmr5, Cmr6, Csb1, Csb2, Csb3, Csx17, Csx14, Csx10, Csx16, CsaX, Csx3, Csx1, Csx1S, Csx11, Csf1, Csf2, CsO, Csf4, Csd1, Csd2, Cst1, Cst2, Csh1, Csh2, Csa1, Csa2, Csa3, Csa4, Csa5, Type II Cas effector proteins, Type V Cas effector proteins, Type VI Cas effector proteins, CARF, DinG, Cpf1, Cas12b/C2c1, Cas12c/C2c3, Cas12b/C2c1, Cas12c/C2c3, SpCas9(K855A), eSpCas9(1.1), SpCas9-HF1, hyper accurate Cas9 variant (HypaCas9), homologues thereof, modified or engineered versions thereof, and/or functional fragments thereof. In embodiments, the Cas9 comprises one or more substitutions, e.g., selected from H840A, D10A, P475A, W476A, N477A, D1125A, W1126A, and D1127A. In embodiments, the Cas9 comprises one or more mutations at positions selected from: D10, G12, G17, E762, H840, N854, N863, H982, H983, A984, D986, and/or A987, e.g., one or more substitutions selected from D10A, G12A, G17A, E762A, H840A, N854A, N863A, H982A, H983A, A984A, and/or D986A. In some embodiments, the endonuclease domain or DNA binding domain comprises a Cas (e.g., Cas9) sequence from Corynebacterium ulcerans, Corynebacterium diphtheria, Spiroplasma syrphidicola, Prevotella intermedia, Spiroplasma taiwanense, Streptococcus iniae, Belliella baltica, Psychroflexus torquis, Streptococcus thermophilus, Listeria innocua, Campylobacter jejuni, Neisseria meningitidis, Streptococcus pyogenes, or Staphylococcus aureus, or a fragment or variant thereof.

[0796] In some embodiments, the endonuclease domain or DNA binding domain comprises a Cpf1 domain, e.g., comprising one or more substitutions, e.g., at position D917, E1006A, D1255 or any combination thereof, e.g., selected from D917A, E1006A, D1255A, D917A/E1006A, D917A/D1255A, E1006A/D1255A, and D917A/E1006A/D1255A.

[0797] In some embodiments, the endonuclease domain or DNA binding domain comprises spCas9, spCas9-VRQR, spCas9-VRER, xCas9 (sp), saCas9, saCas9-KKH, spCas9-MQKSER, spCas9-LRKIQK, or spCas9-LRVSQL.

[0798] In some embodiments, a gene modifying polypeptide has an endonuclease domain comprising a Cas9 nickase, e.g., Cas9H840A. In embodiments, the Cas9 H840A has the following amino acid sequence:

Cas9 nickase (H840A):
(SEQ ID NO: 18260)
DKKYSIGLDIGTNSVGWAVITDEYKVPSKKFKVLGNTDRHSIKKNLIGAL
LFDSGETAEATRLKRTARRRYTRRKNRICYLQEIFSNEMAKVDDSFFHRL
EESFLVEEDKKHERHPIFGNIVDEVAYHEKYPTIYHLRKKLVDSTDKADL
RLIYLALAHMIKFRGHFLIEGDLNPDNSDVDKLFIQLVQTYNQLFEENPI
NASGVDAKAILSARLSKSRRLENLIAQLPGEKKNGLFGNLIALSLGLTPN
FKSNFDLAEDAKLQLSKDTYDDDLDNLLAQIGDQYADLFLAAKNLSDAIL
LSDILRVNTEITKAPLSASMIKRYDEHHQDLTLLKALVRQQLPEKYKEIF
FDQSKNGYAGYIDGGASQEEFYKFIKPILEKMDGTEELLVKLNREDLLRK
QRTFDNGSIPHQIHLGELHAILRRQEDFYPFLKDNREKIEKILTFRIPYY
VGPLARGNSRFAWMTRKSEETITPWNFEEVVDKGASAQSFIERMTNFDKN
LPNEKVLPKHSLLYEYFTVYNELTKVKYVTEGMRKPAFLSGEQKKAIVDL
LFKTNRKVTVKQLKEDYFKKIECFDSVEISGVEDRFNASLGTYHDLLKII
KDKDFLDNEENEDILEDIVLTLTLFEDREMIEERLKTYAHLFDDKVMKQL
KRRRYTGWGRLSRKLINGIRDKQSGKTILDFLKSDGFANRNFMQLIHDDS
LTFKEDIQKAQVSGQGDSLHEHIANLAGSPAIKKGILQTVKVVDELVKVM
GRHKPENIVIEMARENQTTQKGQKNSRERMKRIEEGIKELGSQILKEHPV
ENTQLQNEKLYLYYLQNGRDMYVDQELDINRLSDYDVDAIVPQSFLKDDS
IDNKVLTRSDKNRGKSDNVPSEEVVKKMKNYWRQLLNAKLITQRKFDNLT
KAERGGLSELDKAGFIKRQLVETRQITKHVAQILDSRMNTKYDENDKLIR
EVKVITLKSKLVSDFRKDFQFYKVREINNYHHAHDAYLNAVVGTALIKKY
PKLESEFVYGDYKVYDVRKMIAKSEQEIGKATAKYFFYSNIMNFFKTEIT
LANGEIRKRPLIETNGETGEIVWDKGRDFATVRKVLSMPQVNIVKKTEVQ
TGGFSKESILPKRNSDKLIARKKDWDPKKYGGFDSPTVAYSVLVVAKVEK
GKSKKLKSVKELLGITIMERSSFEKNPIDFLEAKGYKEVKKDLIIKLPKY
SLFELENGRKRMLASAGELQKGNELALPSKYVNFLYLASHYEKLKGSPED
NEQKQLFVEQHKHYLDEIIEQISEFSKRVILADANLDKVLSAYNKHRDKP
IREQAENIIHLFTLTNLGAPAAFKYFDTTIDRKRYTSTKEVLDATLIHQS
ITGLYETRIDLSQLGGD

[0799] In some embodiments, a gene modifying polypeptide comprises a dCas9 sequence comprising a D10A and/or H840A mutation, e.g., the following sequence:

(SEQ ID NO: 7)
SMDKKYSIGLAIGTNSVGWAVITDDYKVPSKKFKVLGNTDRHSIKKNLIG
ALLFDSGETAEATRLKRTARRRYTRRKNRICYLQEIFSNEMAKVDDSFFH
RLEESFLVEEDKKHERHPIFGNIVDEVAYHEKYPTIYHLRKKLVDSTDKA
DLRLIYLALAHMIKFRGHFLIEGDLNPDNSDVDKLFIQLVQTYNQLFEEN
PINASGVDAKAILSARLSKSRRLENLIAQLPGEKKNGLFGNLIALSLGLT
PNFKSNFDLAEDAKLQLSKDTYDDDLDNLLAQIGDQYADLFLAAKNLSDA
ILLSDILRVNTEITKAPLSASMIKRYDEHHQDLTLLKALVRQQLPEKYKE
IFFDQSKNGYAGYIDGGASQEEFYKFIKPILEKMDGTEELLVKLNREDLL
RKQRTFDNGSIPHQIHLGELHAILRRQEDFYPFLKDNREKIEKILTFRIP
YYVGPLARGNSRFAWMTRKSEETITPWNFEEVVDKGASAQSFIERMTNFD
KNLPNEKVLPKHSLLYEYFTVYNELTKVKYVTEGMRKPAFLSGEQKKAIV
DLLFKTNRKVTVKQLKEDYFKKIECFDSVEISGVEDRFNASLGTYHDLLK
IIKDKDFLDNEENEDILEDIVLTLTLFEDREMIEERLKTYAHLFDDKVMK
QLKRRRYTGWGRLSRKLINGIRDKQSGKTILDFLKSDGFANRNFMQLIHD
DSLTFKEDIQKAQVSGQGDSLHEHIANLAGSPAIKKGILQTVKVVDELVK
VMGRHKPENIVIEMARENQTTQKGQKNSRERMKRIEEGIKELGSQILKEH
PVENTQLQNEKLYLYYLQNGRDMYVDQELDINRLSDYDVDAIVPQSFLKD
DSIDNKVLTRSDKNRGKSDNVPSEEVVKKMKNYWRQLLNAKLITQRKFDN
LTKAERGGLSELDKAGFIKRQLVETRQITKHVAQILDSRMNTKYDENDKL
IREVKVITLKSKLVSDFRKDFQFYKVREINNYHHAHDAYLNAVVGTALIK
KYPKLESEFVYGDYKVYDVRKMIAKSEQEIGKATAKYFFYSNIMNFFKTE
ITLANGEIRKRPLIETNGETGEIVWDKGRDFATVRKVLSMPQVNIVKKTE
VQTGGFSKESILPKRNSDKLIARKKDWDPKKYGGFDSPTVAYSVLVVAKV
EKGKSKKLKSVKELLGITIMERSSFEKNPIDFLEAKGYKEVKKDLIIKLP
KYSLFELENGRKRMLASAGELQKGNELALPSKYVNFLYLASHYEKLKGSP
EDNEQKQLFVEQHKHYLDEIIEQISEFSKRVILADANLDKVLSAYNKHRD
KPIREQAENIIHLFTLTNLGAPAAFKYFDTTIDRKRYTSTKEVLDATLIH
QSITGLYETRIDLSQLGGD

### TAL Effectors and Zinc Finger Nucleases

[0800] In some embodiments, an endonuclease domain or DNA-binding domain comprises a TAL effector molecule. A TAL effector molecule, e.g., a TAL effector molecule that specifically binds a DNA sequence, typically comprises a plurality of TAL effector domains or fragments thereof, and optionally one or more additional portions of naturally occurring TAL effectors (e.g., N- and/or C-terminal of the plurality of TAL effector domains). Many TAL effectors are known to those of skill in the art and are commercially available, e.g., from Thermo Fisher Scientific.

[0801] Naturally occurring TALEs are natural effector proteins secreted by numerous species of bacterial pathogens including the plant pathogen Xanthomonas which modulates gene expression in host plants and facilitates bacterial colonization and survival. The specific binding of TAL effectors is based on a central repeat domain of tandemly arranged nearly identical repeats of typically 33 or 34 amino acids (the repeat-variable di-residues, RVD domain).

[0802] Members of the TAL effectors family differ mainly in the number and order of their repeats. The number of repeats typically ranges from 1.5 to 33.5 repeats and the C-terminal repeat is usually shorter in length (e.g., about 20 amino acids) and is generally referred to as a “half-repeat.” Each repeat of the TAL effector generally features a one-repeat-to-one-base-pair correlation with different repeat types exhibiting different base-pair specificity (one repeat recognizes one base-pair on the target gene sequence). Generally, the smaller the number of repeats, the weaker the protein-DNA interactions. A number of 6.5 repeats has been shown to be sufficient to activate transcription of a reporter gene (Scholze et al., 2010).

[0803] Repeat to repeat variations occur predominantly at amino acid positions 12 and 13, which have therefore been termed “hypervariable” and which are responsible for the specificity of the interaction with the target DNA promoter sequence, as shown in Table 9 listing exemplary repeat variable diresidues (RVD) and their correspondence to nucleic acid base targets.

TABLE 9
RVDs and Nucleic Acid Base Specificity

| Target | Possible RVD Amino Acid Combinations | | | | | | | | | | | | |
|---|---|---|---|---|---|---|---|---|---|---|---|---|---|
| A | NI | NN | CI | HI | KI | | | | | | | | |
| G | NN | GN | SN | VN | LN | DN | QN | EN | HN | RH | NK | AN | FN |
| C | HD | RD | KD | ND | AD | | | | | | | | |
| T | NG | HG | VG | IG | EG | MG | YG | AA | EP | VA | QG | KG | RG |

[0804] Accordingly, it is possible to modify the repeats of a TAL effector to target specific DNA sequences. Further studies have shown that the RVD NK can target G. Target sites of TAL effectors also tend to include a T flanking the 5′ base targeted by the first repeat, but the exact mechanism of this recognition is not known. More than 113 TAL effector sequences are known to date. Non-limiting examples of TAL effectors from Xanthomonas include, Hax2, Hax3, Hax4, AvrXa7, AvrXa10 and AvrBs3.

[0805] Accordingly, the TAL effector domain of a TAL effector molecule described herein may be derived from a TAL effector from any bacterial species (e.g., Xanthomonas species such as the African strain of Xanthomonas oryzae pv. Oryzae (Yu et al. 2011), Xanthomonas campestris pv. raphani strain 756C and Xanthomonas oryzae pv. oryzicola strain BLS256 (Bogdanove et al. 2011). In some embodiments, the TAL effector domain comprises an RVD domain as well as flanking sequence(s) (sequences on the N-terminal and/or C-terminal side of the RVD domain) also from the naturally occurring TAL effector. It may comprise more or fewer repeats than the RVD of the naturally occurring TAL effector. The TAL effector molecule can be designed to target a given DNA sequence based on the above code and others known in the art. The number of TAL effector domains (e.g., repeats (monomers or modules)) and their specific sequence can beselected based on the desired DNA target sequence. For example, TAL effector domains, e.g., repeats, may be removed or added in order to suit a specific target sequence. In an embodiment, the TAL effector molecule of the present invention comprises between 6.5 and 33.5 TAL effector domains, e.g., repeats. In an embodiment, TAL effector molecule of the present invention comprises between 8 and 33.5 TAL effector domains, e.g., repeats, e.g., between 10 and 25 TAL effector domains, e.g., repeats, e.g., between 10 and 14 TAL effector domains, e.g., repeats.

[0806] In some embodiments, the TAL effector molecule comprises TAL effector domains that correspond to a perfect match to the DNA target sequence. In some embodiments, a mismatch between a repeat and a target base-pair on the DNA target sequence is permitted as along as it allows for the function of the polypeptide comprising the TAL effector molecule. In general, TALE binding is inversely correlated with the number of mismatches. In some embodiments, the TAL effector molecule of a polypeptide of the present invention comprises no more than 7 mismatches, 6 mismatches, 5 mismatches, 4 mismatches, 3 mismatches, 2 mismatches, or 1 mismatch, and optionally no mismatch, with the target DNA sequence. Without wishing to be bound by theory, in general the smaller the number of TAL effector domains in the TAL effector molecule, the smaller the number of mismatches will be tolerated and still allow for the function of the polypeptide comprising the TAL effector molecule. The binding affinity is thought to depend on the sum of matching repeat-DNA combinations. For example, TAL effector molecules having 25 TAL effector domains or more may be able to tolerate up to 7 mismatches.

[0807] In addition to the TAL effector domains, the TAL effector molecule of the present invention may comprise additional sequences derived from a naturally occurring TAL effector. The length of the C-terminal and/or N-terminal sequence(s) included on each side of the TAL effector domain portion of the TAL effector molecule can vary and be selected by one skilled in the art, for example based on the studies of Zhang et al. (2011). Zhang et al., have characterized a number of C-terminal and N-terminal truncation mutants in Hax3 derived TAL-effector based proteins and have identified key elements, which contribute to optimal binding to the target sequence and thus activation of transcription. Generally, it was found that transcriptional activity is inversely correlated with the length of N-terminus. Regarding the C-terminus, an important element for DNA binding residues within the first 68 amino acids of the Hax 3 sequence was identified. Accordingly, in some embodiments, the first 68 amino acids on the C-terminal side of the TAL effector domains of the naturally occurring TAL effector is included in the TAL effector molecule. Accordingly, in an embodiment, a TAL effector molecule comprises 1) one or more TAL effector domains derived from a naturally occurring TAL effector; 2) at least 70, 80, 90, 100, 110, 120, 130, 140, 150, 170, 180, 190, 200, 220, 230, 240, 250, 260, 270, 280 or more amino acids from the naturally occurring TAL effector on the N-terminal side of the TAL effector domains; and/or 3) at least 68, 80, 90, 100, 110, 120, 130, 140, 150, 170, 180, 190, 200, 220, 230, 240, 250, 260 or more amino acids from the naturally occurring TAL effector on the C-terminal side of the TAL effector domains.

[0808] In some embodiments, an endonuclease domain or DNA-binding domain is or comprises a Zn finger molecule. A Zn finger molecule comprises a Zn finger protein, e.g., a naturally occurring Zn finger protein or engineered Zn finger protein, or fragment thereof. Many Zn finger proteins are known to those of skill in the art and are commercially available, e.g., from Sigma-Aldrich.

[0809] In some embodiments, a Zn finger molecule comprises a non-naturally occurring Zn finger protein that is engineered to bind to a target DNA sequence of choice. See, for example, Beerli, et al. (2002) Nature Biotechnol. 20:135-141; Pabo, et al. (2001) Ann. Rev. Biochem. 70:313-340; Isalan, et al. (2001) Nature Biotechnol. 19:656-660; Segal, et al. (2001) Curr. Opin. Biotechnol. 12:632-637; Choo, et al. (2000) Curr. Opin. Struct. Biol. 10:411-416; U.S. Pat. Nos. 6,453,242; 6,534,261; 6,599,692; 6,503,717; 6,689,558; 7,030,215; 6,794,136; 7,067,317; 7,262,054; 7,070,934; 7,361,635; 7,253,273; and U.S. Patent Publication Nos. 2005/0064474; 2007/0218528; 2005/0267061, all incorporated herein by reference in their entireties.

[0810] An engineered Zn finger protein may have a novel binding specificity, compared to a naturally-occurring Zn finger protein. Engineering methods include, but are not limited to, rational design and various types of selection. Rational design includes, for example, using databases comprising triplet (or quadruplet) nucleotide sequences and individual Zn finger amino acid sequences, in which each triplet or quadruplet nucleotide sequence is associated with one or more amino acid sequences of zinc fingers which bind the particular triplet or quadruplet sequence. See, for example, U.S. Pat. Nos. 6,453,242 and 6,534,261, incorporated by reference herein in their entireties.

[0811] Exemplary selection methods, including phage display and two-hybrid systems, are disclosed in U.S. Pat. Nos. 5,789,538; 5,925,523; 6,007,988; 6,013,453; 6,410,248; 6,140,466; 6,200,759; and 6,242,568; as well as International Patent Publication Nos. WO 98/37186; WO 98/53057; WO 00/27878; and WO 01/88197 and GB 2,338,237. In addition, enhancement of binding specificity for zinc finger proteins has been described, for example, in International Patent Publication No. WO 02/077227.

[0812] In addition, as disclosed in these and other references, zinc finger domains and/or multi-fingered zinc finger proteins may be linked together using any suitable linker sequences, including for example, linkers of 5 or more amino acids in length. See, also, U.S. Pat. Nos. 6,479,626; 6,903,185; and 7,153,949 for exemplary linker sequences 6 or more amino acids in length. The proteins described herein may include any combination of suitable linkers between the individual zinc fingers of the protein. In addition, enhancement of binding specificity for zinc finger binding domains has been described, for example, in co-owned International Patent Publication No. WO 02/077227.

[0813] Zn finger proteins and methods for design and construction of fusion proteins (and polynucleotides encoding same) are known to those of skill in the art and described in detail in U.S. Pat. Nos. 6,140,0815; 789,538; 6,453,242; 6,534,261; 5,925,523; 6,007,988; 6,013,453; and 6,200,759; International Patent Publication Nos. WO 95/19431; WO 96/06166; WO 98/53057; WO 98/54311; WO 00/27878; WO 01/60970; WO 01/88197; WO 02/099084; WO 98/53058; WO 98/53059; WO 98/53060; WO 02/016536; and WO 03/016496.

[0814] In addition, as disclosed in these and other references, Zn finger proteins and/or multi-fingered Zn finger proteins may be linked together, e.g., as a fusion protein, using any suitable linker sequences, including for example, linkers of 5 or more amino acids in length. See, also, U.S. Pat. Nos. 6,479,626; 6,903,185; and 7,153,949 for exemplary linker sequences 6 or more amino acids in length. The Zn finger molecules described herein may include any combination of suitable linkers between the individual zinc finger proteins and/or multi-fingered Zn finger proteins of the Zn finger molecule.

[0815] In certain embodiments, the DNA-binding domain or endonuclease domain comprises a Zn finger molecule comprising an engineered zinc finger protein that binds (in a sequence-specific manner) to a target DNA sequence. In some embodiments, the Zn finger molecule comprises one Zn finger protein or fragment thereof. In other embodiments, the Zn finger molecule comprises a plurality of Zn finger proteins (or fragments thereof), e.g., 2, 3, 4, 5, 6 or more Zn finger proteins (and optionally no more than 12, 11, 10, 9, 8, 7, 6, 5, 4, 3, or 2 Zn finger proteins). In some embodiments, the Zn finger molecule comprises at least three Zn finger proteins. In some embodiments, the Zn finger molecule comprises four, five or six fingers. In some embodiments, the Zn finger molecule comprises 8, 9, 10, 11 or 12 fingers. In some embodiments, a Zn finger molecule comprising three Zn finger proteins recognizes a target DNA sequence comprising 9 or 10 nucleotides. In some embodiments, a Zn finger molecule comprising four Zn finger proteins recognizes a target DNA sequence comprising 12 to 14 nucleotides. In some embodiments, a Zn finger molecule comprising six Zn finger proteins recognizes a target DNA sequence comprising 18 to 21 nucleotides.

[0816] In some embodiments, a Zn finger molecule comprises a two-handed Zn finger protein. Two handed zinc finger proteins are those proteins in which two clusters of zinc finger proteins are separated by intervening amino acids so that the two zinc finger domains bind to two discontinuous target DNA sequences. An example of a two handed type of zinc finger binding protein is SIP1, where a cluster of four zinc finger proteins is located at the amino terminus of the protein and a cluster of three Zn finger proteins is located at the carboxyl terminus (see Remade, et al. (1999) EMBO Journal 18(18):5073-5084). Each cluster of zinc fingers in these proteins is able to bind to a unique target sequence and the spacing between the two target sequences can comprise many nucleotides.

### Linkers

[0817] In some embodiments, a gene modifying polypeptide may comprise a linker, e.g., a peptide linker, e.g., a linker as described in Table 1 or Table 10. In some embodiments, a gene modifying polypeptide comprises, in an N-terminal to C-terminal direction, a Cas domain (e.g., a Cas domain of Table 8), a linker of Table 10 (or a sequence having at least 70%, 80%, 85%, 90%, 95%, or 99% identity thereto), and an RT domain (e.g., an RT domain of Table 6). In some embodiments, a gene modifying polypeptide comprises a flexible linker between the endonuclease and the RT domain, e.g., a linker comprising the amino acid sequence SGGSSGGSSGSETPGTSESATPESSGGSSGGSS (SEQ ID NO: 6). In some embodiments, an RT domain of a gene modifying polypeptide may be located C-terminal to the endonuclease domain. In some embodiments, an RT domain of a gene modifying polypeptide may be located N-terminal to the endonuclease domain.

TABLE 10
Exemplary linker sequences

| Amino Acid Sequence | SEQ ID NO |
|---|---|
| GGS | |
| GGSGGS | 102 |
| GGSGGSGGS | 103 |
| GGSGGSGGSGGS | 104 |
| GGSGGSGGSGGSGGS | 105 |
| GGSGGSGGSGGSGGSGGS | 106 |
| GGGGS | 107 |
| GGGGSGGGGS | 108 |
| GGGGSGGGGSGGGGS | 109 |
| GGGGSGGGGSGGGGSGGGGS | 110 |
| GGGGSGGGGSGGGGSGGGGSGGGGS | 111 |
| GGGGSGGGGSGGGGSGGGGSGGGGSGGGGS | 112 |
| GGG | |
| GGGG | 114 |
| GGGGG | 115 |
| GGGGGG | 116 |
| GGGGGGG | 117 |
| GGGGGGGG | 118 |
| GSS | |
| GSSGSS | 120 |
| GSSGSSGSS | 121 |
| GSSGSSGSSGSS | 122 |
| GSSGSSGSSGSSGSS | 123 |
| GSSGSSGSSGSSGSSGSS | 124 |
| EAAAK | 125 |
| EAAAKEAAAK | 126 |
| EAAAKEAAAKEAAAK | 127 |
| EAAAKEAAAKEAAAKEAAAK | 128 |
| EAAAKEAAAKEAAAKEAAAKEAAAK | 129 |
| EAAAKEAAAKEAAAKEAAAKEAAAKEAAAK | 130 |
| PAP | |
| PAPAP | 132 |
| PAPAPAP | 133 |
| PAPAPAPAP | 134 |
| PAPAPAPAPAP | 135 |
| PAPAPAPAPAPAP | 136 |
| GGSGGG | 137 |
| GGGGGS | 138 |
| GGSGSS | 139 |
| GSSGGS | 140 |
| GGSEAAAK | 141 |
| EAAAKGGS | 142 |
| GGSPAP | 143 |
| PAPGGS | 144 |
| GGGGSS | 145 |
| GSSGGG | 146 |
| GGGEAAAK | 147 |
| EAAAKGGG | 148 |
| GGGPAP | 149 |
| PAPGGG | 150 |
| GSSEAAAK | 151 |
| EAAAKGSS | 152 |
| GSSPAP | 153 |
| PAPGSS | 154 |
| EAAAKPAP | 155 |
| PAPEAAAK | 156 |
| GGSGGGGSS | 157 |
| GGSGSSGGG | 158 |
| GGGGGSGSS | 159 |
| GGGGSSGGS | 160 |
| GSSGGSGGG | 161 |
| GSSGGGGGS | 162 |
| GGSGGGEAAAK | 163 |
| GGSEAAAKGGG | 164 |
| GGGGGSEAAAK | 165 |
| GGGEAAAKGGS | 166 |
| EAAAKGGSGGG | 167 |
| EAAAKGGGGGS | 168 |
| GGSGGGPAP | 169 |
| GGSPAPGGG | 170 |
| GGGGGSPAP | 171 |
| GGGPAPGGS | 172 |
| PAPGGSGGG | 173 |
| PAPGGGGGS | 174 |
| GGSGSSEAAAK | 175 |
| GGSEAAAKGSS | 176 |
| GSSGGSEAAAK | 177 |
| GSSEAAAKGGS | 178 |
| EAAAKGGSGSS | 179 |
| EAAAKGSSGGS | 180 |
| GGSGSSPAP | 181 |
| GGSPAPGSS | 182 |
| GSSGGSPAP | 183 |
| GSSPAPGGS | 184 |
| PAPGGSGSS | 185 |
| PAPGSSGGS | 186 |
| GGSEAAAKPAP | 187 |
| GGSPAPEAAAK | 188 |
| EAAAKGGSPAP | 189 |
| EAAAKPAPGGS | 190 |
| PAPGGSEAAAK | 191 |
| PAPEAAAKGGS | 192 |
| GGGGSSEAAAK | 193 |
| GGGEAAAKGSS | 194 |
| GSSGGGEAAAK | 195 |
| GSSEAAAKGGG | 196 |
| EAAAKGGGGSS | 197 |
| EAAAKGSSGGG | 198 |
| GGGGSSPAP | 199 |
| GGGPAPGSS | 200 |
| GSSGGGPAP | 201 |
| GSSPAPGGG | 202 |
| PAPGGGGSS | 203 |
| PAPGSSGGG | 204 |
| GGGEAAAKPAP | 205 |
| GGGPAPEAAAK | 206 |
| EAAAKGGGPAP | 207 |
| EAAAKPAPGGG | 208 |
| PAPGGGEAAAK | 209 |
| PAPEAAAKGGG | 210 |
| GSSEAAAKPAP | 211 |
| GSSPAPEAAAK | 212 |
| EAAAKGSSPAP | 213 |
| EAAAKPAPGSS | 214 |
| PAPGSSEAAAK | 215 |
| PAPEAAAKGSS | 216 |
| AEAAAKEAAAKEAAAKEAAAKALEAEAAAKEAA | 217 |
| AKEAAAKEAAAKA | |
| GGGGSEAAAKGGGGS | 218 |
| EAAAKGGGGSEAAAK | 219 |
| SGSETPGTSESATPES | 220 |
| GSAGSAAGSGEF | 221 |
| SGGSSGGSSGSETPGTSESATPESSGGSSGGSS | 222 |

[0818] In some embodiments, a linker of agene modifying polypeptide comprises a motif chosen from: (SGGS)ₙ(SEQ ID NO: 25), (GGGS)ₙ(SEQ ID NO: 26), (GGGGS)ₙ(SEQ ID NO: 27), (G)ₙ, (EAAAK)ₙ (SEQ ID NO: 28), (GGS)ₙ, or (XP)ₙ

### Gene Modifying Polypeptide Selection by Pooled Screening

[0819] Candidate gene modifying polypeptides may be screened to evaluate a candidate's gene editing ability. For example, an RNA gene modifying system designed for the targeted editing of a coding sequence in the human genome may be used. In certain embodiments, such a gene modifying system may be used in conjunction with a pooled screening approach.

[0820] For example, a library of gene modifying polypeptide candidates and a template guide RNA (tgRNA) may be introduced into mammalian cells to test the candidates' gene editing abilities by a pooled screening approach. In specific embodiments, a library of gene modifying polypeptide candidates is introduced into mammalian cells followed by introduction of the tgRNA into the cells.

[0821] Representative, non-limiting examples of mammalian cells that may be used in screening include HEK293T cells, U2OS cells, HeLa cells, HepG2 cells, Huh7 cells, K562 cells, or iPS cells.

[0822] A gene modifying polypeptide candidate may comprise 1) a Cas-nuclease, for example a wild-type Cas nuclease, e.g., a wild-type Cas9 nuclease, a mutant Cas nuclease, e.g., a Cas nickase, for example, a Cas9 nickase such as a Cas9 N863A nickase, or a Cas nuclease selected from Table 7 or 8, 2) a peptide linker, e.g., a sequence from Table 1 or 10, that may exhibit varying degrees of length, flexibility, hydrophobicity, and/or secondary structure; and 3) a reverse transcriptase (RT), e.g. an RT domain from Table 1 or 6. A gene modifying polypeptide candidate library comprises: a plurality of different gene modifying polypeptide candidates that differ from each other with respect to one, two or all three of the Cas nuclease, peptide linker or RT domain components, or a plurality of nucleic acid expression vectors that encode such gene modifying polypeptide candidates.

[0823] For screening of gene modifying polypeptide candidates, a two-component system may be used that comprises a gene modifying polypeptide component and a tgRNA component. A gene modifying component may comprise, for example, an expression vector, e.g., an expression plasmid or lentiviral vector, that encodes a gene modifying polypeptide candidate, for example, comprises a human codon-optimized nucleic acid that encodes a gene modifying polypeptide candidate, e.g., a Cas-linker-RT fusion as described above. In a particular embodiment, a lentiviral cassette is utilized that comprises: (i) a promoter for expression in mammalian cells, e.g., a CMV promoter; (ii) a gene modifying library candidate, e.g. a Cas-linker-RT fusion comprising a Cas nuclease of Table CC, a peptide linker of Table AA and an RT of Table BB, for example a Cas-linker-RT fusion as in Table 1; (iii) a self-cleaving polypeptide, e.g., a T2A peptide; (iv) a marker enabling selection in mammalian cells, e.g., a puromycin resistance gene; and (v) a termination signal, e.g., a poly A tail.

[0824] The tgRNA component may comprise a tgRNA or expression vector, e.g., an expression plasmid, that produces the tgRNA, for example, utilizes a U6 promoter to drive expression of the tgRNA, wherein the tgRNA is a non-coding RNA sequence that is recognized by Cas and localizes it to the genomic locus of interest, and that also templates reverse transcription of the desired edit into the genome by the RT domain.

[0825] To prepare a pool of cells expressing gene modifying polypeptide library candidates, mammalian cells, e.g., HEK293T or U2OS cells, may be transduced with pooled gene modifying polypeptide candidate expression vector preparations, e.g., lentiviral preparations, of the gene modifying candidate polypeptide library. In a particular embodiment, lentiviral plasmids are utilized, and HEK293 Lenti-X cells are seeded in 15 cm plates (˜12×10⁶ cells) prior to lentiviral plasmid transfection. In such an embodiment, lentiviral plasmid transfection may be performed using the Lentiviral Packaging Mix (Biosettia) and transfection of the plasmid DNA for the gene modifying candidate library is performed the following day using Lipofectamine 2000 and Opti-MEM media according to the manufacturer's protocol. In such an embodiment, extracellular DNA may be removed by a full media change the next day and virus-containing media may be harvested 48 hours after. Lentiviral media may be concentrated using Lenti-X Concentrator (TaKaRa Biosciences) and 5 mL lentiviral aliquots may be made and stored at −80° C. Lentiviral titering is performed by enumerating colony forming units post-selection, e.g., post Puromycin selection.

[0826] In some embodiments, a plurality of DNA molecules encoding a gene modifying polypeptide as described herein and a plurality of DNA molecules encoding a template RNA as described herein are present in a cell. In some embodiments, a plurality of DNA molecules encoding a gene modifying polypeptide as described herein and a plurality of DNA molecules encoding a template RNA as described herein are introduced into a cell. In certain embodiments, the ratio of DNA molecules encoding the gene modifying polypeptide and the DNA molecules encoding the template RNA is about 6:1, 2:1, 1:1, or 3:5. In certain embodiments, the ratio of DNA molecules encoding the gene modifying polypeptide and the DNA molecules encoding the template RNA is about 6:1 to 2:1, 2:1 to 1:1, or 1:1 to 3:5. In certain embodiments, the system comprises a plurality of DNA molecules (e.g., plasmids) encoding a gRNA and a plurality of DNA molecules (e.g., plasmids) encoding the template RNA. In certain embodiments, the ratio of DNA molecules encoding the gRNA and the DNA molecules encoding the template RNA is about 3:1, 1:1, 1:2, or 3:5. In certain embodiments, the ratio of DNA molecules encoding the gRNA and the DNA molecules encoding the template RNA is about 3:1 to 1:1, 1:1 to 1:2, or 1:2 to 3:5. In certain embodiments, a gene modifying system as described herein comprises at least about 50, 150, 300, or 500 ng of the DNA molecule encoding the template RNA.

[0827] For monitoring gene editing of a target DNA, mammalian cells, e.g., HEK293T or U2OS cells, carrying a target DNA may be utilized. In other embodiments for monitoring gene editing of a target DNA, mammalian cells, e.g., HEK293T or U2OS cells, carrying a target DNA genomic landing pad may be utilized. In particular embodiments, the target DNA genomic landing pad may comprise a gene to be edited for treatment of a disease or disorder of interest. In other particular embodiments, the target DNA is a gene sequence that expresses a protein that exhibits detectable characteristics that may be monitored to determine whether gene editing has occurred. For example, in certain embodiments, a blue fluorescence protein (BFP)— or green fluorescence protein (GFP)-expressing genomic landing pad is utilized. In certain embodiments, mammalian cells, e.g., HEK293T or U2OS cells, comprising a target DNA, e.g., a target DNA genomic landing pad, are seeded in culture plates at 500×-3000× cells per gene modifying library candidate and transduced at a 0.2-0.3 multiplicity of infection (MOI) to minimize multiple infections per cell. Puromycin (2.5 ug/mL) may be added 48 hours post infection to allow for selection of infected cells. In such an embodiment, cells may be kept under puromycin selection for at least 7 days and then scaled up for tgRNA introduction, e.g., tgRNA electroporation.

[0828] To ascertain whether gene editing occurs, mammalian cells containing a target DNA to be edited may be infected with gene modifying polypeptide library candidates then transfected with tgRNA designed for use in editing of the target DNA. Subsequently, the cells may be analyzed to determine whether editing of the target locus has occurred according to the designed outcome, or whether no editing or imperfect editing has occurred, e.g., by using cell sorting and sequence analysis.

[0829] In a particular embodiment, to ascertain whether genome editing occurs, BFP- or GFP-expressing mammalian cells, e.g., HEK293T or U2OS cells, may be infected with gene modifying library candidates and then transfected or electroporated with tgRNA plasmid or RNA, e.g., by electroporation of 250,000 cells/well with 200 ng of a tgRNA plasmid designed to convert BFP-to-GFP or GFP-to-BFP, at a cell count ensuring >250×-1000× coverage per library candidate. In such an embodiment, the genome-editing capacity of the various constructs in this assay may be assessed by sorting the cells by Fluorescence-Activated Cell Sorting (FACS) for expression of the color-converted fluorescent protein (FP) at 4-10 days post-electroporation. Cells are sorted and harvested as distinct populations of unedited cells (exhibiting original florescence protein signal), edited cells (exhibiting converted fluorescence protein signal), and imperfect edit (exhibiting no florescence protein signal) cells. A sample of unsorted cells may also be harvested as the input population to determine candidate enrichment during analysis.

[0830] To determine which gene modifying library candidates exhibit genome-editing capacity in an assay, genomic DNA (gDNA) is harvested from the sorted cell populations, and analyzed by sequencing the gene modifying library candidates in each population. Briefly, gene modifying candidates may be amplified from the genome using primers specific to the gene modifying polypeptide expression vector, e.g., the lentiviral cassette, amplified in a second round of PCR to dilute genomic DNA, and then sequenced, for example, sequenced by a next-generation sequencing platform. After quality control of sequencing reads, reads of at least about 1500 nucleotides and generally no more than about 3200 nucleotides are mapped to the gene modifying polypeptide library sequences and those containing a minimum of about an 80% match to a library sequence are considered to be successfully aligned to a given candidate for purposes of this pooled screen. In order to identify candidates capable of performing gene editing in the assay, e.g., the BFP-to-GFP or GFP-to-BFP edit, the read count of each library candidate in the edited population is compared to its read count in the initial, unsorted population.

[0831] For purposes of pooled screening, gene modifying candidates with genome-editing capacity are identified based on enrichment in the edited (converted FP) population relative to unsorted (input) cells. In some embodiments, an enrichment of at least 1.0, 1.5, 2.0, 2.5, 3.0, 4.0, 5.0, 6.0, 7.0, 8.0, 9.0, 10, 15, 20, 25, 30, 40, 50, 60, 70, 80, 90, or at least 100-fold over the input indicates potentially useful gene editing activity, e.g., at least 2-fold enrichment. In some embodiments, the enrichment is converted to a log-value by taking the log base 2 of the enrichment ratio. In some embodiments, a log 2 enrichment score of at least 0, 1, 2, 3, 4, 5, 5.5, 6.0, 6.2, 6.3, 6.4, 6.5, or at least 6.6 indicates potentially useful gene editing activity, e.g., a log 2 enrichment score of at least 1.0. In particular embodiments, enrichment values observed for gene modifying candidates may be compared to enrichment values observed under similar conditions utilizing a reference, e.g., Element ID No: 17380.

[0832] In some embodiments, multiple tgRNAs may be used to screen the gene modifying candidate library. In particular embodiments, a plurality of tgRNAs may be utilized to optimize template/Cas-linker-RT fusion pairs, e.g., for gene editing of particular target genes, for example, gene targets for the treatment of disease. In specific embodiments, a pooled approach to screening gene modifying candidates may be performed using a multiplicity of different tgRNAs in an arrayed format.

[0833] In some embodiments, multiple types of edits, e.g., insertions, substitutions, and/or deletions of different lengths, may be used to screen the gene modifying candidate library.

[0834] In some embodiments, multiple target sequences, e.g., different fluorescent proteins, may be used to screen the gene modifying candidate library. In some embodiments, multiple target sequences, e.g., different fluorescent proteins, may be used to screen the gene modifying candidate library. In some embodiments, multiple cell types, e.g., HEK293T or U2OS, may be used to screen the gene modifying candidate library. The person of ordinary skill in the art will appreciate that a given candidate may exhibit altered editing capacity or even the gain or loss of any observable or useful activity across different conditions, including tgRNA sequence (e.g., nucleotide modifications, PBS length, RT template length), target sequence, target location, type of edit, location of mutation relative to the first-strand nick of the gene modifying polypeptide, or cell type. Thus, in some embodiments, gene modifying library candidates are screened across multiple parameters, e.g., with at least two distinct tgRNAs in at least two cell types, and gene editing activity is identified by enrichment in any single condition. In other embodiments, a candidate with more robust activity across different tgRNA and cell types is identified by enrichment in at least two conditions, e.g., in all conditions screened. For clarity, candidates found to exhibit little to no enrichment under any given condition are not assumed to be inactive across all conditions and may be screened with different parameters or reconfigured at the polypeptide level, e.g., by swapping, shuffling, or evolving domains (e.g., RT domain), linkers, or other signals (e.g., NLS).

### Sequences of Exemplary Cas9-Linker-RT Fusions

[0835] In some embodiments, a gene modifying polypeptide comprises a linker sequence and an RT sequence. In some embodiments, a gene modifying polypeptide comprises a linker sequence as listed in Table 1, or an amino acid sequence having at least 75%, 80%, 85%, 90%, 95%, 96%, 97%, 98%, or 99% identity thereto. In some embodiments, a gene modifying polypeptide comprises the amino acid sequence of an RT domain as listed in Table 1, or an amino acid sequence having at least 75%, 80%, 85%, 90%, 95%, 96%, 97%, 98%, or 99% identity thereto. In some embodiments, a gene modifying polypeptide comprises a linker sequence as listed in Table 1, or an amino acid sequence having at least 75%, 80%, 85%, 90%, 95%, 96%, 97%, 98%, or 99% identity thereto; and the amino acid sequence of an RT domain as listed in Table 1, or an amino acid sequence having at least 75%, 80%, 85%, 90%, 95%, 96%, 97%, 98%, or 99% identity thereto. In some embodiments, a gene modifying polypeptide comprises: (i) a linker sequence as listed in a row of Table 1, or an amino acid sequence having at least 75%, 80%, 85%, 90%, 95%, 96%, 97%, 98%, or 99% identity thereto; and (ii) the amino acid sequence of an RT domain as listed in the same row of Table 1, or an amino acid sequence having at least 75%, 80%, 85%, 90%, 95%, 96%, 97%, 98%, or 99% identity thereto. For each RT domain named in Table 1, the corresponding amino acid sequence can be found in Table 6 herein.

### Dimerization Domains

[0836] In some embodiments, a gene modifying system as described herein comprises a DNA binding domain (DBD), e.g., comprising a Cas domain (e.g., a Cas9 domain, e.g., an nCas9 or dCas9 domain); an RNA binding domain (RBD); and a retroviral reverse transcriptase (RT) domain. In some embodiments, the DBD is attached to the RBD via binding between two dimerization domains. In some embodiments, the DBD is attached to the RT domain via binding between two dimerization domains. In some embodiments, the RT domain is attached to the RBD via binding between two dimerization domains.

[0837] In some embodiments, a pair of dimerization domains comprised in a gene modifying polypeptide or complex as described herein can be induced to dimerize by a compound (e.g., a small molecule). In some embodiments, a pair of dimerization domains comprised in a gene modifying polypeptide or complex as described herein can be induced to dimerize by exposure to light (e.g., of a specific color and/or wavelength). In some embodiments, a pair of dimerization domains comprised in a gene modifying polypeptide or complex as described herein comprise a Chain A sequence (or a sequence having at least 75%, 80%, 85%, 90%, 95%, 96%, 97%, 98%, or 99% identity thereto) and a Chain B sequence (or a sequence having at least 75%, 80%, 85%, 90%, 95%, 96%, 97%, 98%, or 99% identity thereto), as listed in a single row of Table 34. In embodiments, the pair of dimerization domains can be induced by the inducer listed in the same row of Table 34.

TABLE 34
Exemplary chemical- or light-induced dimerization domains

| | | | Exemplary | | | Exemplary |
|---|---|---|---|---|---|---|
| | chain A | | chain A | chain B | | chain B |
| inducer(s) | name | chain A sequence | source | name | chain B sequence | source |
| rapamycin/ | FKBP | GVQVETISPGDGRTFPKRGQTCVVHY | snapgene | FRB | ILWHEMWHEGLEEASRLYFGERNV | snapgene |
| rapalog | | TGMLEDGKKFDSSRDRNKPFKFMLGK | | | KGMFEVLEPLHAMMERGPQTLKET | |
| | | QEVIRGWEEGVAQMSVGQRAKLTISP | | | SFNQAYGRDLMEAQEWCRKYMKSG | |
| | | DYAYGATGHPGIIPPHATLVFDVELL | | | NVKDLTQAWDLYYHVFRRISK | |
| | | KLE (SEQ ID NO: 18261) | | | (SEQ ID NO: 18262) | |
| rapamycin/ | FKBP | GVQVETISPGDGRTFPKRGQTCVVHY | snapgene | FRB | EMWHEGLEEASRLYFGERNVKGMF | snapgene |
| rapalog | | TGMLEDGKKFDSSRDRNKPFKFMLGK | | | EVLEPLHAMMERGPQTLKETSFNQ | |
| | | QEVIRGWEEGVAQMSVGQRAKLTISP | | | AYGRDLMEAQEWCRKYMKSGNVKD | |
| | | DYAYGATGHPGIIPPHATLVFDVELL | | | LTQAWDLYYHVFRRISKQL (SEQ | |
| | | KLE (SEQ ID NO: 18261) | | | ID NO: 18263) | |
| rapamycin/ | FKBP | GVQVETISPGDGRTFPKRGQTCVVHY | snapgene | FRB* | ILWHEMWHEGLEEASRLYFGERNV | addgene |
| rapalog | | TGMLEDGKKFDSSRDRNKPFKFMLGK | | | KGMFEVLEPLHAMMERGPQTLKET | 108836 |
| | | QEVIRGWEEGVAQMSVGQRAKLTISP | | | SFNQAYGRDLMEAQEWCRKYMKSG | (pBW1308) |
| | | DYAYGATGHPGIIPPHATLVFDVELL | | | NVKDLLQAWDLYYHVFRRIS | |
| | | KLE (SEQ ID NO: 18261) | | | (SEQ ID NO: 18264) | |
| rapamycin/ | FKBP | GVQVETISPGDGRTFPKRGQTCVVHY | snapgene | FRB* | ILWHEMWHEGLEEASRLYFGERNV | snapgene |
| rapalog | | TGMLEDGKKFDSSRDRNKPFKFMLGK | | | KGMFEVLEPLHAMMERGPQTLKET | |
| | | QEVIRGWEEGVAQMSVGQRAKLTISP | | | SFNQAYGRDLMEAQEWCRKYMKSG | |
| | | DYAYGATGHPGIIPPHATLVFDVELL | | | NVKDLLQAWDLYYHVFRRISK | |
| | | KLE (SEQ ID NO: 18261) | | | (SEQ ID NO: 18265) | |
| rapamycin/ | FKBP | SRGVQVETISPGDGRTFPKRGQTCVV | addgene | FRB | ILWHEMWHEGLEEASRLYFGERNV | snapgene |
| rapalog | | HYTGMLEDGKKFDSSRDRNKPFKFML | 108837 | | KGMFEVLEPLHAMMERGPQTLKET | |
| | | GKQEVIRGWEEGVAQMSVGQRAKLTI | (pBHW1309) | | SFNQAYGRDLMEAQEWCRKYMKSG | |
| | | SPDYAYGATGHPGIIPPHATLVFDVE | | | NVKDLTQAWDLYYHVFRRISK | |
| | | LLKLE (SEQ ID NO: 18266) | | | (SEQ ID NO: 18262) | |
| rapamycin/ | FKBP | SRGVQVETISPGDGRTFPKRGQTCVV | addgene | FRB | EMWHEGLEEASRLYFGERNVKGMF | snapgene |
| rapalog | | HYTGMLEDGKKFDSSRDRNKPFKFML | 108837 | | EVLEPLHAMMERGPQTLKETSFNQ | |
| | | GKQEVIRGWEEGVAQMSVGQRAKLTI | (pBHW1309) | | AYGRDLMEAQEWCRKYMKSGNVKD | |
| | | SPDYAYGATGHPGIIPPHATLVEDVE | | | LTQAWDLYYHVFRRISKQL (SEQ | |
| | | LLKLE (SEQ ID NO: 18266) | | | ID NO: 18263) | |
| rapamycin/ | FKBP | SRGVQVETISPGDGRTFPKRGQTCVV | addgene | FRB* | ILWHEMWHEGLEEASRLYFGERNV | addgene |
| rapalog | | HYTGMLEDGKKFDSSRDRNKPFKFML | 108837 | | KGMFEVLEPLHAMMERGPQTLKET | 108836 |
| | | GKQEVIRGWEEGVAQMSVGQRAKLTI | (pBHW1309) | | SFNQAYGRDLMEAQEWCRKYMKSG | (pBW1308) |
| | | SPDYAYGATGHPGIIPPHATLVFDVE | | | NVKDLLQAWDLYYHVFRRIS | |
| | | LLKLE (SEQ ID NO: 18266) | | | (SEQ ID NO: 18264) | |
| rapamycin/ | FKBP | SRGVQVETISPGDGRTFPKRGQTCVV | addgene | FRB* | ILWHEMWHEGLEEASRLYFGERNV | snapgene |
| rapalog | | HYTGMLEDGKKFDSSRDRNKPFKFML | 108837 | | KGMFEVLEPLHAMMERGPQTLKET | |
| | | GKQEVIRGWEEGVAQMSVGQRAKLTI | (pBHW1309) | | SFNQAYGRDLMEAQEWCRKYMKSG | |
| | | SPDYAYGATGHPGIIPPHATLVFDVE | | | NVKDLLQAWDLYYHVFRRISK | |
| | | LLKLE (SEQ ID NO: 18266) | | | (SEQ ID NO: 18265) | |
| abscisic | ABI | PLYGFTSICGRRPEMEAAVSTIPRFL | addgene | PYL | APTQDEFTQLSQSIAEFHTYQLGN | addgene |
| acid | | QSSSGSMLDGRFDPQSAAHFFGVYDG | 135985 | | GRCSSLLAQRIHAPPETVWSVVRR | 135988 (TL) |
| | | HGGSQVANYCRERMHLALAEEIAKEK | (TL) | | FDRPQIYKHFIKSCNVSEDFEMRV | |
| | | PMLCDGDTWLEKWKKALFNSFLRVDS | | | GCTRDVNVISGLPANTSRERLDLL | |
| | | EIESVAPETVGSTSVVAVVFPSHIFV | | | DDDRRVTGFSITGGEHRLRNYKSV | |
| | | ANCGDSRAVLCRGKTALPLSVDHKPD | | | TTVHRFEKEEEEERIWTVVLESYV | |
| | | REDEAARIEAAGGKVIQWNGARVFGV | | | VDVPEGNSEEDTRLFADTVIRLNL | |
| | | LAMSRSIGDRYLKPSIIPDPEVTAVK | | | QKLASITEAMN (SEQ ID NO: | |
| | | RVKEDDCLILASDGVWDVMTDEEACE | | | 18268) | |
| | | MARKRILLWHKKNAVAGDASLLADER | | | | |
| | | RKEGKDPAAMSAAEYLSKLAIQRGSK | | | | |
| | | DNISVVVVDLK (SEQ ID NO: | | | | |
| | | 18267) | | | | |
| abscisic | ABI | PLYGFTSICGRRPEMEAAVSTIPRFL | addgene | PYL | APTQDEFTQLSQSIAEFHTYQLGN | addgene |
| acid | | QSSSGSMLDGRFDPQSAAHFFGVYDG | 135985 | | GRCSSLLAQRIHAPPETVWSVVRR | 108841 |
| | | HGGSQVANYCRERMHLALAEEIAKEK | (TL) | | FDRPQIYKHFIKSCNVSEDFEMRV | (pBW1313) |
| | | PMLCDGDTWLEKWKKALFNSFLRVDS | | | GCTRDVNVISGLPANTSRERLDLL | |
| | | EIESVAPETVGSTSVVAVVFPSHIFV | | | DDDRRVTGFSITGGEHRLRNYKSV | |
| | | ANCGDSRAVLCRGKTALPLSVDHKPD | | | TTVHRFEKEEEEERIWTVVLESYV | |
| | | REDEAARIEAAGGKVIQWNGARVFGV | | | VDVPEGNSEEDTRLFADTVIRLNL | |
| | | LAMSRSIGDRYLKPSIIPDPEVTAVK | | | QKLASITEAMNYPYDVPDYA | |
| | | RVKEDDCLILASDGVWDVMTDEEACE | | | (SEQ ID NO: 18269) | |
| | | MARKRILLWHKKNAVAGDASLLADER | | | | |
| | | RKEGKDPAAMSAAEYLSKLAIQRGSK | | | | |
| | | DNISVVVVDLK (SEQ ID NO: | | | | |
| | | 18267) | | | | |
| abscisic | ABI | PLYGFTSICGRRPEMEDAVSTIPRFL | addgene | PYL | APTQDEFTQLSQSIAEFHTYQLGN | addgene |
| acid | | QSSSGSMLDGRFDPQSAAHFFGVYDG | 108839 | | GRCSSLLAQRIHAPPETVWSVVRR | 135988 (TL) |
| | | HGGSQVANYCRERMHLALAEEIAKEK | (pBW1311) | | FDRPQIYKHFIKSCNVSEDFEMRV | |
| | | PMLCDGDTWLEKWKKALFNSFLRVDS | | | GCTRDVNVISGLPANTSRERLDLL | |
| | | EIGSVAPETVGSTSVVAVVFPSHIFV | | | DDDRRVTGFSITGGEHRLRNYKSV | |
| | | ANCGDSRAVLCRGKTALPLSVDHKPD | | | TTVHRFEKEEEEERIWTVVLESYV | |
| | | REDEAARIEAAGGKVIQWNGARVFGV | | | VDVPEGNSEEDTRLFADTVIRLNL | |
| | | LAMSRSIGDRYLKPSIIPDPEVTAVK | | | QKLASITEAMN (SEQ ID NO: | |
| | | RVKEDDCLILASDGVWDVMTDEEACE | | | 18268) | |
| | | MARKRILLWHKKNAVAGDASLLADER | | | | |
| | | RKEGKDPAAMSAAEYLSKLAIQRGSK | | | | |
| | | DNISVVVVDLK (SEQ ID NO: | | | | |
| | | 18270) | | | | |
| abscisic | ABI | PLYGFTSICGRRPEMEDAVSTIPRFL | addgene | PYL | APTQDEFTQLSQSIAEFHTYQLGN | addgene |
| acid | | QSSSGSMLDGRFDPQSAAHFFGVYDG | 108839 | | GRCSSLLAQRIHAPPETVWSVVRR | 108841 |
| | | HGGSQVANYCRERMHLALAEEIAKEK | (pBW1311) | | FDRPQIYKHFIKSCNVSEDFEMRV | (pBW1313) |
| | | PMLCDGDTWLEKWKKALFNSFLRVDS | | | GCTRDVNVISGLPANTSRERLDLL | |
| | | EIGSVAPETVGSTSVVAVVFPSHIFV | | | DDDRRVTGFSITGGEHRLRNYKSV | |
| | | ANCGDSRAVLCRGKTALPLSVDHKPD | | | TTVHRFEKEEEEERIWTVVLESYV | |
| | | REDEAARIEAAGGKVIQWNGARVFGV | | | VDVPEGNSEEDTRLFADTVIRLNL | |
| | | LAMSRSIGDRYLKPSIIPDPEVTAVK | | | QKLASITEAMNYPYDVPDYA | |
| | | RVKEDDCLILASDGVWDVMTDEEACE | | | (SEQ ID NO: 18269) | |
| | | MARKRILLWHKKNAVAGDASLLADER | | | | |
| | | RKEGKDPAAMSAAEYLSKLAIQRGSK | | | | |
| | | DNISVVVVDLK (SEQ ID NO: | | | | |
| | | 18270) | | | | |
| gibberellin/ | GAI | KRDHHHHHHQDKKTMMMNEEDDGNGM | addgene | GID1 | AASDEVNLIESRTVVPLNTWVLIS | addgene |
| GA3-AM | | DELLAVLGYKVRSSEMADVAQKLEQL | 108845 | | NFKVAYNILRRPDGTFNRHLAEYL | 108843 |
| (gibberellic | | EVMMSNVQEDDLSQLATETVHYNPAE | (pBW2067) | | DRKVTANANPVDGVFSFDVLIDRR | (pBW2065) |
| ester) | | LYTWLDSMLTDLN (SEQ ID NO: | | | INLLSRVYRPAYADQEQPPSILDL | |
| | | 18271) | | | EKPVDGDIVPVILFFHGGSFAHSS | |
| | | | | | ANSAIYDTLCRRLVGLCKCVVVSV | |
| | | | | | NYRRAPENPYPCAYDDGWIALNWV | |
| | | | | | NSRSWLKSKKDSKVHIFLAGDSSG | |
| | | | | | GNIAHNVALRAGESGIDVLGNILL | |
| | | | | | NPMFGGNERTESEKSLDGKYFVTV | |
| | | | | | RDRDWYWKAFLPEGEDREHPACNP | |
| | | | | | FSPRGKSLEGVSFPKSLVVVAGLD | |
| | | | | | LIRDWQLAYAEGLKKAGQEVKLMH | |
| | | | | | LEKATVGFYLLPNNNHFHNVMDEI | |
| | | | | | SAFVNAEC (SEQ ID NO: | |
| | | | | | 18272) | |
| blue light | CRY2 | KMDKKTIVWFRRDLRIEDNPALAAAA | addgene | CIBN | NGAIGGDLLLNFPDMSVLERQRAH | addgene |
| | | HEGSVFPVFIWCPEEEGQFYPGRASR | 135989 | | LKYLNPTFDSPLAGFFADSSMITG | 135986 (TL) |
| | | WWMKQSLAHLSQSLKALGSDLTLIKT | (TL) | | GEMDSYLSTAGLNLPMMYGETTVE | |
| | | HNTISAILDCIRVTGATKVVFNHLYD | | | GDSRLSISPETTLGTGNFKAAKFD | |
| | | PVSLVRDHTVKEKLVERGISVQSYNG | | | TETKDCNEAAKKMTMNRDDLVEEG | |
| | | DLLYEPWEIYCEKGKPFTSFNSYWKK | | | EEEKSKITEQNNGSTKSIKKMKHK | |
| | | CLDMSIESVMLPPPWRLMPITAAAEA | | | AKKEENNFSNDSSKVTKELEKTDY | |
| | | IWACSIEELGLENEAEKPSNALLTRA | | | I (SEQ ID NO: 18274) | |
| | | WSPGWSNADKLLNEFIEKQLIDYAKN | | | | |
| | | SKKVVGNSTSLLSPYLHFGEISVRHV | | | | |
| | | FQCARMKQIIWARDKNSEGEESADLF | | | | |
| | | LRGIGLREYSRYICFNFPFTHEQSLL | | | | |
| | | SHLRFFPWDADVDKFKAWRQGRTGYP | | | | |
| | | LVDAGMRELWATGWMHNRIRVIVSSF | | | | |
| | | AVKFLLLPWKWGMKYFWDTLLDADLE | | | | |
| | | CDILGWQYISGSIPDGHELDRLDNPA | | | | |
| | | LQGAKYDPEGEYIRQWLPELARLPTE | | | | |
| | | WIHHPWDAPLTVLKASGVELGTNYAK | | | | |
| | | PIVDIDTARELLAKAISRTREAQIMI | | | | |
| | | GAA (SEQ ID NO: 18273) | | | | |
| blue light | CRY2 | KMDKKTIVWFRRDLRIEDNPALAAAA | addgene | CIBN | NGAIGGDLLLNFPDMSVLERQRAH | snapgene |
| | | HEGSVFPVFIWCPEEEGQFYPGRASR | 135989 | | LKYLNPTFDSPLAGFFADSSMITG | |
| | | WWMKQSLAHLSQSLKALGSDLTLIKT | (TL) | | GEMDSYLSTAGLNLPMMYGETTVE | |
| | | HNTISAILDCIRVTGATKVVFNHLYD | | | GDSRLSISPETTLGTGNFKKRKFD | |
| | | PVSLVRDHTVKEKLVERGISVQSYNG | | | TETKDCNEKKKKMTMNRDDLVEEG | |
| | | DLLYEPWEIYCEKGKPFTSFNSYWKK | | | EEEKSKITEQNNGSTKSIKKMKHK | |
| | | CLDMSIESVMLPPPWRLMPITAAAEA | | | AKKEENNFSNDSSKVTKELEKTDY | |
| | | IWACSIEELGLENEAEKPSNALLTRA | | | I (SEQ ID NO: 18275) | |
| | | WSPGWSNADKLLNEFIEKQLIDYAKN | | | | |
| | | SKKVVGNSTSLLSPYLHFGEISVRHV | | | | |
| | | FQCARMKQIIWARDKNSEGEESADLF | | | | |
| | | LRGIGLREYSRYICFNFPFTHEQSLL | | | | |
| | | SHLRFFPWDADVDKFKAWRQGRTGYP | | | | |
| | | LVDAGMRELWATGWMHNRIRVIVSSF | | | | |
| | | AVKFLLLPWKWGMKYFWDTLLDADLE | | | | |
| | | CDILGWQYISGSIPDGHELDRLDNPA | | | | |
| | | LQGAKYDPEGEYIRQWLPELARLPTE | | | | |
| | | WIHHPWDAPLTVLKASGVELGTNYAK | | | | |
| | | PIVDIDTARELLAKAISRTREAQIMI | | | | |
| | | GAA (SEQ ID NO: 18273) | | | | |
| blue light | pMag | HTLYAPGGYDIMGYLRQIRNRPNPQV | snapgene, | nMagHigh1 | HTLYAPGGYDIMGYLDQIGNRPNP | |
| | | ELGPVDTSCALILCDLKQKDTPIVYA | addgene | | QVELGPVDTSCALILCDLKQKDTP | |
| | | SEAFLYMTGYSNAEVLGRNCRFLQSP | 108848 | | IVYASEAFLYMTGYSNAEVLGRNC | |
| | | DGMVKPKSTRKYVDSNTINTMRKAID | (pBW2655) | | RFLQSPDGMVKPKSTRKYVDSNTI | |
| | | RNAEVQVEVVNFKKNGQRFVNFLTMI | | | NTIRKAIDRNAEVQVEVVNFKKNG | |
| | | PVRDETGEYRYSMGFQCETE (SEQ | | | QRFVNFLTIIPVRDETGEYRYSMG | |
| | | ID NO: 18276) | | | FQCETE (SEQ ID NO: | |
| | | | | | 18277) | |
| blue light | pMag | HTLYAPGGYDIMGYLRQIRNRPNPQV | snapgene, | nMag | HTLYAPGGYDIMGYLDQIGNRPNP | |
| | | ELGPVDTSCALILCDLKQKDTPIVYA | addgene | | QVELGPVDTSCALILCDLKQKDTP | |
| | | SEAFLYMTGYSNAEVLGRNCRFLQSP | 108848 | | IVYASEAFLYMTGYSNAEVLGRNC | |
| | | DGMVKPKSTRKYVDSNTINTMRKAID | (pBW2655) | | RFLQSPDGMVKPKSTRKYVDSNTI | |
| | | RNAEVQVEVVNFKKNGQRFVNFLTMI | | | NTMRKAIDRNAEVQVEVVNFKKNG | |
| | | PVRDETGEYRYSMGFQCETE (SEQ | | | QRFVNFLTMIPVRDETGEYRYSMG | |
| | | ID NO: 18276) | | | FQCETE (SEQ ID NO: | |
| | | | | | 18278) | |
| blue light | pMagFast2 | HTLYAPGGYDIMGYLRQIRNRPNPQV | | nMagHigh1 | HTLYAPGGYDIMGYLDQIGNRPNP | |
| | | ELGPVDTSCALVLCDLKQKDTPVVYA | | | QVELGPVDTSCALILCDLKQKDTP | |
| | | SEAFLYMTGYSNAEVLGRNCRFLQSP | | | IVYASEAFLYMTGYSNAEVLGRNC | |
| | | DGMVKPKSTRKYVDSNTINTMRKAID | | | RFLQSPDGMVKPKSTRKYVDSNTI | |
| | | RNAEVQVEVVNFKKNGQRFVNFLTMI | | | NTIRKAIDRNAEVQVEVVNFKKNG | |
| | | PVRDETGEYRYSMGFQCETE (SEQ | | | QRFVNFLTIIPVRDETGEYRYSMG | |
| | | ID NO: 18279) | | | FQCETE (SEQ ID NO: | |
| | | | | | 18277) | |
| blue light | pMagFast2 | HTLYAPGGYDIMGYLRQIRNRPNPQV | | nMag | HTLYAPGGYDIMGYLDQIGNRPNP | |
| | | ELGPVDTSCALVLCDLKQKDTPVVYA | | | QVELGPVDTSCALILCDLKQKDTP | |
| | | SEAFLYMTGYSNAEVLGRNCRFLQSP | | | IVYASEAFLYMTGYSNAEVLGRNC | |
| | | DGMVKPKSTRKYVDSNTINTMRKAID | | | RFLQSPDGMVKPKSTRKYVDSNTI | |
| | | RNAEVQVEVVNFKKNGQRFVNFLTMI | | | NTMRKAIDRNAEVQVEVVNFKKNG | |
| | | PVRDETGEYRYSMGFQCETE (SEQ | | | QRFVNFLTMIPVRDETGEYRYSMG | |
| | | ID NO: 18279) | | | FQCETE (SEQ ID NO: | |
| | | | | | 18278) | |
| red light | PhyB | VSGVGGSGGGRGGGRGGEEEPSSSHT | pBW2682 | PIF6 | MFLPTDYCCRLSDQEYMELVFENG | pBW2684 |
| | | PNNRRGGEQAQSSGTKSLRPRSNTES | | | QILAKGQRSNVSLHNQRTKSIMDL | |
| | | MSKAIQQYTVDARLHAVFEQSGESGK | | | YEAEYNEDFMKSIIHGGGGAITNL | |
| | | SFDYSQSLKTTTYGSSVPEQQITAYL | | | GDTQVVPQSHVAAAHETNMLESNK | |
| | | SRIQRGGYIQPFGCMIAVDESSFRII | | | HVD (SEQ ID NO: 18281) | |
| | | GYSENAREMLGIMPQSVPTLEKPEIL | | | | |
| | | AMGTDVRSLFTSSSSILLERAFVARE | | | | |
| | | ITLLNPVWIHSKNTGKPFYAILHRID | | | | |
| | | VGVVIDLEPARTEDPALSIAGAVQSQ | | | | |
| | | KLAVRAISQLQALPGGDIKLLCDTVV | | | | |
| | | ESVRDLTGYDRVMVYKFHEDEHGEVV | | | | |
| | | AESKRDDLEPYIGLHYPATDIPQASR | | | | |
| | | FLFKQNRVRMIVDCNATPVLVVQDDR | | | | |
| | | LTQSMCLVGSTLRAPHGCHSQYMANM | | | | |
| | | GSIASLAMAVIINGNEDDGSNVASGR | | | | |
| | | SSMRLWGLVVCHHTSSRCIPFPLRYA | | | | |
| | | CEFLMQAFGLQLNMELQLALQMSEKR | | | | |
| | | VLRTQTLLCDMLLRDSPAGIVTQSPS | | | | |
| | | IMDLVKCDGAAFLYHGKYYPLGVAPS | | | | |
| | | EVQIKDVVEWLLANHADSTGLSTDSL | | | | |
| | | GDAGYPGAAALGDAVCGMAVAYITKR | | | | |
| | | DFLFWFRSHTAKEIKWGGAKHHPEDK | | | | |
| | | DDGQRMHPRSSFQAFLEVVKSRSQPW | | | | |
| | | ETAEMDAIHSLQLILRDSFKESEAAM | | | | |
| | | NSKVVDGVVQPCRDMAGEQGIDELGA | | | | |
| | | VAREMVRLIETATVPIFAVDAGGCIN | | | | |
| | | GWNAKIAELTGLSVEEAMGKSLVSDL | | | | |
| | | IYKENEATVNKLLSRALRGDEEKNVE | | | | |
| | | VKLKTFSPELQGKAVFVVVNACSSKD | | | | |
| | | YLNNIVGVCFVGQDVTSQKIVMDKFI | | | | |
| | | NIQGDYKAIVHSPNPLIPPIFAADEN | | | | |
| | | TCCLEWNMAMEKLTGWSRSEVIGKMI | | | | |
| | | VGEVFGSCCMLKGPDALTKFMIVLHN | | | | |
| | | AIGGQDTDKFPFPFFDRNGKFVQALL | | | | |
| | | TANKRVSLEGKVIGAFCFLQIPS | | | | |
| | | (SEQ ID NO: 18280) | | | | |
| red light | PhyB | VSGVGGSGGGRGGGRGGEEEPSSSHT | pBW2682 | PIF6 | MFLPTDYCCRLSDQEYMELVFENG | pBW2684 |
| | | PNNRRGGEQAQSSGTKSLRPRSNTES | | | QILAKGQRSNVSLINQRTKSIMDL | |
| | | MSKAIQQYTVDARLHAVFEQSGESGK | | | YEAEYNEDFMKSIIHGGGGAITNL | |
| | | SFDYSQSLKTTTYGSSVPEQQITAYL | | | GDTQVVPQSHVAAAHETNMLESNK | |
| | | SRIQRGGYIQPFGCMIAVDESSFRII | | | HVD (SEQ ID NO: 18281) | |
| | | GYSENAREMLGIMPQSVPTLEKPEIL | | | | |
| | | AMGTDVRSLFTSSSSILLERAFVARE | | | | |
| | | ITLLNPVWIHSKNTGKPFYAILHRID | | | | |
| | | VGVVIDLEPARTEDPALSIAGAVQSQ | | | | |
| | | KLAVRAISQLQALPGGDIKLLCDTVV | | | | |
| | | ESVRDLTGYDRVMVYKFHEDEHGEVV | | | | |
| | | AESKRDDLEPYIGLHYPATDIPQASR | | | | |
| | | FLFKQNRVRMIVDCNATPVLVVQDDR | | | | |
| | | LTQSMCLVGSTLRAPHGCHSQYMANM | | | | |
| | | GSIASLAMAVIINGNEDDGSNVASGR | | | | |
| | | SSMRLWGLVVCHHTSSRCIPFPLRYA | | | | |
| | | CEFLMQAFGLQLNMELQLALQMSEKR | | | | |
| | | VLRTQTLLCDMLLRDSPAGIVTQSPS | | | | |
| | | IMDLVKCDGAAFLYHGKYYPLGVAPS | | | | |
| | | EVQIKDVVEWLLANHADSTGLSTDSL | | | | |
| | | GDAGYPGAAALGDAVCGMAVAYITKR | | | | |
| | | DFLFWFRSHTAKEIKWGGAKHHPEDK | | | | |
| | | DDGQRMHPRSSFQAFLEVVKSRSQPW | | | | |
| | | ETAEMDAIHSLQLILRDSFKESEAAM | | | | |
| | | NSKVVDGVVQPCRDMAGEQGIDELGA | | | | |
| | | VAREMVRLIETATVPIFAVDAGGCIN | | | | |
| | | GWNAKIAELTGLSVEEAMGKSLVSDL | | | | |
| | | IYKENEATVNKLLSRALRGDEEKNVE | | | | |
| | | VKLKTFSPELQGKAVFVVVNACSSKD | | | | |
| | | YLNNIVGVCFVGQDVTSQKIVMDKFI | | | | |
| | | NIQGDYKAIVHSPNPLIPPIFAADEN | | | | |
| | | TCCLEWNMAMEKLTGWSRSEVIGKMI | | | | |
| | | VGEVFGSCCMLKGPDALTKFMIVLHN | | | | |
| | | AIGGQDTDKFPFPFFDRNGKFVQALL | | | | |
| | | TANKRVSLEGKVIGAFCFLQIPS | | | | |
| | | (SEQ ID NO: 18280) | | | | |
| red light | PhyBNT | VSGVGGSGGGRGGGRGGEEEPSSSHT | pBW2682 | PIF6 | MFLPTDYCCRLSDQEYMELVFENG | pBW2684 |
| | | PNNRRGGEQAQSSGTKSLRPRSNTES | | | QILAKGQRSNVSLHNQRTKSIMDL | |
| | | MSKAIQQYTVDARLHAVFEQSGESGK | | | YEAEYNEDFMKSIIHGGGGAITNL | |
| | | SFDYSQSLKTTTYGSSVPEQQITAYL | | | GDTQVVPQSHVAAAHETNMLESNK | |
| | | SRIQRGGYIQPFGCMIAVDESSFRII | | | HVD (SEQ ID NO: 18281) | |
| | | GYSENAREMLGIMPQSVPTLEKPEIL | | | | |
| | | AMGTDVRSLFTSSSSILLERAFVARE | | | | |
| | | ITLLNPVWIHSKNTGKPFYAILHRID | | | | |
| | | VGVVIDLEPARTEDPALSIAGAVQSQ | | | | |
| | | KLAVRAISQLQALPGGDIKLLCDTVV | | | | |
| | | ESVRDLTGYDRVMVYKFHEDEHGEVV | | | | |
| | | AESKRDDLEPYIGLHYPATDIPQASR | | | | |
| | | FLFKQNRVRMIVDCNATPVLVVQDDR | | | | |
| | | LTQSMCLVGSTLRAPHGCHSQYMANM | | | | |
| | | GSIASLAMAVIINGNEDDGSNVASGR | | | | |
| | | SSMRLWGLVVCHHTSSRCIPFPLRYA | | | | |
| | | CEFLMQAFGLQLNMELQLALQMSEKR | | | | |
| | | VLRTQTLLCDMLLRDSPAGIVTQSPS | | | | |
| | | IMDLVKCDGAAFLYHGKYYPLGVAPS | | | | |
| | | EVQIKDVVEWLLANHADSTGLSTDSL | | | | |
| | | GDAGYPGAAALGDAVCGMAVAYITKR | | | | |
| | | DFLFWFRSHTAKEIKWGGAKHHPEDK | | | | |
| | | DDGQRMHPRSSFQAFLEVVKSRSQPW | | | | |
| | | ETAEMDAIHSLQLILRDSFKES | | | | |
| | | (SEQ ID NO: 18282) | | | | |
| red light | PhyBNT | VSGVGGSGGGRGGGRGGEEEPSSSHT | pBW2682 | PIF6 | MFLPTDYCCRLSDQEYMELVFENG | pBW2684 |
| | | PNNRRGGEQAQSSGTKSLRPRSNTES | | | QILAKGQRSNVSLHNQRTKSIMDL | |
| | | MSKAIQQYTVDARLHAVFEQSGESGK | | | YEAEYNEDFMKSIIHGGGGAITNL | |
| | | SFDYSQSLKTTTYGSSVPEQQITAYL | | | GDTQVVPQSHVAAAHETNMLESNK | |
| | | SRIQRGGYIQPFGCMIAVDESSFRII | | | HVD (SEQ ID NO: 18281) | |
| | | GYSENAREMLGIMPQSVPTLEKPEIL | | | | |
| | | AMGTDVRSLFTSSSSILLERAFVARE | | | | |
| | | ITLLNPVWIHSKNTGKPFYAILHRID | | | | |
| | | VGVVIDLEPARTEDPALSIAGAVQSQ | | | | |
| | | KLAVRAISQLQALPGGDIKLLCDTVV | | | | |
| | | ESVRDLTGYDRVMVYKFHEDEHGEVV | | | | |
| | | AESKRDDLEPYIGLHYPATDIPQASR | | | | |
| | | FLFKQNRVRMIVDCNATPVLVVQDDR | | | | |
| | | LTQSMCLVGSTLRAPHGCHSQYMANM | | | | |
| | | GSIASLAMAVIINGNEDDGSNVASGR | | | | |
| | | SSMRLWGLVVCHHTSSRCIPFPLRYA | | | | |
| | | CEFLMQAFGLQLNMELQLALQMSEKR | | | | |
| | | VLRTQTLLCDMLLRDSPAGIVTQSPS | | | | |
| | | IMDLVKCDGAAFLYHGKYYPLGVAPS | | | | |
| | | EVQIKDVVEWLLANHADSTGLSTDSL | | | | |
| | | GDAGYPGAAALGDAVCGMAVAYITKR | | | | |
| | | DFLFWFRSHTAKEIKWGGAKHHPEDK | | | | |
| | | DDGQRMHPRSSFQAFLEVVKSRSQPW | | | | |
| | | ETAEMDAIHSLQLILRDSFKES | | | | |
| | | (SEQ ID NO: 18282) | | | | |
| near | PpsR2 | ASKSVHADITLLLDMEGVIREATLSP | pBW2780 | BphP1 | VAGHASGSPAFGTADLSNCEREEI | pBW2779 |
| infrared | | TMAAESVDGWLGRRWSDIAGAEGGDK | | | HLAGSIQPHGALLVVSEPDHRIIQ | |
| light | | VRRMVEDARRSGISAFRQINQPFPSG | | | ASANAAEFLNLGSVLGVPLAEIDG | |
| | | VEIPIEFTTMLLGDRTGMIAVGKNMQ | | | DLLIKILPHLDPTAEGMPVAVRCR | |
| | | AVTELHSRLIAAQQAMERDYWRLREL | | | IGNPSTEYDGLMHRPPEGGLIIEL | |
| | | ETRYRLVFDAAADAVMIVSAGDMRIV | | | ERAGPPIDLSGTLAPALERIRTAG | |
| | | EANRAAVNAISRVERGNDDLAGRDFL | | | SLRALCDDTALLFQQCTGYDRVMV | |
| | | AEVAAADRDAVRDMLAQVRQRGTALS | | | YRFDEQGHGEVFSERHVPGLESYF | |
| | | VLVHLGRYDRAWMLRGSLMSSERRQV | | | GNRYPSSDIPQMARRLYERQRVRV | |
| | | FLLHFTPVTTTPAIDDVDDDAVLRGL | | | LVDVSYQPVPLEPRLSPLTGRDLD | |
| | | IDRIPDGFVALDSEGVVRHANQAFLD | | | MSGCFLRSMSPIHLQYLKNMGVRA | |
| | | LVQIGSKPAAVGRSLGVWMGRPGADL | | | TLVVSLVVGGKLWGLVACHHYLPR | |
| | | SSLLTLLRRYKTVRLFQTTIRGELGT | | | FIHFELRAICELLAEAIATRITAL | |
| | | ETEVEVSAVDGEDDQYIGVLMRNVAR | | | ESFAQSQSELFVQRLEQRMIEAIT | |
| | | RLDAADDHDALRQALGPISKQLGRSS | | | REGDWRAAIFDTSQSILQPLHADG | |
| | | LRKLVKNAVSIVEQHYVKEALLRSKG | | | CALVYEDQIRTIGDVPSTQDVREI | |
| | | NRTATAELLGLSRQSLYAKLNSYGFD | | | AGWLDRQPRAAVTSTASLGLDVPE | |
| | | DKGVVASAADGAEGASDDAED (SEQ | | | LAHLTRMASGVVAAPISDHRGEFL | |
| | | ID NO: 18283) | | | MWFRPERVHTVTWGGDPKKPFTMG | |
| | | | | | DTPADLSPRRSFAKWHQVVEGTSD | |
| | | | | | PWTAADLAAARTIGQTVADIVLQF | |
| | | | | | RAVRTLIAREQYEQFSSQVHASMQ | |
| | | | | | PVLITDAEGRILLMNDSFRDMLPA | |
| | | | | | GSPSAVHLDDLAGFFVESNDFLRN | |
| | | | | | VAELIDHGRGWRGEVLLRGAGNRP | |
| | | | | | LPLAVRADPVTRTEDQSLGFVLIF | |
| | | | | | SDATDRRTADAARTRFQEGILASA | |
| | | | | | RPGVRLDSKSDLLHEKLLSALVEN | |
| | | | | | AQLAALEITYGVETGRIAELLEGV | |
| | | | | | RQSMLRTAEVLGHLVQHAARTAGS | |
| | | | | | DSSSNGSQNKK (SEQ ID NO: | |
| | | | | | 18284) | |

[0838] In some embodiments, a pair of dimerization domains comprised in a gene modifying polypeptide or complex as described herein comprise an antibody, or a functional fragment thereof, and a peptide recognized by the antibody or fragment thereof. In some embodiments, a pair of dimerization domains comprised in a gene modifying polypeptide or complex as described herein comprise a Chain A sequence (or a sequence having at least 75%, 80%, 85%, 90%, 95%, 96%, 97%, 98%, or 99% identity thereto) and a Chain B sequence (or a sequence having at least 75%, 80%, 85%, 90%, 95%, 96%, 97%, 98%, or 99% identity thereto), as listed in a single row of Table 35.

TABLE 35
Exemplary antibody-peptide dimerization domains

| | | | Ex- | | | Ex- |
|---|---|---|---|---|---|---|
| | | | emplary | | | emplary |
| | chain A | chain A | chain A | chain B | | chain B |
| system | name | sequence | source | name | chain B sequence | source |
| SunTag | GCN4_v4 | EELLSKN | snapgene | GCN4_ | GPDIVMTQSPSSLSASVGDRVTITCRSSTGAVTTSN | addgene |
| | | YHLENEV | | scFv | YASWVQEKPGKLFKGLIGGTNNRAPGVPSRFSGSLI | 60904 |
| | | ARLKK | | | GDKATLTISSLQPEDFATYFCALWYSNHWVFGQGTK | |
| | | (SEQ ID | | | VELKRGGGGSGGGGSGGGGSSGGGSEVKLLESGGGL | |
| | | NO: | | | VQPGGSLKLSCAVSGFSLTDYGVNWVRQAPGRGLEW | |
| | | 18285) | | | IGVIWGDGITDYNSALKDRFIISKDNGKNTVYLQMS | |
| | | | | | KVRSDDTALYYCVTGLFDYWGQGTLVTVSS (SEQ | |
| | | | | | ID NO: 18286) | |
| SunTag | GCN4_v4 | EELLSKN | snapgene | GCN4_ | GPDIVMTQSPSSLSASVGDRVTITCRSSTGAVTTSN | addgene |
| | | YHLENEV | | scFv | YASWVQEKPGKLFKGLIGGTNNRAPGVPSRFSGSLI | 60904 |
| | | ARLKK | | | GDKATLTISSLQPEDFATYFCALWYSNHWVFGQGTK | |
| | | (SEQ ID | | | VELKRGGGGSGGGGSGGGGSSGGGSEVKLLESGGGL | |
| | | NO: | | | VQPGGSLKLSCAVSGFSLTDYGVNWVRQAPGRGLEW | |
| | | 18285) | | | IGVIWGDGITDYNSALKDRFIISKDNGKNTVYLQMS | |
| | | | | | KVRSDDTALYYCVTGLFDYWGQGTLVTVSS (SEQ | |
| | | | | | ID NO: 18286) | |
| SunTag | GCN4_v1 | LLPKNYH | snapgene | GCN4 | GPDIVMTQSPSSLSASVGDRVTITCRSSTGAVTTSN | addgene |
| | | LENEVAR | | scFv | YASWVQEKPGKLFKGLIGGTNNRAPGVPSRFSGSLI | 60904 |
| | | LKKLVGE | | | GDKATLTISSLQPEDFATYFCALWYSNHWVFGQGTK | |
| | | R (SEQ | | | VELKRGGGGSGGGGSGGGGSSGGGSEVKLLESGGGL | |
| | | ID NO: | | | VQPGGSLKLSCAVSGFSLTDYGVNWVRQAPGRGLEW | |
| | | 18287) | | | IGVIWGDGITDYNSALKDRFIISKDNGKNTVYLQMS | |
| | | | | | KVRSDDTALYYCVTGLFDYWGQGTLVTVSS (SEQ | |
| | | | | | ID NO: 18286) | |
| SunTag | GCN4_v1 | LLPKNYH | snapgene | GCN4 | GPDIVMTQSPSSLSASVGDRVTITCRSSTGAVTTSN | addgene |
| | | LENEVAR | | scFv | YASWVQEKPGKLFKGLIGGTNNRAPGVPSRFSGSLI | 60904 |
| | | LKKLVGE | | | GDKATLTISSLQPEDFATYFCALWYSNHWVFGQGTK | |
| | | R (SEQ | | | VELKRGGGGSGGGGSGGGGSSGGGSEVKLLESGGGL | |
| | | ID NO: | | | VQPGGSLKLSCAVSGFSLTDYGVNWVRQAPGRGLEW | |
| | | 18287) | | | IGVIWGDGITDYNSALKDRFIISKDNGKNTVYLQMS | |
| | | | | | KVRSDDTALYYCVTGLFDYWGQGTLVTVSS (SEQ | |
| | | | | | ID NO: 18286) | |
| Moon- | gp41_ | KNEQELL | addgene | moontag | EVQLVESGGGLVQPGGSLRLSCAASGSISSVDVMSW | addgene |
| Tag | peptide | ELDKWAS | 128605 | nanobody | YRQAPGKQRELVAFITDRGRTNYKVSVKGRFTISRD | 128602 |
| | | L (SEQ | | | NSKNMVYLQMNSLKPEDTADYLCRAESRTSWSSPSP | |
| | | ID NO: | | | LDVWGRGTQVTVSS (SEQ ID NO: 18289) | |
| | | 18288) | | | | |

[0839] In some embodiments, a dimerization domain comprised in a gene modifying polypeptide or complex as described herein comprises a coiled-coil dimerization domain. In some embodiments, a dimerization domain comprised in a gene modifying polypeptide or complex as described herein comprises a sequence as listed in a single row of Table 36, or a sequence having at least 75%, 80%, 85%, 90%, 95%, 96%, 97%, 98%, or 99% identity thereto. In some embodiments, a pair of dimerization domains comprised in a gene modifying polypeptide or complex as described herein comprise copies of the same coiled-coil dimerization domain (or coiled-coil dimerization domains having at least 90%, 95%, 96%, 97%, 98%, or 99% identity relative to each other).

TABLE 36
Exemplary coiled coil dimerization domains

| Name | Sequence |
|---|---|
| P1 | SPEDEIQALEEENAQLEQENAALEEEIAQLEYG (SEQ ID NO: 18290) |
| P2 | SPEDKIAQLKEKNAALKEKNQQLKEKIQALKYG (SEQ ID NO: 18291) |
| P3 | SPEDEIQQLEEEIAQLEQKNAALKEKNQALKYG (SEQ ID NO: 18292) |
| P4 | SPEDKIAQLKQKIQALKQENQQLEEENAALEYG (SEQ ID NO: 18293) |
| P3S | SPEDEIQQLEEEISQLEQKNSQLKEKNQQLKYG (SEQ ID NO: 18294) |
| P4S | SPEDKISQLKQKIQQLKQENQQLEEENSQLEYG (SEQ ID NO: 18295) |
| P5 | SPEDENAALEEKIAQLKQKNAALKEEIQALEYG (SEQ ID NO: 18296) |
| P6 | SPEDKNAALKEEIQALEEENQALEEKIAQLKYG (SEQ ID NO: 18297) |
| P7 | SPEDEIQALEEKNAQLKQEIAALEEKNQALKYG (SEQ ID NO: 18298) |
| P8 | SPEDKIAQLKEENQQLEQKIQALKEENAALEYG (SEQ ID NO: 18299) |
| P9 | SPEDENQALEQKNAQLKQEIAALEQEIAQLEYG (SEQ ID NO: 18300) |
| P10 | SPEDKNAQLKEENAALEEKIQQLKEKIQALKYG (SEQ ID NO: 18301) |
| P11 | SPEDENQALEQEIAQLEQEIAALEQKNAQLKYG (SEQ ID NO: 18302) |
| P12 | SPEDKNAQLKEKIAALKEKIQQLKEENQALEYG (SEQ ID NO: 18303) |
| DHD9 | GSPKEEARELIRKQKELIKEQKKLIKEAKQKSDSRDAERIWKRSREINRESKKINKRIKELIKS (SEQ ID NO: |
| | 18304) |
| DHD9 | PKKEAEELAEESEELHDRSEKLHERAEQSSNSEEARKILEDIERISERIEEISDRIERLLRS (SEQ ID NO: |
| | 18305) |
| DHD13_XAAA | GTKEDILERQRKIIERAQEIHRRQQEILEELERIIRKPGSSEEAMKRMLKLLEESLRLLKELLELSEESAQLLYEQR |
| | (SEQ ID NO: 18306) |
| DHD13_XAAA | GTEKRLLEEAERAHREQKEIIKKAQELHRRLEEIVRQSGSSEEAKKEAKKILEEIRELSKRSLELLREILYLSQEQK |
| | GSLVPR (SEQ ID NO: 18307) |
| DHD13_XAXA | TKEDILERQRKIIERAQEIIRRQQEILEELERIIRKPGSSEEAMKRMLKLLEESLRLLKELLELLEESAQLLYEQR |
| | (SEQ ID NO: 18308) |
| DHD13_XAXA | GSTEKRLLEEAERAHREAKEIIKKAQELHRRLEEIVRQSGSSEEAKKEAKKILEEIRELSKRLLELLREILYLSQEQ |
| | K (SEQ ID NO: 18309) |
| DHD13_XAAX | TKEDILERARKIIERAQEIHRRQQEILEELERIIRKPGSSEEAMKRMLKLLEESLRLLKELLELSEELAQLLYEQR |
| | (SEQ ID NO: 18310) |
| DHD13_XAAX | GSTEKRLLEEAERAIREQKEIIKKAQELHRRLEEIVRQSGSSEEAKKEAKKILEEIRELSKRSLELLREILYLLQEQ |
| | K (SEQ ID NO: 18311) |
| DHD13_2:341 | TKEDILERQRKIIERAQEIHRRQQEILEELEYIIR (SEQ ID NO: 18312) |
| DHD13_2:341 | MSEEAMKRMLKLLEESLRLLKELLELSEESAQLLYEQRKANNGSETEKRLLEEAERAHREQKEIIKKAQELHRRLEE |
| | IVRQSGSSEEAKKEAKKILEEIRELSKRSLELLREILYLSQEQK (SEQ ID NO: 18313) |
| DHD13_AAAA | MTKEDILERQRKIIERAQEIHRRQQEILKEQEKIIRKPGSSEEAMKRSLKLIEESLRLLKELLELSEESAQLLYEQR |
| | (SEQ ID NO: 18314) |
| DHD13_AAAA | GTEKRLLEEAERAHREQKEIIKKAQELHKELTKIHQQSGSSEEAKKRALKISQEIRELSKRSLELLREILYLSQEQK |
| | (SEQ ID NO: 18315) |
| DHD13_BAAA | TKEDILERQRKIIERAQEIHRRQQEILKRSEEIIRKPGSSEEALETLRELQEESLRLLKELLELSEESAQLLYEQR |
| | (SEQ ID NO: 18316) |
| DHD13_BAAA | GSTEKRLLEEAERAHREQKEIIKKAQELHRRTEEIIRQSGSSEEAKDELRRIQEEIRELSKRSLELLREILYLSQEQ |
| | K (SEQ ID NO: 18317) |
| DHD13_4:123 | TTKRYLEEAERAHREQKEIIKKAQELHRRLEEIVRQ (SEQ ID NO: 18318) |
| DHD13_4:123 | GSSEEAKKEAKKILEEIRELSKRSLELLREILYLSQQVNDVDEKALERQRKIIERAQEIHRRQQEILEELERIIRKP |
| | GSSEEAMKRMLKLLEESLRLLKELLELSEESAQLLYEAR (SEQ ID NO: 18319) |
| DHD13_1:234 | EAMKRMLKLLEESLRLLKELLELSEESAQLLYEAR (SEQ ID NO: 18320) |
| DHD13_1:234 | TTKRYLEEAERAHREQKEIIKKAQELHRRLEEIVRQSGSSEEAKKEAKKILEEIRELSKRSLELLREILYLSQQVND |
| | VDEKALERQRKIIERAQEIHRRQQEILEELERIIRKPGS (SEQ ID NO: 18321) |
| DHD15 | TREELLRENIELAKEHIEIMREILELLQKMEELLEKARGADEDVAKTIKELLRRLKEIIERNQRIAKEHEYIARERS |
| | (SEQ ID NO: 18322) |
| DHD15 | GTERKLLERSRRLQEESKRLLDEMAEIMRRIKKLLKKARGADEKVLDELRKIIERIRELLDRSRKIHERSEEIAYKE |
| | E (SEQ ID NO: 18323) |
| DHD20 | GDRQELIRRNIELLKEHIKILEEISQLIEELSELLDKSSSEEVVKRYKKILERYKQLLRKSQEIHKESSEIAKKES |
| | (SEQ ID NO: 18324) |
| DHD20 | GDEQKLIERSQRMQKESLELLKEIIKILDTIEKLLDKPDSEELLDTIKKLHDTLKKIHDRNKKLLKEHEEILRQRSG |
| | SLVPR (SEQ ID NO: 18325) |
| DHD21 | DKEEEYKRLLDEIKEILKESKEVLKDSKRVLEDIKRKVPDDDLVKLLEKHVRLLEEHVKLLEQLIREAEKSSK |
| | (SEQ ID NO: 18326) |
| DHD21 | QGSSAEELLKKIKESEKKIRDSLRKIKEIIKKSRKEGVDDKQLDLIRKVVESHRDLLRLHRDLLRLLREETS (SEQ |
| | ID NO: 18327) |
| DHD25 | DIDESIKEVEKLLEEVEQSLQKLDDSLKKLLEKVNQDPDVDDSVRKIVKRHVEILKRHEEVLKRLIEVVKEHTKTVK |
| | (SEQ ID NO: 18328) |
| DHD25 | GSDREEVHKEIVKLIREIIKIHKKILKIHEKIKNGEIDPSEILKLSEEIKKLTDTIIKIIEDLEQLTRDLRR (SEQ |
| | ID NO: 18329) |
| DHD27 | DRKEIVKRHQKVVELLKESSKLLRESSKLLQRLLDKTGDENLQKAVDDQDKAIKRQETAIRKSQEASKKLD (SEQ |
| | ID NO: 18330) |
| DHD27 | DNSEEIKKVAKTSREVAEYSERVAKENDKVVKTLEEGKIDESELLRLLEESIKIFDTALKLHEEAYKLHQDLVRKVS |
| | (SEQ ID NO: 18331) |
| DHD30 | DESEAASVAIESVQILVESVKLLEESVRILLDAVKKNGVEDLLRVAQRWEKLVDEWLKVVKRWLDNVRDIQR (SEQ |
| | ID NO: 18332) |
| DHD30 | GSDKAEEVEKSVRKIEESIKKIRKSIKKAEDAVQLLKEGKIDAKDFLRIVREDLEVVKEDVEIVKEDVENVREFSS |
| | (SEQ ID NO: 18333) |
| DHD33 | SDKEVSDKLLKASKKLLKVSEELLEVVRRLLKALKDDELIKKIADLLRKIIDKDKKFIRTSEEIVKESR (SEQ ID |
| | NO: 18334) |
| DHD33 | GSDLKEVLKTVEEAVKEIIKSSEELLQISRKILEISRVGVDEHEYISAIREYLKALEKHIQILKKFIEILKELIRAV |
| | S (SEQ ID NO: 18335) |
| DHD34_XAAXA | SKEEIDKIVKKHKKKIEEHKKKVDELKKLVEEHDKRVSQDKDDKVKKLSEEVKKIIKRLEEVSKRLEEVSKKLLKVI |
| | SDKR (SEQ ID NO: 18336) |
| DHD34_XAAXA | GSNDEELKKILETLDRILKKLDKILTRLIEVLKKSEDPNLDDKDYTELVKQFIELIKKYEEVVKEYEEVVRQLIRLF |
| | S (SEQ ID NO: 18337) |
| DHD34_XAXXA | SKEEIDKIVKKHKKKIEELKKLVDELKKLVEEHDKRVSQDKDDKVKKLSEEVKKIIKRVEEVAKRLEEVSKKLLKVI |
| | SDKR (SEQ ID NO: 18338) |
| DHD34_XAXXA | GSNDEELKKILETLDRILKKLEKILTRLIEVLKKSEDPNLDDKDYTELVKQFIELIKKFEEVIKEYEEVVRQLIRLF |
| | S (SEQ ID NO: 18339) |
| DHD34_XAAAA | SKEEIDKIVKKHKKKIEEHKKKVDEHKKLVEEHDKRVSQDKDDKVKKLSEELKKISKRLEEVSKRLEEVSKKLLKVI |
| | SDKR (SEQ ID NO: 18340) |
| DHD34_XAAAA | GSNDEELKKILETLDRILKKLDKILTRLDEVLKKSEDPNLDDKDYTELVKQYIELVKKYEEVVKEYEEVVRQLIRLF |
| | S (SEQ ID NO: 18341) |
| DHD36 | DHSRKLKEILDRLRKHVKRLKEHLDELRDLVRQVPEDKLLEHVVKLSDKILQISERAVREFTKSVDKDS (SEQ ID |
| | NO: 18342) |
| DHD36 | GSDKKDELERILDEIRRLIERLDEILSRLNKLLELLKHGVPNAKEVVKDYIRLLKEYLELVKEFLKLVKRHADLVS |
| | (SEQ ID NO: 18343) |
| DHD37_ABXB | DSDEHLKKLKTFLENLRRHLDRLDKHIKQLRDILSENPEDERVKDVIDLSERSVRIVKTVIKIFEDSVRKKE (SEQ |
| | ID NO: 18344) |
| DHD37_ABXB | GSDDKELDKLLDTLEKILQTATKIIDDANKLLEKLRRSERKDPKVVETYVELLKRHEKAVKELLEIAKTHAKKVE |
| | (SEQ ID NO: 18345) |
| DHD37_BBBB | MDEEDHLKKLKTHLEKLERHLKLLEDHAKKLEDILKERPEDSAVKESIDELRRSIELVRESIEIFRQSVEEEE |
| | (SEQ ID NO: 18346) |
| DHD37_BBBB | GDVKELTKILDTLTKILETATKVIKDATKLLEEHRKSDKPDPRLIETHKKLVEEHETLVRQHKELAEEHLKRTR |
| | (SEQ ID NO: 18347) |
| DHD37_XBXB | DSDEHLKKLKTFLENLRRHLDRLDKLLKELRDILSENPEDERVKDVIDELERVIRIVKTVIKIFEDSVRKKE (SEQ |
| | ID NO: 18348) |
| DHD37_XBXB | GSDDKELDKLLDTLEKILQTATKIIDDLNKVLEKLRRSERKDPKVIETVVELLKRHEKAVKELLEIAKTHAKKVE |
| | (SEQ ID NO: 18349) |
| DHD37_AXXB | DSDEHLKKLKTFLENLRRLEDLLDKHIKQLRDILSENPEDERVKDVIDLSERVVRTVKTVIKIFEDSVRKKE (SEQ |
| | ID NO: 18350) |
| DHD37_AXXB | GSDDKELDKLLDTLEKILQTATKVVDDANKLLEKLRRSERKDPKVVETYVELLKRLEKLIKELLEIAKTHAKKVE |
| | (SEQ ID NO: 18351) |
| DHD37_3:124 | DSDEHLKKLKTFLENLRRHLDRLDKHIKQLRDILSEN (SEQ ID NO: 18352) |
| DHD37_3:124 | EDERVKDVIDLSERSVRIVKTVIKIFEDSVRKLEKTKPDSKTAKELDKLLDTLEKILQTATKIIDDANKLLEKLRRS |
| | ERKDPKVVETYVELLKRHEKAVKELLEIAKTHAKKVE (SEQ ID NO: 18353) |
| DHD37_1:234 | DSDEHLYKLKTFLENLRRHLDRLDKHIKQLRDILSENPEDERVKDAIDLSERSVRIVKTVIKIFEDSVRKKEKRPID |
| | KRDDKELDKLLDTLEKILQTATKIIDDANKLLEYLRR (SEQ ID NO: 18354) |
| DHD37_1:234 | GDPKVVETYVELLKRHEKAVKELLEIAKTHAKKVE (SEQ ID NO: 18355) |
| DHD37_AXBB | DSDEHLDRLDKHLKKLKTFLENLRRHIKQLRDILSENPEDERVKDVIDLSKTVIKIFEDSVRKKERSVRIVE (SEQ |
| | ID NO: 18356) |
| DHD37_AXBB | GSDDKEATKIIDDLDKLLDTLEKILQTANKLLEKLRRSERKDPKVVETYVKAVKELLEIAKTHAELLKRHEKKVE |
| | (SEQ ID NO: 18357) |
| DHD37_XBBA | DSDEHIKQLRDHLDRLDKHLKKLKTFLENLRRILSENPEDERVKTVIKIFEDSVRKKERSVRIVKDVIDLSE (SEQ |
| | ID NO: 18358) |
| DHD37_XBBA | GSDDKEANKLLEKATKIIDDLDKLLDTLEKILQTLRRSERKDPKAVKELLEIAKTHAELLKRHEKVVETYVKKVE |
| | (SEQ ID NO: 18359) |
| DHD39 | DHSRKLEEILDRLRKHVKRLLEHLRELLSLVKENPEDKDLVEVLELSLAILRRSLEAVEAFLKSVTKKDPDDEDLRR |
| | KADEIRKEVEEIKKSLAEVEKEIYKLK (SEQ ID NO: 18360) |
| DHD39 | GSSADDVLEDILKIIRELIEILDQILSLLNQLLKLLRHGVPNAKKVVEKYKEILELYLQLVSLFLKIVKTHADAVSG |
| | KIDKKAEEEIKKEEEKIKEKLRQAKDILKKLQEEIDKTR (SEQ ID NO: 18361) |
| DHD40 | DRDAHLYKLLTFLEQLVRHLDRLVKHITQLRDIVKKDPEDERAVDVIRQSVRSLEIVITVLKIFVDSVSDAARSKEA |
| | EKIVRKIRKEIDEIRQKLREIDKEVKKTTS (SEQ ID NO: 18362) |
| DHD40 | GSNDKVLDKILDILDRILRLATRVIDLANKLLQVKKKSTHKDPRIVETYKELLKIHETAVRLLLELADLHRRLKSKD |
| | EEANKRVETELDRIRKKVKDIEDKVRKLEDKVRKTAS (SEQ ID NO: 18363) |
| DHD43 | NDLSKEVLKKLEKSVEELLRRVQKSVKEAQKRGLLSDELVDRHLKILNQLVKRHLELLQEVIKRSDKK (SEQ ID |
| | NO: 18364) |
| DHD43 | GSDEAVKRVVEKSLKILDEVIKKSLDILRELIELQIRHAKDDESVIRASKSALKDAIEALKKSLDEIKKALKRSADE |
| | G (SEQ ID NO: 18365) |
| DHD65 | SSEEVVKVHEKVVKLHKEILELLKKIIKIHETAARDPDDKDSIKKLSDEIKKIVKRIEDISDQAKRESSDAQRKQS |
| | (SEQ ID NO: 18366) |
| DHD65 | DKEEESKELLKKLKEILKRSEELLEESKELLKLAKNGEIDESELADADRKLNKKHEKLVQDIQDLLREHERQDR |
| | (SEQ ID NO: 18367) |
| DHD70 | DEKKKIDKIVKETEDLLQKSEKLLQQSKEAVKRIRSQVKENEIVDRLLRISEELLKISRRLVEISRRIASTLS |
| | (SEQ ID NO: 18368) |
| DHD70 | GSSKEEVIRLLKENVRLIKENLELLTRNLKLITDLVRGSNGSEEKIKTLKELLKEYRELLKRYRKLVEDYKRLVDKH |
| | D (SEQ ID NO: 18369) |
| DHD88 | EIQELIKSSRRIIEESKELIKESEEVLRRIKEILDRIRNGVDNQEDLLREILKLLTKNLKIIQRNLKLLQDNAEILK |
| | RLVS (SEQ ID NO: 18370) |
| DHD88 | GSYIEDVIKKILDVSRELIKLSRTIIKISEEINKQLQQGRDTKDLVKKYDEIIKKYTRIVQHYTELIKELQKLLS |
| | (SEQ ID NO: 18371) |
| DHD89 | SPTEEAIQLSQRVIELSKRVIELSKEILKLLKRVLDLLPDLDKNEEKRLDDYDKELKEYDKELKKYEKRLKDLAS |
| | (SEQ ID NO: 18372) |
| DHD89 | GSEEEEILKIQKELLRIQSEILDKQKKILDTLRSNGAVTEEVRSILEKVERLSEEAKELSKEAKELTKEVSKLIS |
| | (SEQ ID NO: 18373) |
| DHD90 | SPLKELNNQLLRLLRELVKVSKKIVDLSKTIIEVLKHTDLDPRLLDSLEKSQQELDKSQKELDKVVKELTKVNKKLQ |
| | (SEQ ID NO: 18374) |
| DHD90 | GSPLEDLVRKYDELVKTYEKLVEEFKKAVDKYDKAVKKAPVSKEATDSLDLIRKVLELLDRNLKLIKENAKLIKELL |
| | K (SEQ ID NO: 18375) |
| DHD91 | SPTRENEKVIKENEKVISDNERVLEEVVKVVETATDRKEIQDAVDEVRKSVDKLRDSVRKLEESVRTLD (SEQ ID |
| | NO: 18376) |
| DHD91 | GSPIKDISKRLLEISKRLVEISDRIVELLQRIADSKDPNKDLQKEVKDVLEEYKRLVREYREVVKEYEKVVS (SEQ |
| | ID NO: 18377) |
| DHD92 | DEDEHVKQLIKNADLLRKHAELLKELVKLFQEIASQIPDDRVAKKVTDVVDRIDKILKQTEKLVRRTKQILDYSR |
| | (SEQ ID NO: 18378) |
| DHD92 | GSNLEELVKLLKEVLEMHERLLRIHEDLVEAHKSNASDKESERKLKKSDKDIKESLKKIKSIIDQVRYIQS (SEQ |
| | ID NO: 18379) |
| DHD93 | PVEDIIEESLRLLEESLKLLNRILKLLEDSLRKLPRSEEWRQRLDEFRKKLEDWKEELERWIEDVRYKKT (SEQ |
| | ID NO: 18380) |
| DHD93 | GSDEDYESREIIDEIRKLLDRSKKIVHRSQRLVERVKSTPLSEDQEDLIRRHEETINRHRELVKELEKVLEDHERHI |
| | R (SEQ ID NO: 18381) |
| DHD94 | PEEDSRRVLERFVRVSREVLKVLEEFLRVSEELLREADRDRDRRLEEYERQVDELREEIRRYKEEVDKFDKEVKYYK |
| | K (SEQ ID NO: 18382) |
| DHD94 | GSPEKDENRKLLDKVRKLVEKSRRLVEELRKLVDQSTKNGLIDEKALRKQQEVLRKVEEVLEKQERVLRELEEISYR |
| | VI (SEQ ID NO: 18383) |
| DHD94_3:214 | GSPERDENRKLLDKVRKLVEKSRRLVEELRKLVDQSTKN (SEQ ID NO: 18384) |
| DHD94_3:214 | GSDEKALRKQQEVLRKVEEVLEKQERVLRELEEISYRVITRGEDHKAEEDSRRVLERFVRVSREVLKVLEEFLRVSE |
| | ELLREADRDRDRRLEEYERQVDELREEIRRYKEEVDKFDKEVKYYKK (SEQ ID NO: 18385) |
| DHD94_2:143 | GSDRRLEEYERQVDELREEIRRYKEEVDKFDKEVKYYKK (SEQ ID NO: 18386) |
| DHD94_2:143 | GSPERDENRKLLDKVRKLVEKSRRLVEELRKLVDQSTKNGLIDEKALRKQQEVLRKVEEVLEKQERVLRELEEISYR |
| | VITRGEDHKAEEDSRRVLERFVRVSREVLKVLEEFLRVSEELLREADR (SEQ ID NO: 18387) |
| DHD95 | DLSEESKKFVEKVKKLEKESRELEKQVKKIEEDSRSVENDVQKEFLELLKRLLDIQKKVVEVLREVVKVQQYVDS |
| | (SEQ ID NO: 18388) |
| DHD95 | GSDSEYESRQVLRELDTVLKDSHTVLEALRQVIRDSQDVVSKSDEESRRVIDDLEKVIQDSKKVLDDIKRLIDKSKS |
| | IKS (SEQ ID NO: 18389) |
| DHD96 | NEDELLKLLTENLKLLDENLKLLRENLSLLRQANNITDKNRIREIVKQSKEIVKQSREILKQSKEIVERIKYIVS |
| | (SEQ ID NO: 18390) |
| DHD96 | GSSLYELTQRYEKLVQQYEELVKDYRRLVKKLEKLKRDNKPDKRLLKEIVDVIKKSVEIIDRSLKLLEESIKILEET |
| | D (SEQ ID NO: 18391) |
| DHD97 | SQERSLEILKRILDVLKESLEILKESLSILRQLASRIKNPNRKIEEILKESDKIIKESDKVLKEIEEVIRYSS |
| | (SEQ ID NO: 18392) |
| DHD97 | GSDIEYESKEILELIKELLKLSRELLKESRRALELVRKSRDDSIVEEVIQVHKKVLDIHKEVLKIVRKVVEVHRRVK |
| | S (SEQ ID NO: 18393) |
| DHD98 | SKKDESTKLERLAEKIDEITKRIEELVKDVKRKSSEGVDKDQQQKIDEVFQKLLDLQREILEILDRILKVQQYILD |
| | (SEQ ID NO: 18394) |
| DHD98 | GSDLEYLNRRLLQLIKTLIDLNRHLLKLIDKLKKLNSREGDEEKIKEESKQIQEQFKEIVERSKEIIKQIKEIIKRS |
| | Q (SEQ ID NO: 18395) |
| DHD99 | DFERSSRRLEKVVEDLRRSSDRLREVIDELRKSADEKDEDEDLRRARKEHRDLIEELKRALEKQEEIIKHLQELVYR |
| | QL (SEQ ID NO: 18396) |
| DHD99 | GSEESEEVRKVVERIKKISRELEEVVKELDRVSKEFDRHGETDEIVREHERIVEKLEEIVKKHTKIVEELAEIVYKQ |
| | Q (SEQ ID NO: 18397) |
| DHD100 | SDDDSVRVLDEIVKILDESVKLLKESLKLLDDFLRTKPDDHLKEVVKESKKVVEQSKKVLDRIKKIIYESK (SEQ |
| | ID NO: 18398) |
| DHD100 | GSDLLYLSKELLKLVRELLKLSRELVELSRRLVNSTHKSPELVKKYDKLVKKYQDLLKKLADVADEYLRQRS (SEQ |
| | ID NO: 18399) |
| DHD101 | DEKDYHRRLIEHLEDLVRRHEELIKRQKKVVEELERRGLDERLRRVVDRFRRSSERWEEVIERFRQVVDKLRKSVE |
| | (SEQ ID NO: 18400) |
| DHD101 | GSDAYDLDRIVKEHRRLVEEQRELVEELEKLVRRQEDHRVDKKESHEILERLERIIRRSTRILTELEKLTDEFERRT |
| | R (SEQ ID NO: 18401) |
| DHD102 | DERYRAREHIRRVEEHTKRLRHILKRLREHEEKLRRELKPGDEITESVDRFKKIVDQFEESIKKFETVSEELRKSDS |
| | (SEQ ID NO: 18402) |
| DHD102 | GSDRQRILDRLDKILEKLDDILKKLKDILETLSKDDVSDRRHKDLVEKFRELVDTHHKLVERYRELVYQNR (SEQ |
| | ID NO: 18403) |
| DHD102_ | GSDEITESVDRFKKIVDQFEESIKKFETVSEELRKSIS (SEQ ID NO: 18404) |
| 1:243 | |
| DHD102_ | GSDPQRAADRLDKILEKLDDILKKLKDILETLSKDDVKDRRAKDLVEKFRELVDTHHKLVERYRELVYTATAGSDLA |
| 1:243 | RELIRRVEEHTKRLRHILKRLREHEEKLRR (SEQ ID NO: 18405) |
| DHD103 | NADDQLATSIKKLEDSIDQLIKIVRKFEESVKKLQKHGVDQHHVEILRKIVEIFRQHIEKLKKHLEKLRYTSS |
| | (SEQ ID NO: 18406) |
| DHD103 | GSDKEYLVTEHEKLVREHEKIVSEIEKLVKKHEAGVDESELEEILKKVEKLLRKLDEILEQLTQLLRKTE (SEQ |
| | ID NO: 18407) |
| DHD103_ | GSDQHVVEILRKIVEIFRQHIEKLKKHLEKLRYTSS (SEQ ID NO: 18408) |
| 1:423 | |
| DHD103_ | GSDAEYLVTEHEKLVREHEKIVSEIEKLVKKHEKGVDESELEEILKKVEKLLRKLDEILEQLTQLLRKAEKHIDKHS |
| 1:423 | KAADQLATSIKKLEDSIDQLIKIVRKFEESVKKLQKH (SEQ ID NO: 18409) |
| DHD104 | DEDDDIRRVLDESRRVLEHSRRVLKRSEEVLEKASRKKEKDTEEIEKHLKRLREHAKKLEKHRRELDDFLYKEI |
| | (SEQ ID NO: 18410) |
| DHD104 | GSRDKYLLERLNDILKKLDEIVDKLSDILKRLKDVRHDDRLQELVERYKEIVKEYKRIVEEYEKLVREFEEQQR |
| | (SEQ ID NO: 18411) |
| DHD105 | DRDYEDKEFKKIIKELEDVQEELKKLQEKIKRFSSELEEPNELLKEQLKVNEEQLEVNKKILKILRDQLKQNE |
| | (SEQ ID NO: 18412) |
| DHD105 | GSDAEYKVRESVKRSKESVKHSEDVVDKLNKSVKLSESGHSDAEKASRELVKLVREVVELSREVIKLSEKVLRVIS |
| | (SEQ ID NO: 18413) |
| DHD106 | DLQYKQEKLIRHFDRVVREWDKLVRKFSKVLEKQKHESKDKELEEASRRVDELIKRLREQLKRSKEILRRLKELSRK |
| | SS (SEQ ID NO: 18414) |
| DHD106 | GSDWEELLRRLEKVLQEYEEIVKELIDLIERLIKVSEDKSKDASEYKKLVTELEKLISKLEEISKKLEELVKEYEYK |
| | TE (SEQ ID NO: 18415) |
| DHD107 | DAKDELEKSLQEIEESLKELKKLLEELDKSLRELTSQGRNKKLEEHIKKVQKFIELVKKYIKAVQDYLKEVRYDNS |
| | (SEQ ID NO: 18416) |
| DHD107 | GSDKERAARATEEMVKLTKKLLKAVEDLVRDVRRLLKEGLISEKHARIAETILEVFKKHAKIIKKHVDIVKYDES |
| | (SEQ ID NO: 18417) |
| DHD108 | GSPLKERLLEIQRDLDRVLEEVVERLLRIQERLDSVVERKPPDVHEEYKYIVDEIREIVERVVREYEEIVKRIDEEV |
| | R (SEQ ID NO: 18418) |
| DHD108 | GSEEDERIRYDLDRIRKDVRRKLEEIRQRVRELEKKLRDAGHRRDEKELLRELIETSKDILRLVEELLKKIIDKSED |
| | LLRKTE (SEQ ID NO: 18419) |
| DHD109 | GSDEEDYINENVEKDVRDIEDDVRRINERIRELLEKIRTEEVLQRVLEEHHELVERVLRKLVEILRKHEEENR |
| | (SEQ ID NO: 18420) |
| DHD109 | GSDEEEYYKEKLHKLLREIEELLKHYRELVRRLEELVKRGELDKDTAAHILERLSELLERIIRRVAHTLRRLSEERR |
| | (SEQ ID NO: 18421) |
| DHD110 | GSDEDEISYDSKRRVEEIVRQAREKSEKSRKDIEDVAEVLRKGDVSEKEVVDELVKVLEEQVKVLREAVERLREVLK |
| | KQVDDVR (SEQ ID NO: 18422) |
| DHD110 | GSDIVELVDHLLKRSLKLLEELAELVRRLLEKSTELLKRRTEEHKEEVVEESEYMVRELEERLRRVVDESEKLVRDA |
| | DKHIR (SEQ ID NO: 18423) |
| DHD111 | GSKEKDIVKTLVDLLRENLETLERLIEEVVRLLKENVDVRDEGRDDKDSERILRDIKRRIDEAAKESREIIERIEKE |
| | VEYRSR (SEQ ID NO: 18424) |
| DHD111 | GSPEVDVLRRIVREILKASEELLRLLRKLIDEALKLSERKRDSQEYREVVDRVKKELERLLDEYRKLVEELKEKLRY |
| | DTR (SEQ ID NO: 18425) |
| DHD112 | GSDKRYESEKLKRRLDEAVEKVREVVERVERESDRVLEEVRRRRESKEVVDKVIEDNDKALEDVLRVVDEVAKVVRD |
| | VVRENTR (SEQ ID NO: 18426) |
| DHD112 | GSPREYHSKDILRKVDEILERIRRHADRVKKKSERLKRENVDVNEHSKDVKRVIRELLELVKELLRLAKKHSDDQQE |
| | (SEQ ID NO: 18427) |
| DHD113 | GSDEDEILYHSERLLQKLKKELDDLKEKSRELLEELKKEDPDDRLIERIIRLHDEVLKDLDEVLKNILEVHREVLER |
| | LR (SEQ ID NO: 18428) |
| DHD113 | DKLDRLLKIHEEALRRAEELIKRLLDIHRRALDLARRGELDDYLLKESERELREIIRRAREELKESRDRLEEISR |
| | (SEQ ID NO: 18429) |
| DHD114 | GSPKEELIRRVLEEVKRLNEKLLEIIRRAAELVKRANDELPETEKLREIDRELEKKLKEIEDELRRIDKELDDALYE |
| | IED (SEQ ID NO: 18430) |
| DHD114 | GSPKLDKLRELLERNLEKLREILEEVLKILRTNLERVREDIRDEDVLQEYERLIRKAEEDLRRVLKEYDDLLKKLVY |
| | ELR (SEQ ID NO: 18431) |
| DHD115 | GSKEDESVKRAEEIVRTLLKLLEDSLREAERSLRDIKNGEDEHNLRRISEKLEELSKRITETIERLLRELQYTSR |
| | (SEQ ID NO: 18432) |
| DHD115 | GSPNQELLDRVRKILEDLLRLNEELVRLNKELLKRALEMRRKNRDSEEVLERLAEEYRKRLEEYRRELEKLLEELEE |
| | TIYRYKR (SEQ ID NO: 18433) |
| DHD116 | GSDESEEAQHEVEKVLDDIRRLSEHLQKRLEEVLEEVYELRREGSDRTEVVELLKEVIREIVRVNREALERLLRVVE |
| | EAVKRNE (SEQ ID NO: 18434) |
| DHD116 | GSDEEELVETVKRIQKEILDRLTELAKLLVEIQREIKKLKDEGEDDKELKRLSDELEEKVRQVVEEIKRLSDELEET |
| | VEYVSR (SEQ ID NO: 18435) |
| DHD117 | GSDEEEEVVRRAEELVKEHEELIERVIRTHEELVYKLEDQGADKKLVDVLKRVVEESERVAREIVKVSRELIRLLEE |
| | ASR (SEQ ID NO: 18436) |
| DHD117 | GSSKEEILKELEDLQRRLIEELKKLQERVVELLEELIKRLRDRGRDDKHLKRLVKEVRRLSEEVLRSIKEVSDRVRY |
| | QLR (SEQ ID NO: 18437) |
| DHD118 | GSDKEEESEYLLRDLVRLLEKVKEKIEEVNREVEKLLKKVKDGRLDRREVLREILRLNRELAEIIKEVVDRIRHVVE |
| | RSER (SEQ ID NO: 18438) |
| DHD118 | GSDLHEVVYETKELLKRIEEVVEELRKKSEDIIRKAERGEISEDELKRLQEEIAREAKKLLDEIKRVLERHLEQTL |
| | (SEQ ID NO: 18439) |
| DHD119 | GSPVEEIIKEVVKRVIEVQEKVLRIISHAVKRVVEVQKKYDPGSEESNRVVEEVKKTIEDAIRESDEVVDEVVKRIQ |
| | YTVR (SEQ ID NO: 18440) |
| DHD119 | GSPEQEIADRILTEIRESQKELERLARKILKLLDESQEKAKRGRLSEEESDELLERIKKELDELLERSKELLKKIEY |
| | ELR (SEQ ID NO: 18441) |
| DHD120 | GSDEDKEANRVLDEVLKTVRDLLETANEVLKEVLYRLKRTDDQEKVVRTLTEVLKEHLKLVEEIVRILDKVLKEHLE |
| | TEK (SEQ ID NO: 18442) |
| DHD120 | GSPEDDVLRRLEEVSEKILRVAEDVARQLREVSEKITQGKVDRKEWEEDIKRLKRELEELLREWKEEIERLTYELR |
| | (SEQ ID NO: 18443) |
| DHD121 | GSRREEVVKRIRELLKRNKELIDRIRELLEENEYLDKDARDKDVLRRSVELLEELVRILEESVELAKEIIKLLREVV |
| | E (SEQ ID NO: 18444) |
| DHD121 | GSDEKEDNRRLQHKIERILEKNEDLQRKLEEILELLERGEADEEKIDRLRKAVEDYRRVVEEIKEDVKRHKYTVR |
| | (SEQ ID NO: 18445) |
| DHD122 | GSDEKEEAKKASEESVRTVERILEELLKASEESVELLRRGEDAKDVVERSKEALKRVKELLDEVVKRSDEILKYIHN |
| | (SEQ ID NO: 18446) |
| DHD122 | GSDEKKLINEVVETQKRLIKEAAKRLSEVVRHQTELIRELREKNVDDKDVEKLLKESLDLAEEIVRRIKELLDESKK |
| | LVEYVSN (SEQ ID NO: 18447) |
| DHD123 | GSPDMDEVKRVLDELIEIQEEILREIKRVLEKLIKIQEDNGSEYESREVVREIVEIARKLVERSRRVVKKITETLQ |
| | (SEQ ID NO: 18448) |
| DHD123 | GSDERYATREIVERIERIAREILKRTEEIVREVREVLSRDVDQEEVVRRLADLLRESVELVQHLVRRVEELLQESVE |
| | RKK (SEQ ID NO: 18449) |
| DHD124 | GSPEREALREVLEDLKRVTDRLRELVERVLEELKKVTDHVDSERILRESRRVLKELKDIIEEILRESEKVLEKLKYT |
| | ED (SEQ ID NO: 18450) |
| DHD124 | GSPAREILEEVVKKHLEVVEDAARILEEIIREHEKAVREDRDKKELEEISRDLLRKAREALKKVKDISDDLSREIEY |
| | VAS (SEQ ID NO: 18451) |
| DHD125 | GSPVEEAIKKVIDDLRDVQRKIRELVEELIRLLEEVQRDNDKRESEYVVERVEEILRRITETSREVVRKAVEDLS |
| | (SEQ ID NO: 18452) |
| DHD125 | GSDSDEKAEYLLKEMERVVRESDEVVKKILRDLEEVLERLRRGEISEDDVTEILKELAERHIRAIEELVRRLRELLE |
| | RHKR (SEQ ID NO: 18453) |
| DHD126 | GSPVEEVLKELSEVNERVRDIAREIIERLSEVNEEVKETDDEDELKKISKKVVDEVEDLLRKILEVSEEVVRRVEYH |
| | DR (SEQ ID NO: 18454) |
| DHD126 | GSPKEDILREVLRRHKEIVREIVRLVREAVETHLELVKRNSDDRDAQDVIRKLEEDLERLVRHAQEVIEEIFYRLH |
| | (SEQ ID NO: 18455) |
| DHD127 | GSPRSYLLKELADLSQHLVRLLERLVRESERVVEVLERGEVDEEELKRLEDLHRELEKAVREVRETHREIRERSR |
| | (SEQ ID NO: 18456) |
| DHD127 | GSDREYIIKDILDSQEHLLRLIEELLETQKELLEILKRRPDSVERVRELVRRSKEIADEIRRQSDRNVRLLEEVSK |
| | (SEQ ID NO: 18457) |
| DHD128 | GSDEKDEIRHVIESVERLIEDIKRLLKTLRELAHDDSDKKTVKEVLDRVKEMIERHRRELEEHRKELERAEYEVR |
| | (SEQ ID NO: 18458) |
| DHD128 | GSESEDRIKELLKRHIELVERHEELLHEIKKLIDLEEKDDKDREEAVKRIDDAIKESEEMLEESKEILEEIEYLNR |
| | (SEQ ID NO: 18459) |
| DHD129 | GSSLEDSVRLNDEVVKVVERVVRLNQEVVRLIKHATDVEDEETVKYVLERVREVLDESREVLKRVHELLEESERRLE |
| | (SEQ ID NO: 18460) |
| DHD129 | GSHEKDIVYKVEDLVRKSDRIAERAREIVKRSRDIMREIRKDKDNKKLSDDLLKVTRDLQRVVDELEELSRELLRVA |
| | EESRK (SEQ ID NO: 18461) |
| DHD130 | GSPELDEVKKLIDELKKSVERLEESIREVKESIKKLRKGDIDAEENIKLLKENIKIVRENIKIIKEIIDVVQYVLR |
| | (SEQ ID NO: 18462) |
| DHD130 | GSDEEEIEELLRELEKLLKKSEEALEESKKLIDESEELLRRDRLDKEKHVRASEEHVKLSEEHLRISREIVKILEKA |
| | VYSTR (SEQ ID NO: 18463) |
| DHD131 | GSDESDRIRKIVEESDEIVKESRKLAERARELIKESEDKRVSEERNERLLEELLRILDENAELLKRNLELLKEVLYR |
| | TR (SEQ ID NO: 18464) |
| DHD131 | GSDEDDELERLLREYHRVLREYEKLLEELRRLYEEYKRGEVSEEESDRILREIKEILDKSERLWDLSEEVWRTLLYQ |
| | AE (SEQ ID NO: 18465) |
| DHD132 | GSDKKDASRRAIRVLHEFVRVSEEVLEVLRKSVESLKRLDVDEKIKRTHDRIEEELRRWKRELEELIERLREWEYHQ |
| | D (SEQ ID NO: 18466) |
| DHD132 | GSDDEEEDKRLLEEVKRSLDTDERILEKLRHSLERQLEDVDKDEDSRRVLRELDEITKRSREVVKRLRKLAYESK |
| | (SEQ ID NO: 18467) |
| DHD133 | GSDKEYKLDRILRRLDELIKQLSRILEEIERLVDELEREPLDDKEVQDVIERIVELIDEHLELLKEYIKLLEEYIKT |
| | TK (SEQ ID NO: 18468) |
| DHD133 | GSPSKEYQEKSAERQKELLHEYEKLVRHLRELVEKLQRRELDKEEVLRRLVEILERLKDLHKKIEDAHRKNEEAHKE |
| | NK (SEQ ID NO: 18469) |
| DHD134 | GSRDRKISEELIKALEDHIRMLEELIRAIEEHIKLAERGVDEKELRESLEELKKIVDELEKSLEELRKLAERYKYET |
| | R (SEQ ID NO: 18470) |
| DHD134 | GSPKEESVEELKRVIDKHEEILRELKRVLEEHERVSHDEDENELRRSLERLKHILDRLHESLKELHELLKKNEYTER |
| | (SEQ ID NO: 18471) |
| DHD135 | GSDHEYWVKIVERILRVMEKHAEIVKKHLEIVERVVREGPSEDLRRKLKESLREIEESLRELKELLDELDELSEKTR |
| | (SEQ ID NO: 18472) |
| DHD135 | GSDEEYVTRSQRRLKRLLEEYIKVVEEHARLVERNERDDKELKRSIDELDKLTKELLELVKRYKELVDKTET (SEQ |
| | ID NO: 18473) |
| DHD136 | GSDKEEIVKLQDEVIKTLERHLDILRKHIDLLEKLKDHLSEELKERVDRSIKKLEESIKRLERIIEELQELAEYSL |
| | (SEQ ID NO: 18474) |
| DHD136 | GSREEELKESAEELERSVRELKKEADKYKEEVDRLHYRGKVDKDWVRVVEKLIKLVEEHLELIREHLELLKEERR |
| | (SEQ ID NO: 18475) |
| DHD137 | GSDMEYELKKSAEELRKSLEELKRILDELHKSLRELRRHGDDEEYVQTVEELRKELEEHAKKLEEHLKELERVAT |
| | (SEQ ID NO: 18476) |
| DHD137 | PEYELKKSVDDLKRDVDRLVEEVEEVFELSKERLREDRKHLELVEEMVRLIEKHLELIKEHLKLADDHVR (SEQ |
| | ID NO: 18477) |
| DHD138 | GSREKDESKELNDEYKKLLEEYERLLRRSEELVKRAKGPRDEKELKRILEENEDILRRTKEILERTKEISEEQKYRR |
| | R (SEQ ID NO: 18478) |
| DHD138 | GSDKDERQERLNEESDKSNEESERSNRESEELNRRARGPNDEKELQEILDRHLELLERNQRLLDENKEILRESQYLN |
| | D (SEQ ID NO: 18479) |
| DHD139 | GSENKYILKEILKLLRENLKLLHDILRLLDENLEELEKHGAKDLDDYRRKIEEIRKKVEDYREKIEEIEKKVERDR |
| | (SEQ ID NO: 18480) |
| DHD139 | GSESEYTQEEILELLKESIKLLREILRLLEESEELWRRENTKSERSEEIKERAKEAIKRSEEILERVKRLSDHSR |
| | (SEQ ID NO: 18481) |
| DHD140 | GSDEEEANYVSDKAVKIAEDVQELLKELLELSEVVRRGEVDEDEYDRVLRKLQEVMKEYEEVLKEYEEVSRKHE |
| | (SEQ ID NO: 18482) |
| DHD140 | GSPEKYLIKTQEELLRRHAEILEDLIRKVERQVDLRRKVDERDEDLKRELERSLRELERLVRESSRLVEEIRELSKE |
| | IKR (SEQ ID NO: 18483) |
| DHD141 | GSDEEYELERISRESKELLERYKRLLREYQELLKELRHVKDLDRAVKIIHELMRVSKELVEISHRLLELHERLVRRR |
| | K (SEQ ID NO: 18484) |
| DHD141 | GSEKEYIEKLSRKIEEDIRRSEERAKDSERLVRRLEELAKRKRLDLDDVLRVAEENLEILEDNLRILEEILKEQDKS |
| | NR (SEQ ID NO: 18485) |
| DHD142 | GSPHEEVVELHERVMEISERAVELIQRIIDIIRRIREDDKDIEKLVKTIRDLVREYEELHRELEEIDEEIYKKSE |
| | (SEQ ID NO: 18486) |
| DHD142 | GSDHEDVVRLHEDLVRKQEDARRVLEEIVRLAEEIVEVIKKDEKDKDRVTRLVEEIEKLVEEYKKKVDEMRKISDEI |
| | KYRSR (SEQ ID NO: 18487) |
| DHD143 | GSRAREVVKRAKRIIEEWQKILEEWRRILEEWRRLLEDERVDDRDNERIIRENERVIRENEKIIRDVIRLLEELLYE |
| | RR (SEQ ID NO: 18488) |
| DHD143 | GSREDEELEEEIDRIRQMVEEYEELVKEYEELTEKYKQGKVDKEESKKIIEKSERLLDLSQDAVRKVKEIIRRILYT |
| | NR (SEQ ID NO: 18489) |
| DHD144 | GSPKEEIVKLHDESAELHRRSVEVADEILKMHERSKDVDDERESRELSKEIERLIREVEEVSKRIKRLSEEVEYLVR |
| | (SEQ ID NO: 18490) |
| DHD144 | GSPLEEILKIQRRINKIQDDINKILHEILRMQEKLNRSSDKDEVEESLRRIRELIKRIKDLSKEIEDLSREVKYRTT |
| | (SEQ ID NO: 18491) |
| DHD145 | GSPEDEHVYVVREIYEVLREHAEVLEENREVIERLLEAKKRGDKSEELVKELKKSIDKLKEISRKLEEIVKELEKVS |
| | EKLK (SEQ ID NO: 18492) |
| DHD145 | GSDEDETSYRILELLREIVRASRELIRLSEELLEVARRDDKDETVLETLIREYKELLDRYRRLIEELTRLVEEYEER |
| | SR (SEQ ID NO: 18493) |
| DHD146 | GSTQEEINRIQHEVLRIQEEIDEILRDIVEKLKAISRGELDHEVVKDVEDKVREALEKSEELLDKSRKVEYKSE |
| | (SEQ ID NO: 18494) |
| DHD146 | GSDEEELNRELLEKSKRLVDINRDIIRTAQELIEMLKDSKDGRVDEDTKRELRDKLRKLEEKLERVREELRKYEELL |
| | RYVQR (SEQ ID NO: 18495) |
| DHD147 | GSDEKDRVYEILKEVQRLVKEYRDISKEIEDLVKHYEHITDDEAQEVSKELIDKSLRASEIVRELIRLIKELLDELE |
| | (SEQ ID NO: 18496) |
| DHD147 | GSDEEDVLYHLRELLEELKRVSDDYERLVREIKETSERKDRDTKENKDMLDELVKAHREQEKLLERLVRLLEELFER |
| | KR (SEQ ID NO: 18497) |
| DHD1 | PREQAIRISEEIIRISKKIIEILERTRSSTAREAMKWAKDSIRLAEESKYLLDK (SEQ ID NO: 18498) |
| DHD1 | IEDDVKKIQDSTKKAQKETIEALERSTSSTARKQMEEQKEQIRLQKEAMYLLKK (SEQ ID NO: 18499) |
| DHD2 | SREEIAKLQEEVIKLQRRVIELQKEVIELQRRAKELTSSYTKEILEIQRRIEEIQREIEEIQKRIEEIQEEIQRRT |
| | (SEQ ID NO: 18500) |
| DHD2 | SDEEIKRLSEEVIQLSRRVIKMSREAIKLSREVQKLTPSYQKRIKEIADRSIELARESIEIAKRSEKIAEESQRRT |
| | (SEQ ID NO: 18501) |
| DHD3 | PAKDEALKMANESLELAKKSARLIQESSSKEILERIEKIQRRIAELQDRIAYLIKK (SEQ ID NO: 18502) |
| DHD3 | PAKDEALRMIDESRELIKKSNELIQRSSSKEILERILEIQRKIAELQKRIQYLLKS (SEQ ID NO: 18503) |
| DHD4 | TDEARYRSERIVKEAKRLLDEARRRSEKIVREAKQRSNSEDAKRIMEENLRESEEAARRLREIIRRNLEESRETG |
| | (SEQ ID NO: 18504) |
| DHD4 | TREALEYQRKMAEEIEDLLREALRRQEEMVREAKQRSLSEEFKRIMERILEEQERVMRLAKEALERILEEQKRTG |
| | (SEQ ID NO: 18505) |
| DHD5 | SERTKREAKRSQEEILREAKEAMRRAKESQDHRQNRDGSNSEDLERLSQEQKRELEEVERRLKELAREQKYKLEDS |
| | (SEQ ID NO: 18506) |
| DHD5 | SEDLKRILKEITERELKLMQDLMEILKKITEDENNLDSNNSEDLKRSIEKARRILDEALRKLEESARRAKYIQEDN |
| | (SEQ ID NO: 18507) |
| DHD6 | TEDEIRESLKWLDEVLQELREIARESNEVLERNRQKSRSDKLREDIERYKKRMEEARKKLDDQLNKYKKRMDENRS |
| | (SEQ ID NO: 18508) |
| DHD6 | TEEELKESKKFAEDLARSARRALKESKRVLEEISQASRSKKLEEIVRRYKEQVKRWQDEWDERAREYRKRMKENRS |
| | (SEQ ID NO: 18509) |
| DHD7 | TKTEEIERLAREIKKLSEKVERLAQEIEELSRRVKEENSTDRELKEANREIERAIREIEKANKRMEEALRRMKYNG |
| | (SEQ ID NO: 18510) |
| DHD7 | TKTEEHERLAREISKLADEHRKLAKIIEELARRIKEENLTDDELREAIRKIEDALRKNKEALKIMKEAAERNRYNT |
| | (SEQ ID NO: 18511) |
| DHD8 | TKKEESRELARESEELARESEKLARKSLELARRAESSGSEEEKRRIIDENRKIIERNREIIERNKEIIEYNKELIS |
| | (SEQ ID NO: 18512) |
| DHD8 | TKDEESLELNRESEELNRKSEELNRKSKELNDRAESSNSEEEEKEILREHKEILREHLEILRRHKEILRRHKYLTS |
| | (SEQ ID NO: 18513) |
| DHD16 | TREELLRENIELAKEHIEIMREILELLQKMEELLERQSSEDILEELRKIIERIRELLDRSRKIHERSEEIAYKEE |
| | (SEQ ID NO: 18514) |
| DHD16 | SEDIAREIKELLRRLKEIIERNQRIAKEHEYIARERKKLDPSNEKERKLLERSRRLQEESKRLLDEMAEIMRRIKKL |
| | LD (SEQ ID NO: 18515) |
| DHD18 | DRQKLIEENIKLLDKHIKILEEILRLLKKDIDLLKKSSSEEVLEELKKIHRRIDKLLDESKKIHKRSSEIVKKRS |
| | (SEQ ID NO: 18516) |
| DHD18 | DEQKLIETSQRLQEKSERLLEKFEQILREASDLYRKPDSEELLRRVEKLLRELEKLIRENQDLARKHEKILRDQS |
| | (SEQ ID NO: 18517) |
| DHD19 | DRQELIRENIELLKKHIKIVKEIQKLIETFIELLKKSSSEEILRRLKKILKRIEKLYRESQEIHKRSEEIAKKRQ |
| | (SEQ ID NO: 18518) |
| DHD19 | DEERLIDKSRELQKESEELLKELLKIFKRIEELLEKPDSEELIREIKKLLETLSEIHKRNEKLARTHEEILRQQS |
| | (SEQ ID NO: 18519) |
| DHD22 | STRDVQREIAKAFKKMADVQKKLAEEIKRHVKNVEKKNKDNDEYRKIATELLKKATESQKKLKELLDRIRKSDS |
| | (SEQ ID NO: 18520) |
| DHD22 | DKDDRSTSLLKRVEKLIDESDRIIDKFTTLIELSRNGKIDDDQYKKELKEILELLKKYDKHVKEVEELLKRLNS |
| | (SEQ ID NO: 18521) |
| DHD23 | SKRKALEVSERVVRISEKVVRVLDESSDLLKKSYDDSDKFAELIDRHEEKIKKWKKLIKEWLEIIQRHKS (SEQ |
| | ID NO: 18522) |
| DHD23 | SAEEFVKLSEEAVKRSKEILDIVRKQVKLVKAGVDKHEITDSLRKSEKLIEEHKELIKTHRDLLRREN (SEQ ID |
| | NO: 18523) |
| DHD24 | SSTEILKRFKRALRESEKIVKHSRRVLKIIREVLKQKPTQAVHDLVRIIETQVKALEEQLKVLKRIVEALERQS |
| | (SEQ ID NO: 18524) |
| DHD24 | DKQKEIKDILEKTRRIAEESRKIAEKFDEIIKRSTEGKIDESLTKELEELVKEVIKLSEDDARTSDDLVRKES |
| | (SEQ ID NO: 18525) |
| DHD26 | DEDESIKLTRKSIEETRKSLKIIKEVVELIREVLKHIKDLDKEIFERIDKILDKYKKQVDTYDEILKEYEKKQR |
| | (SEQ ID NO: 18526) |
| DHD26 | SELDEQKELIKKQEKLIEEQQRLLSKIRRMFKERVKDQELLREIQKVLKRSQEIVETSKKILDRSDKTTE (SEQ |
| | ID NO: 18527) |
| DHD28 | DQKEINTRIVEKLERIFKKSKEIVRQSERVISTIEKKTEDERELDLLRRHVKIVREHLKLLEELLKIIKEVQKESE |
| | (SEQ ID NO: 18528) |
| DHD28 | DTEELVKRLNELLKELSKLVKEFIKILETYRKDQTKDTSKISERVDRILKTYEDLLQKYKEILEKIEKQLS (SEQ |
| | ID NO: 18529) |
| DHD29 | DYARLIDQAVEVTRKVVEVNVTVARVNDKFAKHLGDEELRRVSEHLKEVSKDLQEVAKKSKDAARQVK (SEQ ID |
| | NO: 18530) |
| DHD29 | DVSKVAEEYLQISKTLVDISRTLLEISERLVRLVRTVADDRSEVKKAIEDSIEVLKTSEEVVRQIKRASDKLVKAIS |
| | (SEQ ID NO: 18531) |
| DHD31 | DAKEIQRRVVEIQTEVVKLQKKAVDIIRKIIEAFNNSNIDQSLLEAAKEIVKEIDKLEKLTESLLEESKKLLKRSS |
| | (SEQ ID NO: 18532) |
| DHD31 | SAEEVVKLAKIFLELLRESIKLLKRSVDLLRKSSDPSLDKSEAEKVSREIEKVSDTSLKLSKKALDVVKRALKVAS |
| | (SEQ ID NO: 18533) |
| DHD32 | DEKDAARKARKVSEEAKEASKKIEKALEESKRILNTLKQKKDEQEVKVIKEHEDVLRQIEKIQKQVLEIQKEVAKLL |
| | ESLD (SEQ ID NO: 18534) |
| DHD32 | SADDVARASEKVLRVARESAKAADKSLEVFKEVVKRGDKEAFLQVVKINEEVVKINITVIRILIEVSKTAT (SEQ |
| | ID NO: 18535) |
| DHD38 | DEYVKETLKQLREALASLREADKRITELVKEARKKPLSEAARKFAEAIVTHVKVVVEHVEVVLRHVEVLVEAKKNGV |
| | IDKSILDNALRIIENVIRLLSNVIRVVDEVLQDLD (SEQ ID NO: 18536) |
| DHD38 | DASDVIRRIHELFEEVHRLIEAVHRAIEDVAKAAQKKGLDESAVEILAELSKELAKLSRRLAEISREIQKVVTDPDD |
| | KEAVERLKEIIKEIKKQLDELRDRLRKLQDLLYKLK (SEQ ID NO: 18537) |
| DHD60 | SEDKAHHDIVRVLEELIKIHDELMKISEEILKATSDSTATDETKEELKRRSKEAQKKSDTLVKIVKELEKESRKAQS |
| | (SEQ ID NO: 18538) |
| DHD60 | DDEEKYRQIIREAQEISKTAKRILRDAQEISKRIRHQGVDRSEHQRLVDLLRELIKEHHKLLRRQQEADTRND |
| | (SEQ ID NO: 18539) |
| DHD63 | DRKDKARKASEKLEEVIQRWKTVADKWKKMVDLVSNGKLSQEEVARVTEELLKIQTELAKLLEEHAKVLQESAS |
| | (SEQ ID NO: 18540) |
| DHD63 | SDEESIKTQSELIKTSEELLKDVKRIDEELQKLRDDPTLDESELKKRVKEWSDRVRKAKEISRKIQEIVKESKKRSS |
| | (SEQ ID NO: 18541) |
| DHD66 | DKDEELRKVIEKYREMVKEYRKVIREYEEVIKSSKTIDKSSLISLSRKMVELSQRVIDVSDEVAKVLSRKQS (SEQ |
| | ID NO: 18542) |
| DHD66 | TDEERLKKQTKELKEQTKQLEKQKDLLEKISNGEISKDEIQEIIKESKKIAKESQKALDSSRKALEEVS (SEQ ID |
| | NO: 18543) |
| DHD67 | DEKEVSKEIIKVLKDIAKVQQKVIEVSQRLASVLRADDDNVVKRALEEYEKILEELRELNKEIEKLTDKYRKVTS |
| | (SEQ ID NO: 18544) |
| DHD67 | DSDEQTKELEKLTELHKRHVEKLKKQTKESREVDSNKLWKSKDVKDKLSESEKELQKLSDQDKKAKDALESSRRKND |
| | (SEQ ID NO: 18545) |
| DHD69 | DAEEQLKLLTKLLRHQQRLLQLIKESLKLIEKIDQSSQENQDEIRKWREVTKKLRELIKTSEKLVRELEKSYKKSS |
| | (SEQ ID NO: 18546) |
| DHD69 | SLRDVVRRYQELVRRYDELIKTLTEILKKYQKKGAEDKDASTELVKAVRTSLKLSKELLKLNSELLKEDS (SEQ |
| | ID NO: 18547) |
| DHD71 | SKEELKRKLDELKKRSDTLKELSKKLKEISERNPDDKSVHRTIIRIHREFVKNHKEIVRVIEEIVSDKS (SEQ ID |
| | NO: 18548) |
| DHD71 | SKQDEHDRLLKIHDKLVKQHDELLKLLTKLSRAGDSVTKKKLEEILRKLQEVSKQLEESLKDADKVSKDIN (SEQ |
| | ID NO: 18549) |
| DHD72 | TVQSLLEQHVKIVKRSIEILERHTQILQDIARSQGVSKELEDVERQVKEYRKEVKKLEEDLRQLSRNSK (SEQ ID |
| | NO: 18550) |
| DHD72 | SDSDRIEKLIRESTELLKEQQKLAKRSRELAETVESLPLTEEYLKQQREHQKKIEKLLKDSEKHLEELKRLVKSEK |
| | (SEQ ID NO: 18551) |
| DHD73 | DSEKRIEDILRTDLELAKRDAELVKEHIKLVKRIDLSEELKKQVEDVEKESKKLEDSSEKLVQKVRKRSS (SEQ |
| | ID NO: 18552) |
| DHD73 | DEEERAKDLRKYLEEQTQYYRTVTEHLRNLEKVVEELERRGKPSSELQQILERSQRIYKETTEIYDTSKKLIEELDK |
| | HHR (SEQ ID NO: 18553) |
| DHD148 | PLEDILKRHLDKVRELVRLSEEVNKLAKEVLDILKDKRVDEKELDKVLKELEKVVEEYERAVKESRDLLRELRETTR |
| | (SEQ ID NO: 18554) |
| DHD148 | DKERLLEIHERIQKLLDRNLEIIERLLRLLREARDIKDDDKLDKVIKRLKELSEESKDILDKIKELLKESEKELT |
| | (SEQ ID NO: 18555) |
| DHD149 | PEDEVIRVIEELLRIAAEVDEVHRRNVEVQEEASRVTDRERLERLNRESEELIKRSRELIEEQRKLIERLERLAT |
| | (SEQ ID NO: 18556) |
| DHD149 | DLEELIKEYAEVVRRHHKAVRDLERLVRELANAKHASEEELKRIATEILRIVKELIRVQERLIKLSEDSNEESR |
| | (SEQ ID NO: 18557) |
| DHD150 | PTDEVIEVLKELLRIHRENLRVNEEIVEVNERASRVTDREELERLLRRSNELIKRSRELNEESKKLIEKLERLAT |
| | (SEQ ID NO: 18558) |
| DHD150 | DNEEIIKEARRVVEEYKKAVDRLEELVRRAENAKHASEKELKDIVREILRISKELNKVSERLIELWERSQERAR |
| | (SEQ ID NO: 18559) |
| DHD151 | PKEDIDRVSRELVRVHKELLEVLRKSTEIVEAVARNEKDERTIEEVLEEQERAVRKLEEVSKKHKEAVKRLK (SEQ |
| | ID NO: 18560) |
| DHD151 | ELERLSEEIQKLSDRLIELIRRHSKVLEEIVRLLKHKDNDEREVRRLLKLLRDLTRRYEEVLRKVEEIVKRQEDESR |
| | (SEQ ID NO: 18561) |
| DHD152 | PEEDILRLLRKLVEVDKELLEVVRESTEVVRLVARNEKDVETVERVLRKQEEVVRKYERVSRELEEAVRRLK (SEQ |
| | ID NO: 18562) |
| DHD152 | ELKDLVEEIVKLSKENLKLWEDHSRVLEEIVRLLKHKDNDEREVRRLLKLLEDLTRRAEETSRRIEEIVKEAEDRAR |
| | (SEQ ID NO: 18563) |
| DHD153 | DEERELREVLRKHHRVVREWTKVVEELKRVVELLKRGETSEEDLLRVLKKLLEMDKRILEVNREVLRVLEKRLT |
| | (SEQ ID NO: 18564) |
| DHD153 | SLEEIIEELVELVRRSVEIAKESDEVARRIVESEDKKKELIDTLRDLHREWQEVTKRAEELVREAEKEVR (SEQ |
| | ID NO: 18565) |
| DHD154 | TAEELLEVHKKSDRVTKEHLRVSEEILKVVEVLTRGEVSSEVLKRVLRKLEELTDKLRRVTEEQRRVVEKLN (SEQ |
| | ID NO: 18566) |
| DHD154 | DLEDLLRRLRRLVDEQRRLVEELERVSRRLEKAVRDNEDERELARLSREHSDIQDKHDKLAREILEVLKRLLERTE |
| | (SEQ ID NO: 18567) |
| DHD155 | PEDDVVRII KEDLESNREVLREQKEIHRILELVTRGEVSEEAIDRVLKRQEDLLKKQKESTDKARKVVEERR (SEQ |
| | ID NO: 18568) |
| DHD155 | DEVRLITEWLKLSEESTRLLKELVELTRLLRNNVPNVEEILREHERISRELERLSRRLKDLADKLERTRR (SEQ |
| | ID NO: 18569) |
| DHD156 | DEDEVVKVHEEHVKSHEEIHRSHEEVVRAAEEDKRDSRELRTLMEEHRKLLEENEKSIEEVKKIHERVKR (SEQ |
| | ID NO: 18570) |
| DHD156 | KKEELIDISKEVLDLDDEINKISKEILELIKKLLRLKEEGREDKDKAREVKRRIRELHRRIQELNKRLRELHKRVQE |
| | TKR (SEQ ID NO: 18571) |
| DHD157 | PEEDIARRVEDLLRKSEELIKESEKILKESKRLLDRNDSDKRVLETNLRLIDKHTKLLERNLELLEELLKLAEDVAK |
| | (SEQ ID NO: 18572) |
| DHD157 | RFKDLSREYIEVVKRLLELSREALEVLREIKDTDKTDKKRIKELIDRLRKLIEEYKRIIDRLRKLSKDLEEEHR |
| | (SEQ ID NO: 18573) |
| DHD158 | DEEELVKILKELQRLSEESLEINKRLVEILRLLRRGEVPKEEVEKKLREIKKEQEKLDREHEKIKKRIEEITK |
| | (SEQ ID NO: 18574) |
| DHD158 | SLKEKILEIIERNMKLVELSNRSVEIVARILKGEKDDEETLERLLREWDKITRDYEEIIKESRKLVKELEEEAK |
| | (SEQ ID NO: 18575) |
| DHD159 | SKTEILRKALEIHKEQIDIVRKLIELSEEVLKLVEESKEKNLEKLKRIDEETDRLLERLDELHKRLTELAERLK |
| | (SEQ ID NO: 18576) |
| DHD159 | SDDEARKQLEEMKRRLREVEKKSKRVEERVRELERLVRENREDEDRVLKTLEDLLRENEKLVRTIERHVREQRELSK |
| | EVK (SEQ ID NO: 18577) |
| DHD160 | SEEELEKKADELRKLSEEWRKLQEEDKRLSEMVEKGELDLQEVDEHSLRVLERATEVHRTVDKVIEEILRTTN |
| | (SEQ ID NO: 18578) |
| DHD160 | SEKERHRESQETQEEIRRTHEEIIRKLEEILRRAKAGELPEETLDRLRRIMERLKELSERLDDLVRKLRDDHRREQK |
| | (SEQ ID NO: 18579) |
| DHD161 | SEKEILEELKRILKRVKDISDRLEELDKRTEEIARREPTKELVDELVKIHRDWLRLHEEILKLVDDALKKVEDATK |
| | (SEQ ID NO: 18580) |
| DHD161 | DLRELLELQREASRLHRELVKLLTELVKKLELIAKGEDIREEDLKRIKERLEEIKKRSKRIKEESDEIDKKTK |
| | (SEQ ID NO: 18581) |
| DHD162 | SERELQRELNKIVRRILEIHREVSELHQRAVKLIRENDNSEELEEISRRIEELSKELEKLVREHDEIVKTIE (SEQ |
| | ID NO: 18582) |
| DHD162 | SEREKLDRNDEELKEINKRVEEIKERSDRITEAIEKNERSEEEIRRLSREQNEALQRLLELHKKLVKLHRELLEDTR |
| | (SEQ ID NO: 18583) |
| DHD163 | DKEDVIRVHDEQHKLIEEQLELTRRIAELVREIAKNTASEEEIKEMLKEIKRLDDRSREIQDRLQKLLEEIRRKTK |
| | (SEQ ID NO: 18584) |
| DHD163 | TEEEIVELNKDIQRKSKEHIDLQNELVKKIERAIRENNITEELLEELERLLRESEKIVEEIRRITDKIRKDAK |
| | (SEQ ID NO: 18585) |
| DHD164 | SEKEILERLLRLSKEQNEISEEIHRLTERLVELKRRKDDDERLKRILDRQKRLVERAREISKEYEDLLRKLE (SEQ |
| | ID NO: 18586) |
| DHD164 | SMEELLRKNARLSRKQLKIIDEHLELSTKLTRGEAGDETLEEIERRSREMLEEQRRVDEESKRIREKLK (SEQ ID |
| | NO: 18587) |
| DHD165 | SEEEIRDIVEKLLRTHEEVLKEIKKLLDDSERVRRRELDKKDLDRIQKEQRDIQEENKEKAKRFDELVKELKKAAK |
| | (SEQ ID NO: 18588) |
| DHD165 | SEEEHRRTMEKVEKEVRDIKRRSEEVKKKVKANTLSEEDLVRLLERLVEDHKRLQDLSQEIIERDEKATK (SEQ |
| | ID NO: 18589) |
| DHD166 | DEDELAKEIEDVQRRNKESQEEHDKSVKKLEAAERGEIDEDSLLRVLEEDIKVLEKDIEVLERSIEVIEKAE (SEQ |
| | ID NO: 18590) |
| DHD166 | SEKELIRRLLEQQRQHLRLSERLIELSRRLVEVVRKGKDNRDLLRELKKLSEEHKKHSKDDHEKVREIREREK |
| | (SEQ ID NO: 18591) |
| SYNZIP1 | NLVAQLENEVASLENENETLKKKNLHKKDLIAYLEKEIANLRKKIEE (SEQ ID NO: 18592) |
| SYNZIP2 | ARNAYLRKKIARLKKDNLQLERDEQNLEKIIANLRDEIARLENEVASHEQ (SEQ ID NO: 18593) |
| SYNZIP3 | NEVTTLENDAAFIENENAYLEKEIARLRKEKAALRNRLAHKK (SEQ ID NO: 18594) |
| SYNZIP4 | QKVAELKNRVAVKLNRNEQLKNKVEELKNRNAYLKNELATLENEVARLENDVAE (SEQ ID NO: 18595) |
| SYNZIP5 | NTVKELKNYIQELEERNAELKNLKEHLKFAKAELEFELAAHKFE (SEQ ID NO: 18596) |
| SYNZIP6 | QKVAQLKNRVAYKLKENAKLENIVARLENDNANLEKDIANLEKDIANLERDVAR (SEQ ID NO: 18597) |
| SYNZIP7 | KEIEYLEKEIERLKDLREHLKQDNAAHRQELNALRLEEAKLEFILAHLLST (SEQ ID NO: 18598) |
| SYNZIP8 | KEIANLEKEIASLEKKVAVLKQRNAAHKQEVAALRKEIAYVEDEIQYVEDE (SEQ ID NO: 18599) |
| SYNZIP9 | QKVESLKQKIEELKQRKAQLKNDIANLEKEIAYAET (SEQ ID NO: 18600) |
| SYNZIP10 | NLLATLRSTAAVLENENHVLEKEKEKLRKEKEQLLNKLEAYK (SEQ ID NO: 18601) |
| SYNZIP11 | ELTDELKNKKEALRKDNAALLNELASLENEIANLEKEIAYFK (SEQ ID NO: 18602) |
| SYNZIP12 | NEDLVLENRLAALRNENAALENDLARLEKEIAYLEKEIEREK (SEQ ID NO: 18603) |
| SYNZIP13 | QKVEELKNKIAELENRNAVKKNRVAHLKQEIAYLKDELAAHEFE (SEQ ID NO: 18604) |
| SYNZIP14 | NDLDAYEREAEKLEKKNEVLRNRLAALENELATLRQEVASMKQELQS (SEQ ID NO: 18605) |
| SYNZIP15 | FENVTHEFILATLENENAKLRRLEAKLERELARLRNEVAWL (SEQ ID NO: 18606) |
| SYNZIP16 | NILASLENKKEELKKLNAHLLKEIENLEKEIANLEKEIAYFK (SEQ ID NO: 18607) |
| SYNZIP17 | NEKEELKSKKAELRNRIEQLKQKREQLKQKIANLRKEIEAYK (SEQ ID NO: 18608) |
| SYNZIP18 | SIAATLENDLARLENENARLEKDIANLERDLAKLEREEAYF (SEQ ID NO: 18609) |
| SYNZIP19 | NELESLENKKEELKNRNEELKQKREQLKQKLAALRNKLDAYKNRL (SEQ ID NO: 18610) |
| SYNZIP20 | STVEELLRAIQELEKRNAELKNRKEELKNLVAHLRQELAAHKYE (SEQ ID NO: 18611) |
| SYNZIP21 | NEVAQLENDVAVIENENAYLEKEIARLRKEIAALRDRLAHKK (SEQ ID NO: 18612) |
| SYNZIP22 | KRIAYLRKKIAALKKDNANLEKDIANLENEIERLIKEIKTLENEVASHEQ (SEQ ID NO: 18613) |

[0840] In some embodiments, a pair of dimerization domains as described herein bind noncovalently to each other.

[0841] In some embodiments, a pair of dimerization domains as described herein bind covalently, e.g., to form a fusion (e.g., an intein mediated fusion, e.g., as described herein). In embodiments, a pair of intein dimerization domains comprise a Chain A sequence (or a sequence having at least 75%, 80%, 85%, 90%, 95%, 96%, 97%, 98%, or 99% identity thereto) and a Chain B sequence (or a sequence having at least 75%, 80%, 85%, 90%, 95%, 96%, 97%, 98%, or 99% identity thereto), as listed in a single row of Table 33.

### Localization Sequences for Gene Modifying Systems

[0842] In certain embodiments, a gene editor system RNA further comprises an intracellular localization sequence, e.g., a nuclear localization sequence (NLS). In some embodiments, a gene modifying polypeptide comprises an NLS as comprised in SEQ ID NO: 4000 and/or SEQ ID NO: 4001, or an NLS having an amino acid sequence having at least 75%, 80%, 85%, 90%, 95%, 96%, 97%, 98%, or 99% identity thereto.

[0843] The nuclear localization sequence may be an RNA sequence that promotes the import of the RNA into the nucleus. In certain embodiments the nuclear localization signal is located on the template RNA. In certain embodiments, the gene modifying polypeptide is encoded on a first RNA, and the template RNA is a second, separate, RNA, and the nuclear localization signal is located on the template RNA and not on an RNA encoding the gene modifying polypeptide. While not wishing to be bound by theory, in some embodiments, the RNA encoding the gene modifying polypeptide is targeted primarily to the cytoplasm to promote its translation, while the template RNA is targeted primarily to the nucleus to promote insertion into the genome. In some embodiments the nuclear localization signal is at the 3′ end, 5′ end, or in an internal region of the template RNA. In some embodiments the nuclear localization signal is 3′ of the heterologous sequence (e.g., is directly 3′ of the heterologous sequence) or is 5′ of the heterologous sequence (e.g., is directly 5′ of the heterologous sequence). In some embodiments the nuclear localization signal is placed outside of the 5′ UTR or outside of the 3′ UTR of the template RNA. In some embodiments the nuclear localization signal is placed between the 5′ UTR and the 3′ UTR, wherein optionally the nuclear localization signal is not transcribed with the transgene (e.g., the nuclear localization signal is an anti-sense orientation or is downstream of a transcriptional termination signal or polyadenylation signal). In some embodiments the nuclear localization sequence is situated inside of an intron. In some embodiments a plurality of the same or different nuclear localization signals are in the RNA, e.g., in the template RNA. In some embodiments the nuclear localization signal is less than 5, 10, 25, 50, 75, 100, 150, 200, 250, 300, 350, 400, 450, 500, 600, 700, 800, 900 or 1000 bp in length. Various RNA nuclear localization sequences can be used. For example, Lubelsky and Ulitsky, Nature 555 (107-111), 2018 describe RNA sequences which drive RNA localization into the nucleus. In some embodiments, the nuclear localization signal is a SINE-derived nuclear RNA localization (SIRLOIN) signal. In some embodiments the nuclear localization signal binds a nuclear-enriched protein. In some embodiments the nuclear localization signal binds the HNRNPK protein. In some embodiments the nuclear localization signal is rich in pyrimidines, e.g., is a C/T rich, C/U rich, C rich, T rich, or U rich region. In some embodiments the nuclear localization signal is derived from a long non-coding RNA. In some embodiments the nuclear localization signal is derived from MALATI long non-coding RNA or is the 600 nucleotide M region of MALATI (described in Miyagawa et al., RNA 18, (738-751), 2012). In some embodiments the nuclear localization signal is derived from BORG long non-coding RNA or is a AGCCC motif (described in Zhang et al., Molecular and Cellular Biology 34, 2318-2329 (2014). In some embodiments the nuclear localization sequence is described in Shukla et al., The EMBO Journal e98452 (2018). In some embodiments the nuclear localization signal is derived from a retrovirus.

[0844] In some embodiments, a polypeptide described herein comprises one or more (e.g., 2, 3, 4, 5) nuclear targeting sequences, for example a nuclear localization sequence (NLS). In some embodiments, the NLS is a bipartite NLS. In some embodiments, an NLS facilitates the import of a protein comprising an NLS into the cell nucleus. In some embodiments, the NLS is fused to the N-terminus of a gene modifying polypeptide as described herein. In some embodiments, the NLS is fused to the C-terminus of the gene modifying polypeptide. In some embodiments, the NLS is fused to the N-terminus or the C-terminus of a Cas domain. In some embodiments, a linker sequence is disposed between the NLS and the neighboring domain of the gene modifying polypeptide.

[0845] In some embodiments, an NLS comprises the amino acid sequence MDSLLMNRRKFLYQFKNVRWAKGRRETYLC (SEQ ID NO: 9), PKKRKVEGADKRTADGSEFESPKKKRKV (SEQ ID NO: 10), RKSGKIAAIWKRPRKPKKKRKV (SEQ ID NO: 11) KRTADGSEFESPKKKRKV (SEQ ID NO: 12), KKTELQTTNAENKTKKL (SEQ ID NO: 13), or KRGINDRNFWRGENGRKTR (SEQ ID NO: 14), KRPAATKKAGQAKKKK (SEQ ID NO: 15), or a functional fragment or variant thereof. Exemplary NLS sequences are also described in PCT/EP2000/011690, the contents of which are incorporated herein by reference for their disclosure of exemplary nuclear localization sequences. In some embodiments, an NLS comprises an amino acid sequence as disclosed in Table 11. An NLS of this table may be utilized with one or more copies in a polypeptide in one or more locations in a polypeptide, e.g., 1, 2, 3 or more copies of an NLS in an N-terminal domain, between peptide domains, in a C-terminal domain, or in a combination of locations, in order to improve subcellular localization to the nucleus. Multiple unique sequences may be used within a single polypeptide. Sequences may be naturally monopartite or bipartite, e.g., having one or two stretches of basic amino acids, or may be used as chimeric bipartite sequences. Sequence references correspond to UniProt accession numbers, except where indicated as SeqNLS for sequences mined using a subcellular localization prediction algorithm (Lin et al BMC Bioinformat 13:157 (2012), incorporated herein by reference in its entirety).

TABLE 11
Exemplary nuclear localization signals for use in gene modifying systems

| Sequence | Sequence References | SEQ ID No. |
|---|---|---|
| AHFKISGEKRPSTDPGKKAKNPKKKKKKDP | Q76IQ7 | 223 |
| AHRAKKMSKTHA | P21827 | 224 |
| ASPEYVNLPINGNG | SeqNLS | 225 |
| CTKRPRW | O88622, Q86W56, Q9QYM2, 002776 | 226 |
| DKAKRVSRNKSEKKRR | O15516, Q5RAK8, Q91YB2, Q91YB0, | 227 |
| | Q8QGQ6, O08785, Q9WVS9, Q6YGZ4 | |
| EELRLKEELLKGIYA | Q9QY16, Q9UHL0, Q2TBP1, Q9QY15 | 228 |
| EEQLRRRKNSRLNNTG | G5EFF5 | 229 |
| EVLKVIRTGKRKKKAWKRMVTKVC | SeqNLS | 230 |
| HHHHHHHHHHHQPH | Q63934, G3V7L5, Q12837 | 231 |
| HKKKHPDASVNFSEFSK | P10103, Q4R844, P12682, B0CM99, | 232 |
| | A9RA84, Q6YKA4, P09429, P63159, | |
| | Q08IE6, P63158, Q9YH06, B1MTB0 | |
| HKRTKK | Q2R2D5 | 233 |
| IINGRKLKLKKSRRRSSQTSNNSFTSRRS | SeqNLS | 234 |
| KAEQERRK | Q8LH59 | 235 |
| KEKRKRREELFIEQKKRK | SeqNLS | 236 |
| KKGKDEWFSRGKKP | P30999 | 237 |
| KKGPSVQKRKKT | Q6ZN17 | 238 |
| KKKTVINDLLHYKKEK | SeqNLS, P32354 | 239 |
| KKNGGKGKNKPSAKIKK | SeqNLS | 240 |
| KKPKWDDFKKKKK | Q15397, Q8BKS9, Q562C7 | 241 |
| KKRKKD | SeqNLS, Q91Z62, Q1A730, Q969P5, | 242 |
| | Q2KHT6, Q9CPU7 | |
| KKRRKRRRK | SeqNLS | 243 |
| KKRRRRARK | Q9UMS6, D4A702, Q91YE8 | 244 |
| KKSKRGR | Q9UBS0 | 245 |
| KKSRKRGS | B4FG96 | 246 |
| KKSTALSRELGKIMRRR | SeqNLS, P32354 | 247 |
| KKSYQDPEIIAHSRPRK | Q9U7C9 | 248 |
| KKTGKNRKLKSKRVKTR | Q9Z301, 054943, Q8K3T2 | 249 |
| KKVSIAGQSGKLWRWKR | Q6YUL8 | 250 |
| KKYENVVIKRSPRKRGRPRK | SeqNLS | 251 |
| KNKKRK | SeqNLS | 252 |
| KPKKKR | SeqNLS | 253 |
| KRAMKDDSHGNSTSPKRRK | Q0E671 | 254 |
| KRANSNLVAAYEKAKKK | P23508 | 255 |
| KRASEDTTSGSPPKKSSAGPKR | Q9BZZ5, Q5R644 | 256 |
| KRFKRRWMVRKMKTKK | SeqNLS | 257 |
| KRGLNSSFETSPKKVK | Q8IV63 | 258 |
| KRGNSSIGPNDLSKRKQRKK | SeqNLS | 259 |
| KRIHSVSLSQSQIDPSKKVKRAK | SeqNLS | 260 |
| KRKGKLKNKGSKRKK | O15381 | 261 |
| KRRRRRRREKRKR | Q96GM8 | 262 |
| KRSNDRTYSPEEEKQRRA | Q91ZF2 | 263 |
| KRTVATNGDASGAHRAKKMSK | SeqNLS | 264 |
| KRVYNKGEDEQEHLPKGKKR | SeqNLS | 265 |
| KSGKAPRRRAVSMDNSNK | Q9WVH4, 043524 | 266 |
| KVNFLDMSLDDIIIYKELE | Q9P127 | 267 |
| KVQHRIAKKTTRRRR | Q9DXE6 | 268 |
| LSPSLSPL | Q9Y261, P32182, P35583 | 269 |
| MDSLLMNRRKFLYQFKNVRWAKGRRETYLC | Q9GZX7 | 270 |
| MPQNEYIELHRKRYGYRLDYHEKKRKKESR | SeqNLS | 271 |
| EAHERSKKAKKMIGLKAKLYHK | | |
| MVQLRPRASR | SeqNLS | 272 |
| NNKLLAKRRKGGASPKDDPMDDIK | Q965G5 | 273 |
| NYKRPMDGTYGPPAKRHEGE | O14497, A2BH40 | 274 |
| PDTKRAKLDSSETTMVKKK | SeqNLS | 275 |
| PEKRTKI | SeqNLS | 276 |
| PGGRGKKK | Q719N1, Q9UBP0, A2VDN5 | 277 |
| PGKMDKGEHRQERRDRPY | Q01844, Q61545 | 278 |
| PKKGDKYDKTD | Q45FA5 | 279 |
| PKKKSRK | O35914, Q01954 | 280 |
| PKKNKPE | Q22663 | 281 |
| PKKRAKV | P04295, P89438 | 282 |
| PKPKKLKVE | P55263, P55262, P55264, Q64640 | 283 |
| PKRGRGR | Q9FYS5, Q43386 | 284 |
| PKRRLVDDA | P0C797 | 285 |
| PKRRRTY | SeqNLS | 286 |
| PLFKRR | A8X6H4, Q9TXJ0 | 287 |
| PLRKAKR | Q86WB0, Q5R8V9 | 288 |
| PPAKRKCIF | Q6AZ28, O75928, Q8C5D8 | 289 |
| PPARRRRL | Q8NAG6 | 290 |
| PPKKKRKV | Q3L6L5, P03070, P14999, P03071 | 291 |
| PPNKRMKVKH | Q8BN78 | 292 |
| PPRIYPQLPSAPT | P0C799 | 293 |
| PQRSPFPKSSVKR | SeqNLS | 294 |
| PRPRKVPR | P0C799 | 295 |
| PRRRVQRKR | SeqNLS, Q5R448, Q5TAQ9 | 296 |
| PRRVRLK | Q58DJ0, P56477, Q13568 | 297 |
| PSRKRPR | Q62315, Q5F363, Q92833 | 298 |
| PSSKKRKV | SeqNLS | 299 |
| PTKKRVK | P07664 | 300 |
| QRPGPYDRP | SeqNLS | 301 |
| RGKGGKGLGKGGAKRHRK | SeqNLS | 302 |
| RKAGKGGGGHKTTKKRSAKDEKVP | B4FG96 | 303 |
| RKIKLKRAK | A1L3G9 | 304 |
| RKIKRKRAK | B9X187 | 305 |
| RKKEAPGPREELRSRGR | O35126, P54258, Q5IS70, P54259 | 306 |
| RKKRKGK | SeqNLS, Q29243, Q62165, Q28685, | 307 |
| | O18738, Q9TSZ6, Q14118 | |
| RKKRRQRRR | P04326, P69697, P69698, P05907, | 308 |
| | P20879, P04613, P19553, P0C1J9, | |
| | P20893, P12506, P04612, Q73370, | |
| | P0C1K0, P05906, P35965, P04609, | |
| | P04610, P04614, P04608, P05905 | |
| RKKSIPLSIKNLKRKHKRKKNKITR | Q9C0C9 | 309 |
| RKLVKPKNTKMKTKLRTNPY | Q14190 | 310 |
| RKRLILSDKGQLDWKK | SeqNLS, Q91Z62, Q1A730, Q2KHT6, | 311 |
| | Q9CPU7 | |
| RKRLKSK | Q13309 | 312 |
| RKRRVRDNM | Q8QPH4, Q809M7, A8C8X1, Q2VNC5, | 313 |
| | Q38SQ0, O89749, Q6DNQ9, Q809L9, | |
| | Q0A429, Q20NV3, P16509, P16505, | |
| | Q6DNQ5, P16506, Q6XT06, P26118, | |
| | Q2ICQ2, Q2RCG8, Q0A2D0, Q0A2H9, | |
| | Q9IQ46, Q809M3, Q6J847, Q6J856, | |
| | B4URE4, A4GCM7, Q0A440, P26120, | |
| | P16511, | |
| RKRSPKDKKEKDLDGAGKRRKT | Q7RTP6 | 314 |
| RKRTPRVDGQTGENDMNKRRRK | O94851 | 315 |
| RLPVRRRRRR | P04499, P12541, P03269, P48313, | 316 |
| | P03270 | |
| RLRFRKPKSK | P69469 | 317 |
| RQQRKR | Q14980 | 318 |
| RRDLNSSFETSPKKVK | Q8K3G5 | 319 |
| RRDRAKLR | Q9SLB8 | 320 |
| RRGDGRRR | Q80WE1, Q5R9B4, Q06787, P35922 | 321 |
| RRGRKRKAEKQ | Q812D1, Q5XXA9, Q99JF8, Q8MJG1, | 322 |
| | Q66T72, O75475 | |
| RRKKRR | Q0VD86, Q58DS6, Q5R6G2, Q9ERI5, | 323 |
| | Q6AYK2, Q6NYC1 | |
| RRKRSKSEDMDSVESKRRR | Q7TT18 | 324 |
| RRKRSR | Q99PU7, D3ZHS6, Q92560, A2VDM8 | 325 |
| RRPKGKTLQKRKPK | Q6ZN17 | 326 |
| RRRGFERFGPDNMGRKRK | Q63014, Q9DBR0 | 327 |
| RRRGKNKVAAQNCRK | SeqNLS | 328 |
| RRRKRR | Q5FVH8, Q6MZT1, Q08DH5, Q8BQP9 | 329 |
| RRRQKQKGGASRRR | SeqNLS | 330 |
| RRRREGPRARRRR | P08313, P10231 | 331 |
| RRTIRLKLVYDKCDRSCKIQKKNRNKCQYC | SeqNLS | 332 |
| RFHKCLSVGMSHNAIRFGRMPRSEKAKLKAE | | |
| RRVPQRKEVSRCRKCRK | Q5RJN4, Q32L09, Q8CAK3, Q9NUL5 | 333 |
| RVGGRRQAVECIEDLLNEPGQPLDLSCKRPRP | P03255 | 334 |
| RVVKLRIAP | P52639, Q8JMN0 | 335 |
| RVVRRR | P70278 | 336 |
| SKRKTKISRKTR | Q5RAY1, 000443 | 337 |
| SYVKTVPNRTRTYIKL | P21935 | 338 |
| TGKNEAKKRKIA | P52739, Q8K3J5, Q5RAU9 | 339 |
| TLSPASSPSSVSCPVIPASTDESPGSALNI | SeqNLS | 340 |
| VSKKQRTGKKIH | P52739, Q8K3J5, Q5RAU9 | 341 |
| SPKKKRKVE | | 342 |
| KRTADGSEFESPKKKRKVE | | 343 |
| PAAKRVKLD | | 344 |
| PKKKRKV | | 345 |
| MDSLLMNRRKFLYQFKNVRWAKGRRETYLC | | 346 |
| SPKKKRKVEAS | | 347 |
| MAPKKKRKVGIHRGVP | | 348 |

[0846] In some embodiments, the NLS is a bipartite NLS. A bipartite NLS typically comprises two basic amino acid clusters separated by a spacer sequence (which may be, e.g., about 10 amino acids in length). A monopartite NLS typically lacks a spacer. An example of a bipartite NLS is the nucleoplasmin NLS, having the sequence KR[PAATKKAGQA]KKKK (SEQ ID NO: 15), wherein the spacer is bracketed. Another exemplary bipartite NLS has the sequence PKKKRKVEGADKRTADGSEFESPKKKRKV (SEQ ID NO: 16). Exemplary NLSs are described in International Application WO2020051561, which is herein incorporated by reference in its entirety, including for its disclosures regarding nuclear localization sequences. In some embodiments, the polypeptide comprises (e.g., N-terminal of the Cas domain) a sequence according to PAAKRVKLDGG (SEQ ID NO: 18016) which comprises an NLS. In some embodiments, the polypeptide comprises (e.g., C-terminal of the RT domain) an NLS having a sequence according to KRTADGSEFESPKKKAKVE (SEQ ID NO: 18017).

[0847] In certain embodiments, a gene editor system polypeptide (e.g., a gene modifying polypeptide as described herein) further comprises an intracellular localization sequence, e.g., a nuclear localization sequence and/or a nucleolar localization sequence. The nuclear localization sequence and/or nucleolar localization sequence may be amino acid sequences that promote the import of the protein into the nucleus and/or nucleolus, where it can promote integration of heterologous sequence into the genome. In certain embodiments, a gene editor system polypeptide (e.g., (e.g., a gene modifying polypeptide as described herein) further comprises a nucleolar localization sequence. In certain embodiments, the gene modifying polypeptide is encoded on a first RNA, and the template RNA is a second, separate, RNA, and the nucleolar localization signal is encoded on the RNA encoding the gene modifying polypeptide and not on the template RNA. In some embodiments, the nucleolar localization signal is located at the N-terminus, C-terminus, or in an internal region of the polypeptide. In some embodiments, a plurality of the same or different nucleolar localization signals are used. In some embodiments, the nuclear localization signal is less than 5, 10, 25, 50, 75, or 100 amino acids in length. Various polypeptide nucleolar localization signals can be used. For example, Yang et al., Journal of Biomedical Science 22, 33 (2015), describe a nuclear localization signal that also functions as a nucleolar localization signal. In some embodiments, the nucleolar localization signal may also be a nuclear localization signal. In some embodiments, the nucleolar localization signal may overlap with a nuclear localization signal. In some embodiments, the nucleolar localization signal may comprise a stretch of basic residues. In some embodiments, the nucleolar localization signal may be rich in arginine and lysine residues. In some embodiments, the nucleolar localization signal may be derived from a protein that is enriched in the nucleolus. In some embodiments, the nucleolar localization signal may be derived from a protein enriched at ribosomal RNA loci. In some embodiments, the nucleolar localization signal may be derived from a protein that binds rRNA. In some embodiments, the nucleolar localization signal may be derived from MSP58. In some embodiments, the nucleolar localization signal may be a monopartite motif. In some embodiments, the nucleolar localization signal may be a bipartite motif. In some embodiments, the nucleolar localization signal may consist of a multiple monopartite or bipartite motifs. In some embodiments, the nucleolar localization signal may consist of a mix of monopartite and bipartite motifs. In some embodiments, the nucleolar localization signal may be a dual bipartite motif. In some embodiments, the nucleolar localization motif may be a KRASSQALGTIPKRRSSSRFIKRKK (SEQ ID NO: 17). In some embodiments, the nucleolar localization signal may be derived from nuclear factor-KB-inducing kinase. In some embodiments, the nucleolar localization signal may be an RKKRKKK motif (SEQ ID NO: 18) (described in Birbach et al., Journal of Cell Science, 117 (3615-3624), 2004).

### Evolved Variants of Gene Modifying Polypeptides and Systems

[0848] In some embodiments, the invention provides evolved variants of gene modifying polypeptides as described herein. Evolved variants can, in some embodiments, be produced by mutagenizing a reference gene modifying polypeptide, or one of the fragments or domains comprised therein. In some embodiments, one or more of the domains (e.g., the reverse transcriptase domain) is evolved. One or more of such evolved variant domains can, in some embodiments, be evolved alone or together with other domains. An evolved variant domain or domains may, in some embodiments, be combined with unevolved cognate component(s) or evolved variants of the cognate component(s), e.g., which may have been evolved in either a parallel or serial manner.

[0849] In some embodiments, the process of mutagenizing a reference gene modifying polypeptide, or fragment or domain thereof, comprises mutagenizing the reference gene modifying polypeptide or fragment or domain thereof. In embodiments, the mutagenesis comprises a continuous evolution method (e.g., PACE) or non-continuous evolution method (e.g., PANCE), e.g., as described herein. In some embodiments, the evolved gene modifying polypeptide, or a fragment or domain thereof, comprises one or more amino acid variations introduced into its amino acid sequence relative to the amino acid sequence of the reference gene modifying polypeptide, or fragment or domain thereof. In embodiments, amino acid sequence variations may include one or more mutated residues (e.g., conservative substitutions, non-conservative substitutions, or a combination thereof) within the amino acid sequence of a reference gene modifying polypeptide, e.g., as a result of a change in the nucleotide sequence encoding the gene modifying polypeptide that results in, e.g., a change in the codon at any particular position in the coding sequence, the deletion of one or more amino acids (e.g., a truncated protein), the insertion of one or more amino acids, or any combination of the foregoing. The evolved variant gene modifying polypeptide may include variants in one or more components or domains of the gene modifying polypeptide (e.g., variants introduced into a reverse transcriptase domain).

[0850] In some aspects, the disclosure provides gene modifying polypeptides, systems, kits, and methods using or comprising an evolved variant of a gene modifying polypeptide, e.g., employs an evolved variant of a gene modifying polypeptide or a gene modifying polypeptide produced or producible by PACE or PANCE. In embodiments, the unevolved reference gene modifying polypeptide is a gene modifying polypeptide as disclosed herein.

[0851] The term “phage-assisted continuous evolution (PACE),” as used herein, generally refers to continuous evolution that employs phage as viral vectors. Examples of PACE technology have been described, for example, in International PCT Application No. PCT/US 2009/056194, filed Sep. 8, 2009, published as WO 2010/028347 on Mar. 11, 2010; International PCT Application, PCT/US2011/066747, filed Dec. 22, 2011, published as WO 2012/088381 on Jun. 28, 2012; U.S. Pat. No. 9,023,594, issued May 5, 2015; U.S. Pat. No. 9,771,574, issued Sep. 26, 2017; U.S. Pat. No. 9,394,537, issued Jul. 19, 2016; International PCT Application, PCT/US2015/012022, filed Jan. 20, 2015, published as WO 2015/134121 on Sep. 11, 2015; U.S. Pat. No. 10,179,911, issued Jan. 15, 2019; and International PCT Application, PCT/US2016/027795, filed Apr. 15, 2016, published as WO 2016/168631 on Oct. 20, 2016, the entire contents of each of which are incorporated herein by reference.

[0852] The term “phage-assisted non-continuous evolution (PANCE),” as used herein, generally refers to non-continuous evolution that employs phage as viral vectors. Examples of PANCE technology have been described, for example, in Suzuki T. et al, Crystal structures reveal an elusive functional domain of pyrrolysyl-tRNA synthetase, Nat Chem Biol. 13(12): 1261-1266 (2017), incorporated herein by reference in its entirety. Briefly, PANCE is a technique for rapid in vivo directed evolution using serial flask transfers of evolving selection phage (SP), which contain a gene of interest to be evolved, across fresh host cells (e.g., E. coli cells). Genes inside the host cell may be held constant while genes contained in the SP continuously evolve. Following phage growth, an aliquot of infected cells may be used to transfect a subsequent flask containing host E. coli. This process can be repeated and/or continued until the desired phenotype is evolved, e.g., for as many transfers as desired.

[0853] Methods of applying PACE and PANCE to gene modifying polypeptides may be readily appreciated by the skilled artisan by reference to, inter alia, the foregoing references. Additional exemplary methods for directing continuous evolution of genome-modifying proteins or systems, e.g., in a population of host cells, e.g., using phage particles, can be applied to generate evolved variants of gene modifying polypeptides, or fragments or subdomains thereof. Non-limiting examples of such methods are described in International PCT Application, PCT/US2009/056194, filed Sep. 8, 2009, published as WO 2010/028347 on Mar. 11, 2010; International PCT Application, PCT/US2011/066747, filed Dec. 22, 2011, published as WO 2012/088381 on Jun. 28, 2012; U.S. Pat. No. 9,023,594, issued May 5, 2015; U.S. Pat. No. 9,771,574, issued Sep. 26, 2017; U.S. Pat. No. 9,394,537, issued Jul. 19, 2016; International PCT Application, PCT/US2015/012022, filed Jan. 20, 2015, published as WO 2015/134121 on Sep. 11, 2015; U.S. Pat. No. 10,179,911, issued Jan. 15, 2019; International Application No. PCT/US2019/37216, filed Jun. 14, 2019, International Patent Publication WO 2019/023680, published Jan. 31, 2019, International PCT Application, PCT/US2016/027795, filed Apr. 15, 2016, published as WO 2016/168631 on Oct. 20, 2016, and International Patent Publication No. PCT/US2019/47996, filed Aug. 23, 2019, each of which is incorporated herein by reference in its entirety.

[0854] In some non-limiting illustrative embodiments, a method of evolution of a evolved variant gene modifying polypeptide, of a fragment or domain thereof, comprises: (a) contacting a population of host cells with a population of viral vectors comprising the gene of interest (the starting gene modifying polypeptide or fragment or domain thereof), wherein: (1) the host cell is amenable to infection by the viral vector; (2) the host cell expresses viral genes required for the generation of viral particles; (3) the expression of at least one viral gene required for the production of an infectious viral particle is dependent on a function of the gene of interest; and/or (4) the viral vector allows for expression of the protein in the host cell, and can be replicated and packaged into a viral particle by the host cell. In some embodiments, the method comprises (b) contacting the host cells with a mutagen, using host cells with mutations that elevate mutation rate (e.g., either by carrying a mutation plasmid or some genome modification—e.g., proofing-impaired DNA polymerase, SOS genes, such as UmuC, UmuD′, and/or RecA, which mutations, if plasmid-bound, may be under control of an inducible promoter), or a combination thereof. In some embodiments, the method comprises (c) incubating the population of host cells under conditions allowing for viral replication and the production of viral particles, wherein host cells are removed from the host cell population, and fresh, uninfected host cells are introduced into the population of host cells, thus replenishing the population of host cells and creating a flow of host cells. In some embodiments, the cells are incubated under conditions allowing for the gene of interest to acquire a mutation. In some embodiments, the method further comprises (d) isolating a mutated version of the viral vector, encoding an evolved gene product (e.g., an evolved variant gene modifying polypeptide, or fragment or domain thereof), from the population of host cells.

[0855] The skilled artisan will appreciate a variety of features employable within the above-described framework. For example, in some embodiments, the viral vector or the phage is a filamentous phage, for example, an M13 phage, e.g., an M13 selection phage. In certain embodiments, the gene required for the production of infectious viral particles is the M13 gene III (gIII). In embodiments, the phage may lack a functional gIII, but otherwise comprise gI, gII, gIV, gV, gVI, gVII, gVIII, gIX, and a gX. In some embodiments, the generation of infectious VSV particles involves the envelope protein VSV-G. Various embodiments can use different retroviral vectors, for example, Murine Leukemia Virus vectors, or Lentiviral vectors. In embodiments, the retroviral vectors can efficiently be packaged with VSV-G envelope protein, e.g., as a substitute for the native envelope protein of the virus.

[0856] In some embodiments, host cells are incubated according to a suitable number of viral life cycles, e.g., at least 10, at least 20, at least 30, at least 40, at least 50, at least 100, at least 200, at least 300, at least 400, at least, 500, at least 600, at least 700, at least 800, at least 900, at least 1000, at least 1250, at least 1500, at least 1750, at least 2000, at least 2500, at least 3000, at least 4000, at least 5000, at least 7500, at least 10000, or more consecutive viral life cycles, which in on illustrative and non-limiting examples of M13 phage is 10-20 minutes per virus life cycle. Similarly, conditions can be modulated to adjust the time a host cell remains in a population of host cells, e.g., about 10, about 11, about 12, about 13, about 14, about 15, about 16, about 17, about 18, about 19, about 20, about 21, about 22, about 23, about 24, about 25, about 30, about 35, about 40, about 45, about 50, about 55, about 60, about 70, about 80, about 90, about 100, about 120, about 150, or about 180 minutes. Host cell populations can be controlled in part by density of the host cells, or, in some embodiments, the host cell density in an inflow, e.g., 10³ cells/ml, about 10⁴ cells/ml, about 10⁵ cells/ml, about 5-10⁵ cells/ml, about 10⁶ cells/ml, about 5-10⁶ cells/ml, about 10⁷ cells/ml, about 5-10⁷ cells/ml, about 10⁸ cells/ml, about 5-10⁸ cells/ml, about 10⁹ cells/ml, about 5-10⁹ cells/ml, about 10¹⁰ cells/ml, or about 5-10¹⁰ cells/ml.

### Inteins

[0857] In some embodiments, as described in more detail below, an intein-N (intN) domain may be fused to the N-terminal portion of a first domain of a gene modifying polypeptide described herein, and an intein-C (intC) domain may be fused to the C-terminal portion of a second domain of a gene modifying polypeptide described herein for the joining of the N-terminal portion to the C-terminal portion, thereby joining the first and second domains. In some embodiments, the first and second domains are each independently chosen from a DNA binding domain, an RNA binding domain, an RT domain, and an endonuclease domain.

[0858] Inteins can occur as self-splicing protein intron (e.g., peptide), e.g., which ligates flanking N-terminal and C-terminal exteins (e.g., fragments to be joined). An intein may, in some instances, comprise a fragment of a protein that is able to excise itself and join the remaining fragments (the exteins) with a peptide bond in a process known as protein splicing. Inteins are also referred to as “protein introns.” The process of an intein excising itself and joining the remaining portions of the protein is herein termed “protein splicing” or “intein-mediated protein splicing.”

[0859] In some embodiments, an intein of a precursor protein (an intein containing protein prior to intein-mediated protein splicing) comes from two genes. Such intein is referred to herein as a split intein (e.g., split intein-N and split intein-C). Accordingly, an intein-based approach may be used to join a first polypeptide sequence and a second polypeptide sequence together. For example, in cyanobacteria, DnaE, the catalytic subunit a of DNA polymerase III, is encoded by two separate genes, dnaE-n and dnaE-c. An intein-N domain, such as that encoded by the dnaE-n gene, when situated as part of a first polypeptide sequence, may join the first polypeptide sequence with a second polypeptide sequence, wherein the second polypeptide sequence comprises an intein-C domain, such as that encoded by the dnaE-c gene. Accordingly, in some embodiments, a protein can be made by providing nucleic acid encoding the first and second polypeptide sequences (e.g., wherein a first nucleic acid molecule encodes the first polypeptide sequence and a second nucleic acid molecule encodes the second polypeptide sequence), and the nucleic acid is introduced into the cell under conditions that allow for production of the first and second polypeptide sequences, and for joining of the first to the second polypeptide sequence via an intein-based mechanism.

[0860] Use of inteins for joining heterologous protein fragments is described, for example, in Wood et al., J. Biol. Chem.289(21); 14512-9 (2014) (incorporated herein by reference in its entirety). For example, when fused to separate protein fragments, the inteins IntN and IntC may recognize each other, splice themselves out, and/or simultaneously ligate the flanking N- and C-terminal exteins of the protein fragments to which they were fused, thereby reconstituting a full-length protein from the two protein fragments.

[0861] In some embodiments, a synthetic intein based on the dnaE intein, the Cfa-N (e.g., split intein-N) and Cfa-C (e.g., split intein-C) intein pair, is used. Examples of such inteins have been described, e.g., in Stevens et al., J Am Chem Soc. 2016 Feb. 24; 138(7):2162-5 (incorporated herein by reference in its entirety). Non-limiting examples of intein pairs that may be used in accordance with the present disclosure include: Cfa DnaE intein, Ssp GyrB intein, Ssp DnaX intein, Ter DnaE3 intein, Ter ThyX intein, Rma DnaB intein and Cne Prp8 intein (e.g., as described in U.S. Pat. No. 8,394,604, incorporated herein by reference.

[0862] In some embodiments involving a split Cas9, an intein-N domain and an intein-C domain may be fused to the N-terminal portion of the split Cas9 and the C-terminal portion of a split Cas9, respectively, for the joining of the N-terminal portion of the split Cas9 and the C-terminal portion of the split Cas9. For example, in some embodiments, an intein-N is fused to the C-terminus of the N-terminal portion of the split Cas9, i.e., to form a structure of N-[N-terminal portion of the split Cas9]−[intein-N]˜C. In some embodiments, an intein-C is fused to the N-terminus of the C-terminal portion of the split Cas9, i.e., to form a structure of N-[intein-C]˜[C-terminal portion of the split Cas9]-C. The mechanism of intein-mediated protein splicing for joining the proteins the inteins are fused to (e.g., split Cas9) is described in Shah et al., Chem Sci. 2014; 5(1):446-461, incorporated herein by reference. Methods for designing and using inteins are known in the art and described, for example by WO2020051561, WO2014004336, WO2017132580, US20150344549, and US20180127780, each of which is incorporated herein by reference in their entirety.

[0863] In some embodiments, a split refers to a division into two or more fragments. In some embodiments, a split Cas9 protein or split Cas9 comprises a Cas9 protein that is provided as an N-terminal fragment and a C-terminal fragment encoded by two separate nucleotide sequences. The polypeptides corresponding to the N-terminal portion and the C-terminal portion of the Cas9 protein may be spliced to form a reconstituted Cas9 protein. In embodiments, the Cas9 protein is divided into two fragments within a disordered region of the protein, e.g., as described in Nishimasu et al., Cell, Volume 156, Issue 5, pp. 935-949, 2014, or as described in Jiang et al. (2016) Science 351: 867-871 and PDB file: 5F9R (each of which is incorporated herein by reference in its entirety). A disordered region may be determined by one or more protein structure determination techniques known in the art, including, without limitation, X-ray crystallography, NMR spectroscopy, electron microscopy (e.g., cryoEM), and/or in silico protein modeling. In some embodiments, the protein is divided into two fragments at any C, T, A, or S, e.g., within a region of SpCas9 between amino acids A292-G364, F445-K483, or E565-T637, or at corresponding positions in any other Cas9, Cas9 variant (e.g., nCas9, dCas9), or other napDNAbp. In some embodiments, protein is divided into two fragments at SpCas9 T310, T313, A456, S469, or C574. In some embodiments, the process of dividing the protein into two fragments is referred to as splitting the protein.

[0864] In some embodiments, a protein fragment ranges from about 2-1000 amino acids (e.g., between 2-10, 10-50, 50-100, 100-200, 200-300, 300-400, 400-500, 500-600, 600-700, 700-800, 800-900, or 900-1000 amino acids) in length. In some embodiments, a protein fragment ranges from about 5-500 amino acids (e.g., between 5-10, 10-50, 50-100, 100-200, 200-300, 300-400, or 400-500 amino acids) in length. In some embodiments, a protein fragment ranges from about 20-200 amino acids (e.g., between 20-30, 30-40, 40-50, 50-100, or 100-200 amino acids) in length.

[0865] In some embodiments, a portion or fragment of a gene modifying polypeptide is fused to an intein. The nuclease can be fused to the N-terminus or the C-terminus of the intein. In some embodiments, a portion or fragment of a fusion protein is fused to an intein and fused to an AAV capsid protein. The intein, nuclease and capsid protein can be fused together in any arrangement (e.g., nuclease-intein-capsid, intein-nuclease-capsid, capsid-intein-nuclease, etc.). In some embodiments, the N-terminus of an intein is fused to the C-terminus of a fusion protein and the C-terminus of the intein is fused to the N-terminus of an AAV capsid protein.

[0866] In some embodiments, an endonuclease domain (e.g., a nickase Cas9 domain) is fused to intein-N and a polypeptide comprising an RT domain is fused to an intein-C.

[0867] Exemplary nucleotide and amino acid sequences of intein-N domains and compatible intein-C domains are provided below:

```
DnaE Intein-N DNA:
(SEQ ID NO: 29)
TGCCTGTCATACGAAACCGAGATACTGACAGTAGAATATGGCCTTCTGCCAATCGGGAAGAT
TGTGGAGAAACGGATAGAATGCACAGTTTACTCTGTCGATAACAATGGTAACATTTATACTC
AGCCAGTTGCCCAGTGGCACGACCGGGGAGAGCAGGAAGTATTCGAATACTGTCTGGAGGA
TGGAAGTCTCATTAGGGCCACTAAGGACCACAAATTTATGACAGTCGATGGCCAGATGCTGC
CTATAGACGAAATCTTTGAGCGAGAGTTGGACCTCATGCGAGTTGACAACCTTCCTAAT
DnaE Intein-N Protein:
  (SEQ ID NO: 30)
CLSYETEILTVEYGLLPIGKIVEKRIECTVYSVDNNGNIYTQPVAQWHDRGEQEVFEYCLEDGSLI
RATKDHKFMTVDGQMLPIDEIFERELDLMRVDNLPN
DnaE Intein-C DNA:
  (SEQ ID NO: 31)
ATGATCAAGATAGCTACAAGGAAGTATCTTGGCAAACAAAACGTTTATGATATTGGAGTCG
AAAGAGATCACAACTTTGCTCTGAAGAACGGATTCATAGCTTCTAAT
DnaE Intein-C Protein:
  (SEQ ID NO: 32)
MIKIATRKYLGKQNVYDIGVERDHNFALKNGFIASN
Cfa-N DNA:
  (SEQ ID NO: 33)
TGCCTGTCTTATGATACCGAGATACTTACCGTTGAATATGGCTTCTTGCCTATTGGAAAGATT
GTCGAAGAGAGAATTGAATGCACAGTATATACTGTAGACAAGAATGGTTTCGTTTACACACA
GCCCATTGCTCAATGGCACAATCGCGGCGAACAAGAAGTATTTGAGTACTGTCTCGAGGATG
GAAGCATCATACGAGCAACTAAAGATCATAAATTCATGACCACTGACGGGCAGATGTTGCC
AATAGATGAGATATTCGAGCGGGGCTTGGATCTCAAACAAGTGGATGGATTG CCA
Cfa-N Protein:
  (SEQ ID NO: 34)
CLSYDTEILTVEYGFLPIGKIVEERIECTVYTVDKNGFVYTQPIAQWHNRGEQEVFEYCLEDGSIIR
ATKDHKFMTTDGQMLPIDEIFERGLDLKQVDGLP
Cfa-C DNA:
  (SEQ ID NO: 35)
ATGAAGAGGACTGCCGATGGATCAGAGTTTGAATCTCCCAAGAAGAAGAGGAAAGTAAAGA
TAATATCTCGAAAAAGTCTTGGTACCCAAAATGTCTATGATATTGGAGTGGAGAAAGATCAC
AACTTCCTTCTCAAGAACGGTCTCGTAGCCAGCAAC
Cfa-C Protein:
  (SEQ ID NO: 36)
MKRTADGSEFESPKKKRKVKIISRKSLGTQNVYDIGVEKDHNFLLKNGLVASN
```

[0868] In some embodiments, an RBD of a gene modifying polypeptide as described herein is attached to an RT domain via an intein-based fusion, e.g., via an intein dimerization sequence as listed in Table 33 below (or an intein dimerization sequence comprising an amino acid sequence having at least 75%, 80%, 85%, 90%, 95%, 96%, 97%, 98%, or 99% identity thereto). In some embodiments, an RBD of a gene modifying polypeptide as described herein is attached to a DBD (e.g., a Cas domain, e.g., a Cas9 domain, e.g., an nCas9 or dCas9 domain) via an intein-based fusion, e.g., via an intein dimerization sequence as listed in Table 33 below (or an intein dimerization sequence comprising an amino acid sequence having at least 75%, 80%, 85%, 90%, 95%, 96%, 97%, 98%, or 99% identity thereto). In some embodiments, an RT domain of a gene modifying polypeptide as described herein is attached to a DBD (e.g., a Cas domain, e.g., a Cas9 domain, e.g., an nCas9 or dCas9 domain) via an intein-based fusion, e.g., via an intein dimerization sequence as listed in Table 33 below (or an intein dimerization sequence comprising an amino acid sequence having at least 75%, 80%, 85%, 90%, 95%, 96%, 97%, 98%, or 99% identity thereto). In some embodiments, a DBD (e.g., a Cas domain, e.g., a Cas9 domain, e.g., an nCas9 or dCas9 domain) of a gene modifying polypeptide as described herein is attached to an RBD and to an RT domain via intein-based fusions. In embodiments, the DBD is attached to the RBD and the RT domain via different intein dimerization sequences, e.g., intein dimerization sequences as listed in Table 33 below (or sequences comprising an amino acid sequence having at least 75%, 80%, 85%, 90%, 95%, 96%, 97%, 98%, or 99% identity thereto). In embodiments, the DBD is attached to the RBD and the RT domain via the same intein dimerization sequence, e.g., an intein dimerization sequence as listed in Table 33 below (or a sequence comprising an amino acid sequence having at least 75%, 80%, 85%, 90%, 95%, 96%, 97%, 98%, or 99% identity thereto). In some embodiments, the intein dimerization sequences of an RBD and a DBD to be bound to each other comprise a Chain A sequence and a Chain B sequence, respectively, or a Chain B sequence and a Chain A sequence, respectively, as listed in a single row of Table 33 below (or sequences having at least 75%, 80%, 85%, 90%, 95%, 96%, 97%, 98%, or 99% identity thereto). In some embodiments, the intein dimerization sequences of an RBD and an RT domain to be bound to each other comprise a Chain A sequence and a Chain B sequence, respectively, or a Chain B sequence and a Chain A sequence, respectively, as listed in a single row of Table 33 below (or sequences having at least 75%, 80%, 85%, 90%, 95%, 96%, 97%, 98%, or 99% identity thereto). In some embodiments, the intein dimerization sequences of an RT domain and a DBD to be bound to each other comprise a Chain A sequence and a Chain B sequence, respectively, or a Chain B sequence and a Chain A sequence, respectively, as listed in a single row of Table 33 below (or sequences having at least 75%, 80%, 85%, 90%, 95%, 96%, 97%, 98%, or 99% identity thereto).

TABLE 33
Exemplary intein dimerization sequences

| | | | Exemplary | | | Exemplary |
|---|---|---|---|---|---|---|
| | Chain A | | Chain A | Chain B | | Chain B |
| System | name | Chain A sequence | source | name | Chain B sequence | source |
| Sce- | Sce- | CFAKGTNVLMADGSIECIENIEVGNKV | snapgene | Sce- | GHGGIRNNLNTENPLWDAI | snapgene |
| VMA | VMA-5′- | MGKDGRPREVIKLPRGRETMYSVVQKS | | VMA-3′- | VGLGFLKDGVKNIPSFLST | common |
| | v1 | QHRAHKSDSSREVPELLKFTCNATHEL | | v1 | DNIGTRETFLAGLIDSDGY | features |
| | | VVRTPRSVRRLSRTIKGVEYFEVITFE | | | VTDEHGIKATIKTIHTSVR | |
| | | MGQKKAPDGRIVELVKEVSKSYPISEG | | | DGLVSLARSLGLVVSVNAE | |
| | | PERANELVESYRKASNKAYFEWTIEAR | | | PAKVDMNVTKHKISYAIYM | |
| | | DLSLLGSHVRKATYQTYAPILYENDHF | | | SGGDVLLNVLSKCAGSKKF | |
| | | FDYMQKSKFHLTIEGPKVLAYLLGLWI | | | RPAPAAAFARECRGFYFEL | |
| | | GDGLSDRATFSVDSRDTSLMERVTEYA | | | QELKEDDYYGITLSDDSDH | |
| | | EKLNLCAEYKDRKEPQVAKTVNLYSKV | | | QFLLGSQVVVQN (SEQ | |
| | | VRG (SEQ ID NO: 18614) | | | ID NO: 18615) | |
| Sce- | Sce- | CFAKGTNVLMADGSIECIENIEVGNKV | snapgene | Sce- | GHGGIRNNLNTENPLWDAI | snapgene |
| VMA | VMA-5′- | MGKDGRPREVIKLPRGRETMYSVVQKS | | VMA-3′- | VGLGFLKDGVKNIPSFLST | common |
| | v1 | QHRAHKSDSSREVPELLKFTCNATHEL | | v2 | DNIGTRETFLAGLIDSDGY | features |
| | | VVRTPRSVRRLSRTIKGVEYFEVITFE | | | VTDEHGIKATIKTIHTSVR | |
| | | MGQKKAPDGRIVELVKEVSKSYPISEG | | | DGLVSLARSLGLVVSVNAE | |
| | | PERANELVESYRKASNKAYFEWTIEAR | | | PAKVDMNVTKHKISYAIYM | |
| | | DLSLLGSHVRKATYQTYAPILYENDHF | | | SGGDVLLNVLSKCAGSKKF | |
| | | FDYMQKSKFHLTIEGPKVLAYLLGLWI | | | RPAPAAAFARECRGFYFEL | |
| | | GDGLSDRATFSVDSRDTSLMERVTEYA | | | QELKEDDYYGITLSDDSDH | |
| | | EKLNLCAEYKDRKEPQVAKTVNLYSKV | | | QFLLGSQVVVQNCGERGNG | |
| | | VRG (SEQ ID NO: 18614) | | | SG (SEQ ID NO: | |
| | | | | | 18616) | |
| Sce- | Sce- | CFAKGTNVLMADGSIECIENIEVGNKV | snapgene | Sce- | GHGGIRNNLNTENPLWDAI | snapgene |
| VMA | VMA-5′- | MGKDGRPREVIKLPRGRETMYSVVQKS | | VMA-3′- | VGLGFLKDGVKNIPSFLST | common |
| | v1 | QHRAHKSDSSREVPELLKFTCNATHEL | | v3 | DNIGTRETFLAGLIDSDGY | features |
| | | VVRTPRSVRRLSRTIKGVEYFEVITFE | | | VTDEHGIKATIKTIHTSVR | |
| | | MGQKKAPDGRIVELVKEVSKSYPISEG | | | DGLVSLARSLGLVVSVNAE | |
| | | PERANELVESYRKASNKAYFEWTIEAR | | | PAKVDMNVTKHKISYAIYM | |
| | | DLSLLGSHVRKATYQTYAPILYENDHF | | | SGGDVLLNVLSKCAGSKKF | |
| | | FDYMQKSKFHLTIEGPKVLAYLLGLWI | | | RPAPAAAFARECRGFYFEL | |
| | | GDGLSDRATFSVDSRDTSLMERVTEYA | | | QELKEDDYYGITLSDDSDH | |
| | | EKLNLCAEYKDRKEPQVAKTVNLYSKV | | | QFLLGSQVVVQNCTMTEKG | |
| | | VRG (SEQ ID NO: 18614) | | | SG (SEQ ID NO: | |
| | | | | | 18617) | |
| Sce- | Sce- | CFAKGTNVLMADGSIECIENIEVGNKV | snapgene | Sce- | GHGGIRNNLNTENPLWDAI | snapgene |
| VMA | VMA-5′- | MGKDGRPREVIKLPRGRETMYSVVQKS | | VMA-3′- | VGLGFLKDGVKNIPSFLST | common |
| | v1 | QHRAHKSDSSREVPELLKFTCNATHEL | | v4 | DNIGTRETFLAGLIDSDGY | features |
| | | VVRTPRSVRRLSRTIKGVEYFEVITFE | | | VTDEHGIKATIKTIHTSVR | |
| | | MGQKKAPDGRIVELVKEVSKSYPISEG | | | DGLVSLARSLGLVVSVNAE | |
| | | PERANELVESYRKASNKAYFEWTIEAR | | | PAKVDMNVTKHKISYAIYM | |
| | | DLSLLGSHVRKATYQTYAPILYENDHF | | | SGGDVLLNVLSKCAGSKKF | |
| | | FDYMQKSKFHLTIEGPKVLAYLLGLWI | | | RPAPAAAFARECRGFYFEL | |
| | | GDGLSDRATFSVDSRDTSLMERVTEYA | | | QELKEDDYYGITLSDDSDH | |
| | | EKLNLCAEYKDRKEPQVAKTVNLYSKV | | | QFLLGSQVVVQNCGEKSMG | |
| | | VRG (SEQ ID NO: 18614) | | | SG (SEQ ID NO: | |
| | | | | | 18618) | |
| Sce- | Sce- | CFAKGTNVLMADGSIECIENIEVGNKV | snapgene | Sce- | VLLNVLSKCAGSKKFRPAP | nature.com/ |
| VMA | VMA-5′- | MGKDGRPREVIKLPRGRETMYSVVQKS | | VMA-3′- | AAAFARECRGFYFELQELK | articles/ |
| | v1 | QHRAHKSDSSREVPELLKFTCNATHEL | | v5 | EDDYYGITLSDDSDHQFLL | nmeth.3585 |
| | | VVRTPRSVRRLSRTIKGVEYFEVITFE | | | ANQVVVHN (SEQ ID | |
| | | MGQKKAPDGRIVELVKEVSKSYPISEG | | | NO: 18619) | |
| | | PERANELVESYRKASNKAYFEWTIEAR | | | | |
| | | DLSLLGSHVRKATYQTYAPILYENDHF | | | | |
| | | FDYMQKSKFHLTIEGPKVLAYLLGLWI | | | | |
| | | GDGLSDRATFSVDSRDTSLMERVTEYA | | | | |
| | | EKLNLCAEYKDRKEPQVAKTVNLYSKV | | | | |
| | | VRG (SEQ ID NO: 18614) | | | | |
| Sce- | Sce- | CFAKGTNVLMADGSIECIENIEVGNKV | snapgene | Sce- | VLLNVLSKCAGSKKFRPAP | nature.com/ |
| VMA | VMA-5′- | MGKDGRPREVIKLPRGRETMYSVVQKS | | VMA-3′- | AAAFARECRGFYFELQELK | articles/ |
| | v1 | QHRAHKSDSSREVPELLKFTCNATHEL | | v6 | EDDYYGITLSDDSDHQFLL | nmeth.3585 |
| | | VVRTPRSVRRLSRTKGVEYFEVITFE | | | ANQVVVHNCGERGNGSG | |
| | | MGQKKAPDGRIVELVKEVSKSYPISEG | | | (SEQ ID NO: 18620) | |
| | | PERANELVESYRKASNKAYFEWTIEAR | | | | |
| | | DLSLLGSHVRKATYQTYAPILYENDHF | | | | |
| | | FDYMQKSKFHLTIEGPKVLAYLLGLWI | | | | |
| | | GDGLSDRATFSVDSRDTSLMERVTEYA | | | | |
| | | EKLNLCAEYKDRKEPQVAKTVNLYSKV | | | | |
| | | VRG (SEQ ID NO: 18614) | | | | |
| Sce- | Sce- | CFAKGTNVLMADGSIECIENIEVGNKV | snapgene | Sce- | VLLNVLSKCAGSKKFRPAP | nature.com/ |
| VMA | VMA-5′- | MGKDGRPREVIKLPRGRETMYSVVQKS | | VMA-3′- | AAAFARECRGFYFELQELK | articles/ |
| | v1 | QHRAHKSDSSREVPELLKFTCNATHEL | | v7 | EDDYYGITLSDDSDHQFLL | nmeth.3585 |
| | | VVRTPRSVRRLSRTIKGVEYFEVITFE | | | ANQVVVHNCTMTEKGSG | |
| | | MGQKKAPDGRIVELVKEVSKSYPISEG | | | (SEQ ID NO: 18621) | |
| | | PERANELVESYRKASNKAYFEWTIEAR | | | | |
| | | DLSLLGSHVRKATYQTYAPILYENDHF | | | | |
| | | FDYMQKSKFHLTIEGPKVLAYLLGLWI | | | | |
| | | GDGLSDRATFSVDSRDTSLMERVTEYA | | | | |
| | | EKLNLCAEYKDRKEPQVAKTVNLYSKV | | | | |
| | | VRG (SEQ ID NO: 18614) | | | | |
| Sce- | Sce- | CFAKGTNVLMADGSIECIENIEVGNKV | snapgene | Sce- | VLLNVLSKCAGSKKFRPAP | nature.com/ |
| VMA | VMA-5′- | MGKDGRPREVIKLPRGRETMYSVVQKS | | VMA-3′- | AAAFARECRGFYFELQELK | articles/ |
| | v1 | QHRAHKSDSSREVPELLKFTCNATHEL | | v8 | EDDYYGITLSDDSDHQFLL | nmeth.3585 |
| | | VVRTPRSVRRLSRTIKGVEYFEVITFE | | | ANQVVVHNCGEKSMGSG | |
| | | MGQKKAPDGRIVELVKEVSKSYPISEG | | | (SEQ ID NO: 18622) | |
| | | PERANELVESYRKASNKAYFEWTIEAR | | | | |
| | | DLSLLGSHVRKATYQTYAPILYENDHF | | | | |
| | | FDYMQKSKFHLTIEGPKVLAYLLGLWI | | | | |
| | | GDGLSDRATFSVDSRDTSLMERVTEYA | | | | |
| | | EKLNLCAEYKDRKEPQVAKTVNLYSKV | | | | |
| | | VRG (SEQ ID NO: 18614) | | | | |
| Sce- | Sce- | GGIIYVGCFAKGTNVLMADGSIECIEN | snapgene | Sce- | GHGGIRNNLNTENPLWDAI | snapgene |
| VMA | VMA-5′- | IEVGNKVMGKDGRPREVIKLPRGRETM | | VMA-3′- | VGLGFLKDGVKNIPSFLST | common |
| | v2 | YSVVQKSQHRAHKSDSSREVPELLKFT | | v1 | DNIGTRETFLAGLIDSDGY | features |
| | | CNATHELVVRTPRSVRRLSRTIKGVEY | | | VTDEHGIKATIKTIHTSVR | |
| | | FEVITFEMGQKKAPDGRIVELVKEVSK | | | DGLVSLARSLGLVVSVNAE | |
| | | SYPISEGPERANELVESYRKASNKAYF | | | PAKVDMNVTKHKISYAIYM | |
| | | EWTIEARDLSLLGSHVRKATYQTYAPI | | | SGGDVLLNVLSKCAGSKKF | |
| | | LYENDHFFDYMQKSKFHLTIEGPKVLA | | | RPAPAAAFARECRGFYFEL | |
| | | YLLGLWIGDGLSDRATFSVDSRDTSLM | | | QELKEDDYYGITLSDDSDH | |
| | | ERVTEYAEKLNLCAEYKDRKEPQVAKT | | | QFLLGSQVVVQN (SEQ | |
| | | VNLYSKVVRG snapgene common | | | ID NO: 18615) | |
| | | features (SEQ ID NO: 18623) | | | | |
| Sce- | Sce- | GGIIYVGCFAKGTNVLMADGSIECIEN | snapgene | Sce- | GHGGIRNNLNTENPLWDAI | snapgene |
| VMA | VMA-5′- | IEVGNKVMGKDGRPREVIKLPRGRETM | | VMA-3′- | VGLGFLKDGVKNIPSFLST | common |
| | v2 | YSVVQKSQHRAHKSDSSREVPELLKFT | | v2 | DNIGTRETFLAGLIDSDGY | features |
| | | CNATHELVVRTPRSVRRLSRTIKGVEY | | | VTDEHGIKATIKTIHTSVR | |
| | | FEVITFEMGQKKAPDGRIVELVKEVSK | | | DGLVSLARSLGLVVSVNAE | |
| | | SYPISEGPERANELVESYRKASNKAYF | | | PAKVDMNVTKHKISYAIYM | |
| | | EWTIEARDLSLLGSHVRKATYQTYAPI | | | SGGDVLLNVLSKCAGSKKF | |
| | | LYENDHFFDYMQKSKFHLTIEGPKVLA | | | RPAPAAAFARECRGFYFEL | |
| | | YLLGLWIGDGLSDRATFSVDSRDTSLM | | | QELKEDDYYGITLSDDSDH | |
| | | ERVTEYAEKLNLCAEYKDRKEPQVAKT | | | QFLLGSQVVVQNCGERGNG | |
| | | VNLYSKVVRG snapgene common | | | SG (SEQ ID NO: | |
| | | features (SEQ ID NO: 18623) | | | 18616) | |
| Sce- | Sce- | GGIIYVGCFAKGTNVLMADGSIECIEN | snapgene | Sce- | GHGGIRNNLNTENPLWDAI | snapgene |
| VMA | VMA-5′- | IEVGNKVMGKDGRPREVIKLPRGRETM | | VMA-3′- | VGLGFLKDGVKNIPSFLST | common |
| | v2 | YSVVQKSQHRAHKSDSSREVPELLKFT | | v3 | DNIGTRETFLAGLIDSDGY | features |
| | | CNATHELVVRTPRSVRRLSRTIKGVEY | | | VTDEHGIKATIKTIHTSVR | |
| | | FEVITFEMGQKKAPDGRIVELVKEVSK | | | DGLVSLARSLGLVVSVNAE | |
| | | SYPISEGPERANELVESYRKASNKAYF | | | PAKVDMNVTKHKISYAIYM | |
| | | EWTIEARDLSLLGSHVRKATYQTYAPI | | | SGGDVLLNVLSKCAGSKKF | |
| | | LYENDHFFDYMQKSKFHLTIEGPKVLA | | | RPAPAAAFARECRGFYFEL | |
| | | YLLGLWIGDGLSDRATFSVDSRDTSLM | | | QELKEDDYYGITLSDDSDH | |
| | | ERVTEYAEKLNLCAEYKDRKEPQVAKT | | | QFLLGSQVVVQNCTMTEKG | |
| | | VNLYSKVVRG snapgene common | | | SG (SEQ ID NO: | |
| | | features (SEQ ID NO: 18623) | | | 18617) | |
| Sce- | Sce- | GGIIYVGCFAKGTNVLMADGSIECIEN | snapgene | Sce- | GHGGIRNNLNTENPLWDAI | snapgene |
| VMA | VMA-5′- | IEVGNKVMGKDGRPREVIKLPRGRETM | | VMA-3′- | VGLGFLKDGVKNIPSFLST | common |
| | v2 | YSVVQKSQHRAHKSDSSREVPELLKFT | | v4 | DNIGTRETFLAGLIDSDGY | features |
| | | CNATHELVVRTPRSVRRLSRTIKGVEY | | | VTDEHGIKATIKTIHTSVR | |
| | | FEVITFEMGQKKAPDGRIVELVKEVSK | | | DGLVSLARSLGLVVSVNAE | |
| | | SYPISEGPERANELVESYRKASNKAYF | | | PAKVDMNVTKHKISYAIYM | |
| | | EWTIEARDLSLLGSHVRKATYQTYAPI | | | SGGDVLLNVLSKCAGSKKF | |
| | | LYENDHFFDYMQKSKFHLTIEGPKVLA | | | RPAPAAAFARECRGFYFEL | |
| | | YLLGLWIGDGLSDRATFSVDSRDTSLM | | | QELKEDDYYGITLSDDSDH | |
| | | ERVTEYAEKLNLCAEYKDRKEPQVAKT | | | QFLLGSQVVVQNCGEKSMG | |
| | | VNLYSKVVRG snapgene common | | | SG (SEQ ID NO: | |
| | | features (SEQ ID NO: 18623) | | | 18618) | |
| Sce- | Sce- | GGIIYVGCFAKGTNVLMADGSIECIEN | snapgene | Sce- | VLLNVLSKCAGSKKFRPAP | nature.com/ |
| VMA | VMA-5′- | IEVGNKVMGKDGRPREVIKLPRGRETM | | VMA-3′- | AAAFARECRGFYFELQELK | articles/ |
| | v2 | YSVVQKSQHRAHKSDSSREVPELLKFT | | v5 | EDDYYGITLSDDSDHQFLL | nmeth.3585 |
| | | CNATHELVVRTPRSVRRLSRTIKGVEY | | | ANQVVVHN (SEQ ID | |
| | | FEVITFEMGQKKAPDGRIVELVKEVSK | | | NO: 18619) | |
| | | SYPISEGPERANELVESYRKASNKAYF | | | | |
| | | EWTIEARDLSLLGSHVRKATYQTYAPI | | | | |
| | | LYENDHFFDYMQKSKFHLTIEGPKVLA | | | | |
| | | YLLGLWIGDGLSDRATFSVDSRDTSLM | | | | |
| | | ERVTEYAEKLNLCAEYKDRKEPQVAKT | | | | |
| | | VNLYSKVVRG snapgene common | | | | |
| | | features (SEQ ID NO: 18623) | | | | |
| Sce- | Sce- | GGIIYVGCFAKGTNVLMADGSIECIEN | snapgene | Sce- | VLLNVLSKCAGSKKFRPAP | nature.com/ |
| VMA | VMA-5′- | IEVGNKVMGKDGRPREVIKLPRGRETM | | VMA-3′- | AAAFARECRGFYFELQELK | articles/ |
| | v2 | YSVVQKSQHRAHKSDSSREVPELLKFT | | v6 | EDDYYGITLSDDSDHQFLL | nmeth.3585 |
| | | CNATHELVVRTPRSVRRLSRTIKGVEY | | | ANQVVVHNCGERGNGSG | |
| | | FEVITFEMGQKKAPDGRIVELVKEVSK | | | (SEQ ID NO: 18620) | |
| | | SYPISEGPERANELVESYRKASNKAYF | | | | |
| | | EWTIEARDLSLLGSHVRKATYQTYAPI | | | | |
| | | LYENDHFFDYMQKSKFHLTIEGPKVLA | | | | |
| | | YLLGLWIGDGLSDRATFSVDSRDTSLM | | | | |
| | | ERVTEYAEKLNLCAEYKDRKEPQVAKT | | | | |
| | | VNLYSKVVRG snapgene common | | | | |
| | | features (SEQ ID NO: 18623) | | | | |
| Sce- | Sce- | GGIIYVGCFAKGTNVLMADGSIECIEN | snapgene | Sce- | VLLNVLSKCAGSKKFRPAP | nature.com/ |
| VMA | VMA-5′- | IEVGNKVMGKDGRPREVIKLPRGRETM | | VMA-3′- | AAAFARECRGFYFELQELK | articles/ |
| | v2 | YSVVQKSQHRAHKSDSSREVPELLKFT | | v7 | EDDYYGITLSDDSDHQFLL | nmeth.3585 |
| | | CNATHELVVRTPRSVRRLSRTIKGVEY | | | ANQVVVHNCTMTEKGSG | |
| | | FEVITFEMGQKKAPDGRIVELVKEVSK | | | (SEQ ID NO: 18621) | |
| | | SYPISEGPERANELVESYRKASNKAYF | | | | |
| | | EWTIEARDLSLLGSHVRKATYQTYAPI | | | | |
| | | LYENDHFFDYMQKSKFHLTIEGPKVLA | | | | |
| | | YLLGLWIGDGLSDRATFSVDSRDTSLM | | | | |
| | | ERVTEYAEKLNLCAEYKDRKEPQVAKT | | | | |
| | | VNLYSKVVRG snapgene common | | | | |
| | | features (SEQ ID NO: 18623) | | | | |
| Sce- | Sce- | GGIIYVGCFAKGTNVLMADGSIECIEN | snapgene | Sce- | VLLNVLSKCAGSKKFRPAP | nature.com/ |
| VMA | VMA-5′- | IEVGNKVMGKDGRPREVIKLPRGRETM | | VMA-3′- | AAAFARECRGFYFELQELK | articles/ |
| | v2 | YSVVQKSQHRAHKSDSSREVPELLKFT | | v8 | EDDYYGITLSDDSDHQFLL | nmeth.3585 |
| | | CNATHELVVRTPRSVRRLSRTIKGVEY | | | ANQVVVHNCGEKSMGSG | |
| | | FEVITFEMGQKKAPDGRIVELVKEVSK | | | (SEQ ID NO: 18622) | |
| | | SYPISEGPERANELVESYRKASNKAYF | | | | |
| | | EWTIEARDLSLLGSHVRKATYQTYAPI | | | | |
| | | LYENDHFFDYMQKSKFHLTIEGPKVLA | | | | |
| | | YLLGLWIGDGLSDRATFSVDSRDTSLM | | | | |
| | | ERVTEYAEKLNLCAEYKDRKEPQVAKT | | | | |
| | | VNLYSKVVRG snapgene common | | | | |
| | | features (SEQ ID NO: 18623) | | | | |
| Sce- | Sce- | GGVVLEKGCFAKGTNVLMADGSIECIE | snapgene | Sce- | GHGGIRNNLNTENPLWDAI | snapgene |
| VMA | VMA-5′- | NIEVGNKVMGKDGRPREVIKLPRGRET | | VMA-3′- | VGLGFLKDGVKNIPSFLST | common |
| | v3 | MYSVVQKSQHRAHKSDSSREVPELLKF | | v1 | DNIGTRETFLAGLIDSDGY | features |
| | | TCNATHELVVRTPRSVRRLSRTIKGVE | | | VTDEHGIKATIKTIHTSVR | |
| | | YFEVITFEMGQKKAPDGRIVELVKEVS | | | DGLVSLARSLGLVVSVNAE | |
| | | KSYPISEGPERANELVESYRKASNKAY | | | PAKVDMNVTKHKISYAIYM | |
| | | FEWTIEARDLSLLGSHVRKATYQTYAP | | | SGGDVLLNVLSKCAGSKKF | |
| | | ILYENDHFFDYMQKSKFHLTIEGPKVL | | | RPAPAAAFARECRGFYFEL | |
| | | AYLLGLWIGDGLSDRATFSVDSRDTSL | | | QELKEDDYYGITLSDDSDH | |
| | | MERVTEYAEKLNLCAEYKDRKEPQVAK | | | QFLLGSQVVVQN (SEQ | |
| | | TVNLYSKVVRG (SEQ ID NO: | | | ID NO: 18615) | |
| | | 18624) | | | | |
| Sce- | Sce- | GGVVLEKGCFAKGTNVLMADGSIECIE | snapgene | Sce- | GHGGIRNNLNTENPLWDAI | snapgene |
| VMA | VMA-5′- | NIEVGNKVMGKDGRPREVIKLPRGRET | | VMA-3′- | VGLGFLKDGVKNIPSFLST | common |
| | v3 | MYSVVQKSQHRAHKSDSSREVPELLKF | | v2 | DNIGTRETFLAGLIDSDGY | features |
| | | TCNATHELVVRTPRSVRRLSRTIKGVE | | | VTDEHGIKATIKTIHTSVR | |
| | | YFEVITFEMGQKKAPDGRIVELVKEVS | | | DGLVSLARSLGLVVSVNAE | |
| | | KSYPISEGPERANELVESYRKASNKAY | | | PAKVDMNVTKHKISYAIYM | |
| | | FEWTIEARDLSLLGSHVRKATYQTYAP | | | SGGDVLLNVLSKCAGSKKF | |
| | | ILYENDHFFDYMQKSKFHLTIEGPKVL | | | RPAPAAAFARECRGFYFEL | |
| | | AYLLGLWIGDGLSDRATFSVDSRDTSL | | | QELKEDDYYGITLSDDSDH | |
| | | MERVTEYAEKLNLCAEYKDRKEPQVAK | | | QFLLGSQVVVQNCGERGNG | |
| | | TVNLYSKVVRG (SEQ ID NO: | | | SG (SEQ ID NO: | |
| | | 18624) | | | 18616) | |
| Sce- | Sce- | GGVVLEKGCFAKGTNVLMADGSIECIE | snapgene | Sce- | GHGGIRNNLNTENPLWDAI | snapgene |
| VMA | VMA-5′- | NIEVGNKVMGKDGRPREVIKLPRGRET | | VMA-3′- | VGLGFLKDGVKNIPSFLST | common |
| | v3 | MYSVVQKSQHRAHKSDSSREVPELLKF | | v3 | DNIGTRETFLAGLIDSDGY | features |
| | | TCNATHELVVRTPRSVRRLSRTIKGVE | | | VTDEHGIKATIKTIHTSVR | |
| | | YFEVITFEMGQKKAPDGRIVELVKEVS | | | DGLVSLARSLGLVVSVNAE | |
| | | KSYPISEGPERANELVESYRKASNKAY | | | PAKVDMNVTKHKISYAIYM | |
| | | FEWTIEARDLSLLGSHVRKATYQTYAP | | | SGGDVLLNVLSKCAGSKKF | |
| | | ILYENDHFFDYMQKSKFHLTIEGPKVL | | | RPAPAAAFARECRGFYFEL | |
| | | AYLLGLWIGDGLSDRATFSVDSRDTSL | | | QELKEDDYYGITLSDDSDH | |
| | | MERVTEYAEKLNLCAEYKDRKEPQVAK | | | QFLLGSQVVVQNCTMTEKG | |
| | | TVNLYSKVVRG (SEQ ID NO: | | | SG (SEQ ID NO: | |
| | | 18624) | | | 18617) | |
| Sce- | Sce- | GGVVLEKGCFAKGTNVLMADGSIECIE | snapgene | Sce- | GHGGIRNNLNTENPLWDAI | snapgene |
| VMA | VMA-5′- | NIEVGNKVMGKDGRPREVIKLPRGRET | | VMA-3′- | VGLGFLKDGVKNIPSFLST | common |
| | v3 | MYSVVQKSQHRAHKSDSSREVPELLKF | | v4 | DNIGTRETFLAGLIDSDGY | features |
| | | TCNATHELVVRTPRSVRRLSRTIKGVE | | | VTDEHGIKATIKTIHTSVR | |
| | | YFEVITFEMGQKKAPDGRIVELVKEVS | | | DGLVSLARSLGLVVSVNAE | |
| | | KSYPISEGPERANELVESYRKASNKAY | | | PAKVDMNVTKHKISYAIYM | |
| | | FEWTIEARDLSLLGSHVRKATYQTYAP | | | SGGDVLLNVLSKCAGSKKF | |
| | | ILYENDHFFDYMQKSKFHLTIEGPKVL | | | RPAPAAAFARECRGFYFEL | |
| | | AYLLGLWIGDGLSDRATFSVDSRDTSL | | | QELKEDDYYGITLSDDSDH | |
| | | MERVTEYAEKLNLCAEYKDRKEPQVAK | | | QFLLGSQVVVQNCGEKSMG | |
| | | TVNLYSKVVRG (SEQ ID NO: | | | SG (SEQ ID NO: | |
| | | 18624) | | | 18618) | |
| Sce- | Sce- | GGVVLEKGCFAKGTNVLMADGSIECIE | snapgene | Sce- | VLLNVLSKCAGSKKFRPAP | nature.com/ |
| VMA | VMA-5′- | NIEVGNKVMGKDGRPREVIKLPRGRET | | VMA-3′- | AAAFARECRGFYFELQELK | articles/ |
| | v3 | MYSVVQKSQHRAHKSDSSREVPELLKF | | v5 | EDDYYGITLSDDSDHQFLL | nmeth.3585 |
| | | TCNATHELVVRTPRSVRRLSRTIKGVE | | | ANQVVVHN (SEQ ID | |
| | | YFEVITFEMGQKKAPDGRIVELVKEVS | | | NO: 18619) | |
| | | KSYPISEGPERANELVESYRKASNKAY | | | | |
| | | FEWTIEARDLSLLGSHVRKATYQTYAP | | | | |
| | | ILYENDHFFDYMQKSKFHLTIEGPKVL | | | | |
| | | AYLLGLWIGDGLSDRATFSVDSRDTSL | | | | |
| | | MERVTEYAEKLNLCAEYKDRKEPQVAK | | | | |
| | | TVNLYSKVVRG (SEQ ID NO: | | | | |
| | | 18624) | | | | |
| Sce- | Sce- | GGVVLEKGCFAKGTNVLMADGSIECIE | snapgene | Sce- | VLLNVLSKCAGSKKFRPAP | nature.com/ |
| VMA | VMA-5′- | NIEVGNKVMGKDGRPREVIKLPRGRET | | VMA-3′- | AAAFARECRGFYFELQELK | articles/ |
| | v3 | MYSVVQKSQHRAHKSDSSREVPELLKF | | v6 | EDDYYGITLSDDSDHQFLL | nmeth.3585 |
| | | TCNATHELVVRTPRSVRRLSRTIKGVE | | | ANQVVVHNCGERGNGSG | |
| | | YFEVITFEMGQKKAPDGRIVELVKEVS | | | (SEQ ID NO: 18620) | |
| | | KSYPISEGPERANELVESYRKASNKAY | | | | |
| | | FEWTIEARDLSLLGSHVRKATYQTYAP | | | | |
| | | ILYENDHFFDYMQKSKFHLTIEGPKVL | | | | |
| | | AYLLGLWIGDGLSDRATFSVDSRDTSL | | | | |
| | | MERVTEYAEKLNLCAEYKDRKEPQVAK | | | | |
| | | TVNLYSKVVRG (SEQ ID NO: | | | | |
| | | 18624) | | | | |
| Sce- | Sce- | GGVVLEKGCFAKGTNVLMADGSIECIE | snapgene | Sce- | VLLNVLSKCAGSKKFRPAP | nature.com/ |
| VMA | VMA-5′- | NIEVGNKVMGKDGRPREVIKLPRGRET | | VMA-3′- | AAAFARECRGFYFELQELK | articles/ |
| | v3 | MYSVVQKSQHRAHKSDSSREVPELLKF | | v7 | EDDYYGITLSDDSDHQFLL | nmeth.3585 |
| | | TCNATHELVVRTPRSVRRLSRTIKGVE | | | ANQVVVHNCTMTEKGSG | |
| | | YFEVITFEMGQKKAPDGRIVELVKEVS | | | (SEQ ID NO: 18621) | |
| | | KSYPISEGPERANELVESYRKASNKAY | | | | |
| | | FEWTIEARDLSLLGSHVRKATYQTYAP | | | | |
| | | ILYENDHFFDYMQKSKFHLTIEGPKVL | | | | |
| | | AYLLGLWIGDGLSDRATFSVDSRDTSL | | | | |
| | | MERVTEYAEKLNLCAEYKDRKEPQVAK | | | | |
| | | TVNLYSKVVRG (SEQ ID NO: | | | | |
| | | 18624) | | | | |
| Sce- | Sce- | GGVVLEKGCFAKGTNVLMADGSIECIE | snapgene | Sce- | VLLNVLSKCAGSKKFRPAP | nature.com/ |
| VMA | VMA-5′- | NIEVGNKVMGKDGRPREVIKLPRGRET | | VMA-3′- | AAAFARECRGFYFELQELK | articles/ |
| | v3 | MYSVVQKSQHRAHKSDSSREVPELLKF | | v8 | EDDYYGITLSDDSDHQFLL | nmeth.3585 |
| | | TCNATHELVVRTPRSVRRLSRTIKGVE | | | ANQVVVHNCGEKSMGSG | |
| | | YFEVITFEMGQKKAPDGRIVELVKEVS | | | (SEQ ID NO: 18622) | |
| | | KSYPISEGPERANELVESYRKASNKAY | | | | |
| | | FEWTIEARDLSLLGSHVRKATYQTYAP | | | | |
| | | ILYENDHFFDYMQKSKFHLTIEGPKVL | | | | |
| | | AYLLGLWIGDGLSDRATFSVDSRDTSL | | | | |
| | | MERVTEYAEKLNLCAEYKDRKEPQVAK | | | | |
| | | TVNLYSKVVRG (SEQ ID NO: | | | | |
| | | 18624) | | | | |
| Sce- | Sce- | GGFQTVGCFAKGTNVLMADGSIECIEN | snapgene | Sce- | GHGGIRNNLNTENPLWDAI | snapgene |
| VMA | VMA-5′- | IEVGNKVMGKDGRPREVIKLPRGRETM | | VMA-3′- | VGLGFLKDGVKNIPSFLST | common |
| | v4 | YSVVQKSQHRAHKSDSSREVPELLKFT | | v1 | DNIGTRETFLAGLIDSDGY | features |
| | | CNATHELVVRTPRSVRRLSRTIKGVEY | | | VTDEHGIKATIKTIHTSVR | |
| | | FEVITFEMGQKKAPDGRIVELVKEVSK | | | DGLVSLARSLGLVVSVNAE | |
| | | SYPISEGPERANELVESYRKASNKAYF | | | PAKVDMNVTKHKISYAIYM | |
| | | EWTIEARDLSLLGSHVRKATYQTYAPI | | | SGGDVLLNVLSKCAGSKKF | |
| | | LYENDHFFDYMQKSKFHLTIEGPKVLA | | | RPAPAAAFARECRGFYFEL | |
| | | YLLGLWIGDGLSDRATFSVDSRDTSLM | | | QELKEDDYYGITLSDDSDH | |
| | | ERVTEYAEKLNLCAEYKDRKEPQVAKT | | | QFLLGSQVVVQN (SEQ | |
| | | VNLYSKVVRG (SEQ ID NO: | | | ID NO: 18615) | |
| | | 18625) | | | | |
| Sce- | Sce- | GGFQTVGCFAKGTNVLMADGSIECIEN | snapgene | Sce- | GHGGIRNNLNTENPLWDAI | snapgene |
| VMA | VMA-5′- | IEVGNKVMGKDGRPREVIKLPRGRETM | | VMA-3′- | VGLGFLKDGVKNIPSFLST | common |
| | v4 | YSVVQKSQHRAHKSDSSREVPELLKFT | | v2 | DNIGTRETFLAGLIDSDGY | features |
| | | CNATHELVVRTPRSVRRLSRTIKGVEY | | | VTDEHGIKATIKTIHTSVR | |
| | | FEVITFEMGQKKAPDGRIVELVKEVSK | | | DGLVSLARSLGLVVSVNAE | |
| | | SYPISEGPERANELVESYRKASNKAYF | | | PAKVDMNVTKHKISYAIYM | |
| | | EWTIEARDLSLLGSHVRKATYQTYAPI | | | SGGDVLLNVLSKCAGSKKF | |
| | | LYENDHFFDYMQKSKFHLTIEGPKVLA | | | RPAPAAAFARECRGFYFEL | |
| | | YLLGLWIGDGLSDRATFSVDSRDTSLM | | | QELKEDDYYGITLSDDSDH | |
| | | ERVTEYAEKLNLCAEYKDRKEPQVAKT | | | QFLLGSQVVVQNCGERGNG | |
| | | VNLYSKVVRG (SEQ ID NO: | | | SG (SEQ ID NO: | |
| | | 18625) | | | 18616) | |
| Sce- | Sce- | GGFQTVGCFAKGTNVLMADGSIECIEN | snapgene | Sce- | GHGGIRNNLNTENPLWDAI | snapgene |
| VMA | VMA-5′- | IEVGNKVMGKDGRPREVIKLPRGRETM | | VMA-3′- | VGLGFLKDGVKNIPSFLST | common |
| | v4 | YSVVQKSQHRAHKSDSSREVPELLKFT | | v3 | DNIGTRETFLAGLIDSDGY | features |
| | | CNATHELVVRTPRSVRRLSRTIKGVEY | | | VTDEHGIKATIKTIHTSVR | |
| | | FEVITFEMGQKKAPDGRIVELVKEVSK | | | DGLVSLARSLGLVVSVNAE | |
| | | SYPISEGPERANELVESYRKASNKAYF | | | PAKVDMNVTKHKISYAIYM | |
| | | EWTIEARDLSLLGSHVRKATYQTYAPI | | | SGGDVLLNVLSKCAGSKKF | |
| | | LYENDHFFDYMQKSKFHLTIEGPKVLA | | | RPAPAAAFARECRGFYFEL | |
| | | YLLGLWIGDGLSDRATFSVDSRDTSLM | | | QELKEDDYYGITLSDDSDH | |
| | | ERVTEYAEKLNLCAEYKDRKEPQVAKT | | | QFLLGSQVVVQNCTMTEKG | |
| | | VNLYSKVVRG (SEQ ID NO: | | | SG (SEQ ID NO: | |
| | | 18625) | | | 18617) | |
| Sce- | Sce- | GGFQTVGCFAKGTNVLMADGSIECIEN | snapgene | Sce- | GHGGIRNNLNTENPLWDAI | snapgene |
| VMA | VMA-5′- | IEVGNKVMGKDGRPREVIKLPRGRETM | | VMA-3′- | VGLGFLKDGVKNIPSFLST | common |
| | v4 | YSVVQKSQHRAHKSDSSREVPELLKFT | | v4 | DNIGTRETFLAGLIDSDGY | features |
| | | CNATHELVVRTPRSVRRLSRTIKGVEY | | | VTDEHGIKATIKTIHTSVR | |
| | | FEVITFEMGQKKAPDGRIVELVKEVSK | | | DGLVSLARSLGLVVSVNAE | |
| | | SYPISEGPERANELVESYRKASNKAYF | | | PAKVDMNVTKHKISYAIYM | |
| | | EWTIEARDLSLLGSHVRKATYQTYAPI | | | SGGDVLLNVLSKCAGSKKF | |
| | | LYENDHFFDYMQKSKFHLTIEGPKVLA | | | RPAPAAAFARECRGFYFEL | |
| | | YLLGLWIGDGLSDRATFSVDSRDTSLM | | | QELKEDDYYGITLSDDSDH | |
| | | ERVTEYAEKLNLCAEYKDRKEPQVAKT | | | QFLLGSQVVVQNCGEKSMG | |
| | | VNLYSKVVRG (SEQ ID NO: | | | SG (SEQ ID NO: | |
| | | 18625) | | | 18618) | |
| Sce- | Sce- | GGFQTVGCFAKGTNVLMADGSIECIEN | snapgene | Sce- | VLLNVLSKCAGSKKFRPAP | nature.com/ |
| VMA | VMA-5′- | IEVGNKVMGKDGRPREVIKLPRGRETM | | VMA-3′- | AAAFARECRGFYFELQELK | articles/ |
| | v4 | YSVVQKSQHRAHKSDSSREVPELLKFT | | v5 | EDDYYGITLSDDSDHQFLL | nmeth.3585 |
| | | CNATHELVVRTPRSVRRLSRTIKGVEY | | | ANQVVVHN (SEQ ID | |
| | | FEVITFEMGQKKAPDGRIVELVKEVSK | | | NO: 18619) | |
| | | SYPISEGPERANELVESYRKASNKAYF | | | | |
| | | EWTIEARDLSLLGSHVRKATYQTYAPI | | | | |
| | | LYENDHFFDYMQKSKFHLTIEGPKVLA | | | | |
| | | YLLGLWIGDGLSDRATFSVDSRDTSLM | | | | |
| | | ERVTEYAEKLNLCAEYKDRKEPQVAKT | | | | |
| | | VNLYSKVVRG (SEQ ID NO: | | | | |
| | | 18625) | | | | |
| Sce- | Sce- | GGFQTVGCFAKGTNVLMADGSIECIEN | snapgene | Sce- | VLLNVLSKCAGSKKFRPAP | nature.com/ |
| VMA | VMA-5′- | IEVGNKVMGKDGRPREVIKLPRGRETM | | VMA-3′- | AAAFARECRGFYFELQELK | articles/ |
| | v4 | YSVVQKSQHRAHKSDSSREVPELLKFT | | v6 | EDDYYGITLSDDSDHQFLL | nmeth.3585 |
| | | CNATHELVVRTPRSVRRLSRTIKGVEY | | | ANQVVVHNCGERGNGSG | |
| | | FEVITFEMGQKKAPDGRIVELVKEVSK | | | (SEQ ID NO: 18620) | |
| | | SYPISEGPERANELVESYRKASNKAYF | | | | |
| | | EWTIEARDLSLLGSHVRKATYQTYAPI | | | | |
| | | LYENDHFFDYMQKSKFHLTIEGPKVLA | | | | |
| | | YLLGLWIGDGLSDRATFSVDSRDTSLM | | | | |
| | | ERVTEYAEKLNLCAEYKDRKEPQVAKT | | | | |
| | | VNLYSKVVRG (SEQ ID NO: | | | | |
| | | 18625) | | | | |
| Sce- | Sce- | GGFQTVGCFAKGTNVLMADGSIECIEN | snapgene | Sce- | VLLNVLSKCAGSKKFRPAP | nature.com/ |
| VMA | VMA-5′- | IEVGNKVMGKDGRPREVIKLPRGRETM | | VMA-3′- | AAAFARECRGFYFELQELK | articles/ |
| | v4 | YSVVQKSQHRAHKSDSSREVPELLKFT | | v7 | EDDYYGITLSDDSDHQFLL | nmeth.3585 |
| | | CNATHELVVRTPRSVRRLSRTIKGVEY | | | ANQVVVHNCTMTEKGSG | |
| | | FEVITFEMGQKKAPDGRIVELVKEVSK | | | (SEQ ID NO: 18621) | |
| | | SYPISEGPERANELVESYRKASNKAYF | | | | |
| | | EWTIEARDLSLLGSHVRKATYQTYAPI | | | | |
| | | LYENDHFFDYMQKSKFHLTIEGPKVLA | | | | |
| | | YLLGLWIGDGLSDRATFSVDSRDTSLM | | | | |
| | | ERVTEYAEKLNLCAEYKDRKEPQVAKT | | | | |
| | | VNLYSKVVRG (SEQ ID NO: | | | | |
| | | 18625) | | | | |
| Sce- | Sce- | GGFQTVGCFAKGTNVLMADGSIECIEN | snapgene | Sce- | VLLNVLSKCAGSKKFRPAP | nature.com/ |
| VMA | VMA-5′- | IEVGNKVMGKDGRPREVIKLPRGRETM | | VMA-3′- | AAAFARECRGFYFELQELK | articles/ |
| | v4 | YSVVQKSQHRAHKSDSSREVPELLKFT | | v8 | EDDYYGITLSDDSDHQFLL | nmeth.3585 |
| | | CNATHELVVRTPRSVRRLSRTIKGVEY | | | ANQVVVHNCGEKSMGSG | |
| | | FEVITFEMGQKKAPDGRIVELVKEVSK | | | (SEQ ID NO: 18622) | |
| | | SYPISEGPERANELVESYRKASNKAYF | | | | |
| | | EWTIEARDLSLLGSHVRKATYQTYAPI | | | | |
| | | LYENDHFFDYMQKSKFHLTIEGPKVLA | | | | |
| | | YLLGLWIGDGLSDRATFSVDSRDTSLM | | | | |
| | | ERVTEYAEKLNLCAEYKDRKEPQVAKT | | | | |
| | | VNLYSKVVRG (SEQ ID NO: | | | | |
| | | 18625) | | | | |
| Sce- | Sce- | CFAKGTNVLMADGSIECIENIEVGNKV | nature.com/ | Sce- | GHGGIRNNLNTENPLWDAI | snapgene |
| VMA | VMA-5′- | MGKDGRPREVIKLPRGRETMYSVVQKS | articles/ | VMA-3′- | VGLGFLKDGVKNIPSFLST | common |
| | v5 | QHRAHKSDSSREVPELLKFTCNATHEL | nmeth.3585 | v1 | DNIGTRETFLAGLIDSDGY | features |
| | | VVRTPRSVRRLSRTIKGVEYFEVITFE | | | VTDEHGIKATIKTIHTSVR | |
| | | MGQKKAPDGRIVELVKEVSKSYPISEG | | | DGLVSLARSLGLVVSVNAE | |
| | | PERANELVESYRKASNKAYFEWTIEAR | | | PAKVDMNVTKHKISYAIYM | |
| | | DLSLLGSHVRKATYQTYAPI (SEQ | | | SGGDVLLNVLSKCAGSKKF | |
| | | ID NO: 18626) | | | RPAPAAAFARECRGFYFEL | |
| | | | | | QELKEDDYYGITLSDDSDH | |
| | | | | | QFLLGSQVVVQN (SEQ | |
| | | | | | ID NO: 18615) | |
| Sce- | Sce- | CFAKGTNVLMADGSIECIENIEVGNKV | nature.com/ | Sce- | GHGGIRNNLNTENPLWDAI | snapgene |
| VMA | VMA-5′- | MGKDGRPREVIKLPRGRETMYSVVQKS | articles/ | VMA-3′- | VGLGFLKDGVKNIPSFLST | common |
| | v5 | QHRAHKSDSSREVPELLKFTCNATHEL | nmeth.3585 | v2 | DNIGTRETFLAGLIDSDGY | features |
| | | VVRTPRSVRRLSRTIKGVEYFEVITFE | | | VTDEHGIKATIKTIHTSVR | |
| | | MGQKKAPDGRIVELVKEVSKSYPISEG | | | DGLVSLARSLGLVVSVNAE | |
| | | PERANELVESYRKASNKAYFEWTIEAR | | | PAKVDMNVTKHKISYAIYM | |
| | | DLSLLGSHVRKATYQTYAPI (SEQ | | | SGGDVLLNVLSKCAGSKKF | |
| | | ID NO: 18626) | | | RPAPAAAFARECRGFYFEL | |
| | | | | | QELKEDDYYGITLSDDSDH | |
| | | | | | QFLLGSQVVVQNCGERGNG | |
| | | | | | SG (SEQ ID NO: | |
| | | | | | 18616) | |
| Sce- | Sce- | CFAKGTNVLMADGSIECIENIEVGNKV | nature.com/ | Sce- | GHGGIRNNLNTENPLWDAI | snapgene |
| VMA | VMA-5′- | MGKDGRPREVIKLPRGRETMYSVVQKS | articles/ | VMA-3′- | VGLGFLKDGVKNIPSFLST | common |
| | v5 | QHRAHKSDSSREVPELLKFTCNATHEL | nmeth.3585 | v3 | DNIGTRETFLAGLIDSDGY | features |
| | | VVRTPRSVRRLSRTIKGVEYFEVITFE | | | VTDEHGIKATIKTIHTSVR | |
| | | MGQKKAPDGRIVELVKEVSKSYPISEG | | | DGLVSLARSLGLVVSVNAE | |
| | | PERANELVESYRKASNKAYFEWTIEAR | | | PAKVDMNVTKHKISYAIYM | |
| | | DLSLLGSHVRKATYQTYAPI (SEQ | | | SGGDVLLNVLSKCAGSKKF | |
| | | ID NO: 18626) | | | RPAPAAAFARECRGFYFEL | |
| | | | | | QELKEDDYYGITLSDDSDH | |
| | | | | | QFLLGSQVVVQNCTMTEKG | |
| | | | | | SG (SEQ ID NO: | |
| | | | | | 18617) | |
| Sce- | Sce- | CFAKGTNVLMADGSIECIENIEVGNKV | nature.com/ | Sce- | GHGGIRNNLNTENPLWDAI | snapgene |
| | VMA-5′- | MGKDGRPREVIKLPRGRETMYSVVQKS | articles/ | VMA-3′- | VGLGFLKDGVKNIPSFLST | common |
| VMA | v5 | QHRAHKSDSSREVPELLKFTCNATHEL | nmeth.35 | v4 | DNIGTRETFLAGLIDSDGY | features |
| | | VVRTPRSVRRLSRTIKGVEYFEVITFE | 85 | | VTDEHGIKATIKTIHTSVR | |
| | | MGQKKAPDGRIVELVKEVSKSYPISEG | | | DGLVSLARSLGLVVSVNAE | |
| | | PERANELVESYRKASNKAYFEWTIEAR | | | PAKVDMNVTKHKISYAIYM | |
| | | DLSLLGSHVRKATYQTYAPI (SEQ | | | SGGDVLLNVLSKCAGSKKF | |
| | | ID NO: 18626) | | | RPAPAAAFARECRGFYFEL | |
| | | | | | QELKEDDYYGITLSDDSDH | |
| | | | | | QFLLGSQVVVQNCGEKSMG | |
| | | | | | SG (SEQ ID NO: | |
| | | | | | 18618) | |
| Sce- | Sce- | CFAKGTNVLMADGSIECIENIEVGNKV | nature.com/ | Sce- | VLLNVLSKCAGSKKFRPAP | nature.com/ |
| VMA | VMA-5′- | MGKDGRPREVIKLPRGRETMYSVVQKS | articles/ | VMA-3′- | AAAFARECRGFYFELQELK | articles/ |
| | v5 | QHRAHKSDSSREVPELLKFTCNATHEL | nmeth.3585 | v5 | EDDYYGITLSDDSDHQFLL | nmeth.3585 |
| | | VVRTPRSVRRLSRTIKGVEYFEVITFE | | | ANQVVVHN (SEQ ID | |
| | | MGQKKAPDGRIVELVKEVSKSYPISEG | | | NO: 18619) | |
| | | PERANELVESYRKASNKAYFEWTIEAR | | | | |
| | | DLSLLGSHVRKATYQTYAPI (SEQ | | | | |
| | | ID NO: 18626) | | | | |
| Sce- | Sce- | CFAKGTNVLMADGSIECIENIEVGNKV | nature.com/ | Sce- | VLLNVLSKCAGSKKFRPAP | nature.com/ |
| VMA | VMA-5′- | MGKDGRPREVIKLPRGRETMYSVVQKS | articles/ | VMA-3′- | AAAFARECRGFYFELQELK | articles/ |
| | v5 | QHRAHKSDSSREVPELLKFTCNATHEL | nmeth.3585 | v6 | EDDYYGITLSDDSDHQFLL | nmeth.3585 |
| | | VVRTPRSVRRLSRTIKGVEYFEVITFE | | | ANQVVVHNCGERGNGSG | |
| | | MGQKKAPDGRIVELVKEVSKSYPISEG | | | (SEQ ID NO: 18620) | |
| | | PERANELVESYRKASNKAYFEWTIEAR | | | | |
| | | DLSLLGSHVRKATYQTYAPI (SEQ | | | | |
| | | ID NO: 18626) | | | | |
| Sce- | Sce- | CFAKGTNVLMADGSIECIENIEVGNKV | nature.com/ | Sce- | VLLNVLSKCAGSKKFRPAP | nature.com/ |
| VMA | VMA-5′- | MGKDGRPREVIKLPRGRETMYSVVQKS | articles/ | VMA-3′- | AAAFARECRGFYFELQELK | articles/ |
| | v5 | QHRAHKSDSSREVPELLKFTCNATHEL | nmeth.3585 | v7 | EDDYYGITLSDDSDHQFLL | nmeth.3585 |
| | | VVRTPRSVRRLSRTIKGVEYFEVITFE | | | ANQVVVHNCTMTEKGSG | |
| | | MGQKKAPDGRIVELVKEVSKSYPISEG | | | (SEQ ID NO: 18621) | |
| | | PERANELVESYRKASNKAYFEWTIEAR | | | | |
| | | DLSLLGSHVRKATYQTYAPI (SEQ | | | | |
| | | ID NO: 18626) | | | | |
| Sce- | Sce- | CFAKGTNVLMADGSIECIENIEVGNKV | nature.com/ | Sce- | VLLNVLSKCAGSKKFRPAP | nature.com/ |
| VMA | VMA-5′- | MGKDGRPREVIKLPRGRETMYSVVQKS | articles/ | VMA-3′- | AAAFARECRGFYFELQELK | articles/ |
| | v5 | QHRAHKSDSSREVPELLKFTCNATHEL | nmeth.3585 | v8 | EDDYYGITLSDDSDHQFLL | nmeth.3585 |
| | | VVRTPRSVRRLSRTIKGVEYFEVITFE | | | ANQVVVHNCGEKSMGSG | |
| | | MGQKKAPDGRIVELVKEVSKSYPISEG | | | (SEQ ID NO: 18622) | |
| | | PERANELVESYRKASNKAYFEWTIEAR | | | | |
| | | DLSLLGSHVRKATYQTYAPI (SEQ | | | | |
| | | ID NO: 18626) | | | | |
| Sce- | Sce- | GGIIYVGCFAKGTNVLMADGSIECIEN | nature.com/ | Sce- | GHGGIRNNLNTENPLWDAI | snapgene |
| VMA | VMA-5′- | IEVGNKVMGKDGRPREVIKLPRGRETM | articles/ | VMA-3′- | VGLGFLKDGVKNIPSFLST | common |
| | v6 | YSVVQKSQHRAHKSDSSREVPELLKFT | nmeth.3585 | v1 | DNIGTRETFLAGLIDSDGY | features |
| | | CNATHELVVRTPRSVRRLSRTIKGVEY | | | VTDEHGIKATIKTIHTSVR | |
| | | FEVITFEMGQKKAPDGRIVELVKEVSK | | | DGLVSLARSLGLVVSVNAE | |
| | | SYPISEGPERANELVESYRKASNKAYF | | | PAKVDMNVTKHKISYAIYM | |
| | | EWTIEARDLSLLGSHVRKATYQTYAPI | | | SGGDVLLNVLSKCAGSKKF | |
| | | (SEQ ID NO: 18627) | | | RPAPAAAFARECRGFYFEL | |
| | | | | | QELKEDDYYGITLSDDSDH | |
| | | | | | QFLLGSQVVVQN (SEQ | |
| | | | | | ID NO: 18615) | |
| Sce- | Sce- | GGIIYVGCFAKGTNVLMADGSIECIEN | nature.com/ | Sce- | GHGGIRNNLNTENPLWDAI | snapgene |
| VMA | VMA-5′- | IEVGNKVMGKDGRPREVIKLPRGRETM | articles/ | VMA-3′- | VGLGFLKDGVKNIPSFLST | common |
| | v6 | YSVVQKSQHRAHKSDSSREVPELLKFT | nmeth.3585 | v2 | DNIGTRETFLAGLIDSDGY | features |
| | | CNATHELVVRTPRSVRRLSRTIKGVEY | | | VTDEHGIKATIKTIHTSVR | |
| | | FEVITFEMGQKKAPDGRIVELVKEVSK | | | DGLVSLARSLGLVVSVNAE | |
| | | SYPISEGPERANELVESYRKASNKAYF | | | PAKVDMNVTKHKISYAIYM | |
| | | EWTIEARDLSLLGSHVRKATYQTYAPI | | | SGGDVLLNVLSKCAGSKKF | |
| | | (SEQ ID NO: 18627) | | | RPAPAAAFARECRGFYFEL | |
| | | | | | QELKEDDYYGITLSDDSDH | |
| | | | | | QFLLGSQVVVQNCGERGNG | |
| | | | | | SG (SEQ ID NO: | |
| | | | | | 18616) | |
| Sce- | Sce- | GGIIYVGCFAKGTNVLMADGSIECIEN | nature.com/ | Sce- | GHGGIRNNLNTENPLWDAI | snapgene |
| VMA | VMA-5′- | IEVGNKVMGKDGRPREVIKLPRGRETM | articles/ | VMA-3′- | VGLGFLKDGVKNIPSFLST | common |
| | v6 | YSVVQKSQHRAHKSDSSREVPELLKFT | nmeth.3585 | v3 | DNIGTRETFLAGLIDSDGY | features |
| | | CNATHELVVRTPRSVRRLSRTIKGVEY | | | VTDEHGIKATIKTIHTSVR | |
| | | FEVITFEMGQKKAPDGRIVELVKEVSK | | | DGLVSLARSLGLVVSVNAE | |
| | | SYPISEGPERANELVESYRKASNKAYF | | | PAKVDMNVTKHKISYAIYM | |
| | | EWTIEARDLSLLGSHVRKATYQTYAPI | | | SGGDVLLNVLSKCAGSKKF | |
| | | (SEQ ID NO: 18627) | | | RPAPAAAFARECRGFYFEL | |
| | | | | | QELKEDDYYGITLSDDSDH | |
| | | | | | QFLLGSQVVVQNCTMTEKG | |
| | | | | | SG (SEQ ID NO: | |
| | | | | | 18617) | |
| Sce- | Sce- | GGIIYVGCFAKGTNVLMADGSIECIEN | nature.com/ | Sce- | GHGGIRNNLNTENPLWDAI | snapgene |
| VMA | VMA-5′- | IEVGNKVMGKDGRPREVIKLPRGRETM | articles/ | VMA-3′- | VGLGFLKDGVKNIPSFLST | common |
| | v6 | YSVVQKSQHRAHKSDSSREVPELLKFT | nmeth.3585 | v4 | DNIGTRETFLAGLIDSDGY | features |
| | | CNATHELVVRTPRSVRRLSRTIKGVEY | | | VTDEHGIKATIKTIHTSVR | |
| | | FEVITFEMGQKKAPDGRIVELVKEVSK | | | DGLVSLARSLGLVVSVNAE | |
| | | SYPISEGPERANELVESYRKASNKAYF | | | PAKVDMNVTKHKISYAIYM | |
| | | EWTIEARDLSLLGSHVRKATYQTYAPI | | | SGGDVLLNVLSKCAGSKKF | |
| | | (SEQ ID NO: 18627) | | | RPAPAAAFARECRGFYFEL | |
| | | | | | QELKEDDYYGITLSDDSDH | |
| | | | | | QFLLGSQVVVQNCGEKSMG | |
| | | | | | SG (SEQ ID NO: | |
| | | | | | 18618) | |
| Sce- | Sce- | GGIIYVGCFAKGTNVLMADGSIECIEN | nature.com/ | Sce- | VLLNVLSKCAGSKKFRPAP | nature.com/ |
| VMA | VMA-5′- | IEVGNKVMGKDGRPREVIKLPRGRETM | articles/ | VMA-3′- | AAAFARECRGFYFELQELK | articles/ |
| | v6 | YSVVQKSQHRAHKSDSSREVPELLKFT | nmeth.3585 | v5 | EDDYYGITLSDDSDHQFLL | nmeth.3585 |
| | | CNATHELVVRTPRSVRRLSRTIKGVEY | | | ANQVVVHN (SEQ ID | |
| | | FEVITFEMGQKKAPDGRIVELVKEVSK | | | NO: 18619) | |
| | | SYPISEGPERANELVESYRKASNKAYF | | | | |
| | | EWTIEARDLSLLGSHVRKATYQTYAPI | | | | |
| | | (SEQ ID NO: 18627) | | | | |
| Sce- | Sce- | GGIIYVGCFAKGTNVLMADGSIECIEN | nature.com/ | Sce- | VLLNVLSKCAGSKKFRPAP | nature.com/ |
| VMA | VMA-5′- | IEVGNKVMGKDGRPREVIKLPRGRETM | articles/ | VMA-3′- | AAAFARECRGFYFELQELK | articles/ |
| | v6 | YSVVQKSQHRAHKSDSSREVPELLKFT | nmeth.3585 | v6 | EDDYYGITLSDDSDHQFLL | nmeth.3585 |
| | | CNATHELVVRTPRSVRRLSRTIKGVEY | | | ANQVVVHNCGERGNGSG | |
| | | FEVITFEMGQKKAPDGRIVELVKEVSK | | | (SEQ ID NO: 18620) | |
| | | SYPISEGPERANELVESYRKASNKAYF | | | | |
| | | EWTIEARDLSLLGSHVRKATYQTYAPI | | | | |
| | | (SEQ ID NO: 18627) | | | | |
| Sce- | Sce- | GGIIYVGCFAKGTNVLMADGSIECIEN | nature.com/ | Sce- | VLLNVLSKCAGSKKFRPAP | nature.com/ |
| VMA | VMA-5′- | IEVGNKVMGKDGRPREVIKLPRGRETM | articles/ | VMA-3′- | AAAFARECRGFYFELQELK | articles/ |
| | v6 | YSVVQKSQHRAHKSDSSREVPELLKFT | nmeth.3585 | v7 | EDDYYGITLSDDSDHQFLL | nmeth.35 |
| | | CNATHELVVRTPRSVRRLSRTIKGVEY | | | ANQVVVHNCTMTEKGSG | 85 |
| | | FEVITFEMGQKKAPDGRIVELVKEVSK | | | (SEQ ID NO: 18621) | |
| | | SYPISEGPERANELVESYRKASNKAYF | | | | |
| | | EWTIEARDLSLLGSHVRKATYQTYAPI | | | | |
| | | (SEQ ID NO: 18627) | | | | |
| Sce- | Sce- | GGIIYVGCFAKGTNVLMADGSIECIEN | nature.com/ | Sce- | VLLNVLSKCAGSKKFRPAP | nature.com/ |
| VMA | VMA-5′- | IEVGNKVMGKDGRPREVIKLPRGRETM | articles/ | VMA-3′- | AAAFARECRGFYFELQELK | articles/ |
| | v6 | YSVVQKSQHRAHKSDSSREVPELLKFT | nmeth.3585 | v8 | EDDYYGITLSDDSDHQFLL | nmeth.35 |
| | | CNATHELVVRTPRSVRRLSRTIKGVEY | | | ANQVVVHNCGEKSMGSG | 85 |
| | | FEVITFEMGQKKAPDGRIVELVKEVSK | | | (SEQ ID NO: 18622) | |
| | | SYPISEGPERANELVESYRKASNKAYF | | | | |
| | | EWTIEARDLSLLGSHVRKATYQTYAPI | | | | |
| | | (SEQ ID NO: 18627) | | | | |
| Sce- | Sce- | GGVVLEKGCFAKGTNVLMADGSIECIE | nature.com/ | Sce- | GHGGIRNNLNTENPLWDAI | snapgene |
| VMA | VMA-5′- | NIEVGNKVMGKDGRPREVIKLPRGRET | articles/ | VMA-3′- | VGLGFLKDGVKNIPSFLST | common |
| | v7 | MYSVVQKSQHRAHKSDSSREVPELLKF | nmeth.35 | v1 | DNIGTRETFLAGLIDSDGY | features |
| | | TCNATHELVVRTPRSVRRLSRTIKGVE | 85 | | VTDEHGIKATIKTIHTSVR | |
| | | YFEVITFEMGQKKAPDGRIVELVKEVS | | | DGLVSLARSLGLVVSVNAE | |
| | | KSYPISEGPERANELVESYRKASNKAY | | | PAKVDMNVTKHKISYAIYM | |
| | | FEWTIEARDLSLLGSHVRKATYQTYAP | | | SGGDVLLNVLSKCAGSKKF | |
| | | I (SEQ ID NO: 18628) | | | RPAPAAAFARECRGFYFEL | |
| | | | | | QELKEDDYYGITLSDDSDH | |
| | | | | | QFLLGSQVVVQN (SEQ | |
| | | | | | ID NO: 18615) | |
| Sce- | Sce- | GGVVLEKGCFAKGTNVLMADGSIECIE | nature.com/ | Sce- | GHGGIRNNLNTENPLWDAI | snapgene |
| VMA | VMA-5′- | NIEVGNKVMGKDGRPREVIKLPRGRET | articles/ | VMA-3′- | VGLGFLKDGVKNIPSFLST | common |
| | v7 | MYSVVQKSQHRAHKSDSSREVPELLKF | nmeth.3585 | v2 | DNIGTRETFLAGLIDSDGY | features |
| | | TCNATHELVVRTPRSVRRLSRTIKGVE | | | VTDEHGIKATIKTIHTSVR | |
| | | YFEVITFEMGQKKAPDGRIVELVKEVS | | | DGLVSLARSLGLVVSVNAE | |
| | | KSYPISEGPERANELVESYRKASNKAY | | | PAKVDMNVTKHKISYAIYM | |
| | | FEWTIEARDLSLLGSHVRKATYQTYAP | | | SGGDVLLNVLSKCAGSKKF | |
| | | I (SEQ ID NO: 18628) | | | RPAPAAAFARECRGFYFEL | |
| | | | | | QELKEDDYYGITLSDDSDH | |
| | | | | | QFLLGSQVVVQNCGERGNG | |
| | | | | | SG (SEQ ID NO: | |
| | | | | | 18616) | |
| Sce- | Sce- | GGVVLEKGCFAKGTNVLMADGSIECIE | nature.com/ | Sce- | GHGGIRNNLNTENPLWDAI | snapgene |
| VMA | VMA-5′- | NIEVGNKVMGKDGRPREVIKLPRGRET | articles/ | VMA-3′- | VGLGFLKDGVKNIPSFLST | common |
| | v7 | MYSVVQKSQHRAHKSDSSREVPELLKF | nmeth.3585 | v3 | DNIGTRETFLAGLIDSDGY | features |
| | | TCNATHELVVRTPRSVRRLSRTIKGVE | | | VTDEHGIKATIKTIHTSVR | |
| | | YFEVITFEMGQKKAPDGRIVELVKEVS | | | DGLVSLARSLGLVVSVNAE | |
| | | KSYPISEGPERANELVESYRKASNKAY | | | PAKVDMNVTKHKISYAIYM | |
| | | FEWTIEARDLSLLGSHVRKATYQTYAP | | | SGGDVLLNVLSKCAGSKKF | |
| | | I (SEQ ID NO: 18628) | | | RPAPAAAFARECRGFYFEL | |
| | | | | | QELKEDDYYGITLSDDSDH | |
| | | | | | QFLLGSQVVVQNCTMTEKG | |
| | | | | | SG (SEQ ID NO: | |
| | | | | | 18617) | |
| Sce- | Sce- | GGVVLEKGCFAKGTNVLMADGSIECIE | nature.com/ | Sce- | GHGGIRNNLNTENPLWDAI | snapgene |
| VMA | VMA-5′- | NIEVGNKVMGKDGRPREVIKLPRGRET | articles/ | VMA-3′- | VGLGFLKDGVKNIPSFLST | common |
| | v7 | MYSVVQKSQHRAHKSDSSREVPELLKF | nmeth. 3585 | v4 | DNIGTRETFLAGLIDSDGY | features |
| | | TCNATHELVVRTPRSVRRLSRTIKGVE | | | VTDEHGIKATIKTIHTSVR | |
| | | YFEVITFEMGQKKAPDGRIVELVKEVS | | | DGLVSLARSLGLVVSVNAE | |
| | | KSYPISEGPERANELVESYRKASNKAY | | | PAKVDMNVTKHKISYAIYM | |
| | | FEWTIEARDLSLLGSHVRKATYQTYAP | | | SGGDVLLNVLSKCAGSKKF | |
| | | I (SEQ ID NO: 18628) | | | RPAPAAAFARECRGFYFEL | |
| | | | | | QELKEDDYYGITLSDDSDH | |
| | | | | | QFLLGSQVVVQNCGEKSMG | |
| | | | | | SG (SEQ ID NO: | |
| | | | | | 18618) | |
| Sce- | Sce- | GGVVLEKGCFAKGTNVLMADGSIECIE | nature.com/ | Sce- | VLLNVLSKCAGSKKFRPAP | nature.com/ |
| VMA | VMA-5′- | NIEVGNKVMGKDGRPREVIKLPRGRET | articles/ | VMA-3′- | AAAFARECRGFYFELQELK | articles/ |
| | v7 | MYSVVQKSQHRAHKSDSSREVPELLKF | nmeth.3585 | v5 | EDDYYGITLSDDSDHQFLL | nmeth.3585 |
| | | TCNATHELVVRTPRSVRRLSRTIKGVE | | | ANQVVVHN (SEQ ID | |
| | | YFEVITFEMGQKKAPDGRIVELVKEVS | | | NO: 18619) | |
| | | KSYPISEGPERANELVESYRKASNKAY | | | | |
| | | FEWTIEARDLSLLGSHVRKATYQTYAP | | | | |
| | | I (SEQ ID NO: 18628) | | | | |
| Sce- | Sce- | GGVVLEKGCFAKGTNVLMADGSIECIE | nature.com/ | Sce- | VLLNVLSKCAGSKKFRPAP | nature.com/ |
| VMA | VMA-5′- | NIEVGNKVMGKDGRPREVIKLPRGRET | articles/ | VMA-3′- | AAAFARECRGFYFELQELK | articles/ |
| | v7 | MYSVVQKSQHRAHKSDSSREVPELLKF | nmeth.3585 | v6 | EDDYYGITLSDDSDHQFLL | nmeth.3585 |
| | | TCNATHELVVRTPRSVRRLSRTIKGVE | | | ANQVVVHNCGERGNGSG | |
| | | YFEVITFEMGQKKAPDGRIVELVKEVS | | | (SEQ ID NO: 18620) | |
| | | KSYPISEGPERANELVESYRKASNKAY | | | | |
| | | FEWTI EARDLSLLGSHVRKATYQTYAP | | | | |
| | | I (SEQ ID NO: 18628) | | | | |
| Sce- | Sce- | GGVVLEKGCFAKGTNVLMADGSIECIE | nature.com/ | Sce- | VLLNVLSKCAGSKKFRPAP | nature.com/ |
| VMA | VMA-5′- | NIEVGNKVMGKDGRPREVIKLPRGRET | articles/ | VMA-3′- | AAAFARECRGFYFELQELK | articles/ |
| | v7 | MYSVVQKSQHRAHKSDSSREVPELLKF | nmeth.3585 | v7 | EDDYYGITLSDDSDHQFLL | nmeth.3585 |
| | | TCNATHELVVRTPRSVRRLSRTIKGVE | | | ANQVVVHNCTMTEKGSG | |
| | | YFEVITFEMGQKKAPDGRIVELVKEVS | | | (SEQ ID NO: 18621) | |
| | | KSYPISEGPERANELVESYRKASNKAY | | | | |
| | | FEWTIEARDLSLLGSHVRKATYQTYAP | | | | |
| | | I (SEQ ID NO: 18628) | | | | |
| Sce- | Sce- | GGVVLEKGCFAKGTNVLMADGSIECIE | nature.com/ | Sce- | VLLNVLSKCAGSKKFRPAP | nature.com/ |
| VMA | VMA-5′- | NIEVGNKVMGKDGRPREVIKLPRGRET | articles/ | VMA-3′- | AAAFARECRGFYFELQELK | articles/ |
| | v7 | MYSVVQKSQHRAHKSDSSREVPELLKF | nmeth.3585 | v8 | EDDYYGITLSDDSDHQFLL | nmeth.3585 |
| | | TCNATHELVVRTPRSVRRLSRTIKGVE | | | ANQVVVHNCGEKSMGSG | |
| | | YFEVITFEMGQKKAPDGRIVELVKEVS | | | (SEQ ID NO: 18622) | |
| | | KSYPISEGPERANELVESYRKASNKAY | | | | |
| | | FEWTIEARDLSLLGSHVRKATYQTYAP | | | | |
| | | I (SEQ ID NO: 18628) | | | | |
| Sce- | Sce- | GGFQTVGCFAKGTNVLMADGSIECIEN | nature.com/ | Sce- | GHGGIRNNLNTENPLWDAI | snapgene |
| VMA | VMA-5′- | IEVGNKVMGKDGRPREVIKLPRGRETM | articles/ | VMA-3′- | VGLGFLKDGVKNIPSFLST | common |
| | v8 | YSVVQKSQHRAHKSDSSREVPELLKFT | nmeth.3585 | v1 | DNIGTRETFLAGLIDSDGY | features |
| | | CNATHELVVRTPRSVRRLSRTIKGVEY | | | VTDEHGIKATIKTIHTSVR | |
| | | FEVITFEMGQKKAPDGRIVELVKEVSK | | | DGLVSLARSLGLVVSVNAE | |
| | | SYPISEGPERANELVESYRKASNKAYF | | | PAKVDMNVTKHKISYAIYM | |
| | | EWTIEARDLSLLGSHVRKATYQTYAPI | | | SGGDVLLNVLSKCAGSKKF | |
| | | (SEQ ID NO: 18629) | | | RPAPAAAFARECRGFYFEL | |
| | | | | | QELKEDDYYGITLSDDSDH | |
| | | | | | QFLLGSQVVVQN (SEQ | |
| | | | | | ID NO: 18615) | |
| Sce- | Sce- | GGFQTVGCFAKGTNVLMADGSIECIEN | nature.com/ | Sce- | GHGGIRNNLNTENPLWDAI | snapgene |
| VMA | VMA-5′- | IEVGNKVMGKDGRPREVIKLPRGRETM | articles/ | VMA-3′- | VGLGFLKDGVKNIPSFLST | common |
| | v8 | YSVVQKSQHRAHKSDSSREVPELLKFT | nmeth.3585 | v2 | DNIGTRETFLAGLIDSDGY | features |
| | | CNATHELVVRTPRSVRRLSRTIKGVEY | | | VTDEHGIKATIKTIHTSVR | |
| | | FEVITFEMGQKKAPDGRIVELVKEVSK | | | DGLVSLARSLGLVVSVNAE | |
| | | SYPISEGPERANELVESYRKASNKAYF | | | PAKVDMNVTKHKISYAIYM | |
| | | EWTIEARDLSLLGSHVRKATYQTYAPI | | | SGGDVLLNVLSKCAGSKKF | |
| | | (SEQ ID NO: 18629) | | | RPAPAAAFARECRGFYFEL | |
| | | | | | QELKEDDYYGITLSDDSDH | |
| | | | | | QFLLGSQVVVQNCGERGNG | |
| | | | | | SG (SEQ ID NO: | |
| | | | | | 18616) | |
| Sce- | Sce- | GGFQTVGCFAKGTNVLMADGSIECIEN | nature.com/ | Sce- | GHGGIRNNLNTENPLWDAI | snapgene |
| VMA | VMA-5′- | IEVGNKVMGKDGRPREVIKLPRGRETM | articles/ | VMA-3′- | VGLGFLKDGVKNIPSFLST | common |
| | v8 | YSVVQKSQHRAHKSDSSREVPELLKFT | nmeth.3585 | v3 | DNIGTRETFLAGLIDSDGY | features |
| | | CNATHELVVRTPRSVRRLSRTIKGVEY | | | VTDEHGIKATIKTIHTSVR | |
| | | FEVITFEMGQKKAPDGRIVELVKEVSK | | | DGLVSLARSLGLVVSVNAE | |
| | | SYPISEGPERANELVESYRKASNKAYF | | | PAKVDMNVTKHKISYAIYM | |
| | | EWTIEARDLSLLGSHVRKATYQTYAPI | | | SGGDVLLNVLSKCAGSKKF | |
| | | (SEQ ID NO: 18629) | | | RPAPAAAFARECRGFYFEL | |
| | | | | | QELKEDDYYGITLSDDSDH | |
| | | | | | QFLLGSQVVVQNCTMTEKG | |
| | | | | | SG (SEQ ID NO: | |
| | | | | | 18617) | |
| Sce- | Sce- | GGFQTVGCFAKGTNVLMADGSIECIEN | nature.com/ | Sce- | GHGGIRNNLNTENPLWDAI | snapgene |
| VMA | VMA-5′- | IEVGNKVMGKDGRPREVIKLPRGRETM | articles/ | VMA-3′- | VGLGFLKDGVKNIPSFLST | common |
| | v8 | YSVVQKSQHRAHKSDSSREVPELLKFT | nmeth.3585 | v4 | DNIGTRETFLAGLIDSDGY | features |
| | | CNATHELVVRTPRSVRRLSRTIKGVEY | | | VTDEHGIKATIKTIHTSVR | |
| | | FEVITFEMGQKKAPDGRIVELVKEVSK | | | DGLVSLARSLGLVVSVNAE | |
| | | SYPISEGPERANELVESYRKASNKAYF | | | PAKVDMNVTKHKISYAIYM | |
| | | EWTIEARDLSLLGSHVRKATYQTYAPI | | | SGGDVLLNVLSKCAGSKKF | |
| | | (SEQ ID NO: 18629) | | | RPAPAAAFARECRGFYFEL | |
| | | | | | QELKEDDYYGITLSDDSDH | |
| | | | | | QFLLGSQVVVQNCGEKSMG | |
| | | | | | SG (SEQ ID NO: | |
| | | | | | 18618) | |
| Sce- | Sce- | GGFQTVGCFAKGTNVLMADGSIECIEN | nature.com/ | Sce- | VLLNVLSKCAGSKKFRPAP | nature.com/ |
| VMA | VMA-5′- | IEVGNKVMGKDGRPREVIKLPRGRETM | articles/ | VMA-3′- | AAAFARECRGFYFELQELK | articles/ |
| | v8 | YSVVQKSQHRAHKSDSSREVPELLKFT | nmeth.3585 | v5 | EDDYYGITLSDDSDHQFLL | nmeth.3585 |
| | | CNATHELVVRTPRSVRRLSRTIKGVEY | | | ANQVVVHN (SEQ ID | |
| | | FEVITFEMGQKKAPDGRIVELVKEVSK | | | NO: 18619) | |
| | | SYPISEGPERANELVESYRKASNKAYF | | | | |
| | | EWTIEARDLSLLGSHVRKATYQTYAPI | | | | |
| | | (SEQ ID NO: 18629) | | | | |
| Sce- | Sce- | GGFQTVGCFAKGTNVLMADGSIECIEN | nature.com/ | Sce- | VLLNVLSKCAGSKKFRPAP | nature.com/ |
| VMA | VMA-5′- | IEVGNKVMGKDGRPREVIKLPRGRETM | articles/ | VMA-3′- | AAAFARECRGFYFELQELK | articles/ |
| | v8 | YSVVQKSQHRAHKSDSSREVPELLKFT | nmeth.3585 | v6 | EDDYYGITLSDDSDHQFLL | nmeth.3585 |
| | | CNATHELVVRTPRSVRRLSRTIKGVEY | | | ANQVVVHNCGERGNGSG | |
| | | FEVITFEMGQKKAPDGRIVELVKEVSK | | | (SEQ ID NO: 18620) | |
| | | SYPISEGPERANELVESYRKASNKAYF | | | | |
| | | EWTIEARDLSLLGSHVRKATYQTYAPI | | | | |
| | | (SEQ ID NO: 18629) | | | | |
| Sce- | Sce- | GGFQTVGCFAKGTNVLMADGSIECIEN | nature.com/ | Sce- | VLLNVLSKCAGSKKFRPAP | nature.com/ |
| VMA | VMA-5′- | IEVGNKVMGKDGRPREVIKLPRGRETM | articles/ | VMA-3′- | AAAFARECRGFYFELQELK | articles/ |
| | v8 | YSVVQKSQHRAHKSDSSREVPELLKFT | nmeth.3585 | v7 | EDDYYGITLSDDSDHQFLL | nmeth.3585 |
| | | CNATHELVVRTPRSVRRLSRTIKGVEY | | | ANQVVVHNCTMTEKGSG | |
| | | FEVITFEMGQKKAPDGRIVELVKEVSK | | | (SEQ ID NO: 18621) | |
| | | SYPISEGPERANELVESYRKASNKAYF | | | | |
| | | EWTIEARDLSLLGSHVRKATYQTYAPI | | | | |
| | | (SEQ ID NO: 18629) | | | | |
| Sce- | Sce- | GGFQTVGCFAKGTNVLMADGSIECIEN | nature.com/ | Sce- | VLLNVLSKCAGSKKFRPAP | nature.com/ |
| VMA | VMA-5′- | IEVGNKVMGKDGRPREVIKLPRGRETM | articles/ | VMA-3′- | AAAFARECRGFYFELQELK | articles/ |
| | v8 | YSVVQKSQHRAHKSDSSREVPELLKFT | nmeth.3585 | v8 | EDDYYGITLSDDSDHQFLL | nmeth.3585 |
| | | CNATHELVVRTPRSVRRLSRTIKGVEY | | | ANQVVVHNCGEKSMGSG | |
| | | FEVITFEMGQKKAPDGRIVELVKEVSK | | | (SEQ ID NO: 18622) | |
| | | SYPISEGPERANELVESYRKASNKAYF | | | | |
| | | EWTIEARDLSLLGSHVRKATYQTYAPI | | | | |
| | | (SEQ ID NO: 18629) | | | | |

### Additional Domains

[0869] The gene modifying polypeptide can bind a target DNA sequence and template nucleic acid (e.g., template RNA), nick the target site, and write (e.g., reverse transcribe) the template into DNA, resulting in a modification of the target site. In some embodiments, additional domains may be added to the polypeptide to enhance the efficiency of the process. In some embodiments, the gene modifying polypeptide may contain an additional DNA ligation domain to join reverse transcribed DNA to the DNA of the target site. In some embodiments, the polypeptide may comprise a heterologous RNA-binding domain. In some embodiments, the polypeptide may comprise a domain having 5′ to 3′ exonuclease activity (e.g., wherein the 5′ to 3′ exonuclease activity increases repair of the alteration of the target site, e.g., in favor of alteration over the original genomic sequence). In some embodiments, the polypeptide may comprise a domain having 3′ to 5′ exonuclease activity, e.g., proof-reading activity. In some embodiments, the writing domain, e.g., RT domain, has 3′ to 5′ exonuclease activity, e.g., proof-reading activity.

### Template Nucleic Acids

[0870] The gene modifying systems described herein can modify a host target DNA site using a template nucleic acid sequence. In some embodiments, the gene modifying systems described herein transcribe an RNA sequence template into host target DNA sites by target-primed reverse transcription (TPRT). By modifying DNA sequence(s) via reverse transcription of the RNA sequence template directly into the host genome, the gene modifying system can insert an object sequence into a target genome without the need for exogenous DNA sequences to be introduced into the host cell (unlike, for example, CRISPR systems), as well as eliminate an exogenous DNA insertion step. The gene modifying system can also delete a sequence from the target genome or introduce a substitution using an object sequence. Therefore, the gene modifying system provides a platform for the use of customized RNA sequence templates containing object sequences, e.g., sequences comprising heterologous gene coding and/or function information.

[0871] In some embodiments, the template nucleic acid comprises one or more sequence (e.g., 2 sequences) that binds the gene modifying polypeptide.

[0872] In some embodiments, the template RNA comprises a nucleic acid sequence as listed in Table S4, or a nucleic acid sequence having at least 70%, 75%, 80%, 85%, 90%, 95%, 96%, 97%, 98%, or 99% identity thereto. In some embodiments, the template RNA comprises a 5′ end block sequence of a template sequence as listed in Table S4, or a nucleic acid sequence having at least 70%, 75%, 80%, 85%, 90%, 95%, 96%, 97%, 98%, or 99% identity thereto. In some embodiments, the template RNA comprises a PBS sequence of a template sequence as listed in Table S4, or a nucleic acid sequence having at least 70%, 75%, 80%, 85%, 90%, 95%, 96%, 97%, 98%, or 99% identity thereto. In some embodiments, the template RNA comprises a linker sequence of a template sequence as listed in Table S4, or a nucleic acid sequence having at least 70%, 75%, 80%, 85%, 90%, 95%, 96%, 97%, 98%, or 99% identity thereto. In some embodiments, the template RNA comprises one or more (e.g., 1, 2, 3, or 4) RRS sequences of a template sequence as listed in Table S4, or nucleic acid sequences having at least 70%, 75%, 80%, 85%, 90%, 95%, 96%, 97%, 98%, or 99% identity thereto. In some embodiments, the template RNA comprises a 3′ end block sequence of a template sequence as listed in Table S4, or a nucleic acid sequence having at least 70%, 75%, 80%, 85%, 90%, 95%, 96%, 97%, 98%, or 99% identity thereto. In some embodiments, the template RNA comprises (e.g., in 5′ to 3′ order) a 5′ end block sequence, PBS sequence, one or more RRS sequences, and a 3′ end block sequence of a template sequence as listed in Table S4, or nucleic acid sequences having at least 70%, 75%, 80%, 85%, 90%, 95%, 96%, 97%, 98%, or 99% identity thereto.

[0873] In some embodiments a system or method described herein comprises a single template nucleic acid (e.g., template RNA). In some embodiments a system or method described herein comprises a plurality of template nucleic acids (e.g., template RNAs). For example, a system described herein comprises a first RNA comprising (e.g., from 5′ to 3′) a sequence that binds the gene modifying polypeptide (e.g., the DNA-binding domain and/or the endonuclease domain, e.g., a gRNA) and a sequence that binds a target site (e.g., a second strand of a site in a target genome), and a second RNA (e.g., a template RNA) comprising (e.g., from 5′ to 3′) optionally a sequence that binds the gene modifying polypeptide (e.g., that specifically binds the RT domain), a heterologous object sequence, and a PBS sequence. In some embodiments, when the system comprises a plurality of nucleic acids, each nucleic acid comprises a conjugating domain. In some embodiments, a conjugating domain enables association of nucleic acid molecules, e.g., by hybridization of complementary sequences. For example, in some embodiments a first RNA comprises a first conjugating domain and a second RNA comprises a second conjugating domain, and the first and second conjugating domains are capable of hybridizing to one another, e.g., under stringent conditions. In some embodiments, the stringent conditions for hybridization include hybridization in 4× sodium chloride/sodium citrate (SSC), at about 65 C, followed by a wash in 1×SSC, at about 65 C.

[0874] In some embodiments, the template nucleic acid comprises RNA. In some embodiments, the template nucleic acid comprises DNA (e.g., single stranded or double stranded DNA).

[0875] In some embodiments, the template nucleic acid comprises one or more (e.g., 2) homology domains that have homology to the target sequence. In some embodiments, the homology domains are about 10-20, 20-50, or 50-100 nucleotides in length.

[0876] In some embodiments, a template RNA can comprise a gRNA sequence, e.g., to direct the gene modifying polypeptide to a target site of interest. In some embodiments, a template RNA comprises (e.g., from 5′ to 3′) (i) optionally a gRNA spacer that binds a target site (e.g., a second strand of a site in a target genome), (ii) optionally a gRNA scaffold that binds a polypeptide described herein (e.g., a gene modifying polypeptide or a Cas polypeptide), (iii) a heterologous object sequence comprising a mutation region (optionally the heterologous object sequence comprises, from 5′ to 3′, a first homology region, a mutation region, and a second homology region), and (iv) a primer binding site (PBS) sequence comprising a 3′ target homology domain.

[0877] The template nucleic acid (e.g., template RNA) component of a genome editing system described herein typically is able to bind the gene modifying polypeptide of the system. In some embodiments the template nucleic acid (e.g., template RNA) has a 3′ region that is capable of binding a gene modifying polypeptide. The binding region, e.g., 3′ region, may be a structured RNA region, e.g., having at least 1, 2 or 3 hairpin loops, capable of binding the gene modifying polypeptide of the system. The binding region may associate the template nucleic acid (e.g., template RNA) with any of the polypeptide modules. In some embodiments, the binding region of the template nucleic acid (e.g., template RNA) may associate with an RNA-binding domain in the polypeptide. In some embodiments, the binding region of the template nucleic acid (e.g., template RNA) may associate with the reverse transcription domain of the gene modifying polypeptide (e.g., specifically bind to the RT domain). In some embodiments, the template nucleic acid (e.g., template RNA) may associate with the DNA binding domain of the polypeptide, e.g., a gRNA associating with a Cas9-derived DNA binding domain. In some embodiments, the binding region may also provide DNA target recognition, e.g., a gRNA hybridizing to the target DNA sequence and binding the polypeptide, e.g., a Cas9 domain. In some embodiments, the template nucleic acid (e.g., template RNA) may associate with multiple components of the polypeptide, e.g., DNA binding domain and reverse transcription domain.

[0878] In some embodiments the template RNA has a poly-A tail at the 3′ end. In some embodiments the template RNA does not have a poly-A tail at the 3′ end.

[0879] In some embodiments, a template RNA may be customized to correct a given mutation in the genomic DNA of a target cell (e.g., ex vivo or in vivo, e.g., in a target tissue or organ, e.g., in a subject). For example, the mutation may be a disease-associated mutation relative to the wild-type sequence. Without wishing to be bound by theory, any given target site and edit will have a large number of possible template RNA molecules for use in a gene modifying system that will result in a range of editing efficiencies and fidelities. To partially reduce this screening burden, sets of empirical parameters help ensure optimal initial in silico designs of template RNAs or portions thereof. As a non-limiting illustrative example, for a selected mutation, the following design parameters may be employed. In some embodiments, design is initiated by acquiring approximately 500 bp (e.g., up to 50, 100, 150, 200, 250, 300, 350, 400, 450, 500, 550, 600, 650, or 700 bp, and optionally at least 20, 30, 40, 50, 100, 150, 200, 250, 300, 350, 400, 450, 500, 550, 600, or 650 bp) flanking sequence on either side of the mutation to serve as the target region. In some embodiments, a template nucleic acid comprises a gRNA. In some embodiments, a gRNA comprises a sequence (e.g., a CRISPR spacer) that binds a target site. In some embodiments, the sequence (e.g., a CRISPR spacer) that binds a target site for use in targeting a template nucleic acid to a target region is selected by considering the particular gene modifying polypeptide (e.g., endonuclease domain or writing domain, e.g., comprising a CRISPR/Cas domain) being used (e.g., for Cas9, a protospacer-adjacent motif (PAM) of NGG immediately 3′ of a 20 nucleotide gRNA binding region). In some embodiments, the CRISPR spacer is selected by ranking first by whether the PAM will be disrupted by the gene modifying system induced edit. In some embodiments, disruption of the PAM may increase edit efficiency. In some embodiments, the PAM can be disrupted by also introducing (e.g., as part of or in addition to another modification to a target site in genomic DNA) a silent mutation (e.g., a mutation that does not alter an amino acid residue encoded by the target nucleic acid sequence, if any) in the target site during gene modification. In some embodiments, the CRISPR spacer is selected by ranking sequences by the proximity of their corresponding genomic site to the desired edit location. In some embodiments, the gRNA comprises a gRNA scaffold. In some embodiments, the gRNA scaffold used may be a standard scaffold (e.g., for Cas9, 5′-GTTTTAGAGCTAGAAATAGCAAGTTAAAATAAGGCTAGTCCGTTATCAACTTGAAAAAGTGG CACCGAGTCGGTGC-3′ (SEQ ID NO: 18630)), or may contain one or more nucleotide substitutions. In some embodiments, the heterologous object sequence has at least 90% identity, e.g., at least 90%, 95%, 98%, 99%, or 100% identity, or comprises no more than 1, 2, 3, 4, or 5 positions of non-identity to the target site 3′ of the first strand nick (e.g., immediately 3′ of the first strand nick or up to 1, 2, 3, 4, or 5 nucleotides 3′ of the first strand nick), with the exception of any insertion, substitution, or deletion that may be written into the target site by the gene modifying. In some embodiments, the 3′ target homology domain contains at least 90% identity, e.g., at least 90%, 95%, 98%, 99%, or 100% identity, or comprises no more than 1, 2, 3, 4, or 5 positions of non-identity to the target site 5′ of the first strand nick (e.g., immediately 5′ of the first strand nick or up to 1, 2, 3, 4, or 5 nucleotides 3′ of the first strand nick).

[0880] In some embodiments, the template nucleic acid is a template RNA. In some embodiments, the template RNA comprises one or more modified nucleotides. For example, in some embodiments, the template RNA comprises one or more deoxyribonucleotides. In some embodiments, regions of the template RNA are replaced by DNA nucleotides, e.g., to enhance stability of the molecule. For example, the 3′ end of the template may comprise DNA nucleotides, while the rest of the template comprises RNA nucleotides that can be reverse transcribed. For instance, in some embodiments, the heterologous object sequence is primarily or wholly made up of RNA nucleotides (e.g., at least 90%, 95%, 98%, or 99% RNA nucleotides). In some embodiments, the PBS sequence is primarily or wholly made up of DNA nucleotides (e.g., at least 90%, 95%, 98%, or 99% DNA nucleotides). In other embodiments, the heterologous object sequence for writing into the genome may comprise DNA nucleotides. In some embodiments, the DNA nucleotides in the template are copied into the genome by a domain capable of DNA-dependent DNA polymerase activity. In some embodiments, the DNA-dependent DNA polymerase activity is provided by a DNA polymerase domain in the polypeptide. In some embodiments, the DNA-dependent DNA polymerase activity is provided by a reverse transcriptase domain that is also capable of DNA-dependent DNA polymerization, e.g., second strand synthesis. In some embodiments, the template molecule is composed of only DNA nucleotides.

[0881] In some embodiments, a system described herein comprises two nucleic acids which together comprise the sequences of a template RNA described herein. In some embodiments, the two nucleic acids are associated with each other non-covalently, e.g., directly associated with each other (e.g., via base pairing), or indirectly associated as part of a complex comprising one or more additional molecule.

[0882] A template RNA described herein may comprise, from 5′ to 3′: (1) a gRNA spacer; (2) a gRNA scaffold; (3) heterologous object sequence (4) a primer binding site (PBS) sequence. Each of these components is now described in more detail.

gRNA Spacer and gRNA Scaffold

[0883] A template RNA described herein may comprise a gRNA spacer that directs the gene modifying system to a target nucleic acid, and a gRNA scaffold that promotes association of the template RNA with the Cas domain of the gene modifying polypeptide. The systems described herein can also comprise a gRNA that is not part of a template nucleic acid. For example, a gRNA that comprises a gRNA spacer and gRNA scaffold, but not a heterologous object sequence or a PBS sequence, can be used, e.g., to promote unwinding of the target nucleic acid or to reduce MMR reversal of a desired edit by the host cell (e.g., as described in the End Block Sequences and Additional Guide RNA sections herein), or to induce second strand nicking, e.g., as described in the section herein entitled “Second Strand Nicking”.

[0884] In some embodiments, the gRNA is a short synthetic RNA composed of a scaffold sequence that participates in CRISPR-associated protein binding and a user-defined ˜20 nucleotide targeting sequence for a genomic target. The structure of a complete gRNA was described by Nishimasu et al. Cell 156, P935-949 (2014). The gRNA (also referred to as sgRNA for single-guide RNA) consists of crRNA- and tracrRNA-derived sequences connected by an artificial tetraloop. The crRNA sequence can be divided into guide (20 nt) and repeat (12 nt) regions, whereas the tracrRNA sequence can be divided into anti-repeat (14 nt) and three tracrRNA stem loops (Nishimasu et al. Cell 156, P935-949 (2014)). In practice, guide RNA sequences are generally designed to have a length of between 17-24 nucleotides (e.g., 19, 20, or 21 nucleotides) and be complementary to a targeted nucleic acid sequence. Custom gRNA generators and algorithms are available commercially for use in the design of effective guide RNAs. In some embodiments, the gRNA comprises two RNA components from the native CRISPR system, e.g. crRNA and tracrRNA. As is well known in the art, the gRNA may also comprise a chimeric, single guide RNA (sgRNA) containing sequence from both a tracrRNA (for binding the nuclease) and at least one crRNA (to guide the nuclease to the sequence targeted for editing/binding). Chemically modified sgRNAs have also been demonstrated to be effective for use with CRISPR-associated proteins; see, for example, Hendel et al. (2015) Nature Biotechnol., 985-991. In some embodiments, a gRNA spacer comprises a nucleic acid sequence that is complementary to a DNA sequence associated with a target gene.

[0885] In some embodiments, the region of the template nucleic acid, e.g., template RNA, comprising the gRNA adopts an underwound ribbon-like structure of gRNA bound to target DNA (e.g., as described in Mulepati et al. Science 19 Sep. 2014: Vol. 345, Issue 6203, pp. 1479-1484). Without wishing to be bound by theory, this non-canonical structure is thought to be facilitated by rotation of every sixth nucleotide out of the RNA-DNA hybrid. Thus, in some embodiments, the region of the template nucleic acid, e.g., template RNA, comprising the gRNA may tolerate increased mismatching with the target site at some interval, e.g., every sixth base. In some embodiments, the region of the template nucleic acid, e.g., template RNA, comprising the gRNA comprising homology to the target site may possess wobble positions at a regular interval, e.g., every sixth base, that do not need to base pair with the target site.

[0886] In some embodiments, the template nucleic acid (e.g., template RNA) has at least 15, 16, 17, 18, 19, 20, 21, 22, 23, or 24 bases of at least 80%, 85%, 90%, 95%, 99%, or 100% homology to the target site, e.g., at the 5′ end, e.g., comprising a gRNA spacer sequence of length appropriate to the Cas9 domain of the gene modifying polypeptide (Table 8).

[0887] Table 12 provides parameters to define components for designing gRNA and/or Template RNAs to apply Cas variants listed in Table 8 for gene modifying. The cut site indicates the validated or predicted protospacer adjacent motif (PAM) requirements, validated or predicted location of cut site (relative to the most upstream base of the PAM site). The gRNA for a given enzyme can be assembled by concatenating the crRNA, Tetraloop, and tracrRNA sequences, and further adding a 5′ spacer of a length within Spacer (min) and Spacer (max) that matches a protospacer at a target site. Further, the predicted location of the ssDNA nick at the target is important for designing a PBS sequence of a Template RNA that can anneal to the sequence immediately 5′ of the nick in order to initiate target primed reverse transcription. In some embodiments, a gRNA scaffold described herein comprises a nucleic acid sequence comprising, in the 5′ to 3′ direction, a crRNA of Table 12, a tetraloop from the same row of Table 12, and a tracrRNA from the same row of Table 12, or a sequence having at least 70%, 80%, 85%, 90%, 95%, or 99% identity thereto. In some embodiments, the gRNA or template RNA comprising the scaffold further comprises a gRNA spacer having a length within the Spacer (min) and Spacer (max) indicated in the same row of Table 12. In some embodiments, the gRNA or template RNA having a sequence according to Table 12 is comprised by a system that further comprises a gene modifying polypeptide, wherein the gene modifying polypeptide comprises a Cas domain described in the same row of Table 12.

TABLE 12
Parameters to define components for designing gRNA and/or Template RNAs to apply
Cas variants listed in Table 8 in gene modifying systems

| | | | | Spacer | Spacer | | | |
|---|---|---|---|---|---|---|---|---|
| Variant | PAM(s) | Cut | Tier | (min) | (max) | crRNA | Tetraloop | tracrRNA |
| Nme2Cas9 | NNNNCC | −3 | 1 | 22 | 24 | GTTGTAGC | GAAA | CGAAATGAGAACCGTTGCTACAATAAGGC |
| | | | | | | TCCCTTTCT | | CGTCTGAAAAGATGTGCCGCAACGCTCTG |
| | | | | | | CATTTCG | | CCCCTTAAAGCTTCTGCTTTAAGGGGCATC |
| | | | | | | (SEQ ID NO: | | GTTTA (SEQ ID NO: 18632) |
| | | | | | | 18631) | | |
| PpnCas9 | NNNNRTT | | 1 | 21 | 24 | GTTGTAGC | GAAA | GCGAAATGAAAAACGTTGTTACAATAAGA |
| | | | | | | TCCCTTTTT | | GATGAATTTCTCGCAAAGCTCTGCCTCTTG |
| | | | | | | CATTTCGC | | AAATTTCGGTTTCAAGAGGCATC (SEQ ID |
| | | | | | | (SEQ ID NO: | | NO: 18634) |
| | | | | | | 18633) | | |
| SauCas9 | NNGRR; | −3 | 1 | 21 | 23 | GTTTTAGT | GAAA | CAGAATCTACTAAAACAAGGCAAAATGCC |
| | NNGRRT | | | | | ACTCTG | | GTGTTTATCTCGTCAACTTGTTGGCGAGA |
| | | | | | | (SEQ ID NO: | | (SEQ ID NO: 18636) |
| | | | | | | 18635) | | |
| SauCas9- | NNNRR; | −3 | 1 | 21 | 21 | GTTTTAGT | GAAA | CAGAATCTACTAAAACAAGGCAAAATGCC |
| KKH | NNNRRT | | | | | ACTCTG | | GTGTTTATCTCGTCAACTTGTTGGCGAGA |
| | | | | | | (SEQ ID NO: | | (SEQ ID NO: 18636) |
| | | | | | | 18635) | | |
| SauriCas9 | NNGG | −3 | 1 | 21 | 21 | GTTTTAGT | GAAA | CAGAATCTACTAAAACAAGGCAAAATGCC |
| | | | | | | ACTCTG | | GTGTTTATCTCGTCAACTTGTTGGCGAGA |
| | | | | | | (SEQ ID NO: | | (SEQ ID NO: 18636) |
| | | | | | | 18635) | | |
| SauriCas9- | NNRG | −3 | 1 | 21 | 21 | GTTTTAGT | GAAA | CAGAATCTACTAAAACAAGGCAAAATGCC |
| KKH | | | | | | ACTCTG | | GTGTTTATCTCGTCAACTTGTTGGCGAGA |
| | | | | | | | | (SEQ ID NO: 18636) |
| | | | | | | (SEQ ID NO: | | |
| | | | | | | 18635) | | |
| ScaCas9- | NNG | −3 | 1 | 20 | 20 | GTTTTAGA | GAAA | TAGCAAGTTAAAATAAGGCTAGTCCGTTA |
| Sc++ | | | | | | GCTA (SEQ | | TCAACTTGAAAAAGTGGCACCGAGTCGGT |
| | | | | | | ID NO: | | GC (SEQ ID NO: 18638) |
| | | | | | | 18637) | | |
| SpyCas9 | NGG | −3 | 1 | 20 | 20 | GTTTTAGA | GAAA | TAGCAAGTTAAAATAAGGCTAGTCCGTTA |
| | | | | | | GCTA (SEQ | | TCAACTTGAAAAAGTGGCACCGAGTCGGT |
| | | | | | | ID NO: | | GC (SEQ ID NO: 18638) |
| | | | | | | 18637) | | |
| SpyCas9- | NG | −3 | 1 | 20 | 20 | GTTTTAGA | GAAA | TAGCAAGTTAAAATAAGGCTAGTCCGTTA |
| NG | (NGG = | | | | | GCTA (SEQ | | TCAACTTGAAAAAGTGGCACCGAGTCGGT |
| | NGA = | | | | | ID NO: | | GC (SEQ ID NO: 18638) |
| | NGT > NGC) | | | | | 18637) | | |
| SpyCas9- | NRN > NYN | −3 | 1 | 20 | 20 | GTTTTAGA | GAAA | TAGCAAGTTAAAATAAGGCTAGTCCGTTA |
| SpRY | | | | | | GCTA (SEQ | | TCAACTTGAAAAAGTGGCACCGAGTCGGT |
| | | | | | | ID NO: | | GC (SEQ ID NO: 18638) |
| | | | | | | 18637) | | |
| St1Cas9 | NNAGAAW > | −3 | 1 | 20 | 20 | GTCTTTGTA | GTAC | CAGAAGCTACAAAGATAAGGCTTCATGCC |
| | NNAGGAW = | | | | | CTCTG (SEQ | | GAAATCAACACCCTGTCATTTTATGGCAG |
| | NNGGAAW | | | | | ID NO: | | GGTGTTTT (SEQ ID NO: 18640) |
| | | | | | | 18639) | | |
| BlatCas9 | NNNNCN | −3 | 1 | 19 | 23 | GCTATAGT | GAAA | GGTAAGTTGCTATAGTAAGGGCAACAGAC |
| | AA > NNNN | | | | | TCCTTACT | | CCGAGGCGTTGGGGATCGCCTAGCCCGTG |
| | CNDD > NN | | | | | (SEQ ID NO: | | TTTACGGGCTCTCCCCATATTCAAAATAAT |
| | NNC | | | | | 18641) | | GACAGACGAGCACCTTGGAGCATTTATCT |
| | | | | | | | | CCGAGGTGCT (SEQ ID NO: 18642) |
| cCas9-v16 | NNVACT; | −3 | 2 | 21 | 21 | GTCTTAGT | GAAA | CAGAATCTACTAAGACAAGGCAAAATGCC |
| | NNVATGM; | | | | | ACTCTG | | GTGTTTATCTCGTCAACTTGTTGGCGAGA |
| | NNVATT; | | | | | (SEQ ID NO: | | (SEQ ID NO: 18644) |
| | NNVGCT; | | | | | 18643) | | |
| | NNVGTG; | | | | | | | |
| | NNVGTT | | | | | | | |
| cCas9-v17 | NNVRRN | −3 | 2 | 21 | 21 | GTCTTAGT | GAAA | CAGAATCTACTAAGACAAGGCAAAATGCC |
| | | | | | | ACTCTG | | GTGTTTATCTCGTCAACTTGTTGGCGAGA |
| | | | | | | (SEQ ID NO: | | (SEQ ID NO: 18644) |
| | | | | | | 18643) | | |
| cCas9-v21 | NNVACT; | −3 | 2 | 21 | 21 | GTCTTAGT | GAAA | CAGAATCTACTAAGACAAGGCAAAATGCC |
| | NNVATGM; | | | | | ACTCTG | | GTGTTTATCTCGTCAACTTGTTGGCGAGA |
| | NNVATT; | | | | | (SEQ ID NO: | | (SEQ ID NO: 18644) |
| | NNVGCT; | | | | | 18643) | | |
| | NNVGTG; | | | | | | | |
| | NNVGTT | | | | | | | |
| cCas9-v42 | NNVRRN | −3 | 2 | 21 | 21 | GTCTTAGT | GAAA | CAGAATCTACTAAGACAAGGCAAAATGCC |
| | | | | | | ACTCTG | | GTGTTTATCTCGTCAACTTGTTGGCGAGA |
| | | | | | | (SEQ ID NO: | | (SEQ ID NO: 18644) |
| | | | | | | 18643) | | |
| CdiCas9 | NNRHHHY; | | 2 | 22 | 22 | ACTGGGGT | GAAA | CTGAACCTCAGTAAGCATTGGCTCGTTTCC |
| | NNRAAA | | | | | TCAG (SEQ | | AATGTTGATTGCTCCGCCGGTGCTCCTTAT |
| | Y | | | | | ID NO: | | TTTTAAGGGCGCCGGC (SEQ ID NO: |
| | | | | | | 18645) | | 18646) |
| CjeCas9 | NNNNRYA | −3 | 2 | 21 | 23 | GTTTTAGTC | GAAA | AGGGACTAAAATAAAGAGTTTGCGGGACT |
| | C | | | | | CCT (SEQ ID | | CTGCGGGGTTACAATCCCCTAAAACCGC |
| | | | | | | NO: 18647) | | (SEQ ID NO: 18648) |
| GeoCas9 | NNNNCRA | | 2 | 21 | 23 | GTCATAGT | GAAA | TCAGGGTTACTATGATAAGGGCTTTCTGCC |
| | A | | | | | TCCCCTGA | | TAAGGCAGACTGACCCGCGGCGTTGGGG |
| | | | | | | (SEQ ID NO | | ATCGCCTGTCGCCCGCTTTTGGCGGGCATT |
| | | | | | | 18649) | | CCCCATCCTT (SEQ ID NO: 18650) |
| iSpyMac | NAAN | −3 | 2 | 19 | 21 | GTTTTAGA | GAAA | TAGCAAGTTAAAATAAGGCTAGTCCGTTA |
| Cas9 | | | | | | GCTA (SEQ | | TCAACTTGAAAAAGTGGCACCGAGTCGGT |
| | | | | | | ID NO: | | GC (SEQ ID NO: 18638) |
| | | | | | | 18637) | | |
| NmeCas9 | NNNNGAYT; | −3 | 2 | 20 | 24 | GTTGTAGC | GAAA | CGAAATGAGAACCGTTGCTACAATAAGGC |
| | NNNNGYTT; | | | | | TCCCTTTCT | | CGTCTGAAAAGATGTGCCGCAACGCTCTG |
| | NN | | | | | CATTTCG | | CCCCTTAAAGCTTCTGCTTTAAGGGGCATC |
| | NNGAYA; | | | | | (SEQ ID NO: | | GTTTA (SEQ ID NO: 18632) |
| | NNNNGTC | | | | | 18631) | | |
| | T | | | | | | | |
| ScaCas9 | NNG | −3 | 2 | 20 | 20 | GTTTTAGA | GAAA | TAGCAAGTTAAAATAAGGCTAGTCCGTTA |
| | | | | | | GCTA (SEQ | | TCAACTTGAAAAAGTGGCACCGAGTCGGT |
| | | | | | | ID NO: | | GC (SEQ ID NO: 18638) |
| | | | | | | 18637) | | |
| ScaCas9- | NNG | −3 | 2 | 20 | 20 | GTTTTAGA | GAAA | TAGCAAGTTAAAATAAGGCTAGTCCGTTA |
| HiFi-Sc++ | | | | | | GCTA (SEQ | | TCAACTTGAAAAAGTGGCACCGAGTCGGT |
| | | | | | | ID NO: | | GC (SEQ ID NO: 18638) |
| | | | | | | 18637) | | |
| SpyCas9- | NRRH | −3 | 2 | 20 | 20 | GTTTAAGA | GAAA | CAGCATAGCAAGTTTAAATAAGGCTAGTC |
| 3var-NRRH | | | | | | GCTATGCT | | CGTTATCAACTTGAAAAAGTGGCACCGAG |
| | | | | | | G (SEQ ID | | TCGGTGC (SEQ ID NO: 18652) |
| | | | | | | NO: 18651) | | |
| SpyCas9- | NRTH | −3 | 2 | 20 | 20 | GTTTAAGA | GAAA | CAGCATAGCAAGTTTAAATAAGGCTAGTC |
| 3var-NRTH | | | | | | GCTATGCT | | CGTTATCAACTTGAAAAAGTGGCACCGAG |
| | | | | | | G (SEQ ID | | TCGGTGC (SEQ ID NO: 18652) |
| | | | | | | NO: 18651) | | |
| SpyCas9- | NRCH | −3 | 2 | 20 | 20 | GTTTAAGA | GAAA | CAGCATAGCAAGTTTAAATAAGGCTAGTC |
| 3var-NRCH | | | | | | GCTATGCT | | CGTTATCAACTTGAAAAAGTGGCACCGAG |
| | | | | | | G (SEQ ID | | TCGGTGC (SEQ ID NO: 18652) |
| | | | | | | NO: 18651) | | |
| SpyCas9- | NGG | −3 | 2 | 20 | 20 | GTTTTAGA | GAAA | TAGCAAGTTAAAATAAGGCTAGTCCGTTA |
| HF1 | | | | | | GCTA (SEQ | | TCAACTTGAAAAAGTGGCACCGAGTCGGT |
| | | | | | | ID NO: | | GC (SEQ ID NO: 18638) |
| | | | | | | 18637) | | |
| SpyCas9- | NAAG | −3 | 2 | 20 | 20 | GTTTTAGA | GAAA | TAGCAAGTTAAAATAAGGCTAGTCCGTTA |
| QQR1 | | | | | | GCTA (SEQ | | TCAACTTGAAAAAGTGGCACCGAGTCGGT |
| | | | | | | ID NO: | | GC (SEQ ID NO: 18638) |
| | | | | | | 18637) | | |
| SpyCas9- | NGN | −3 | 2 | 20 | 20 | GTTTTAGA | GAAA | TAGCAAGTTAAAATAAGGCTAGTCCGTTA |
| SpG | | | | | | GCTA (SEQ | | TCAACTTGAAAAAGTGGCACCGAGTCGGT |
| | | | | | | ID NO: | | GC (SEQ ID NO: 18638) |
| | | | | | | 18637) | | |
| SpyCas9- | NGAN | −3 | 2 | 20 | 20 | GTTTTAGA | GAAA | TAGCAAGTTAAAATAAGGCTAGTCCGTTA |
| VQR | | | | | | GCTA (SEQ | | TCAACTTGAAAAAGTGGCACCGAGTCGGT |
| | | | | | | ID NO: | | GC (SEQ ID NO: 18638) |
| | | | | | | 18637) | | |
| SpyCas9- | NGCG | −3 | 2 | 20 | 20 | GTTTTAGA | GAAA | TAGCAAGTTAAAATAAGGCTAGTCCGTTA |
| VRER | | | | | | GCTA (SEQ | | TCAACTTGAAAAAGTGGCACCGAGTCGGT |
| | | | | | | ID NO: | | GC (SEQ ID NO: 18638) |
| | | | | | | 18637) | | |
| SpyCas9- | NG; | −3 | 2 | 20 | 20 | GTTTAAGA | GAAA | CAGCATAGCAAGTTTAAATAAGGCTAGTC |
| xCas | GAA; | | | | | GCTATGCT | | CGTTATCAACTTGAAAAAGTGGCACCGAG |
| | GAT | | | | | G (SEQ ID | | TCGGTGC (SEQ ID NO: 18652) |
| | | | | | | NO: 18651) | | |
| SpyCas9- | NG | −3 | 2 | 20 | 20 | GTTTAAGA | GAAA | CAGCATAGCAAGTTTAAATAAGGCTAGTC |
| xCas-NG | | | | | | GCTATGCT | | CGTTATCAACTTGAAAAAGTGGCACCGAG |
| | | | | | | G (SEQ ID | | TCGGTGC (SEQ ID NO: 18652) |
| | | | | | | NO: 18651) | | |
| St1Cas9- | NNACAA | −3 | 2 | 20 | 20 | GTCTTTGTA | GTAC | CAGAAGCTACAAAGATAAGGCTTCATGCC |
| CNRZ1066 | | | | | | CTCTG (SEQ | | GAAATCAACACCCTGTCATTTTATGGCAG |
| | | | | | | ID NO: | | GGTGTTTT (SEQ ID NO: 18640) |
| | | | | | | 18639) | | |
| St1Cas9- | NNGCAA | −3 | 2 | 20 | 20 | GTCTTTGTA | GTAC | CAGAAGCTACAAAGATAAGGCTTCATGCC |
| LMG1831 | | | | | | CTCTG (SEQ | | GAAATCAACACCCTGTCATTTTATGGCAG |
| | | | | | | ID NO: | | GGTGTTTT (SEQ ID NO: 18640) |
| | | | | | | 18639) | | |
| St1Cas9- | NNAAAA | −3 | 2 | 20 | 20 | GTCTTTGTA | GTAC | CAGAAGCTACAAAGATAAGGCTTCATGCC |
| MTH17CL396 | | | | | | CTCTG (SEQ | | GAAATCAACACCCTGTCATTTTATGGCAG |
| | | | | | | ID NO: | | GGTGTTTT (SEQ ID NO: 18640) |
| | | | | | | 18639) | | |
| St1Cas9- | NNGAAA | −3 | 2 | 20 | 20 | GTCTTTGTA | GTAC | CAGAAGCTACAAAGATAAGGCTTCATGCC |
| TH1477 | | | | | | CTCTG (SEQ | | GAAATCAACACCCTGTCATTTTATGGCAG |
| | | | | | | ID NO: | | GGTGTTTT (SEQ ID NO: 18640) |
| | | | | | | 18639) | | |
| sRGN3.1 | NNGG | | 1 | 21 | 23 | GTTTTAGT | GAAA | CAGAATCTACTGAAACAAGACAATATGTC |
| | | | | | | ACTCTG | | GTGTTTATCCCATCAATTTATTGGTGGGAT |
| | | | | | | (SEQ ID NO: | | TTT (SEQ ID NO: 18653) |
| | | | | | | 18635) | | |
| sRGN3.3 | NNGG | | 1 | 21 | 23 | GTTTTAGT | GAAA | CAGAATCTACTGAAACAAGACAATATGTC |
| | | | | | | ACTCTG | | GTGTTTATCCCATCAATTTATTGGTGGGAT |
| | | | | | | (SEQ ID NO: | | TTT (SEQ ID NO: 18653) |
| | | | | | | 18635) | | |

[0888] Herein, when an RNA sequence (e.g., a template RNA sequence) is said to comprise a particular sequence (e.g., a sequence of Table 12 or a portion thereof) that comprises thymine (T), it is of course understood that the RNA sequence may (and frequently does) comprise uracil (U) in place of T. For instance, the RNA sequence may comprise U at every position shown as T in the sequence in Table 12. More specifically, the present disclosure provides an RNA sequence according to every gRNA scaffold sequence of Table 12, wherein the RNA sequence has a U in place of each T in the sequence in Table 12. Additionally, it is understood that terminal Us and Ts may optionally be added or removed from tracrRNA sequences and may be modified or unmodified when provided as RNA. Without wishing to be bound by example, versions of gRNA scaffold sequences alternative to those exemplified in Table 12 may also function with the different Cas9 enzymes or derivatives thereof exemplified in Table 8, e.g., alternate gRNA scaffold sequences with nucleotide additions, substitutions, or deletions, e.g., sequences with stem-loop structures added or removed. It is contemplated herein that the gRNA scaffold sequences represent a component of gene modifying systems that can be similarly optimized for a given system, Cas-RT fusion polypeptide, indication, target mutation, template RNA, or delivery vehicle.

### RNA Binding Domain Recruitment Sites (RRS)

[0889] In some embodiments, a template RNA described herein comprises an RNA binding domain (RBD) recruitment site (RRS), capable of binding to an RBD as described herein. In some embodiments, an RRS binds to the RBD of a gene modifying polypeptide or complex as described herein. In some embodiments, the RRS is located at the 5′ end of the template RNA. In some embodiments, the RRS is located within 5, 10, 15, 20, 25, or 30 nucleotides of the 5′ end of the template RNA. In some embodiments, the RRS comprises one or more (e.g., 1 or 2) stem-loop sequences.

[0890] In some embodiments, a template nucleic acid comprises a plurality of RRS sequences (e.g., a plurality of the same RRS sequence, or a plurality of different RRS sequences). In some embodiments, the RRS sequence is repeated at least 2, 3, 4, 5, 6, 7, 8, 9, or 10 times. In some embodiments, the plurality of RRS sequences is separated by one or more linker sequences. In some embodiments, the plurality of RRS sequences are positioned adjacent to each other (e.g., without an intervening linker sequence).

[0891] In some embodiments, the RRS is not located between a PBS and a heterologous object sequence. In some embodiments, the RRS is located between a PBS and a heterologous object sequence.

[0892] In some embodiments, an RRS comprises the nucleic acid sequence of an RRS as listed in Table 40, or a nucleic acid sequence having at least 75%, 80%, 85%, 90%, 95%, 96%, 97%, 98%, or 99% identity thereto. In some embodiments, an RRS comprises the nucleic acid sequence of an RRS as listed in Table 40, or a nucleic acid sequence having no more than 1, 2, 3, 4, 5, 6, 7, 8, 9, or 10 nucleotide differences therefrom. Herein, when an RNA sequence (e.g., an RRS) is said to comprise a particular sequence (e.g., a sequence of Table 40 or a portion thereof) that comprises thymine (T), it is of course understood that the RNA sequence may (and frequently does) comprise uracil (U) in place of T. For instance, the RNA sequence may comprise U at every position shown as T in the sequence in Table 40. More specifically, the present disclosure provides an RNA sequence according to every RRS sequence of Table 40, wherein the RNA sequence has a U in place of each T in the sequence in Table 40.

TABLE 40
Exemplary RNA binding domain recruitment sites (RRS)

| RBP | RBP domain | |
|---|---|---|
| recognition | binding | |
| site (RRS) | partner | Sequence (5′ to 3′) |
| MS2 | MCP | gcACATGAGGATCACCCATGTgc (SEQ ID NO: 18654) |
| PP7 | PCP | caTAAGGAGTTTATATGGAAACCCTTAtg (SEQ ID NO: |
| | | 18655) |
| PP7 core | PCP | TAAGGAGTTTATATGGAAACCCTTA (SEQ ID NO: 18656) |
| com | Com | CTGAATGCCTGCGAGCATC (SEQ ID NO: 18657) |
| LS4-1 | LS4 | GGCAGAGAAAGGCCATACAATCATTGGCCTTGTGAGGCCG |
| | | TGTGTCTTCCAGTGGC (SEQ ID NO: 18658) |
| LS12-1 | LS12 | GGCAGAGAAAGGCCATACAATCATTGGCTTTTCCATGACGC |
| | | CAGTTCCAGTGGC (SEQ ID NO: 18659) |
| BoxB | lambdaN | GGGCCCTGAAGAAGGGCCC (SEQ ID NO: 18660) |
| | (1-22) | |
| Kt | L7Ae | GGATCCGTGATCGGAAACGTGAGATCC (SEQ ID NO: |
| | | 18661) |
| CS1 | LS4 | GGTGGCAGAGAAAGGCGAAAGCCTTGTGAGGCCATCAA |
| | | (SEQ ID NO: 18662) |
| CS2 | LS12 | GGATGCAGAGAACGAAAGTTCCATGACGCATCCAA (SEQ |
| | | ID NO: 18663) |

### End Block Sequences

[0893] In some embodiments, a template RNA as described herein comprises one or more end block sequences. In some instances, an end block sequence or end protection sequence, as described herein, may protect the template RNA from exonuclease degradation (e.g., reduces exonuclease degradation of the template RNA by at least 25%, 50%, 75%, 80%, 85%, 90%, 95%, 96%, 97%, 98%, 99%, or 100% relative to an otherwise similar template RNA lacking the end block sequence). In some instances, an end block sequence or end protection sequence, as described herein, may act to terminate a reverse transcriptase reaction. In some embodiments, an end block sequence is positioned adjacent to, or within 1, 2, 3, 4, 5, 6, 7, 8, 9, 10, 15, 20, 25, or 30 nucleotides of a gRNA spacer sequence (e.g., which pairs with the nicked target nucleic acid strand). In embodiments, the gRNA spacer sequence has 100% complementarity to the nicked target nucleic acid strand and/or directs nicking activity by a Cas domain (e.g., a Cas9 domain, e.g., an nCas9). In embodiments, the gRNA spacer sequence has greater than or equal to 18 nucleotides of complementarity (e.g., about 18, 19, or 20 nucleotides of complementarity) to the target nucleic acid strand, e.g., and promotes unwinding of the target nucleic acid without nicking. In some embodiments, an end block sequence (e.g., a 5′ end blocksequence) comprises a gRNA scaffold as described herein. In some embodiments, a gRNA spacer within or adjacent to a 5′ end block as described herein has a length suitable for limited nicking, e.g., the spacer induces less nicking activity than the activity of a Cas domain paired with a spacer having the preferred spacer length for that Cas domain. In some embodiments, a gRNA spacer as described herein has a length suitable for full nicking.

[0894] In some embodiments, an end block sequence comprises the nucleic acid sequence of an end block sequence as listed in Table 41, or a nucleic acid sequence having at least 75%, 80%, 85%, 90%, 95%, 96%, 97%, 98%, or 99% identity thereto, or the reverse complement thereof. In some embodiments, an end block sequence comprises the nucleic acid sequence of an end block sequence as listed in Table 41, or a nucleic acid sequence having no more than 1, 2, 3, 4, 5, 6, 7, 8, 9, or 10 nucleotide differences therefrom, or the reverse complement thereof. Herein, when an RNA sequence (e.g., a end block sequence) is said to comprise a particular sequence (e.g., a sequence of Table 41 or a portion thereof) that comprises thymine (T), it is of course understood that the RNA sequence may (and frequently does) comprise uracil (U) in place of T. For instance, the RNA sequence may comprise U at every position shown as T in the sequence in Table 41. More specifically, the present disclosure provides an RNA sequence according to every end block sequence of Table 41, wherein the RNA sequence has a U in place of each T in the sequence in Table 41.

TABLE 41
Exemplary end block sequences

| End-block | Sequence (5′ to 3′) |
|---|---|
| G-quadruplex | GGTGGTGGTGG (SEQ ID NO: 18664) |
| Tinoco hairpin | GGACTTCGGTCC (SEQ ID NO: 18665) |
| GC-Geo hairpin | CTCATAGTTCCCCTGAGAAATCAGGGTTACTATGAG (SEQ ID NO: |
| | 18666) |
| Nme2Cas9 | GTTGTAGCTCCCTTTCTCATTTCGGAAACGAAATGAGAACCGTTGCTAC |
| scaffold | AATAAGGCCGTCTGAAAAGATGTGCCGCAACGCTCTGCCCCTTAAAGC |
| | TTCTGCTTTAAGGGGCATCGTTTA (SEQ ID NO: 18667) |
| Nme2Cas9 | CAGTACATGACCTTACGGGAGTTGTAGCTCCCTTTCTCATTTCG |
| spacer + scaffold | GAAACGAAATGAGAACCGTTGCTACAATAAGGCCGTCTGAAAAGATGT |
| | GCCGCAACGCTCTGCCCCTTAAAGCTTCTGCTTTAAGGGGCATCGTTTA |
| | (SEQ ID NO: 18668) |
| Nme2Cas9 16 nt | ACATGACCTTACGGGAGTTGTAGCTCCCTTTCTCATTTCGGAAAC |
| spacer + scaffold | GAAATGAGAACCGTTGCTACAATAAGGCCGTCTGAAAAGATGTGCCGC |
| | AACGCTCTGCCCCTTAAAGCTTCTGCTTTAAGGGGCATCGTTTA (SEQ |
| | ID NO: 18669) |
| BlatCas9 | GCTATAGTTCCTTACTGAAAGGTAAGTTGCTATAGTAAGGGCAACAGA |
| scaffold | CCCGAGGCGTTGGGGATCGCCTAGCCCGTGTTTACGGGCTCTCCCCAT |
| | ATTCAAAATAATGACAGACGAGCACCTTGGAGCATTTATCTCCGAGGT |
| | GCT (SEQ ID NO: 18670) |
| GeoCas9 | GTCATAGTTCCCCTGAGAAATCAGGGTTACTATGATAAGGGCTTTCTGC |
| | CTAAGGCAGACTGACCCGCGGCGTTGGGGATCGCCTGTCGCCCGCTTT |
| | TGGCGGGCATTCCCCATCCTT (SEQ ID NO: 18671) |
| PpnCas9 scaffold | GTTGTAGCTCCCTTTTTCATTTCGCGAAAGCGAAATGAAAAACGTTGTT |
| | ACAATAAGAGATGAATTTCTCGCAAAGCTCTGCCTCTTGAAATTTCGGT |
| | TTCAAGAGGCATC (SEQ ID NO: 18672) |
| CdiCas9scaffold | ACTGGGGTTCAGGAAACTGAACCTCAGTAAGCATTGGCTCGTTTCCAAT |
| | GTTGATTGCTCCGCCGGTGCTCCTTATTTTTAAGGGCGCCGGC (SEQ ID |
| | NO: 18673) |
| SpyCas9 + hairpin | GTTTTAGAGCTAGAAATAGCAAGTTAAAATAAGGCTAGTCCGTTATCA |
| scaffold | ACTTGAAAAAGTGGCACCGGGACTTCGGTCCCGGTGC (SEQ ID |
| | NO: 18674) |
| St1Cas9 scaffold | GTCTTTGTACTCTGGTACCAGAAGCTACAAAGATAAGGCTTCATGCCGA |
| | AATCAACACCCTGTCATTTTATGGCAGGGTGTTTT |
| | (SEQ ID NO: 18675) |
| cCas9-v16 | GTCTTAGTACTCTGGAAACAGAATCTACTAAGACAAGGCAAAATGCCG |
| scaffold | TGTTTATCTCGTCAACTTGTTGGCGAGA (SEQ ID NO: 18676) |
| SpyCas9-3var-NRRH | GTTTAAGAGCTATGCTGGAAACAGCATAGCAAGTTTAAATAAGGCTAG |
| scaffold | TCCGTTATCAACTTGAAAAAGTGGCACCGAGTCGGTGC (SEQ ID NO: |
| | 18677) |
| SauCas9 scaffold | GTTTTAGTACTCTGGAAACAGAATCTACTAAAACAAGGCAAAATGCCG |
| | TGTTTATCTCGTCAACTTGTTGGCGAGA (SEQ ID NO: 18678) |
| CjeCas9 scaffold | GTTTTAGTCCCTGAAAAGGGACTAAAATAAAGAGTTTGCGGGACTCTG |
| | CGGGGTTACAATCCCCTAAAACCGC (SEQ ID NO: 18679) |
| SpyCas9 scaffold | GTTTTAGAGCTAGAAATAGCAAGTTAAAATAAGGCTAGTCCGTTATCA |
| | ACTTGAAAAAGTGGCACCGAGTCGGTGC (SEQ ID NO: 18630) |

[0895] In some embodiments, an end block comprises a gRNA spacer sequence, e.g., as described herein. In certain embodiments, the gRNA spacer sequence has greater than or equal to 18 nucleotides of complementarity (e.g., about 18, 19, 20, 21, 22, or 23 nucleotides of complementarity) to the target nucleic acid strand. In certain embodiments, the gRNA spacer sequence promotes unwinding and nicking of the target nucleic acid.

### Heterologous Object Sequence

[0896] A template RNA described herein may comprise a heterologous object sequence that the gene modifying polypeptide can use as a template for reverse transcription, to write a desired sequence into the target nucleic acid. In some embodiments, the heterologous object sequence comprises, from 5′ to 3′, a post-edit homology region, the mutation region, and a pre-edit homology region. Without wishing to be bound by theory, an RT performing reverse transcription on the template RNA first reverse transcribes the pre-edit homology region, then the mutation region, and then the post-edit homology region, thereby creating a DNA strand comprising the desired mutation with a homology region on either side.

[0897] In some embodiments, the heterologous object sequence is at least 32, 33, 34, 35, 36, 37, 38, 39, 40, 41, 42, 43, 44, 45, 46, 47, 48, 49, 50, 51, 52, 53, 54, 55, 56, 57, 58, 59, 60, 61, 62, 63, 64, 65, 66, 67, 68, 69, 70, 71, 72, 73, 74, 75, 76, 77, 78, 79, 80, 81, 82, 83, 84, 85, 86, 87, 88, 89, 90, 91, 92, 93, 94, 95, 96, 97, 98, 99, 100, 120, 140, 160, 180, 200, 500, or 1,000 nucleotides (nts) in length, or at least 1, 1.5, 2, 2.5, 3, 3.5, 4, 4.5, 5, 5.5, 6, 6.5, 7, 7.5, 8, 8.5, 9, 9.5, or 10 kilobases in length. In some embodiments, the heterologous object sequence is no more than 33, 34, 35, 36, 37, 38, 39, 40, 41, 42, 43, 44, 45, 46, 47, 48, 49, 50, 51, 52, 53, 54, 55, 56, 57, 58, 59, 60, 61, 62, 63, 64, 65, 66, 67, 68, 69, 70, 71, 72, 73, 74, 75, 76, 77, 78, 79, 80, 81, 82, 83, 84, 85, 86, 87, 88, 89, 90, 91, 92, 93, 94, 95, 96, 97, 98, 99, 100, 120, 140, 160, 180, 200, 500, 1,000, or 2000 nucleotides (nts) in length, or no more than 20, 15, 10, 9, 8, 7, 6, 5, 4, or 3 kilobases in length. In some embodiments, the heterologous object sequence is 30-1000, 40-1000, 50-1000, 60-1000, 70-1000, 74-1000, 75-1000, 76-1000, 77-1000, 78-1000, 79-1000, 80-1000, 85-1000, 90-1000, 100-1000, 120-1000, 140-1000, 160-1000, 180-1000, 200-1000, 500-1000, 30-500, 40-500, 50-500, 60-500, 70-500, 74-500, 75-500, 76-500, 77-500, 78-500, 79-500, 80-500, 85-500, 90-500, 100-500, 120-500, 140-500, 160-500, 180-500, 200-500, 30-200, 40-200, 50-200, 60-200, 70-200, 74-200, 75-200, 76-200, 77-200, 78-200, 79-200, 80-200, 85-200, 90-200, 100-200, 120-200, 140-200, 160-200, 180-200, 30-100, 40-100, 50-100, 60-100, 70-100, 74-100, 75-100, 76-100, 77-100, 78-100, 79-100, 80-100, 85-100, or 90-100 nucleotides (nts) in length, or 1-20, 1-15, 1-10, 1-9, 1-8, 1-7, 1-6, 1-5, 1-4, 1-3, 1-2, 2-20, 2-15, 2-10, 2-9, 2-8, 2-7, 2-6, 2-5, 2-4, 2-3, 3-20, 3-15, 3-10, 3-9, 3-8, 3-7, 3-6, 3-5, 3-4, 4-20, 4-15, 4-10, 4-9, 4-8, 4-7, 4-6, 4-5, 5-20, 5-15, 5-10, 5-9, 5-8, 5-7, 5-6, 6-20, 6-15, 6-10, 6-9, 6-8, 6-7, 7-20, 7-15, 7-10, 7-9, 7-8, 8-20, 8-15, 8-10, 8-9, 9-20, 9-15, 9-10, 10-15, 10-20, or 15-20 kilobases in length. In some embodiments, the heterologous object sequence is 10-100, 10-90, 10-80, 10-70, 10-60, 10-50, 10-40, 10-30, or 10-20 nt in length, e.g., 10-80, 10-50, or 10-20 nt in length, e.g., about 10-20 nt in length. In some embodiments, the heterologous object sequence is 8-30, 9-25, 10-20, 11-16, or 12-15 nucleotides in length, e.g., is 11-16 nt in length. Without wishing to be bound by theory, in some embodiments, a larger insertion size, larger region of editing (e.g., the distance between a first edit/substitution and a second edit/substitution in the target region), and/or greater number of desired edits (e.g., mismatches of the heterologous object sequence to the target genome), may result in a longer optimal heterologous object sequence.

[0898] In certain embodiments, the template nucleic acid comprises a customized RNA sequence template which can be identified, designed, engineered and constructed to contain sequences altering or specifying host genome function, for example by introducing a heterologous coding region into a genome; affecting or causing exon structure/alternative splicing, e.g., leading to exon skipping of one or more exons; causing disruption of an endogenous gene, e.g., creating a genetic knockout; causing transcriptional activation of an endogenous gene; causing epigenetic regulation of an endogenous DNA; causing up-regulation of one or more operably linked genes, e.g., leading to gene activation or overexpression; causing down-regulation of one or more operably linked genes, e.g., creating a genetic knock-down; etc. In certain embodiments, a customized RNA sequence template can be engineered to contain sequences coding for exons and/or transgenes, provide binding sites for transcription factor activators, repressors, enhancers, etc., and combinations thereof. In some embodiments, a customized template can be engineered to encode a nucleic acid or peptide tag to be expressed in an endogenous RNA transcript or endogenous protein operably linked to the target site. In other embodiments, the coding sequence can be further customized with splice donor sites, splice acceptor sites, or poly-A tails.

[0899] The template nucleic acid (e.g., template RNA) of the system typically comprises an object sequence (e.g., a heterologous object sequence) for writing a desired sequence into a target DNA. The object sequence may be coding or non-coding. The template nucleic acid (e.g., template RNA) can be designed to result in insertions, mutations, or deletions at the target DNA locus. In some embodiments, the template nucleic acid (e.g., template RNA) may be designed to cause an insertion in the target DNA. For example, the template nucleic acid (e.g., template RNA) may contain a heterologous sequence, wherein the reverse transcription will result in insertion of the heterologous sequence into the target DNA. In other embodiments, the RNA template may be designed to introduce a deletion into the target DNA. For example, the template nucleic acid (e.g., template RNA) may match the target DNA upstream and downstream of the desired deletion, wherein the reverse transcription will result in the copying of the upstream and downstream sequences from the template nucleic acid (e.g., template RNA) without the intervening sequence, e.g., causing deletion of the intervening sequence. In other embodiments, the template nucleic acid (e.g., template RNA) may be designed to introduce an edit into the target DNA. For example, the template RNA may match the target DNA sequence with the exception of one or more nucleotides, wherein the reverse transcription will result in the copying of these edits into the target DNA, e.g., resulting in mutations, e.g., transition or transversion mutations.

[0900] In some embodiments, writing of an object sequence into a target site results in the substitution of nucleotides, e.g., where the full length of the object sequence corresponds to a matching length of the target site with one or more mismatched bases. In some embodiments, a heterologous object sequence may be designed such that a combination of sequence alterations may occur, e.g., a simultaneous addition and deletion, addition and substitution, or deletion and substitution.

[0901] In some embodiments, the heterologous object sequence may contain an open reading frame or a fragment of an open reading frame. In some embodiments the heterologous object sequence has a Kozak sequence. In some embodiments the heterologous object sequence has an internal ribosome entry site. In some embodiments the heterologous object sequence has a self-cleaving peptide such as a T2A or P2A site. In some embodiments the heterologous object sequence has a start codon. In some embodiments the template RNA has a splice acceptor site. In some embodiments the template RNA has a splice donor site. Exemplary splice acceptor and splice donor sites are described in WO2016044416, incorporated herein by reference in its entirety. Exemplary splice acceptor site sequences are known to those of skill in the art. In some embodiments the template RNA has a microRNA binding site downstream of the stop codon. In some embodiments the template RNA has a polyA tail downstream of the stop codon of an open reading frame. In some embodiments the template RNA comprises one or more exons. In some embodiments the template RNA comprises one or more introns. In some embodiments the template RNA comprises a eukaryotic transcriptional terminator. In some embodiments the template RNA comprises an enhanced translation element or a translation enhancing element. In some embodiments the RNA comprises the human T-cell leukemia virus (HTLV-1) R region. In some embodiments the RNA comprises a posttranscriptional regulatory element that enhances nuclear export, such as that of Hepatitis B Virus (HPRE) or Woodchuck Hepatitis Virus (WPRE).

[0902] In some embodiments, the heterologous object sequence may contain a non-coding sequence. For example, the template nucleic acid (e.g., template RNA) may comprise a regulatory element, e.g., a promoter or enhancer sequence or miRNA binding site. In some embodiments, integration of the object sequence at a target site will result in upregulation of an endogenous gene. In some embodiments, integration of the object sequence at a target site will result in downregulation of an endogenous gene. In some embodiments the template nucleic acid (e.g., template RNA) comprises a tissue specific promoter or enhancer, each of which may be unidirectional or bidirectional. In some embodiments the promoter is an RNA polymerase I promoter, RNA polymerase II promoter, or RNA polymerase III promoter. In some embodiments the promoter comprises a TATA element. In some embodiments the promoter comprises a B recognition element. In some embodiments the promoter has one or more binding sites for transcription factors.

[0903] In some embodiments, the template nucleic acid (e.g., template RNA) comprises a site that coordinates epigenetic modification. In some embodiments, the template nucleic acid (e.g., template RNA) comprises a chromatin insulator. For example, the template nucleic acid (e.g., template RNA) comprises a CTCF site or a site targeted for DNA methylation.

[0904] In some embodiments, the template nucleic acid (e.g., template RNA) comprises a gene expression unit composed of at least one regulatory region operably linked to an effector sequence. The effector sequence may be a sequence that is transcribed into RNA (e.g., a coding sequence or a non-coding sequence such as a sequence encoding a micro RNA).

[0905] In some embodiments, the heterologous object sequence of the template nucleic acid (e.g., template RNA) is inserted into a target genome in an endogenous intron. In some embodiments, the heterologous object sequence of the template nucleic acid (e.g., template RNA) is inserted into a target genome and thereby acts as a new exon. In some embodiments, the insertion of the heterologous object sequence into the target genome results in replacement of a natural exon or the skipping of a natural exon.

[0906] In some embodiments, the heterologous object sequence of the template nucleic acid (e.g., template RNA) is inserted into the target genome in a genomic safe harbor site, such as AAVS1, CCR5, ROSA26, or albumin locus. In some embodiments, a gene modifying is used to integrate a CAR into the T-cell receptor α constant (TRAC) locus (Eyquem et al Nature 543, 113-117 (2017)). In some embodiments, a gene modifying system is used to integrate a CAR into a T-cell receptor R constant (TRBC) locus. Many other safe harbors have been identified by computational approaches (Pellenz et al Hum Gen Ther 30, 814-828 (2019)) and could be used for gene modifying system-mediated integration. In some embodiments, the heterologous object sequence of the template nucleic acid (e.g., template RNA) is added to the genome in an intergenic or intragenic region. In some embodiments, the heterologous object sequence of the template nucleic acid (e.g., template RNA) is added to the genome 5′ or 3′ within 0.1 kb, 0.25 kb, 0.5 kb, 0.75, kb, 1 kb, 2 kb, 3 kb, 4 kb, 5 kb, 7.5 kb, 10 kb, 15 kb, 20 kb, 25 kb, 50, 75 kb, or 100 kb of an endogenous active gene. In some embodiments, the heterologous object sequence of the template nucleic acid (e.g., template RNA) is added to the genome 5′ or 3′ within 0.1 kb, 0.25 kb, 0.5 kb, 0.75, kb, 1 kb, 2 kb, 3 kb, 4 kb, 5 kb, 7.5 kb, 10 kb, 15 kb, 20 kb, 25 kb, 50, 75 kb, or 100 kb of an endogenous promoter or enhancer. In some embodiments, the heterologous object sequence of the template nucleic acid (e.g., template RNA) can be, e.g., 50-50,000 base pairs (e.g., between 50-40,000 bp, between 500-30,000 bp between 500-20,000 bp, between 100-15,000 bp, between 500-10,000 bp, between 50-10,000 bp, between 50-5,000 bp.

[0907] The template nucleic acid (e.g., template RNA) can be designed to result in insertions, mutations, or deletions at the target DNA locus. In some embodiments, the template nucleic acid (e.g., template RNA) may be designed to cause an insertion in the target DNA. For example, the template nucleic acid (e.g., template RNA) may contain a heterologous object sequence, wherein the reverse transcription will result in insertion of the heterologous object sequence into the target DNA. In other embodiments, the RNA template may be designed to write a deletion into the target DNA. For example, the template nucleic acid (e.g., template RNA) may match the target DNA upstream and downstream of the desired deletion, wherein the reverse transcription will result in the copying of the upstream and downstream sequences from the template nucleic acid (e.g., template RNA) without the intervening sequence, e.g., causing deletion of the intervening sequence. In other embodiments, the template nucleic acid (e.g., template RNA) may be designed to write an edit into the target DNA. For example, the template RNA may match the target DNA sequence with the exception of one or more nucleotides, wherein the reverse transcription will result in the copying of these edits into the target DNA, e.g., resulting in mutations, e.g., transition or transversion mutations.

[0908] In some embodiments, the pre-edit homology domain comprises a nucleic acid sequence having 100% sequence identity with a nucleic acid sequence comprised in a target nucleic acid molecule.

[0909] In some embodiments, the post-edit homology domain comprises a nucleic acid sequence having 100% sequence identity with a nucleic acid sequence comprised in a target nucleic acid molecule.

[0910] The template RNA (e.g., trans template RNA) sequences may be customized. For example, in some embodiments it is desired to inactivate a PAM sequence upon editing (e.g., using a “PAM-kill” modification) to decrease the potential for further gene editing (e.g., by Cas retargeting) following the initial edit. Consequently, certain template RNAs are designed to install a mutation (e.g., a substitution) into the PAM of the target nucleic acid, such that upon editing, the PAM site will be mutated to a sequence no longer recognized by the gene modifying polypeptide. Thus, a mutation region within the heterologous object sequence of the template RNA may comprise a PAM-kill sequence. Without wishing to be bound by theory, in some embodiments, a PAM-kill sequence prevents re-engagement of the gene modifying polypeptide upon completion of a genetic modification, or decreases re-engagement relative to a template RNA lacking a PAM-kill sequence. In some embodiments, a PAM-kill sequence does not alter the amino acid sequence encoded by a gene, e.g., the PAM-kill sequence results in a silent mutation. In some embodiments, the PAM edited by the PAM-kill trans template RNA is the PAM used to direct the first strand nick. In other embodiments, it is desired to leave the PAM sequence intact (no PAM-kill).

[0911] In some embodiments, a homology domain (e.g., a pre-edit homology domain) comprises the nucleic acid sequence of a homology 1 sequence as listed in Table 38 below, or a nucleic acid sequence having at least 75%, 80%, 85%, 90%, 95%, 96%, 97%, 98%, or 99% identity thereto. In some embodiments, a homology domain (e.g., a pre-edit homology domain) comprises the nucleic acid sequence of a homology 1 sequence as listed in Table 38 below, or a nucleic acid sequence having no more than 1, 2, 3, 4, or 5 nucleotide differences relative thereto. In some embodiments, a homology domain has a length of 0-30 nucleotides (e.g., about 0-10, 10-20, or 20-30 nucleotides). Herein, when an RNA sequence (e.g., a homology domain sequence) is said to comprise a particular sequence (e.g., a sequence of Table 38 or a portion thereof) that comprises thymine (T), it is of course understood that the RNA sequence may (and frequently does) comprise uracil (U) in place of T. For instance, the RNA sequence may comprise U at every position shown as T in the sequence in Table 38. More specifically, the present disclosure provides an RNA sequence according to every homology domain sequence of Table 38, wherein the RNA sequence has a U in place of each T in the sequence in Table 38. In certain embodiments, the homology domain has a length between 0-5, 5-10, 10-15, 15-20, 20-25, 25-30, 30-35, 35-40, 40-45, or 45-50 nucleotides. In certain embodiments, the homology domain has a length between 50-100, 100-150, 150-200, 200-250, 250-300, 300-350, 350-400, 400-450, or 450-550 nucleotides. In certain embodiments, the homology domain has a length of about 0, 1, 2, 3, 4, 5, 6, 7, 8, 9, 10, 11, 12, 13, 14, 15, 16, 17, 18, 19, 20, 21, 22, 23, 24, 25, 26, 27, 28, 29, 30, 40, 50, 60, 70, 80, 90, 100, 150, 200, 250, 300, 350, 400, 450, or 500 nucleotides.

TABLE 38
Exemplary homology 1 sequences

| | Edit | | Homology 1 | Homology 1 |
|---|---|---|---|---|
| Reporter | type | Edit Sequence (5′ to 3′) | length | Sequence (5′ to 3′) |
| BFP to GFP | SNP | GT | 3 nt | ACG |
| | SNP | GT | 3 nt | ACG |
| | SNP | GT | 3 nt | ACG |
| | SNP | GT | 3 nt | ACG |
| | SNP | GT | 3 nt | ACG |
| | SNP | GT | 3 nt | ACG |
| | SNP | GT | 3 nt | ACG |
| | SNP | GT | 3 nt | ACG |
| | SNP | GT | 3 nt | ACG |
| 250 bp GFP | 250 | AGAATTTTGTAATACGACTCACTATAGGGCGGCCGGGAATTCGC | 0 nt | |
| | bp | CACCATGGTGAGCAAGGGCGAGGAGCTGTTCACCGGGGTGGT | | |
| | in- | GCCCATCCTGGTCGAGCTGGACGGCGACGTAAACGGCCACAAG | | |
| | sertion | TTCAGCGTGTCCGGCGAGGGCGAGGGCGATGCCACCTACGGCA | | |
| | | AGCTGACCCTGAAGTTCATCTGCACCACCGGCAAGCTGCCCGTG | | |
| | | CCCTGGCCCACCCTCGTGACCACCCTGACGTACG (SEQ ID NO: | | |
| | | 18680) | | |
| insertion | 250 | CAGAATTTTGTAATACGACTCACTATAGGGCGGCCGGGAATTCG | 1 nt | G |
| | bp | CCACCATGGTGAGCAAGGGCGAGGAGCTGTTCACCGGGGTGGT | | |
| | in- | GCCCATCCTGGTCGAGCTGGACGGCGACGTAAACGGCCACAAG | | |
| | sertion | TTCAGCGTGTCCGGCGAGGGCGAGGGCGATGCCACCTACGGCA | | |
| | | AGCTGACCCTGAAGTTCATCTGCACCACCGGCAAGCTGCCCGTG | | |
| | | CCCTGGCCCACCCTCGTGACCACCCTGACGTAC (SEQ ID NO: | | |
| | | 18681) | | |
| | 250 | TCAGAATTTTGTAATACGACTCACTATAGGGCGGCCGGGAATTC | 2 nt | CG |
| | bp | GCCACCATGGTGAGCAAGGGCGAGGAGCTGTTCACCGGGGTG | | |
| | in- | GTGCCCATCCTGGTCGAGCTGGACGGCGACGTAAACGGCCACA | | |
| | sertion | AGTTCAGCGTGTCCGGCGAGGGCGAGGGCGATGCCACCTACGG | | |
| | | CAAGCTGACCCTGAAGTTCATCTGCACCACCGGCAAGCTGCCCG | | |
| | | TGCCCTGGCCCACCCTCGTGACCACCCTGACGTA (SEQ ID NO: | | |
| | | 18682) | | |
| | 250 | GTCAGAATTTTGTAATACGACTCACTATAGGGCGGCCGGGAATT | 3 nt | ACG |
| | bp | CGCCACCATGGTGAGCAAGGGCGAGGAGCTGTTCACCGGGGTG | | |
| | in- | GTGCCCATCCTGGTCGAGCTGGACGGCGACGTAAACGGCCACA | | |
| | sertion | AGTTCAGCGTGTCCGGCGAGGGCGAGGGCGATGCCACCTACGG | | |
| | | CAAGCTGACCCTGAAGTTCATCTGCACCACCGGCAAGCTGCCCG | | |
| | | TGCCCTGGCCCACCCTCGTGACCACCCTGACGT (SEQ ID NO: | | |
| | | 18683) | | |
| | 250 | CGTCAGAATTTTGTAATACGACTCACTATAGGGCGGCCGGGAAT | 4 nt | TACG |
| | bp | TCGCCACCATGGTGAGCAAGGGCGAGGAGCTGTTCACCGGGGT | | |
| | in- | GGTGCCCATCCTGGTCGAGCTGGACGGCGACGTAAACGGCCAC | | |
| | sertion | AAGTTCAGCGTGTCCGGCGAGGGCGAGGGCGATGCCACCTACG | | |
| | | GCAAGCTGACCCTGAAGTTCATCTGCACCACCGGCAAGCTGCCC | | |
| | | GTGCCCTGGCCCACCCTCGTGACCACCCTGACG (SEQ ID NO: | | |
| | | 18684) | | |
| | 250 | CCGTCAGAATTTTGTAATACGACTCACTATAGGGCGGCCGGGAA | 5 nt | GTACG |
| | bp | TTCGCCACCATGGTGAGCAAGGGCGAGGAGCTGTTCACCGGGG | | |
| | in- | TGGTGCCCATCCTGGTCGAGCTGGACGGCGACGTAAACGGCCA | | |
| | sertion | CAAGTTCAGCGTGTCCGGCGAGGGCGAGGGCGATGCCACCTAC | | |
| | | GGCAAGCTGACCCTGAAGTTCATCTGCACCACCGGCAAGCTGCC | | |
| | | CGTGCCCTGGCCCACCCTCGTGACCACCCTGAC (SEQ ID NO: | | |
| | | 18685) | | |
| | 250 | ACCGTCAGAATTTTGTAATACGACTCACTATAGGGCGGCCGGGA | 6 nt | CGTACG |
| | bp | ATTCGCCACCATGGTGAGCAAGGGCGAGGAGCTGTTCACCGGG | | |
| | in- | GTGGTGCCCATCCTGGTCGAGCTGGACGGCGACGTAAACGGCC | | |
| | sertion | ACAAGTTCAGCGTGTCCGGCGAGGGCGAGGGCGATGCCACCTA | | |
| | | CGGCAAGCTGACCCTGAAGTTCATCTGCACCACCGGCAAGCTGC | | |
| | | CCGTGCCCTGGCCCACCCTCGTGACCACCCTGA (SEQ ID NO: | | |
| | | 18686) | | |
| | 250 | AACCGTCAGAATTTTGTAATACGACTCACTATAGGGCGGCCGGG | 7 nt | ACGTACG |
| | bp | AATTCGCCACCATGGTGAGCAAGGGCGAGGAGCTGTTCACCGG | | |
| | in- | GGTGGTGCCCATCCTGGTCGAGCTGGACGGCGACGTAAACGGC | | |
| | sertion | CACAAGTTCAGCGTGTCCGGCGAGGGCGAGGGCGATGCCACCT | | |
| | | ACGGCAAGCTGACCCTGAAGTTCATCTGCACCACCGGCAAGCTG | | |
| | | CCCGTGCCCTGGCCCACCCTCGTGACCACCCTG (SEQ ID NO: | | |
| | | 18687) | | |
| | 250 | GAACCGTCAGAATTTTGTAATACGACTCACTATAGGGCGGCCGG | 8 nt | GACGTACG |
| | bp | GAATTCGCCACCATGGTGAGCAAGGGCGAGGAGCTGTTCACCG | | |
| | in- | GGGTGGTGCCCATCCTGGTCGAGCTGGACGGCGACGTAAACGG | | |
| | sertion | CCACAAGTTCAGCGTGTCCGGCGAGGGCGAGGGCGATGCCACC | | |
| | | TACGGCAAGCTGACCCTGAAGTTCATCTGCACCACCGGCAAGCT | | |
| | | GCCCGTGCCCTGGCCCACCCTCGTGACCACCCT (SEQ ID NO: | | |
| | | 18688) | | |
| | 250 | TGAACCGTCAGAATTTTGTAATACGACTCACTATAGGGCGGCCG | 9 nt | TGACGTACG |
| | bp | GGAATTCGCCACCATGGTGAGCAAGGGCGAGGAGCTGTTCACC | | |
| | in- | GGGGTGGTGCCCATCCTGGTCGAGCTGGACGGCGACGTAAACG | | |
| | sertion | GCCACAAGTTCAGCGTGTCCGGCGAGGGCGAGGGCGATGCCAC | | |
| | | CTACGGCAAGCTGACCCTGAAGTTCATCTGCACCACCGGCAAGC | | |
| | | TGCCCGTGCCCTGGCCCACCCTCGTGACCACCC (SEQ ID NO: | | |
| | | 18689) | | |
| | 250 | GTGAACCGTCAGAATTTTGTAATACGACTCACTATAGGGCGGCC | 10 nt | CTGACGTACG (SEQ |
| | bp | GGGAATTCGCCACCATGGTGAGCAAGGGCGAGGAGCTGTTCAC | | ID NO: 18691) |
| | in- | CGGGGTGGTGCCCATCCTGGTCGAGCTGGACGGCGACGTAAAC | | |
| | sertion | GGCCACAAGTTCAGCGTGTCCGGCGAGGGCGAGGGCGATGCCA | | |
| | | CCTACGGCAAGCTGACCCTGAAGTTCATCTGCACCACCGGCAAG | | |
| | | CTGCCCGTGCCCTGGCCCACCCTCGTGACCACC (SEQ ID NO: | | |
| | | 18690) | | |
| | 250 | AGTGAACCGTCAGAATTTTGTAATACGACTCACTATAGGGCGGC | 11 nt | CCTGACGTACG |
| | bp | CGGGAATTCGCCACCATGGTGAGCAAGGGCGAGGAGCTGTTCA | | (SEQ ID NO: 18693) |
| | in- | CCGGGGTGGTGCCCATCCTGGTCGAGCTGGACGGCGACGTAAA | | |
| | sertion | CGGCCACAAGTTCAGCGTGTCCGGCGAGGGCGAGGGCGATGCC | | |
| | | ACCTACGGCAAGCTGACCCTGAAGTTCATCTGCACCACCGGCAA | | |
| | | GCTGCCCGTGCCCTGGCCCACCCTCGTGACCAC (SEQ ID NO: | | |
| | | 18692) | | |
| | 250 | TAGTGAACCGTCAGAATTTTGTAATACGACTCACTATAGGGCGG | 12 nt | CCCTGACGTACG |
| | bp | CCGGGAATTCGCCACCATGGTGAGCAAGGGCGAGGAGCTGTTC | | (SEQ ID NO: 18695) |
| | in- | ACCGGGGTGGTGCCCATCCTGGTCGAGCTGGACGGCGACGTAA | | |
| | sertion | ACGGCCACAAGTTCAGCGTGTCCGGCGAGGGCGAGGGCGATGC | | |
| | | CACCTACGGCAAGCTGACCCTGAAGTTCATCTGCACCACCGGCA | | |
| | | AGCTGCCCGTGCCCTGGCCCACCCTCGTGACCA (SEQ ID NO: | | |
| | | 18694) | | |
| | 250 | TTAGTGAACCGTCAGAATTTTGTAATACGACTCACTATAGGGCG | 13 nt | ACCCTGACGTACG |
| | bp | GCCGGGAATTCGCCACCATGGTGAGCAAGGGCGAGGAGCTGTT | | (SEQ ID NO: 18697) |
| | in- | CACCGGGGTGGTGCCCATCCTGGTCGAGCTGGACGGCGACGTA | | |
| | sertion | AACGGCCACAAGTTCAGCGTGTCCGGCGAGGGCGAGGGCGAT | | |
| | | GCCACCTACGGCAAGCTGACCCTGAAGTTCATCTGCACCACCGG | | |
| | | CAAGCTGCCCGTGCCCTGGCCCACCCTCGTGACC (SEQ ID NO: | | |
| | | 18696) | | |
| | 250 | TTTAGTGAACCGTCAGAATTTTGTAATACGACTCACTATAGGGC | 14 nt | CACCCTGACGTACG |
| | bp | GGCCGGGAATTCGCCACCATGGTGAGCAAGGGCGAGGAGCTGT | | (SEQ ID NO: 18699) |
| | in- | TCACCGGGGTGGTGCCCATCCTGGTCGAGCTGGACGGCGACGT | | |
| | sertion | AAACGGCCACAAGTTCAGCGTGTCCGGCGAGGGCGAGGGCGAT | | |
| | | GCCACCTACGGCAAGCTGACCCTGAAGTTCATCTGCACCACCGG | | |
| | | CAAGCTGCCCGTGCCCTGGCCCACCCTCGTGAC (SEQ ID NO: | | |
| | | 18698) | | |
| | 250 | GTTTAGTGAACCGTCAGAATTTTGTAATACGACTCACTATAGGG | 15 nt | CCACCCTGACGTAC |
| | bp | CGGCCGGGAATTCGCCACCATGGTGAGCAAGGGCGAGGAGCT | | G (SEQ ID NO: |
| | in- | GTTCACCGGGGTGGTGCCCATCCTGGTCGAGCTGGACGGCGAC | | 18701) |
| | sertion | GTAAACGGCCACAAGTTCAGCGTGTCCGGCGAGGGCGAGGGC | | |
| | | GATGCCACCTACGGCAAGCTGACCCTGAAGTTCATCTGCACCAC | | |
| | | CGGCAAGCTGCCCGTGCCCTGGCCCACCCTCGTGA (SEQ ID NO: | | |
| | | 18700) | | |
| | 250 | CGTTTAGTGAACCGTCAGAATTTTGTAATACGACTCACTATAGG | 16 nt | ACCACCCTGACGTA |
| | bp | GCGGCCGGGAATTCGCCACCATGGTGAGCAAGGGCGAGGAGC | | CG (SEQ ID NO: |
| | | TGTTCACCGGGGTGGTGCCCATCCTGGTCGAGCTGGACGGCGA | | 18703) |
| | in- | CGTAAACGGCCACAAGTTCAGCGTGTCCGGCGAGGGCGAGGGC | | |
| | sertion | GATGCCACCTACGGCAAGCTGACCCTGAAGTTCATCTGCACCAC | | |
| | | CGGCAAGCTGCCCGTGCCCTGGCCCACCCTCGTG (SEQ ID NO: | | |
| | | 18702) | | |
| | 250 | TCGTTTAGTGAACCGTCAGAATTTTGTAATACGACTCACTATAGG | 17 nt | GACCACCCTGACGT |
| | bp | GCGGCCGGGAATTCGCCACCATGGTGAGCAAGGGCGAGGAGC | | ACG (SEQ ID NO: |
| | in- | TGTTCACCGGGGTGGTGCCCATCCTGGTCGAGCTGGACGGCGA | | 18705) |
| | sertion | CGTAAACGGCCACAAGTTCAGCGTGTCCGGCGAGGGCGAGGGC | | |
| | | GATGCCACCTACGGCAAGCTGACCCTGAAGTTCATCTGCACCAC | | |
| | | CGGCAAGCTGCCCGTGCCCTGGCCCACCCTCGT (SEQ ID NO: | | |
| | | 18704) | | |
| | 250 | CTCGTTTAGTGAACCGTCAGAATTTTGTAATACGACTCACTATAG | 18 nt | TGACCACCCTGACG |
| | bp | GGCGGCCGGGAATTCGCCACCATGGTGAGCAAGGGCGAGGAG | | TACG (SEQ ID NO: |
| | in- | CTGTTCACCGGGGTGGTGCCCATCCTGGTCGAGCTGGACGGCG | | 18707) |
| | sertion | ACGTAAACGGCCACAAGTTCAGCGTGTCCGGCGAGGGCGAGGG | | |
| | | CGATGCCACCTACGGCAAGCTGACCCTGAAGTTCATCTGCACCA | | |
| | | CCGGCAAGCTGCCCGTGCCCTGGCCCACCCTCG (SEQ ID NO: | | |
| | | 18706) | | |
| | 250 | GCTCGTTTAGTGAACCGTCAGAATTTTGTAATACGACTCACTATA | 19 nt | GTGACCACCCTGAC |
| | bp | GGGCGGCCGGGAATTCGCCACCATGGTGAGCAAGGGCGAGGA | | GTACG (SEQ ID NO: |
| | in- | GCTGTTCACCGGGGTGGTGCCCATCCTGGTCGAGCTGGACGGC | | 18709) |
| | sertion | GACGTAAACGGCCACAAGTTCAGCGTGTCCGGCGAGGGCGAGG | | |
| | | GCGATGCCACCTACGGCAAGCTGACCCTGAAGTTCATCTGCACC | | |
| | | ACCGGCAAGCTGCCCGTGCCCTGGCCCACCCTC (SEQ ID NO: | | |
| | | 18708) | | |
| | 250 | AGCTCGTTTAGTGAACCGTCAGAATTTTGTAATACGACTCACTAT | 20 nt | CGTGACCACCCTGA |
| | bp | AGGGCGGCCGGGAATTCGCCACCATGGTGAGCAAGGGCGAGG | | CGTACG (SEQ ID |
| | in- | AGCTGTTCACCGGGGTGGTGCCCATCCTGGTCGAGCTGGACGG | | NO: 18711) |
| | sertion | CGACGTAAACGGCCACAAGTTCAGCGTGTCCGGCGAGGGCGAG | | |
| | | GGCGATGCCACCTACGGCAAGCTGACCCTGAAGTTCATCTGCAC | | |
| | | CACCGGCAAGCTGCCCGTGCCCTGGCCCACCCT (SEQ ID NO: | | |
| | | 18710) | | |
| mCherry | >750 | [mCherry-expressing cassette] | 0 nt | |
| | bp | | | |
| | in- | | | |
| | sertion | | | |
| insertion | >750 | [mCherry-expressing cassette] | 1 nt | G |
| | bp | | | |
| | in- | | | |
| | sertion | | | |
| | >750 | [mCherry-expressing cassette] | 2 nt | CG |
| | bp | | | |
| | in- | | | |
| | sertion | | | |
| | >750 | [mCherry-expressing cassette] | 3 nt | ACG |
| | bp | | | |
| | in- | | | |
| | sertion | | | |
| | >750 | [mCherry-expressing cassette] | 4 nt | TACG |
| | bp | | | |
| | in- | | | |
| | sertion | | | |
| | >750 | [mCherry-expressing cassette] | 5 nt | GTACG |
| | bp | | | |
| | in- | | | |
| | sertion | | | |
| | >750 | [mCherry-expressing cassette] | 6 nt | CGTACG |
| | bp | | | |
| | in- | | | |
| | sertion | | | |
| | >750 | [mCherry-expressing cassette] | 7 nt | ACGTACG |
| | bp | | | |
| | in- | | | |
| | sertion | | | |
| | >750 | [mCherry-expressing cassette] | 8 nt | GACGTACG |
| | bp | | | |
| | in- | | | |
| | sertion | | | |
| | >750 | [mCherry-expressing cassette] | 9 nt | TGACGTACG |
| | bp | | | |
| | in- | | | |
| | sertion | | | |
| | >750 | [mCherry-expressing cassette] | 10 nt | CTGACGTACG (SEQ |
| | bp | | | ID NO: 18691) |
| | in- | | | |
| | sertion | | | |
| | >750 | [mCherry-expressing cassette] | 11 nt | CCTGACGTACG |
| | bp | | | (SEQ ID NO: 18693) |
| | in- | | | |
| | sertion | | | |
| | >750 | [mCherry-expressing cassette] | 12 nt | CCCTGACGTACG |
| | bp | | | (SEQ ID NO: 18695) |
| | in- | | | |
| | sertion | | | |
| | >750 | [mCherry-expressing cassette] | 13 nt | ACCCTGACGTACG |
| | bp | | | (SEQ ID NO: 18697) |
| | in- | | | |
| | sertion | | | |
| | >750 | [mCherry-expressing cassette] | 14 nt | CACCCTGACGTACG |
| | bp | | | (SEQ ID NO: 18699) |
| | in- | | | |
| | sertion | | | |
| | >750 | [mCherry-expressing cassette] | 15 nt | CCACCCTGACGTAC |
| | bp | | | G (SEQ ID NO: |
| | in- | | | 18701) |
| | sertion | | | |
| | >750 | [mCherry-expressing cassette] | 16 nt | ACCACCCTGACGTA |
| | bp | | | CG (SEQ ID NO: |
| | in- | | | 18703) |
| | sertion | | | |
| | >750 | [mCherry-expressing cassette] | 17 nt | GACCACCCTGACGT |
| | bp | | | ACG (SEQ ID NO: |
| | in- | | | 18705) |
| | sertion | | | |
| | >750 | [mCherry-expressing cassette] | 18 nt | TGACCACCCTGACG |
| | bp | | | TACG (SEQ ID NO: |
| | in- | | | 18707) |
| | sertion | | | |
| | >750 | [mCherry-expressing cassette] | 19 nt | GTGACCACCCTGAC |
| | bp | | | GTACG (SEQ ID NO: |
| | in- | | | 18709) |
| | sertion | | | |
| | >750 | [mCherry-expressing cassette] | 20 nt | CGTGACCACCCTGA |
| | bp | | | CGTACG (SEQ ID |
| | in- | | | NO: 18711) |
| | sertion | | | |

[0912] In some embodiments, a homology domain (e.g., a post-edit homology domain) comprises the nucleic acid sequence of a homology 2 sequence as listed in Table 39 below, or a nucleic acid sequence having at least 75%, 80%, 85%, 90%, 95%, 96%, 97%, 98%, or 99% identity thereto. In some embodiments, a homology domain (e.g., a post-edit homology domain) comprises the nucleic acid sequence of a homology 2 sequence as listed in Table 39 below, or a nucleic acid sequence having no more than 1, 2, 3, 4, or 5 nucleotide differences relative thereto. In some embodiments, a homology domain has a length of 0-1000 nucleotides (e.g., about 0-5, 5-10, 10-50, 50-100, 100-500, or 500-1000 nucleotides). Herein, when an RNA sequence (e.g., a homology domain sequence) is said to comprise a particular sequence (e.g., a sequence of Table 39 or a portion thereof) that comprises thymine (T), it is of course understood that the RNA sequence may (and frequently does) comprise uracil (U) in place of T. For instance, the RNA sequence may comprise U at every position shown as T in the sequence in Table 39. More specifically, the present disclosure provides an RNA sequence according to every homology domain sequence of Table 39, wherein the RNA sequence has a U in place of each T in the sequence in Table 39.

TABLE 39
Exemplary homology 2 sequences

| | Homology | | |
|---|---|---|---|
| Reporter | 2 length | Homology 2 Sequence (5′ to 3′) | Homology 1 pair |
| BFP to GFP | 8 nt | ACCCTGAC | |
| | 11 nt | ACCACCCTGAC (SEQ ID NO: 18712) | |
| | 12 nt | GACCACCCTGAC (SEQ ID NO: 18713) | |
| | 13 nt | TGACCACCCTGAC (SEQ ID NO: 18714) | |
| | 14 nt | GTGACCACCCTGAC (SEQ ID NO: 18715) | |
| | 16 nt | TCGTGACCACCCTGAC (SEQ ID NO: 18716) | |
| | 20 nt | ACCCTCGTGACCACCCTGAC (SEQ ID NO: 18717) | |
| | 24 nt | GCCCACCCTCGTGACCACCCTGAC (SEQ ID NO: 18718) | |
| | 25 nt | GGCCCACCCTCGTGACCACCCTGAC (SEQ ID NO: 18719) | |
| 250 bp GFP | 500 nt | CCCGCCTGGCTGACCGCCCAACGACCCCCGCCCATTGACGTCAATAATGACGTATGTTCCCATAGTAAC | 0 nt Homology 1 |
| insertion | | GCCAATAGGGACTTTCCATTGACGTCAATGGGTGGAGTATTTACGGTAAACTGCCCACTTGGCAGTAC | |
| | | ATCAAGTGTATCATATGCCAAGTCCGCCCCCTATTGACGTCAATGACGGTAAATGGCCCGCCTGGCATT | |
| | | ATGCCCAGTACATGACCTTACGGGACTTTCCTACTTGGCAGTACATCTACGTATTAGTCATCGCTATTAC | |
| | | CATGGTGATGCGGTTTTGGCAGTACACCAATGGGCGTGGATAGCGGTTTGACTCACGGGGATTTCCAA | |
| | | GTCTCCACCCCATTGACGTCAATGGGAGTTTGTTTTGGCACCAAAATCAACGGGACTTTCCAAAATGTC | |
| | | GTAATAACCCCGCCCCGTTGACGCAAATGGGCGGTAGGCGTGTACGGTGGGAGGTCTATATAAGCAG | |
| | | AGCTCGTTTAGTGAACCGTC (SEQ ID NO: 18720) | |
| | 499 nt | CCGCCTGGCTGACCGCCCAACGACCCCCGCCCATTGACGTCAATAATGACGTATGTTCCCATAGTAACG | 0 nt Homology 1 |
| | | CCAATAGGGACTTTCCATTGACGTCAATGGGTGGAGTATTTACGGTAAACTGCCCACTTGGCAGTACA | |
| | | TCAAGTGTATCATATGCCAAGTCCGCCCCCTATTGACGTCAATGACGGTAAATGGCCCGCCTGGCATTA | |
| | | TGCCCAGTACATGACCTTACGGGACTTTCCTACTTGGCAGTACATCTACGTATTAGTCATCGCTATTACC | |
| | | ATGGTGATGCGGTTTTGGCAGTACACCAATGGGCGTGGATAGCGGTTTGACTCACGGGGATTTCCAA | |
| | | GTCTCCACCCCATTGACGTCAATGGGAGTTTGTTTTGGCACCAAAATCAACGGGACTTTCCAAAATGTC | |
| | | GTAATAACCCCGCCCCGTTGACGCAAATGGGCGGTAGGCGTGTACGGTGGGAGGTCTATATAAGCAG | |
| | | AGCTCGTTTAGTGAACCGTC (SEQ ID NO: 18721) | |
| | 498 nt | CGCCTGGCTGACCGCCCAACGACCCCCGCCCATTGACGTCAATAATGACGTATGTTCCCATAGTAACGC | 0 nt Homology 1 |
| | | CAATAGGGACTTTCCATTGACGTCAATGGGTGGAGTATTTACGGTAAACTGCCCACTTGGCAGTACAT | |
| | | CAAGTGTATCATATGCCAAGTCCGCCCCCTATTGACGTCAATGACGGTAAATGGCCCGCCTGGCATTAT | |
| | | GCCCAGTACATGACCTTACGGGACTTTCCTACTTGGCAGTACATCTACGTATTAGTCATCGCTATTACCA | |
| | | TGGTGATGCGGTTTTGGCAGTACACCAATGGGCGTGGATAGCGGTTTGACTCACGGGGATTTCCAAG | |
| | | TCTCCACCCCATTGACGTCAATGGGAGTTTGTTTTGGCACCAAAATCAACGGGACTTTCCAAAATGTCG | |
| | | TAATAACCCCGCCCCGTTGACGCAAATGGGCGGTAGGCGTGTACGGTGGGAGGTCTATATAAGCAGA | |
| | | GCTCGTTTAGTGAACCGTC (SEQ ID NO: 18722) | |
| | 497 nt | GCCTGGCTGACCGCCCAACGACCCCCGCCCATTGACGTCAATAATGACGTATGTTCCCATAGTAACGCC | 0 nt Homology 1 |
| | | AATAGGGACTTTCCATTGACGTCAATGGGTGGAGTATTTACGGTAAACTGCCCACTTGGCAGTACATC | |
| | | AAGTGTATCATATGCCAAGTCCGCCCCCTATTGACGTCAATGACGGTAAATGGCCCGCCTGGCATTAT | |
| | | GCCCAGTACATGACCTTACGGGACTTTCCTACTTGGCAGTACATCTACGTATTAGTCATCGCTATTACCA | |
| | | TGGTGATGCGGTTTTGGCAGTACACCAATGGGCGTGGATAGCGGTTTGACTCACGGGGATTTCCAAG | |
| | | TCTCCACCCCATTGACGTCAATGGGAGTTTGTTTTGGCACCAAAATCAACGGGACTTTCCAAAATGTCG | |
| | | TAATAACCCCGCCCCGTTGACGCAAATGGGCGGTAGGCGTGTACGGTGGGAGGTCTATATAAGCAGA | |
| | | GCTCGTTTAGTGAACCGTC (SEQ ID NO: 18723) | |
| | 496 nt | CCTGGCTGACCGCCCAACGACCCCCGCCCATTGACGTCAATAATGACGTATGTTCCCATAGTAACGCCA | 0 nt Homology 1 |
| | | ATAGGGACTTTCCATTGACGTCAATGGGTGGAGTATTTACGGTAAACTGCCCACTTGGCAGTACATCA | |
| | | AGTGTATCATATGCCAAGTCCGCCCCCTATTGACGTCAATGACGGTAAATGGCCCGCCTGGCATTATGC | |
| | | CCAGTACATGACCTTACGGGACTTTCCTACTTGGCAGTACATCTACGTATTAGTCATCGCTATTACCATG | |
| | | GTGATGCGGTTTTGGCAGTACACCAATGGGCGTGGATAGCGGTTTGACTCACGGGGATTTCCAAGTCT | |
| | | CCACCCCATTGACGTCAATGGGAGTTTGTTTTGGCACCAAAATCAACGGGACTTTCCAAAATGTCGTAA | |
| | | TAACCCCGCCCCGTTGACGCAAATGGGCGGTAGGCGTGTACGGTGGGAGGTCTATATAAGCAGAGCT | |
| | | CGTTTAGTGAACCGTC (SEQ ID NO: 18724) | |
| | 495 nt | CTGGCTGACCGCCCAACGACCCCCGCCCATTGACGTCAATAATGACGTATGTTCCCATAGTAACGCCAA | 0 nt Homology 1 |
| | | TAGGGACTTTCCATTGACGTCAATGGGTGGAGTATTTACGGTAAACTGCCCACTTGGCAGTACATCAA | |
| | | GTGTATCATATGCCAAGTCCGCCCCCTATTGACGTCAATGACGGTAAATGGCCCGCCTGGCATTATGCC | |
| | | CAGTACATGACCTTACGGGACTTTCCTACTTGGCAGTACATCTACGTATTAGTCATCGCTATTACCATG | |
| | | GTGATGCGGTTTTGGCAGTACACCAATGGGCGTGGATAGCGGTTTGACTCACGGGGATTTCCAAGTCT | |
| | | CCACCCCATTGACGTCAATGGGAGTTTGTTTTGGCACCAAAATCAACGGGACTTTCCAAAATGTCGTAA | |
| | | TAACCCCGCCCCGTTGACGCAAATGGGCGGTAGGCGTGTACGGTGGGAGGTCTATATAAGCAGAGCT | |
| | | CGTTTAGTGAACCGTC (SEQ ID NO: 18725) | |
| | 494 nt | TGGCTGACCGCCCAACGACCCCCGCCCATTGACGTCAATAATGACGTATGTTCCCATAGTAACGCCAAT | 0 nt Homology 1 |
| | | AGGGACTTTCCATTGACGTCAATGGGTGGAGTATTTACGGTAAACTGCCCACTTGGCAGTACATCAAG | |
| | | TGTATCATATGCCAAGTCCGCCCCCTATTGACGTCAATGACGGTAAATGGCCCGCCTGGCATTATGCCC | |
| | | AGTACATGACCTTACGGGACTTTCCTACTTGGCAGTACATCTACGTATTAGTCATCGCTATTACCATGGT | |
| | | GATGCGGTTTTGGCAGTACACCAATGGGCGTGGATAGCGGTTTGACTCACGGGGATTTCCAAGTCTCC | |
| | | ACCCCATTGACGTCAATGGGAGTTTGTTTTGGCACCAAAATCAACGGGACTTTCCAAAATGTCGTAATA | |
| | | ACCCCGCCCCGTTGACGCAAATGGGCGGTAGGCGTGTACGGTGGGAGGTCTATATAAGCAGAGCTCG | |
| | | TTTAGTGAACCGTC (SEQ ID NO: 18726) | |
| | 493 nt | GGCTGACCGCCCAACGACCCCCGCCCATTGACGTCAATAATGACGTATGTTCCCATAGTAACGCCAAT | 0 nt Homology 1 |
| | | AGGGACTTTCCATTGACGTCAATGGGTGGAGTATTTACGGTAAACTGCCCACTTGGCAGTACATCAAG | |
| | | TGTATCATATGCCAAGTCCGCCCCCTATTGACGTCAATGACGGTAAATGGCCCGCCTGGCATTATGCCC | |
| | | AGTACATGACCTTACGGGACTTTCCTACTTGGCAGTACATCTACGTATTAGTCATCGCTATTACCATGGT | |
| | | GATGCGGTTTTGGCAGTACACCAATGGGCGTGGATAGCGGTTTGACTCACGGGGATTTCCAAGTCTCC | |
| | | ACCCCATTGACGTCAATGGGAGTTTGTTTTGGCACCAAAATCAACGGGACTTTCCAAAATGTCGTAATA | |
| | | ACCCCGCCCCGTTGACGCAAATGGGCGGTAGGCGTGTACGGTGGGAGGTCTATATAAGCAGAGCTCG | |
| | | TTTAGTGAACCGTC (SEQ ID NO: 18727) | |
| | 492 nt | GCTGACCGCCCAACGACCCCCGCCCATTGACGTCAATAATGACGTATGTTCCCATAGTAACGCCAATA | 0 nt Homology 1 |
| | | GGGACTTTCCATTGACGTCAATGGGTGGAGTATTTACGGTAAACTGCCCACTTGGCAGTACATCAAGT | |
| | | GTATCATATGCCAAGTCCGCCCCCTATTGACGTCAATGACGGTAAATGGCCCGCCTGGCATTATGCCCA | |
| | | GTACATGACCTTACGGGACTTTCCTACTTGGCAGTACATCTACGTATTAGTCATCGCTATTACCATGGT | |
| | | GATGCGGTTTTGGCAGTACACCAATGGGCGTGGATAGCGGTTTGACTCACGGGGATTTCCAAGTCTCC | |
| | | ACCCCATTGACGTCAATGGGAGTTTGTTTTGGCACCAAAATCAACGGGACTTTCCAAAATGTCGTAATA | |
| | | ACCCCGCCCCGTTGACGCAAATGGGCGGTAGGCGTGTACGGTGGGAGGTCTATATAAGCAGAGCTCG | |
| | | TTTAGTGAACCGTC (SEQ ID NO: 18728) | |
| | 491 nt | CTGACCGCCCAACGACCCCCGCCCATTGACGTCAATAATGACGTATGTTCCCATAGTAACGCCAATAG | 0 nt Homology 1 |
| | | GGACTTTCCATTGACGTCAATGGGTGGAGTATTTACGGTAAACTGCCCACTTGGCAGTACATCAAGTG | |
| | | TATCATATGCCAAGTCCGCCCCCTATTGACGTCAATGACGGTAAATGGCCCGCCTGGCATTATGCCCAG | |
| | | TACATGACCTTACGGGACTTTCCTACTTGGCAGTACATCTACGTATTAGTCATCGCTATTACCATGGTGA | |
| | | TGCGGTTTTGGCAGTACACCAATGGGCGTGGATAGCGGTTTGACTCACGGGGATTTCCAAGTCTCCAC | |
| | | CCCATTGACGTCAATGGGAGTTTGTTTTGGCACCAAAATCAACGGGACTTTCCAAAATGTCGTAATAAC | |
| | | CCCGCCCCGTTGACGCAAATGGGCGGTAGGCGTGTACGGTGGGAGGTCTATATAAGCAGAGCTCGTT | |
| | | TAGTGAACCGTC (SEQ ID NO: 18729) | |
| | 490 nt | TGACCGCCCAACGACCCCCGCCCATTGACGTCAATAATGACGTATGTTCCCATAGTAACGCCAATAGG | 0 nt Homology 1 |
| | | GACTTTCCATTGACGTCAATGGGTGGAGTATTTACGGTAAACTGCCCACTTGGCAGTACATCAAGTGT | |
| | | ATCATATGCCAAGTCCGCCCCCTATTGACGTCAATGACGGTAAATGGCCCGCCTGGCATTATGCCCAGT | |
| | | ACATGACCTTACGGGACTTTCCTACTTGGCAGTACATCTACGTATTAGTCATCGCTATTACCATGGTGAT | |
| | | GCGGTTTTGGCAGTACACCAATGGGCGTGGATAGCGGTTTGACTCACGGGGATTTCCAAGTCTCCACC | |
| | | CCATTGACGTCAATGGGAGTTTGTTTTGGCACCAAAATCAACGGGACTTTCCAAAATGTCGTAATAACC | |
| | | CCGCCCCGTTGACGCAAATGGGCGGTAGGCGTGTACGGTGGGAGGTCTATATAAGCAGAGCTCGTTT | |
| | | AGTGAACCGTC (SEQ ID NO: 18730) | |
| | 489 nt | GACCGCCCAACGACCCCCGCCCATTGACGTCAATAATGACGTATGTTCCCATAGTAACGCCAATAGGG | 0 nt Homology 1 |
| | | ACTTTCCATTGACGTCAATGGGTGGAGTATTTACGGTAAACTGCCCACTTGGCAGTACATCAAGTGTAT | |
| | | CATATGCCAAGTCCGCCCCCTATTGACGTCAATGACGGTAAATGGCCCGCCTGGCATTATGCCCAGTAC | |
| | | ATGACCTTACGGGACTTTCCTACTTGGCAGTACATCTACGTATTAGTCATCGCTATTACCATGGTGATG | |
| | | CGGTTTTGGCAGTACACCAATGGGCGTGGATAGCGGTTTGACTCACGGGGATTTCCAAGTCTCCACCC | |
| | | CATTGACGTCAATGGGAGTTTGTTTTGGCACCAAAATCAACGGGACTTTCCAAAATGTCGTAATAACCC | |
| | | CGCCCCGTTGACGCAAATGGGCGGTAGGCGTGTACGGTGGGAGGTCTATATAAGCAGAGCTCGTTTA | |
| | | GTGAACCGTC (SEQ ID NO: 18731) | |
| | 488 nt | ACCGCCCAACGACCCCCGCCCATTGACGTCAATAATGACGTATGTTCCCATAGTAACGCCAATAGGGA | 0 nt Homology 1 |
| | | CTTTCCATTGACGTCAATGGGTGGAGTATTTACGGTAAACTGCCCACTTGGCAGTACATCAAGTGTATC | |
| | | ATATGCCAAGTCCGCCCCCTATTGACGTCAATGACGGTAAATGGCCCGCCTGGCATTATGCCCAGTAC | |
| | | ATGACCTTACGGGACTTTCCTACTTGGCAGTACATCTACGTATTAGTCATCGCTATTACCATGGTGATG | |
| | | CGGTTTTGGCAGTACACCAATGGGCGTGGATAGCGGTTTGACTCACGGGGATTTCCAAGTCTCCACCC | |
| | | CATTGACGTCAATGGGAGTTTGTTTTGGCACCAAAATCAACGGGACTTTCCAAAATGTCGTAATAACCC | |
| | | CGCCCCGTTGACGCAAATGGGCGGTAGGCGTGTACGGTGGGAGGTCTATATAAGCAGAGCTCGTTTA | |
| | | GTGAACCGTC (SEQ ID NO: 18732) | |
| | 487 nt | CCGCCCAACGACCCCCGCCCATTGACGTCAATAATGACGTATGTTCCCATAGTAACGCCAATAGGGAC | 0 nt Homology 1 |
| | | TTTCCATTGACGTCAATGGGTGGAGTATTTACGGTAAACTGCCCACTTGGCAGTACATCAAGTGTATCA | |
| | | TATGCCAAGTCCGCCCCCTATTGACGTCAATGACGGTAAATGGCCCGCCTGGCATTATGCCCAGTACAT | |
| | | GACCTTACGGGACTTTCCTACTTGGCAGTACATCTACGTATTAGTCATCGCTATTACCATGGTGATGCG | |
| | | GTTTTGGCAGTACACCAATGGGCGTGGATAGCGGTTTGACTCACGGGGATTTCCAAGTCTCCACCCCA | |
| | | TTGACGTCAATGGGAGTTTGTTTTGGCACCAAAATCAACGGGACTTTCCAAAATGTCGTAATAACCCCG | |
| | | CCCCGTTGACGCAAATGGGCGGTAGGCGTGTACGGTGGGAGGTCTATATAAGCAGAGCTCGTTTAGT | |
| | | GAACCGTC (SEQ ID NO: 18733) | |
| | 486 nt | CGCCCAACGACCCCCGCCCATTGACGTCAATAATGACGTATGTTCCCATAGTAACGCCAATAGGGACTT | 0 nt Homology 1 |
| | | TCCATTGACGTCAATGGGTGGAGTATTTACGGTAAACTGCCCACTTGGCAGTACATCAAGTGTATCATA | |
| | | TGCCAAGTCCGCCCCCTATTGACGTCAATGACGGTAAATGGCCCGCCTGGCATTATGCCCAGTACATG | |
| | | ACCTTACGGGACTTTCCTACTTGGCAGTACATCTACGTATTAGTCATCGCTATTACCATGGTGATGCGG | |
| | | TTTTGGCAGTACACCAATGGGCGTGGATAGCGGTTTGACTCACGGGGATTTCCAAGTCTCCACCCCATT | |
| | | GACGTCAATGGGAGTTTGTTTTGGCACCAAAATCAACGGGACTTTCCAAAATGTCGTAATAACCCCGC | |
| | | CCCGTTGACGCAAATGGGCGGTAGGCGTGTACGGTGGGAGGTCTATATAAGCAGAGCTCGTTTAGTG | |
| | | AACCGTC (SEQ ID NO: 18734) | |
| | 485 nt | GCCCAACGACCCCCGCCCATTGACGTCAATAATGACGTATGTTCCCATAGTAACGCCAATAGGGACTTT | 0 nt Homology 1 |
| | | CCATTGACGTCAATGGGTGGAGTATTTACGGTAAACTGCCCACTTGGCAGTACATCAAGTGTATCATAT | |
| | | GCCAAGTCCGCCCCCTATTGACGTCAATGACGGTAAATGGCCCGCCTGGCATTATGCCCAGTACATGA | |
| | | CCTTACGGGACTTTCCTACTTGGCAGTACATCTACGTATTAGTCATCGCTATTACCATGGTGATGCGGT | |
| | | TTTGGCAGTACACCAATGGGCGTGGATAGCGGTTTGACTCACGGGGATTTCCAAGTCTCCACCCCATT | |
| | | GACGTCAATGGGAGTTTGTTTTGGCACCAAAATCAACGGGACTTTCCAAAATGTCGTAATAACCCCGC | |
| | | CCCGTTGACGCAAATGGGGGTAGGCGTGTACGGTGGGAGGTCTATATAAGCAGAGCTCGTTTAGTG | |
| | | AACCGTC (SEQ ID NO: 18735) | |
| | 484 nt | CCCAACGACCCCCGCCCATTGACGTCAATAATGACGTATGTTCCCATAGTAACGCCAATAGGGACTTTC | 0 nt Homology 1 |
| | | CATTGACGTCAATGGGTGGAGTATTTACGGTAAACTGCCCACTTGGCAGTACATCAAGTGTATCATAT | |
| | | GCCAAGTCCGCCCCCTATTGACGTCAATGACGGTAAATGGCCCGCCTGGCATTATGCCCAGTACATGA | |
| | | CCTTACGGGACTTTCCTACTTGGCAGTACATCTACGTATTAGTCATCGCTATTACCATGGTGATGCGGT | |
| | | TTTGGCAGTACACCAATGGGCGTGGATAGCGGTTTGACTCACGGGGATTTCCAAGTCTCCACCCCATT | |
| | | GACGTCAATGGGAGTTTGTTTTGGCACCAAAATCAACGGGACTTTCCAAAATGTCGTAATAACCCCGC | |
| | | CCCGTTGACGCAAATGGGCGGTAGGCGTGTACGGTGGGAGGTCTATATAAGCAGAGCTCGTTTAGTG | |
| | | AACCGTC (SEQ ID NO: 18736) | |
| | 483 nt | CCAACGACCCCCGCCCATTGACGTCAATAATGACGTATGTTCCCATAGTAACGCCAATAGGGACTTTCC | 0 nt Homology 1 |
| | | ATTGACGTCAATGGGTGGAGTATTTACGGTAAACTGCCCACTTGGCAGTACATCAAGTGTATCATATG | |
| | | CCAAGTCCGCCCCCTATTGACGTCAATGACGGTAAATGGCCCGCCTGGCATTATGCCCAGTACATGAC | |
| | | CTTACGGGACTTTCCTACTTGGCAGTACATCTACGTATTAGTCATCGCTATTACCATGGTGATGCGGTTT | |
| | | TGGCAGTACACCAATGGGCGTGGATAGCGGTTTGACTCACGGGGATTTCCAAGTCTCCACCCCATTGA | |
| | | CGTCAATGGGAGTTTGTTTTGGCACCAAAATCAACGGGACTTTCCAAAATGTCGTAATAACCCCGCCCC | |
| | | GTTGACGCAAATGGGCGGTAGGCGTGTACGGTGGGAGGTCTATATAAGCAGAGCTCGTTTAGTGAAC | |
| | | CGTC (SEQ ID NO: 18737) | |
| | 482 nt | CAACGACCCCCGCCCATTGACGTCAATAATGACGTATGTTCCCATAGTAACGCCAATAGGGACTTTCCA | 0 nt Homology 1 |
| | | TTGACGTCAATGGGTGGAGTATTTACGGTAAACTGCCCACTTGGCAGTACATCAAGTGTATCATATGC | |
| | | CAAGTCCGCCCCCTATTGACGTCAATGACGGTAAATGGCCCGCCTGGCATTATGCCCAGTACATGACCT | |
| | | TACGGGACTTTCCTACTTGGCAGTACATCTACGTATTAGTCATCGCTATTACCATGGTGATGCGGTTTT | |
| | | GGCAGTACACCAATGGGCGTGGATAGCGGTTTGACTCACGGGGATTTCCAAGTCTCCACCCCATTGAC | |
| | | GTCAATGGGAGTTTGTTTTGGCACCAAAATCAACGGGACTTTCCAAAATGTCGTAATAACCCCGCCCC | |
| | | GTTGACGCAAATGGGCGGTAGGCGTGTACGGTGGGAGGTCTATATAAGCAGAGCTCGTTTAGTGAAC | |
| | | CGTC (SEQ ID NO: 18738) | |
| | 481 nt | AACGACCCCCGCCCATTGACGTCAATAATGACGTATGTTCCCATAGTAACGCCAATAGGGACTTTCCAT | 0 nt Homology 1 |
| | | TGACGTCAATGGGTGGAGTATTTACGGTAAACTGCCCACTTGGCAGTACATCAAGTGTATCATATGCC | |
| | | AAGTCCGCCCCCTATTGACGTCAATGACGGTAAATGGCCCGCCTGGCATTATGCCCAGTACATGACCTT | |
| | | ACGGGACTTTCCTACTTGGCAGTACATCTACGTATTAGTCATCGCTATTACCATGGTGATGCGGTTTTG | |
| | | GCAGTACACCAATGGGCGTGGATAGCGGTTTGACTCACGGGGATTTCCAAGTCTCCACCCCATTGACG | |
| | | TCAATGGGAGTTTGTTTTGGCACCAAAATCAACGGGACTTTCCAAAATGTCGTAATAACCCCGCCCCGT | |
| | | TGACGCAAATGGGCGGTAGGCGTGTACGGTGGGAGGTCTATATAAGCAGAGCTCGTTTAGTGAACCG | |
| | | TC (SEQ ID NO: 18739) | |
| | 480 nt | ACGACCCCCGCCCATTGACGTCAATAATGACGTATGTTCCCATAGTAACGCCAATAGGGACTTTCCATT | 0 nt Homology 1 |
| | | GACGTCAATGGGTGGAGTATTTACGGTAAACTGCCCACTTGGCAGTACATCAAGTGTATCATATGCCA | |
| | | AGTCCGCCCCCTATTGACGTCAATGACGGTAAATGGCCCGCCTGGCATTATGCCCAGTACATGACCTTA | |
| | | CGGGACTTTCCTACTTGGCAGTACATCTACGTATTAGTCATCGCTATTACCATGGTGATGCGGTTTTGG | |
| | | CAGTACACCAATGGGCGTGGATAGCGGTTTGACTCACGGGGATTTCCAAGTCTCCACCCCATTGACGT | |
| | | CAATGGGAGTTTGTTTTGGCACCAAAATCAACGGGACTTTCCAAAATGTCGTAATAACCCCGCCCCGTT | |
| | | GACGCAAATGGGCGGTAGGCGTGTACGGTGGGAGGTCTATATAAGCAGAGCTCGTTTAGTGAACCGT | |
| | | C (SEQ ID NO: 18740) | |
| | 479 nt | CGACCCCCGCCCATTGACGTCAATAATGACGTATGTTCCCATAGTAACGCCAATAGGGACTTTCCATTG | 0 nt Homology 1 |
| | | ACGTCAATGGGTGGAGTATTTACGGTAAACTGCCCACTTGGCAGTACATCAAGTGTATCATATGCCAA | |
| | | GTCCGCCCCCTATTGACGTCAATGACGGTAAATGGCCCGCCTGGCATTATGCCCAGTACATGACCTTAC | |
| | | GGGACTTTCCTACTTGGCAGTACATCTACGTATTAGTCATCGCTATTACCATGGTGATGCGGTTTTGGC | |
| | | AGTACACCAATGGGCGTGGATAGCGGTTTGACTCACGGGGATTTCCAAGTCTCCACCCCATTGACGTC | |
| | | AATGGGAGTTTGTTTTGGCACCAAAATCAACGGGACTTTCCAAAATGTCGTAATAACCCCGCCCCGTTG | |
| | | ACGCAAATGGGCGGTAGGCGTGTACGGTGGGAGGTCTATATAAGCAGAGCTCGTTTAGTGAACCGTC | |
| | | (SEQ ID NO: 18741) | |
| | 478 nt | GACCCCCGCCCATTGACGTCAATAATGACGTATGTTCCCATAGTAACGCCAATAGGGACTTTCCATTGA | 0 nt Homology 1 |
| | | CGTCAATGGGTGGAGTATTTACGGTAAACTGCCCACTTGGCAGTACATCAAGTGTATCATATGCCAAG | |
| | | TCCGCCCCCTATTGACGTCAATGACGGTAAATGGCCCGCCTGGCATTATGCCCAGTACATGACCTTACG | |
| | | GGACTTTCCTACTTGGCAGTACATCTACGTATTAGTCATCGCTATTACCATGGTGATGCGGTTTTGGCA | |
| | | GTACACCAATGGGCGTGGATAGCGGTTTGACTCACGGGGATTTCCAAGTCTCCACCCCATTGACGTCA | |
| | | ATGGGAGTTTGTTTTGGCACCAAAATCAACGGGACTTTCCAAAATGTCGTAATAACCCCGCCCCGTTGA | |
| | | CGCAAATGGGCGGTAGGCGTGTACGGTGGGAGGTCTATATAAGCAGAGCTCGTTTAGTGAACCGTC | |
| | | (SEQ ID NO: 18742) | |
| | 477 nt | ACCCCCGCCCATTGACGTCAATAATGACGTATGTTCCCATAGTAACGCCAATAGGGACTTTCCATTGAC | 0 nt Homology 1 |
| | | GTCAATGGGTGGAGTATTTACGGTAAACTGCCCACTTGGCAGTACATCAAGTGTATCATATGCCAAGT | |
| | | CCGCCCCCTATTGACGTCAATGACGGTAAATGGCCCGCCTGGCATTATGCCCAGTACATGACCTTACG | |
| | | GGACTTTCCTACTTGGCAGTACATCTACGTATTAGTCATCGCTATTACCATGGTGATGCGGTTTTGGCA | |
| | | GTACACCAATGGGCGTGGATAGCGGTTTGACTCACGGGGATTTCCAAGTCTCCACCCCATTGACGTCA | |
| | | ATGGGAGTTTGTTTTGGCACCAAAATCAACGGGACTTTCCAAAATGTCGTAATAACCCCGCCCCGTTGA | |
| | | CGCAAATGGGCGGTAGGCGTGTACGGTGGGAGGTCTATATAAGCAGAGCTCGTTTAGTGAACCGTC | |
| | | (SEQ ID NO: 18743) | |
| | 476 nt | CCCCCGCCCATTGACGTCAATAATGACGTATGTTCCCATAGTAACGCCAATAGGGACTTTCCATTGACG | 0 nt Homology 1 |
| | | TCAATGGGTGGAGTATTTACGGTAAACTGCCCACTTGGCAGTACATCAAGTGTATCATATGCCAAGTC | |
| | | CGCCCCCTATTGACGTCAATGACGGTAAATGGCCCGCCTGGCATTATGCCCAGTACATGACCTTACGG | |
| | | GACTTTCCTACTTGGCAGTACATCTACGTATTAGTCATCGCTATTACCATGGTGATGCGGTTTTGGCAG | |
| | | TACACCAATGGGCGTGGATAGCGGTTTGACTCACGGGGATTTCCAAGTCTCCACCCCATTGACGTCAA | |
| | | TGGGAGTTTGTTTTGGCACCAAAATCAACGGGACTTTCCAAAATGTCGTAATAACCCCGCCCCGTTGAC | |
| | | GCAAATGGGCGGTAGGCGTGTACGGTGGGAGGTCTATATAAGCAGAGCTCGTTTAGTGAACCGTC | |
| | | (SEQ ID NO: 18744) | |
| | 475 nt | CCCCGCCCATTGACGTCAATAATGACGTATGTTCCCATAGTAACGCCAATAGGGACTTTCCATTGACGT | 0 nt Homology 1 |
| | | CAATGGGTGGAGTATTTACGGTAAACTGCCCACTTGGCAGTACATCAAGTGTATCATATGCCAAGTCC | |
| | | GCCCCCTATTGACGTCAATGACGGTAAATGGCCCGCCTGGCATTATGCCCAGTACATGACCTTACGGG | |
| | | ACTTTCCTACTTGGCAGTACATCTACGTATTAGTCATCGCTATTACCATGGTGATGCGGTTTTGGCAGT | |
| | | ACACCAATGGGCGTGGATAGCGGTTTGACTCACGGGGATTTCCAAGTCTCCACCCCATTGACGTCAAT | |
| | | GGGAGTTTGTTTTGGCACCAAAATCAACGGGACTTTCCAAAATGTCGTAATAACCCCGCCCCGTTGAC | |
| | | GCAAATGGGCGGTAGGCGTGTACGGTGGGAGGTCTATATAAGCAGAGCTCGTTTAGTGAACCGTC | |
| | | (SEQ ID NO: 18745) | |
| | 474 nt | CCCGCCCATTGACGTCAATAATGACGTATGTTCCCATAGTAACGCCAATAGGGACTTTCCATTGACGTC | 0 nt Homology 1 |
| | | AATGGGTGGAGTATTTACGGTAAACTGCCCACTTGGCAGTACATCAAGTGTATCATATGCCAAGTCCG | |
| | | CCCCCTATTGACGTCAATGACGGTAAATGGCCCGCCTGGCATTATGCCCAGTACATGACCTTACGGGA | |
| | | CTTTCCTACTTGGCAGTACATCTACGTATTAGTCATCGCTATTACCATGGTGATGCGGTTTTGGCAGTAC | |
| | | ACCAATGGGCGTGGATAGCGGTTTGACTCACGGGGATTTCCAAGTCTCCACCCCATTGACGTCAATGG | |
| | | GAGTTTGTTTTGGCACCAAAATCAACGGGACTTTCCAAAATGTCGTAATAACCCCGCCCCGTTGACGCA | |
| | | AATGGGCGGTAGGCGTGTACGGTGGGAGGTCTATATAAGCAGAGCTCGTTTAGTGAACCGTC (SEQ | |
| | | ID NO: 18746) | |
| | 473 nt | CCGCCCATTGACGTCAATAATGACGTATGTTCCCATAGTAACGCCAATAGGGACTTTCCATTGACGTCA | 0 nt Homology 1 |
| | | ATGGGTGGAGTATTTACGGTAAACTGCCCACTTGGCAGTACATCAAGTGTATCATATGCCAAGTCCGC | |
| | | CCCCTATTGACGTCAATGACGGTAAATGGCCCGCCTGGCATTATGCCCAGTACATGACCTTACGGGAC | |
| | | TTTCCTACTTGGCAGTACATCTACGTATTAGTCATCGCTATTACCATGGTGATGCGGTTTTGGCAGTAC | |
| | | ACCAATGGGCGTGGATAGCGGTTTGACTCACGGGGATTTCCAAGTCTCCACCCCATTGACGTCAATGG | |
| | | GAGTTTGTTTTGGCACCAAAATCAACGGGACTTTCCAAAATGTCGTAATAACCCCGCCCCGTTGACGCA | |
| | | AATGGGCGGTAGGCGTGTACGGTGGGAGGTCTATATAAGCAGAGCTCGTTTAGTGAACCGTC (SEQ | |
| | | ID NO: 18747) | |
| | 472 nt | CGCCCATTGACGTCAATAATGACGTATGTTCCCATAGTAACGCCAATAGGGACTTTCCATTGACGTCAA | 0 nt Homology 1 |
| | | TGGGTGGAGTATTTACGGTAAACTGCCCACTTGGCAGTACATCAAGTGTATCATATGCCAAGTCCGCC | |
| | | CCCTATTGACGTCAATGACGGTAAATGGCCCGCCTGGCATTATGCCCAGTACATGACCTTACGGGACTT | |
| | | TCCTACTTGGCAGTACATCTACGTATTAGTCATCGCTATTACCATGGTGATGCGGTTTTGGCAGTACAC | |
| | | CAATGGGCGTGGATAGCGGTTTGACTCACGGGGATTTCCAAGTCTCCACCCCATTGACGTCAATGGGA | |
| | | GTTTGTTTTGGCACCAAAATCAACGGGACTTTCCAAAATGTCGTAATAACCCCGCCCCGTTGACGCAAA | |
| | | TGGGCGGTAGGCGTGTACGGTGGGAGGTCTATATAAGCAGAGCTCGTTTAGTGAACCGTC (SEQ ID | |
| | | NO: 18748) | |
| | 471 nt | GCCCATTGACGTCAATAATGACGTATGTTCCCATAGTAACGCCAATAGGGACTTTCCATTGACGTCAAT | 0 nt Homology 1 |
| | | GGGTGGAGTATTTACGGTAAACTGCCCACTTGGCAGTACATCAAGTGTATCATATGCCAAGTCCGCCC | |
| | | CCTATTGACGTCAATGACGGTAAATGGCCCGCCTGGCATTATGCCCAGTACATGACCTTACGGGACTTT | |
| | | CCTACTTGGCAGTACATCTACGTATTAGTCATCGCTATTACCATGGTGATGCGGTTTTGGCAGTACACC | |
| | | AATGGGCGTGGATAGCGGTTTGACTCACGGGGATTTCCAAGTCTCCACCCCATTGACGTCAATGGGAG | |
| | | TTTGTTTTGGCACCAAAATCAACGGGACTTTCCAAAATGTCGTAATAACCCCGCCCCGTTGACGCAAAT | |
| | | GGGCGGTAGGCGTGTACGGTGGGAGGTCTATATAAGCAGAGCTCGTTTAGTGAACCGTC (SEQ ID | |
| | | NO: 18749) | |
| | 470 nt | CCCATTGACGTCAATAATGACGTATGTTCCCATAGTAACGCCAATAGGGACTTTCCATTGACGTCAATG | 0 nt Homology 1 |
| | | GGTGGAGTATTTACGGTAAACTGCCCACTTGGCAGTACATCAAGTGTATCATATGCCAAGTCCGCCCC | |
| | | CTATTGACGTCAATGACGGTAAATGGCCCGCCTGGCATTATGCCCAGTACATGACCTTACGGGACTTTC | |
| | | CTACTTGGCAGTACATCTACGTATTAGTCATCGCTATTACCATGGTGATGCGGTTTTGGCAGTACACCA | |
| | | ATGGGCGTGGATAGCGGTTTGACTCACGGGGATTTCCAAGTCTCCACCCCATTGACGTCAATGGGAGT | |
| | | TTGTTTTGGCACCAAAATCAACGGGACTTTCCAAAATGTCGTAATAACCCCGCCCCGTTGACGCAAATG | |
| | | GGCGGTAGGCGTGTACGGTGGGAGGTCTATATAAGCAGAGCTCGTTTAGTGAACCGTC (SEQ ID NO: | |
| | | 18750) | |
| | 469 nt | CCATTGACGTCAATAATGACGTATGTTCCCATAGTAACGCCAATAGGGACTTTCCATTGACGTCAATGG | 0 nt Homology 1 |
| | | GTGGAGTATTTACGGTAAACTGCCCACTTGGCAGTACATCAAGTGTATCATATGCCAAGTCCGCCCCCT | |
| | | ATTGACGTCAATGACGGTAAATGGCCCGCCTGGCATTATGCCCAGTACATGACCTTACGGGACTTTCCT | |
| | | ACTTGGCAGTACATCTACGTATTAGTCATCGCTATTACCATGGTGATGCGGTTTTGGCAGTACACCAAT | |
| | | GGGCGTGGATAGCGGTTTGACTCACGGGGATTTCCAAGTCTCCACCCCATTGACGTCAATGGGAGTTT | |
| | | GTTTTGGCACCAAAATCAACGGGACTTTCCAAAATGTCGTAATAACCCCGCCCCGTTGACGCAAATGG | |
| | | GCGGTAGGCGTGTACGGTGGGAGGTCTATATAAGCAGAGCTCGTTTAGTGAACCGTC (SEQ ID NO: | |
| | | 18751) | |
| | 468 nt | CATTGACGTCAATAATGACGTATGTTCCCATAGTAACGCCAATAGGGACTTTCCATTGACGTCAATGGG | 0 nt Homology 1 |
| | | TGGAGTATTTACGGTAAACTGCCCACTTGGCAGTACATCAAGTGTATCATATGCCAAGTCCGCCCCCTA | |
| | | TTGACGTCAATGACGGTAAATGGCCCGCCTGGCATTATGCCCAGTACATGACCTTACGGGACTTTCCTA | |
| | | CTTGGCAGTACATCTACGTATTAGTCATCGCTATTACCATGGTGATGCGGTTTTGGCAGTACACCAATG | |
| | | GGCGTGGATAGCGGTTTGACTCACGGGGATTTCCAAGTCTCCACCCCATTGACGTCAATGGGAGTTTG | |
| | | TTTTGGCACCAAAATCAACGGGACTTTCCAAAATGTCGTAATAACCCCGCCCCGTTGACGCAAATGGG | |
| | | CGGTAGGCGTGTACGGTGGGAGGTCTATATAAGCAGAGCTCGTTTAGTGAACCGTC (SEQ ID NO: | |
| | | 18752) | |
| | 467 nt | ATTGACGTCAATAATGACGTATGTTCCCATAGTAACGCCAATAGGGACTTTCCATTGACGTCAATGGGT | 0 nt Homology 1 |
| | | GGAGTATTTACGGTAAACTGCCCACTTGGCAGTACATCAAGTGTATCATATGCCAAGTCCGCCCCCTAT | |
| | | TGACGTCAATGACGGTAAATGGCCCGCCTGGCATTATGCCCAGTACATGACCTTACGGGACTTTCCTAC | |
| | | TTGGCAGTACATCTACGTATTAGTCATCGCTATTACCATGGTGATGCGGTTTTGGCAGTACACCAATGG | |
| | | GCGTGGATAGCGGTTTGACTCACGGGGATTTCCAAGTCTCCACCCCATTGACGTCAATGGGAGTTTGT | |
| | | TTTGGCACCAAAATCAACGGGACTTTCCAAAATGTCGTAATAACCCCGCCCCGTTGACGCAAATGGGC | |
| | | GGTAGGCGTGTACGGTGGGAGGTCTATATAAGCAGAGCTCGTTTAGTGAACCGTC (SEQ ID NO: | |
| | | 18753) | |
| | 466 nt | TTGACGTCAATAATGACGTATGTTCCCATAGTAACGCCAATAGGGACTTTCCATTGACGTCAATGGGTG | 0 nt Homology 1 |
| | | GAGTATTTACGGTAAACTGCCCACTTGGCAGTACATCAAGTGTATCATATGCCAAGTCCGCCCCCTATT | |
| | | GACGTCAATGACGGTAAATGGCCCGCCTGGCATTATGCCCAGTACATGACCTTACGGGACTTTCCTACT | |
| | | TGGCAGTACATCTACGTATTAGTCATCGCTATTACCATGGTGATGCGGTTTTGGCAGTACACCAATGGG | |
| | | CGTGGATAGCGGTTTGACTCACGGGGATTTCCAAGTCTCCACCCCATTGACGTCAATGGGAGTTTGTTT | |
| | | TGGCACCAAAATCAACGGGACTTTCCAAAATGTCGTAATAACCCCGCCCCGTTGACGCAAATGGGCGG | |
| | | TAGGCGTGTACGGTGGGAGGTCTATATAAGCAGAGCTCGTTTAGTGAACCGTC (SEQ ID NO: 18754) | |
| | 465 nt | TGACGTCAATAATGACGTATGTTCCCATAGTAACGCCAATAGGGACTTTCCATTGACGTCAATGGGTG | 0 nt Homology 1 |
| | | GAGTATTTACGGTAAACTGCCCACTTGGCAGTACATCAAGTGTATCATATGCCAAGTCCGCCCCCTATT | |
| | | GACGTCAATGACGGTAAATGGCCCGCCTGGCATTATGCCCAGTACATGACCTTACGGGACTTTCCTACT | |
| | | TGGCAGTACATCTACGTATTAGTCATCGCTATTACCATGGTGATGCGGTTTTGGCAGTACACCAATGGG | |
| | | CGTGGATAGCGGTTTGACTCACGGGGATTTCCAAGTCTCCACCCCATTGACGTCAATGGGAGTTTGTTT | |
| | | TGGCACCAAAATCAACGGGACTTTCCAAAATGTCGTAATAACCCCGCCCCGTTGACGCAAATGGGCGG | |
| | | TAGGCGTGTACGGTGGGAGGTCTATATAAGCAGAGCTCGTTTAGTGAACCGTC (SEQ ID NO: 18755) | |
| | 464 nt | GACGTCAATAATGACGTATGTTCCCATAGTAACGCCAATAGGGACTTTCCATTGACGTCAATGGGTGG | 0 nt Homology 1 |
| | | AGTATTTACGGTAAACTGCCCACTTGGCAGTACATCAAGTGTATCATATGCCAAGTCCGCCCCCTATTG | |
| | | ACGTCAATGACGGTAAATGGCCCGCCTGGCATTATGCCCAGTACATGACCTTACGGGACTTTCCTACTT | |
| | | GGCAGTACATCTACGTATTAGTCATCGCTATTACCATGGTGATGCGGTTTTGGCAGTACACCAATGGG | |
| | | CGTGGATAGCGGTTTGACTCACGGGGATTTCCAAGTCTCCACCCCATTGACGTCAATGGGAGTTTGTTT | |
| | | TGGCACCAAAATCAACGGGACTTTCCAAAATGTCGTAATAACCCCGCCCCGTTGACGCAAATGGGCGG | |
| | | TAGGCGTGTACGGTGGGAGGTCTATATAAGCAGAGCTCGTTTAGTGAACCGTC (SEQ ID NO: 18756) | |
| | 463 nt | ACGTCAATAATGACGTATGTTCCCATAGTAACGCCAATAGGGACTTTCCATTGACGTCAATGGGTGGA | 0 nt Homology 1 |
| | | GTATTTACGGTAAACTGCCCACTTGGCAGTACATCAAGTGTATCATATGCCAAGTCCGCCCCCTATTGA | |
| | | CGTCAATGACGGTAAATGGCCCGCCTGGCATTATGCCCAGTACATGACCTTACGGGACTTTCCTACTTG | |
| | | GCAGTACATCTACGTATTAGTCATCGCTATTACCATGGTGATGCGGTTTTGGCAGTACACCAATGGGC | |
| | | GTGGATAGCGGTTTGACTCACGGGGATTTCCAAGTCTCCACCCCATTGACGTCAATGGGAGTTTGTTTT | |
| | | GGCACCAAAATCAACGGGACTTTCCAAAATGTCGTAATAACCCCGCCCCGTTGACGCAAATGGGCGGT | |
| | | AGGCGTGTACGGTGGGAGGTCTATATAAGCAGAGCTCGTTTAGTGAACCGTC (SEQ ID NO: 18757) | |
| | 462 nt | CGTCAATAATGACGTATGTTCCCATAGTAACGCCAATAGGGACTTTCCATTGACGTCAATGGGTGGAG | 0 nt Homology 1 |
| | | TATTTACGGTAAACTGCCCACTTGGCAGTACATCAAGTGTATCATATGCCAAGTCCGCCCCCTATTGAC | |
| | | GTCAATGACGGTAAATGGCCCGCCTGGCATTATGCCCAGTACATGACCTTACGGGACTTTCCTACTTGG | |
| | | CAGTACATCTACGTATTAGTCATCGCTATTACCATGGTGATGCGGTTTTGGCAGTACACCAATGGGCGT | |
| | | GGATAGCGGTTTGACTCACGGGGATTTCCAAGTCTCCACCCCATTGACGTCAATGGGAGTTTGTTTTG | |
| | | GCACCAAAATCAACGGGACTTTCCAAAATGTCGTAATAACCCCGCCCCGTTGACGCAAATGGGCGGTA | |
| | | GGCGTGTACGGTGGGAGGTCTATATAAGCAGAGCTCGTTTAGTGAACCGTC (SEQ ID NO: 18758) | |
| | 461 nt | GTCAATAATGACGTATGTTCCCATAGTAACGCCAATAGGGACTTTCCATTGACGTCAATGGGTGGAGT | 0 nt Homology 1 |
| | | ATTTACGGTAAACTGCCCACTTGGCAGTACATCAAGTGTATCATATGCCAAGTCCGCCCCCTATTGACG | |
| | | TCAATGACGGTAAATGGCCCGCCTGGCATTATGCCCAGTACATGACCTTACGGGACTTTCCTACTTGGC | |
| | | AGTACATCTACGTATTAGTCATCGCTATTACCATGGTGATGCGGTTTTGGCAGTACACCAATGGGCGTG | |
| | | GATAGCGGTTTGACTCACGGGGATTTCCAAGTCTCCACCCCATTGACGTCAATGGGAGTTTGTTTTGGC | |
| | | ACCAAAATCAACGGGACTTTCCAAAATGTCGTAATAACCCCGCCCCGTTGACGCAAATGGGCGGTAGG | |
| | | CGTGTACGGTGGGAGGTCTATATAAGCAGAGCTCGTTTAGTGAACCGTC (SEQ ID NO: 18759) | |
| | 460 nt | TCAATAATGACGTATGTTCCCATAGTAACGCCAATAGGGACTTTCCATTGACGTCAATGGGTGGAGTA | 0 nt Homology 1 |
| | | TTTACGGTAAACTGCCCACTTGGCAGTACATCAAGTGTATCATATGCCAAGTCCGCCCCCTATTGACGT | |
| | | CAATGACGGTAAATGGCCCGCCTGGCATTATGCCCAGTACATGACCTTACGGGACTTTCCTACTTGGCA | |
| | | GTACATCTACGTATTAGTCATCGCTATTACCATGGTGATGCGGTTTTGGCAGTACACCAATGGGCGTG | |
| | | GATAGCGGTTTGACTCACGGGGATTTCCAAGTCTCCACCCCATTGACGTCAATGGGAGTTTGTTTTGGC | |
| | | ACCAAAATCAACGGGACTTTCCAAAATGTCGTAATAACCCCGCCCCGTTGACGCAAATGGGCGGTAGG | |
| | | CGTGTACGGTGGGAGGTCTATATAAGCAGAGCTCGTTTAGTGAACCGTC (SEQ ID NO: 18760) | |
| | 459 nt | CAATAATGACGTATGTTCCCATAGTAACGCCAATAGGGACTTTCCATTGACGTCAATGGGTGGAGTAT | 0 nt Homology 1 |
| | | TTACGGTAAACTGCCCACTTGGCAGTACATCAAGTGTATCATATGCCAAGTCCGCCCCCTATTGACGTC | |
| | | AATGACGGTAAATGGCCCGCCTGGCATTATGCCCAGTACATGACCTTACGGGACTTTCCTACTTGGCA | |
| | | GTACATCTACGTATTAGTCATCGCTATTACCATGGTGATGCGGTTTTGGCAGTACACCAATGGGCGTG | |
| | | GATAGCGGTTTGACTCACGGGGATTTCCAAGTCTCCACCCCATTGACGTCAATGGGAGTTTGTTTTGGC | |
| | | ACCAAAATCAACGGGACTTTCCAAAATGTCGTAATAACCCCGCCCCGTTGACGCAAATGGGCGGTAGG | |
| | | CGTGTACGGTGGGAGGTCTATATAAGCAGAGCTCGTTTAGTGAACCGTC (SEQ ID NO: 18761) | |
| | 458 nt | AATAATGACGTATGTTCCCATAGTAACGCCAATAGGGACTTTCCATTGACGTCAATGGGTGGAGTATTT | 0 nt Homology 1 |
| | | ACGGTAAACTGCCCACTTGGCAGTACATCAAGTGTATCATATGCCAAGTCCGCCCCCTATTGACGTCAA | |
| | | TGACGGTAAATGGCCCGCCTGGCATTATGCCCAGTACATGACCTTACGGGACTTTCCTACTTGGCAGTA | |
| | | CATCTACGTATTAGTCATCGCTATTACCATGGTGATGCGGTTTTGGCAGTACACCAATGGGCGTGGATA | |
| | | GCGGTTTGACTCACGGGGATTTCCAAGTCTCCACCCCATTGACGTCAATGGGAGTTTGTTTTGGCACCA | |
| | | AAATCAACGGGACTTTCCAAAATGTCGTAATAACCCCGCCCCGTTGACGCAAATGGGCGGTAGGCGTG | |
| | | TACGGTGGGAGGTCTATATAAGCAGAGCTCGTTTAGTGAACCGTC (SEQ ID NO: 18762) | |
| | 457 nt | ATAATGACGTATGTTCCCATAGTAACGCCAATAGGGACTTTCCATTGACGTCAATGGGTGGAGTATTTA | 0 nt Homology 1 |
| | | CGGTAAACTGCCCACTTGGCAGTACATCAAGTGTATCATATGCCAAGTCCGCCCCCTATTGACGTCAAT | |
| | | GACGGTAAATGGCCCGCCTGGCATTATGCCCAGTACATGACCTTACGGGACTTTCCTACTTGGCAGTA | |
| | | CATCTACGTATTAGTCATCGCTATTACCATGGTGATGCGGTTTTGGCAGTACACCAATGGGCGTGGATA | |
| | | GCGGTTTGACTCACGGGGATTTCCAAGTCTCCACCCCATTGACGTCAATGGGAGTTTGTTTTGGCACCA | |
| | | AAATCAACGGGACTTTCCAAAATGTCGTAATAACCCCGCCCCGTTGACGCAAATGGGGGTAGGCGTG | |
| | | TACGGTGGGAGGTCTATATAAGCAGAGCTCGTTTAGTGAACCGTC (SEQ ID NO: 18763) | |
| | 456 nt | TAATGACGTATGTTCCCATAGTAACGCCAATAGGGACTTTCCATTGACGTCAATGGGTGGAGTATTTAC | 0 nt Homology 1 |
| | | GGTAAACTGCCCACTTGGCAGTACATCAAGTGTATCATATGCCAAGTCCGCCCCCTATTGACGTCAATG | |
| | | ACGGTAAATGGCCCGCCTGGCATTATGCCCAGTACATGACCTTACGGGACTTTCCTACTTGGCAGTACA | |
| | | TCTACGTATTAGTCATCGCTATTACCATGGTGATGCGGTTTTGGCAGTACACCAATGGGCGTGGATAG | |
| | | CGGTTTGACTCACGGGGATTTCCAAGTCTCCACCCCATTGACGTCAATGGGAGTTTGTTTTGGCACCAA | |
| | | AATCAACGGGACTTTCCAAAATGTCGTAATAACCCCGCCCCGTTGACGCAAATGGGCGGTAGGCGTGT | |
| | | ACGGTGGGAGGTCTATATAAGCAGAGCTCGTTTAGTGAACCGTC (SEQ ID NO: 18764) | |
| | 455 nt | AATGACGTATGTTCCCATAGTAACGCCAATAGGGACTTTCCATTGACGTCAATGGGTGGAGTATTTAC | 0 nt Homology 1 |
| | | GGTAAACTGCCCACTTGGCAGTACATCAAGTGTATCATATGCCAAGTCCGCCCCCTATTGACGTCAATG | |
| | | ACGGTAAATGGCCCGCCTGGCATTATGCCCAGTACATGACCTTACGGGACTTTCCTACTTGGCAGTACA | |
| | | TCTACGTATTAGTCATCGCTATTACCATGGTGATGCGGTTTTGGCAGTACACCAATGGGCGTGGATAG | |
| | | CGGTTTGACTCACGGGGATTTCCAAGTCTCCACCCCATTGACGTCAATGGGAGTTTGTTTTGGCACCAA | |
| | | AATCAACGGGACTTTCCAAAATGTCGTAATAACCCCGCCCCGTTGACGCAAATGGGCGGTAGGCGTGT | |
| | | ACGGTGGGAGGTCTATATAAGCAGAGCTCGTTTAGTGAACCGTC (SEQ ID NO: 18765) | |
| | 454 nt | ATGACGTATGTTCCCATAGTAACGCCAATAGGGACTTTCCATTGACGTCAATGGGTGGAGTATTTACG | 0 nt Homology 1 |
| | | GTAAACTGCCCACTTGGCAGTACATCAAGTGTATCATATGCCAAGTCCGCCCCCTATTGACGTCAATGA | |
| | | CGGTAAATGGCCCGCCTGGCATTATGCCCAGTACATGACCTTACGGGACTTTCCTACTTGGCAGTACAT | |
| | | CTACGTATTAGTCATCGCTATTACCATGGTGATGCGGTTTTGGCAGTACACCAATGGGCGTGGATAGC | |
| | | GGTTTGACTCACGGGGATTTCCAAGTCTCCACCCCATTGACGTCAATGGGAGTTTGTTTTGGCACCAAA | |
| | | ATCAACGGGACTTTCCAAAATGTCGTAATAACCCCGCCCCGTTGACGCAAATGGGCGGTAGGCGTGTA | |
| | | CGGTGGGAGGTCTATATAAGCAGAGCTCGTTTAGTGAACCGTC (SEQ ID NO: 18766) | |
| | 453 nt | TGACGTATGTTCCCATAGTAACGCCAATAGGGACTTTCCATTGACGTCAATGGGTGGAGTATTTACGG | 0 nt Homology 1 |
| | | TAAACTGCCCACTTGGCAGTACATCAAGTGTATCATATGCCAAGTCCGCCCCCTATTGACGTCAATGAC | |
| | | GGTAAATGGCCCGCCTGGCATTATGCCCAGTACATGACCTTACGGGACTTTCCTACTTGGCAGTACATC | |
| | | TACGTATTAGTCATCGCTATTACCATGGTGATGCGGTTTTGGCAGTACACCAATGGGCGTGGATAGCG | |
| | | GTTTGACTCACGGGGATTTCCAAGTCTCCACCCCATTGACGTCAATGGGAGTTTGTTTTGGCACCAAAA | |
| | | TCAACGGGACTTTCCAAAATGTCGTAATAACCCCGCCCCGTTGACGCAAATGGGCGGTAGGCGTGTAC | |
| | | GGTGGGAGGTCTATATAAGCAGAGCTCGTTTAGTGAACCGTC (SEQ ID NO: 18767) | |
| | 452 nt | GACGTATGTTCCCATAGTAACGCCAATAGGGACTTTCCATTGACGTCAATGGGTGGAGTATTTACGGT | 0 nt Homology 1 |
| | | AAACTGCCCACTTGGCAGTACATCAAGTGTATCATATGCCAAGTCCGCCCCCTATTGACGTCAATGACG | |
| | | GTAAATGGCCCGCCTGGCATTATGCCCAGTACATGACCTTACGGGACTTTCCTACTTGGCAGTACATCT | |
| | | ACGTATTAGTCATCGCTATTACCATGGTGATGCGGTTTTGGCAGTACACCAATGGGCGTGGATAGCGG | |
| | | TTTGACTCACGGGGATTTCCAAGTCTCCACCCCATTGACGTCAATGGGAGTTTGTTTTGGCACCAAAAT | |
| | | CAACGGGACTTTCCAAAATGTCGTAATAACCCCGCCCCGTTGACGCAAATGGGCGGTAGGCGTGTACG | |
| | | GTGGGAGGTCTATATAAGCAGAGCTCGTTTAGTGAACCGTC (SEQ ID NO: 18768) | |
| | 451 nt | ACGTATGTTCCCATAGTAACGCCAATAGGGACTTTCCATTGACGTCAATGGGTGGAGTATTTACGGTA | 0 nt Homology 1 |
| | | AACTGCCCACTTGGCAGTACATCAAGTGTATCATATGCCAAGTCCGCCCCCTATTGACGTCAATGACGG | |
| | | TAAATGGCCCGCCTGGCATTATGCCCAGTACATGACCTTACGGGACTTTCCTACTTGGCAGTACATCTA | |
| | | CGTATTAGTCATCGCTATTACCATGGTGATGCGGTTTTGGCAGTACACCAATGGGCGTGGATAGCGGT | |
| | | TTGACTCACGGGGATTTCCAAGTCTCCACCCCATTGACGTCAATGGGAGTTTGTTTTGGCACCAAAATC | |
| | | AACGGGACTTTCCAAAATGTCGTAATAACCCCGCCCCGTTGACGCAAATGGGGGTAGGCGTGTACG | |
| | | GTGGGAGGTCTATATAAGCAGAGCTCGTTTAGTGAACCGTC (SEQ ID NO: 18769) | |
| | 450 nt | CGTATGTTCCCATAGTAACGCCAATAGGGACTTTCCATTGACGTCAATGGGTGGAGTATTTACGGTAA | 0 nt Homology 1 |
| | | ACTGCCCACTTGGCAGTACATCAAGTGTATCATATGCCAAGTCCGCCCCCTATTGACGTCAATGACGGT | |
| | | AAATGGCCCGCCTGGCATTATGCCCAGTACATGACCTTACGGGACTTTCCTACTTGGCAGTACATCTAC | |
| | | GTATTAGTCATCGCTATTACCATGGTGATGCGGTTTTGGCAGTACACCAATGGGCGTGGATAGCGGTT | |
| | | TGACTCACGGGGATTTCCAAGTCTCCACCCCATTGACGTCAATGGGAGTTTGTTTTGGCACCAAAATCA | |
| | | ACGGGACTTTCCAAAATGTCGTAATAACCCCGCCCCGTTGACGCAAATGGGCGGTAGGCGTGTACGGT | |
| | | GGGAGGTCTATATAAGCAGAGCTCGTTTAGTGAACCGTC (SEQ ID NO: 18770) | |
| | 449 nt | GTATGTTCCCATAGTAACGCCAATAGGGACTTTCCATTGACGTCAATGGGTGGAGTATTTACGGTAAA | 0 nt Homology 1 |
| | | CTGCCCACTTGGCAGTACATCAAGTGTATCATATGCCAAGTCCGCCCCCTATTGACGTCAATGACGGTA | |
| | | AATGGCCCGCCTGGCATTATGCCCAGTACATGACCTTACGGGACTTTCCTACTTGGCAGTACATCTACG | |
| | | TATTAGTCATCGCTATTACCATGGTGATGCGGTTTTGGCAGTACACCAATGGGCGTGGATAGCGGTTT | |
| | | GACTCACGGGGATTTCCAAGTCTCCACCCCATTGACGTCAATGGGAGTTTGTTTTGGCACCAAAATCAA | |
| | | CGGGACTTTCCAAAATGTCGTAATAACCCCGCCCCGTTGACGCAAATGGGCGGTAGGCGTGTACGGT | |
| | | GGGAGGTCTATATAAGCAGAGCTCGTTTAGTGAACCGTC (SEQ ID NO: 18771) | |
| | 448 nt | TATGTTCCCATAGTAACGCCAATAGGGACTTTCCATTGACGTCAATGGGTGGAGTATTTACGGTAAACT | 0 nt Homology 1 |
| | | GCCCACTTGGCAGTACATCAAGTGTATCATATGCCAAGTCCGCCCCCTATTGACGTCAATGACGGTAAA | |
| | | TGGCCCGCCTGGCATTATGCCCAGTACATGACCTTACGGGACTTTCCTACTTGGCAGTACATCTACGTA | |
| | | TTAGTCATCGCTATTACCATGGTGATGCGGTTTTGGCAGTACACCAATGGGCGTGGATAGCGGTTTGA | |
| | | CTCACGGGGATTTCCAAGTCTCCACCCCATTGACGTCAATGGGAGTTTGTTTTGGCACCAAAATCAACG | |
| | | GGACTTTCCAAAATGTCGTAATAACCCCGCCCCGTTGACGCAAATGGGCGGTAGGCGTGTACGGTGG | |
| | | GAGGTCTATATAAGCAGAGCTCGTTTAGTGAACCGTC (SEQ ID NO: 18772) | |
| | 447 nt | ATGTTCCCATAGTAACGCCAATAGGGACTTTCCATTGACGTCAATGGGTGGAGTATTTACGGTAAACT | 0 nt Homology 1 |
| | | GCCCACTTGGCAGTACATCAAGTGTATCATATGCCAAGTCCGCCCCCTATTGACGTCAATGACGGTAAA | |
| | | TGGCCCGCCTGGCATTATGCCCAGTACATGACCTTACGGGACTTTCCTACTTGGCAGTACATCTACGTA | |
| | | TTAGTCATCGCTATTACCATGGTGATGCGGTTTTGGCAGTACACCAATGGGCGTGGATAGCGGTTTGA | |
| | | CTCACGGGGATTTCCAAGTCTCCACCCCATTGACGTCAATGGGAGTTTGTTTTGGCACCAAAATCAACG | |
| | | GGACTTTCCAAAATGTCGTAATAACCCCGCCCCGTTGACGCAAATGGGCGGTAGGCGTGTACGGTGG | |
| | | GAGGTCTATATAAGCAGAGCTCGTTTAGTGAACCGTC (SEQ ID NO: 18773) | |
| | 446 nt | TGTTCCCATAGTAACGCCAATAGGGACTTTCCATTGACGTCAATGGGTGGAGTATTTACGGTAAACTG | 0 nt Homology 1 |
| | | CCCACTTGGCAGTACATCAAGTGTATCATATGCCAAGTCCGCCCCCTATTGACGTCAATGACGGTAAAT | |
| | | GGCCCGCCTGGCATTATGCCCAGTACATGACCTTACGGGACTTTCCTACTTGGCAGTACATCTACGTAT | |
| | | TAGTCATCGCTATTACCATGGTGATGCGGTTTTGGCAGTACACCAATGGGCGTGGATAGCGGTTTGAC | |
| | | TCACGGGGATTTCCAAGTCTCCACCCCATTGACGTCAATGGGAGTTTGTTTTGGCACCAAAATCAACGG | |
| | | GACTTTCCAAAATGTCGTAATAACCCCGCCCCGTTGACGCAAATGGGCGGTAGGCGTGTACGGTGGG | |
| | | AGGTCTATATAAGCAGAGCTCGTTTAGTGAACCGTC (SEQ ID NO: 18774) | |
| | 445 nt | GTTCCCATAGTAACGCCAATAGGGACTTTCCATTGACGTCAATGGGTGGAGTATTTACGGTAAACTGC | 0 nt Homology 1 |
| | | CCACTTGGCAGTACATCAAGTGTATCATATGCCAAGTCCGCCCCCTATTGACGTCAATGACGGTAAATG | |
| | | GCCCGCCTGGCATTATGCCCAGTACATGACCTTACGGGACTTTCCTACTTGGCAGTACATCTACGTATT | |
| | | AGTCATCGCTATTACCATGGTGATGCGGTTTTGGCAGTACACCAATGGGCGTGGATAGCGGTTTGACT | |
| | | CACGGGGATTTCCAAGTCTCCACCCCATTGACGTCAATGGGAGTTTGTTTTGGCACCAAAATCAACGG | |
| | | GACTTTCCAAAATGTCGTAATAACCCCGCCCCGTTGACGCAAATGGGGGTAGGCGTGTACGGTGGG | |
| | | AGGTCTATATAAGCAGAGCTCGTTTAGTGAACCGTC (SEQ ID NO: 18775) | |
| | 444 nt | TTCCCATAGTAACGCCAATAGGGACTTTCCATTGACGTCAATGGGTGGAGTATTTACGGTAAACTGCCC | 0 nt Homology 1 |
| | | ACTTGGCAGTACATCAAGTGTATCATATGCCAAGTCCGCCCCCTATTGACGTCAATGACGGTAAATGG | |
| | | CCCGCCTGGCATTATGCCCAGTACATGACCTTACGGGACTTTCCTACTTGGCAGTACATCTACGTATTA | |
| | | GTCATCGCTATTACCATGGTGATGCGGTTTTGGCAGTACACCAATGGGCGTGGATAGCGGTTTGACTC | |
| | | ACGGGGATTTCCAAGTCTCCACCCCATTGACGTCAATGGGAGTTTGTTTTGGCACCAAAATCAACGGG | |
| | | ACTTTCCAAAATGTCGTAATAACCCCGCCCCGTTGACGCAAATGGGCGGTAGGCGTGTACGGTGGGA | |
| | | GGTCTATATAAGCAGAGCTCGTTTAGTGAACCGTC (SEQ ID NO: 18776) | |
| | 443 nt | TCCCATAGTAACGCCAATAGGGACTTTCCATTGACGTCAATGGGTGGAGTATTTACGGTAAACTGCCC | 0 nt Homology 1 |
| | | ACTTGGCAGTACATCAAGTGTATCATATGCCAAGTCCGCCCCCTATTGACGTCAATGACGGTAAATGG | |
| | | CCCGCCTGGCATTATGCCCAGTACATGACCTTACGGGACTTTCCTACTTGGCAGTACATCTACGTATTA | |
| | | GTCATCGCTATTACCATGGTGATGCGGTTTTGGCAGTACACCAATGGGCGTGGATAGCGGTTTGACTC | |
| | | ACGGGGATTTCCAAGTCTCCACCCCATTGACGTCAATGGGAGTTTGTTTTGGCACCAAAATCAACGGG | |
| | | ACTTTCCAAAATGTCGTAATAACCCCGCCCCGTTGACGCAAATGGGCGGTAGGCGTGTACGGTGGGA | |
| | | GGTCTATATAAGCAGAGCTCGTTTAGTGAACCGTC (SEQ ID NO: 18777) | |
| | 442 nt | CCCATAGTAACGCCAATAGGGACTTTCCATTGACGTCAATGGGTGGAGTATTTACGGTAAACTGCCCA | 0 nt Homology 1 |
| | | CTTGGCAGTACATCAAGTGTATCATATGCCAAGTCCGCCCCCTATTGACGTCAATGACGGTAAATGGCC | |
| | | CGCCTGGCATTATGCCCAGTACATGACCTTACGGGACTTTCCTACTTGGCAGTACATCTACGTATTAGT | |
| | | CATCGCTATTACCATGGTGATGCGGTTTTGGCAGTACACCAATGGGCGTGGATAGCGGTTTGACTCAC | |
| | | GGGGATTTCCAAGTCTCCACCCCATTGACGTCAATGGGAGTTTGTTTTGGCACCAAAATCAACGGGAC | |
| | | TTTCCAAAATGTCGTAATAACCCCGCCCCGTTGACGCAAATGGGCGGTAGGCGTGTACGGTGGGAGG | |
| | | TCTATATAAGCAGAGCTCGTTTAGTGAACCGTC (SEQ ID NO: 18778) | |
| | 441 nt | CCATAGTAACGCCAATAGGGACTTTCCATTGACGTCAATGGGTGGAGTATTTACGGTAAACTGCCCAC | 0 nt Homology 1 |
| | | TTGGCAGTACATCAAGTGTATCATATGCCAAGTCCGCCCCCTATTGACGTCAATGACGGTAAATGGCCC | |
| | | GCCTGGCATTATGCCCAGTACATGACCTTACGGGACTTTCCTACTTGGCAGTACATCTACGTATTAGTC | |
| | | ATCGCTATTACCATGGTGATGCGGTTTTGGCAGTACACCAATGGGCGTGGATAGCGGTTTGACTCACG | |
| | | GGGATTTCCAAGTCTCCACCCCATTGACGTCAATGGGAGTTTGTTTTGGCACCAAAATCAACGGGACTT | |
| | | TCCAAAATGTCGTAATAACCCCGCCCCGTTGACGCAAATGGGCGGTAGGCGTGTACGGTGGGAGGTC | |
| | | TATATAAGCAGAGCTCGTTTAGTGAACCGTC (SEQ ID NO: 18779) | |
| | 440 nt | CATAGTAACGCCAATAGGGACTTTCCATTGACGTCAATGGGTGGAGTATTTACGGTAAACTGCCCACT | 0 nt Homology 1 |
| | | TGGCAGTACATCAAGTGTATCATATGCCAAGTCCGCCCCCTATTGACGTCAATGACGGTAAATGGCCC | |
| | | GCCTGGCATTATGCCCAGTACATGACCTTACGGGACTTTCCTACTTGGCAGTACATCTACGTATTAGTC | |
| | | ATCGCTATTACCATGGTGATGCGGTTTTGGCAGTACACCAATGGGCGTGGATAGCGGTTTGACTCACG | |
| | | GGGATTTCCAAGTCTCCACCCCATTGACGTCAATGGGAGTTTGTTTTGGCACCAAAATCAACGGGACTT | |
| | | TCCAAAATGTCGTAATAACCCCGCCCCGTTGACGCAAATGGGCGGTAGGCGTGTACGGTGGGAGGTC | |
| | | TATATAAGCAGAGCTCGTTTAGTGAACCGTC (SEQ ID NO: 18780) | |
| | 439 nt | ATAGTAACGCCAATAGGGACTTTCCATTGACGTCAATGGGTGGAGTATTTACGGTAAACTGCCCACTT | 0 nt Homology 1 |
| | | GGCAGTACATCAAGTGTATCATATGCCAAGTCCGCCCCCTATTGACGTCAATGACGGTAAATGGCCCG | |
| | | CCTGGCATTATGCCCAGTACATGACCTTACGGGACTTTCCTACTTGGCAGTACATCTACGTATTAGTCAT | |
| | | CGCTATTACCATGGTGATGCGGTTTTGGCAGTACACCAATGGGCGTGGATAGCGGTTTGACTCACGGG | |
| | | GATTTCCAAGTCTCCACCCCATTGACGTCAATGGGAGTTTGTTTTGGCACCAAAATCAACGGGACTTTC | |
| | | CAAAATGTCGTAATAACCCCGCCCCGTTGACGCAAATGGGCGGTAGGCGTGTACGGTGGGAGGTCTA | |
| | | TATAAGCAGAGCTCGTTTAGTGAACCGTC (SEQ ID NO: 18781) | |
| | 438 nt | TAGTAACGCCAATAGGGACTTTCCATTGACGTCAATGGGTGGAGTATTTACGGTAAACTGCCCACTTG | 0 nt Homology 1 |
| | | GCAGTACATCAAGTGTATCATATGCCAAGTCCGCCCCCTATTGACGTCAATGACGGTAAATGGCCCGC | |
| | | CTGGCATTATGCCCAGTACATGACCTTACGGGACTTTCCTACTTGGCAGTACATCTACGTATTAGTCATC | |
| | | GCTATTACCATGGTGATGCGGTTTTGGCAGTACACCAATGGGCGTGGATAGCGGTTTGACTCACGGG | |
| | | GATTTCCAAGTCTCCACCCCATTGACGTCAATGGGAGTTTGTTTTGGCACCAAAATCAACGGGACTTTC | |
| | | CAAAATGTCGTAATAACCCCGCCCCGTTGACGCAAATGGGCGGTAGGCGTGTACGGTGGGAGGTCTA | |
| | | TATAAGCAGAGCTCGTTTAGTGAACCGTC (SEQ ID NO: 18782) | |
| | 437 nt | AGTAACGCCAATAGGGACTTTCCATTGACGTCAATGGGTGGAGTATTTACGGTAAACTGCCCACTTGG | 0 nt Homology 1 |
| | | CAGTACATCAAGTGTATCATATGCCAAGTCCGCCCCCTATTGACGTCAATGACGGTAAATGGCCCGCCT | |
| | | GGCATTATGCCCAGTACATGACCTTACGGGACTTTCCTACTTGGCAGTACATCTACGTATTAGTCATCG | |
| | | CTATTACCATGGTGATGCGGTTTTGGCAGTACACCAATGGGCGTGGATAGCGGTTTGACTCACGGGGA | |
| | | TTTCCAAGTCTCCACCCCATTGACGTCAATGGGAGTTTGTTTTGGCACCAAAATCAACGGGACTTTCCA | |
| | | AAATGTCGTAATAACCCCGCCCCGTTGACGCAAATGGGCGGTAGGCGTGTACGGTGGGAGGTCTATA | |
| | | TAAGCAGAGCTCGTTTAGTGAACCGTC (SEQ ID NO: 18783) | |
| | 436 nt | GTAACGCCAATAGGGACTTTCCATTGACGTCAATGGGTGGAGTATTTACGGTAAACTGCCCACTTGGC | 0 nt Homology 1 |
| | | AGTACATCAAGTGTATCATATGCCAAGTCCGCCCCCTATTGACGTCAATGACGGTAAATGGCCCGCCT | |
| | | GGCATTATGCCCAGTACATGACCTTACGGGACTTTCCTACTTGGCAGTACATCTACGTATTAGTCATCG | |
| | | CTATTACCATGGTGATGCGGTTTTGGCAGTACACCAATGGGCGTGGATAGCGGTTTGACTCACGGGGA | |
| | | TTTCCAAGTCTCCACCCCATTGACGTCAATGGGAGTTTGTTTTGGCACCAAAATCAACGGGACTTTCCA | |
| | | AAATGTCGTAATAACCCCGCCCCGTTGACGCAAATGGGCGGTAGGCGTGTACGGTGGGAGGTCTATA | |
| | | TAAGCAGAGCTCGTTTAGTGAACCGTC (SEQ ID NO: 18784) | |
| | 435 nt | TAACGCCAATAGGGACTTTCCATTGACGTCAATGGGTGGAGTATTTACGGTAAACTGCCCACTTGGCA | 0 nt Homology 1 |
| | | GTACATCAAGTGTATCATATGCCAAGTCCGCCCCCTATTGACGTCAATGACGGTAAATGGCCCGCCTG | |
| | | GCATTATGCCCAGTACATGACCTTACGGGACTTTCCTACTTGGCAGTACATCTACGTATTAGTCATCGCT | |
| | | ATTACCATGGTGATGCGGTTTTGGCAGTACACCAATGGGCGTGGATAGCGGTTTGACTCACGGGGATT | |
| | | TCCAAGTCTCCACCCCATTGACGTCAATGGGAGTTTGTTTTGGCACCAAAATCAACGGGACTTTCCAAA | |
| | | ATGTCGTAATAACCCCGCCCCGTTGACGCAAATGGGCGGTAGGCGTGTACGGTGGGAGGTCTATATA | |
| | | AGCAGAGCTCGTTTAGTGAACCGTC (SEQ ID NO: 18785) | |
| | 434 nt | AACGCCAATAGGGACTTTCCATTGACGTCAATGGGTGGAGTATTTACGGTAAACTGCCCACTTGGCAG | 0 nt Homology 1 |
| | | TACATCAAGTGTATCATATGCCAAGTCCGCCCCCTATTGACGTCAATGACGGTAAATGGCCCGCCTGGC | |
| | | ATTATGCCCAGTACATGACCTTACGGGACTTTCCTACTTGGCAGTACATCTACGTATTAGTCATCGCTAT | |
| | | TACCATGGTGATGCGGTTTTGGCAGTACACCAATGGGCGTGGATAGCGGTTTGACTCACGGGGATTTC | |
| | | CAAGTCTCCACCCCATTGACGTCAATGGGAGTTTGTTTTGGCACCAAAATCAACGGGACTTTCCAAAAT | |
| | | GTCGTAATAACCCCGCCCCGTTGACGCAAATGGGCGGTAGGCGTGTACGGTGGGAGGTCTATATAAG | |
| | | CAGAGCTCGTTTAGTGAACCGTC (SEQ ID NO: 18786) | |
| | 433 nt | ACGCCAATAGGGACTTTCCATTGACGTCAATGGGTGGAGTATTTACGGTAAACTGCCCACTTGGCAGT | 0 nt Homology 1 |
| | | ACATCAAGTGTATCATATGCCAAGTCCGCCCCCTATTGACGTCAATGACGGTAAATGGCCCGCCTGGC | |
| | | ATTATGCCCAGTACATGACCTTACGGGACTTTCCTACTTGGCAGTACATCTACGTATTAGTCATCGCTAT | |
| | | TACCATGGTGATGCGGTTTTGGCAGTACACCAATGGGCGTGGATAGCGGTTTGACTCACGGGGATTTC | |
| | | CAAGTCTCCACCCCATTGACGTCAATGGGAGTTTGTTTTGGCACCAAAATCAACGGGACTTTCCAAAAT | |
| | | GTCGTAATAACCCCGCCCCGTTGACGCAAATGGGCGGTAGGCGTGTACGGTGGGAGGTCTATATAAG | |
| | | CAGAGCTCGTTTAGTGAACCGTC (SEQ ID NO: 18787) | |
| | 432 nt | CGCCAATAGGGACTTTCCATTGACGTCAATGGGTGGAGTATTTACGGTAAACTGCCCACTTGGCAGTA | 0 nt Homology 1 |
| | | CATCAAGTGTATCATATGCCAAGTCCGCCCCCTATTGACGTCAATGACGGTAAATGGCCCGCCTGGCAT | |
| | | TATGCCCAGTACATGACCTTACGGGACTTTCCTACTTGGCAGTACATCTACGTATTAGTCATCGCTATTA | |
| | | CCATGGTGATGCGGTTTTGGCAGTACACCAATGGGCGTGGATAGCGGTTTGACTCACGGGGATTTCCA | |
| | | AGTCTCCACCCCATTGACGTCAATGGGAGTTTGTTTTGGCACCAAAATCAACGGGACTTTCCAAAATGT | |
| | | CGTAATAACCCCGCCCCGTTGACGCAAATGGGCGGTAGGCGTGTACGGTGGGAGGTCTATATAAGCA | |
| | | GAGCTCGTTTAGTGAACCGTC (SEQ ID NO: 18788) | |
| | 431 nt | GCCAATAGGGACTTTCCATTGACGTCAATGGGTGGAGTATTTACGGTAAACTGCCCACTTGGCAGTAC | 0 nt Homology 1 |
| | | ATCAAGTGTATCATATGCCAAGTCCGCCCCCTATTGACGTCAATGACGGTAAATGGCCCGCCTGGCATT | |
| | | ATGCCCAGTACATGACCTTACGGGACTTTCCTACTTGGCAGTACATCTACGTATTAGTCATCGCTATTAC | |
| | | CATGGTGATGCGGTTTTGGCAGTACACCAATGGGCGTGGATAGCGGTTTGACTCACGGGGATTTCCAA | |
| | | GTCTCCACCCCATTGACGTCAATGGGAGTTTGTTTTGGCACCAAAATCAACGGGACTTTCCAAAATGTC | |
| | | GTAATAACCCCGCCCCGTTGACGCAAATGGGCGGTAGGCGTGTACGGTGGGAGGTCTATATAAGCAG | |
| | | AGCTCGTTTAGTGAACCGTC (SEQ ID NO: 18789) | |
| | 430 nt | CCAATAGGGACTTTCCATTGACGTCAATGGGTGGAGTATTTACGGTAAACTGCCCACTTGGCAGTACA | 0 nt Homology 1 |
| | | TCAAGTGTATCATATGCCAAGTCCGCCCCCTATTGACGTCAATGACGGTAAATGGCCCGCCTGGCATTA | |
| | | TGCCCAGTACATGACCTTACGGGACTTTCCTACTTGGCAGTACATCTACGTATTAGTCATCGCTATTACC | |
| | | ATGGTGATGCGGTTTTGGCAGTACACCAATGGGCGTGGATAGCGGTTTGACTCACGGGGATTTCCAA | |
| | | GTCTCCACCCCATTGACGTCAATGGGAGTTTGTTTTGGCACCAAAATCAACGGGACTTTCCAAAATGTC | |
| | | GTAATAACCCCGCCCCGTTGACGCAAATGGGCGGTAGGCGTGTACGGTGGGAGGTCTATATAAGCAG | |
| | | AGCTCGTTTAGTGAACCGTC (SEQ ID NO: 18790) | |
| | 429 nt | CAATAGGGACTTTCCATTGACGTCAATGGGTGGAGTATTTACGGTAAACTGCCCACTTGGCAGTACAT | 0 nt Homology 1 |
| | | CAAGTGTATCATATGCCAAGTCCGCCCCCTATTGACGTCAATGACGGTAAATGGCCCGCCTGGCATTAT | |
| | | GCCCAGTACATGACCTTACGGGACTTTCCTACTTGGCAGTACATCTACGTATTAGTCATCGCTATTACCA | |
| | | TGGTGATGCGGTTTTGGCAGTACACCAATGGGCGTGGATAGCGGTTTGACTCACGGGGATTTCCAAG | |
| | | TCTCCACCCCATTGACGTCAATGGGAGTTTGTTTTGGCACCAAAATCAACGGGACTTTCCAAAATGTCG | |
| | | TAATAACCCCGCCCCGTTGACGCAAATGGGCGGTAGGCGTGTACGGTGGGAGGTCTATATAAGCAGA | |
| | | GCTCGTTTAGTGAACCGTC (SEQ ID NO: 18791) | |
| | 428 nt | AATAGGGACTTTCCATTGACGTCAATGGGTGGAGTATTTACGGTAAACTGCCCACTTGGCAGTACATC | 0 nt Homology 1 |
| | | AAGTGTATCATATGCCAAGTCCGCCCCCTATTGACGTCAATGACGGTAAATGGCCCGCCTGGCATTAT | |
| | | GCCCAGTACATGACCTTACGGGACTTTCCTACTTGGCAGTACATCTACGTATTAGTCATCGCTATTACCA | |
| | | TGGTGATGCGGTTTTGGCAGTACACCAATGGGCGTGGATAGCGGTTTGACTCACGGGGATTTCCAAG | |
| | | TCTCCACCCCATTGACGTCAATGGGAGTTTGTTTTGGCACCAAAATCAACGGGACTTTCCAAAATGTCG | |
| | | TAATAACCCCGCCCCGTTGACGCAAATGGGCGGTAGGCGTGTACGGTGGGAGGTCTATATAAGCAGA | |
| | | GCTCGTTTAGTGAACCGTC (SEQ ID NO: 18792) | |
| | 427 nt | ATAGGGACTTTCCATTGACGTCAATGGGTGGAGTATTTACGGTAAACTGCCCACTTGGCAGTACATCA | 0 nt Homology 1 |
| | | AGTGTATCATATGCCAAGTCCGCCCCCTATTGACGTCAATGACGGTAAATGGCCCGCCTGGCATTATGC | |
| | | CCAGTACATGACCTTACGGGACTTTCCTACTTGGCAGTACATCTACGTATTAGTCATCGCTATTACCATG | |
| | | GTGATGCGGTTTTGGCAGTACACCAATGGGCGTGGATAGCGGTTTGACTCACGGGGATTTCCAAGTCT | |
| | | CCACCCCATTGACGTCAATGGGAGTTTGTTTTGGCACCAAAATCAACGGGACTTTCCAAAATGTCGTAA | |
| | | TAACCCCGCCCCGTTGACGCAAATGGGCGGTAGGCGTGTACGGTGGGAGGTCTATATAAGCAGAGCT | |
| | | CGTTTAGTGAACCGTC (SEQ ID NO: 18793) | |
| | 426 nt | TAGGGACTTTCCATTGACGTCAATGGGTGGAGTATTTACGGTAAACTGCCCACTTGGCAGTACATCAA | 0 nt Homology 1 |
| | | GTGTATCATATGCCAAGTCCGCCCCCTATTGACGTCAATGACGGTAAATGGCCCGCCTGGCATTATGCC | |
| | | CAGTACATGACCTTACGGGACTTTCCTACTTGGCAGTACATCTACGTATTAGTCATCGCTATTACCATG | |
| | | GTGATGCGGTTTTGGCAGTACACCAATGGGCGTGGATAGCGGTTTGACTCACGGGGATTTCCAAGTCT | |
| | | CCACCCCATTGACGTCAATGGGAGTTTGTTTTGGCACCAAAATCAACGGGACTTTCCAAAATGTCGTAA | |
| | | TAACCCCGCCCCGTTGACGCAAATGGGCGGTAGGCGTGTACGGTGGGAGGTCTATATAAGCAGAGCT | |
| | | CGTTTAGTGAACCGTC (SEQ ID NO: 18794) | |
| | 425 nt | AGGGACTTTCCATTGACGTCAATGGGTGGAGTATTTACGGTAAACTGCCCACTTGGCAGTACATCAAG | 0 nt Homology 1 |
| | | TGTATCATATGCCAAGTCCGCCCCCTATTGACGTCAATGACGGTAAATGGCCCGCCTGGCATTATGCCC | |
| | | AGTACATGACCTTACGGGACTTTCCTACTTGGCAGTACATCTACGTATTAGTCATCGCTATTACCATGGT | |
| | | GATGCGGTTTTGGCAGTACACCAATGGGCGTGGATAGCGGTTTGACTCACGGGGATTTCCAAGTCTCC | |
| | | ACCCCATTGACGTCAATGGGAGTTTGTTTTGGCACCAAAATCAACGGGACTTTCCAAAATGTCGTAATA | |
| | | ACCCCGCCCCGTTGACGCAAATGGGCGGTAGGCGTGTACGGTGGGAGGTCTATATAAGCAGAGCTCG | |
| | | TTTAGTGAACCGTC (SEQ ID NO: 18795) | |
| | 424 nt | GGGACTTTCCATTGACGTCAATGGGTGGAGTATTTACGGTAAACTGCCCACTTGGCAGTACATCAAGT | 0 nt Homology 1 |
| | | GTATCATATGCCAAGTCCGCCCCCTATTGACGTCAATGACGGTAAATGGCCCGCCTGGCATTATGCCCA | |
| | | GTACATGACCTTACGGGACTTTCCTACTTGGCAGTACATCTACGTATTAGTCATCGCTATTACCATGGT | |
| | | GATGCGGTTTTGGCAGTACACCAATGGGCGTGGATAGCGGTTTGACTCACGGGGATTTCCAAGTCTCC | |
| | | ACCCCATTGACGTCAATGGGAGTTTGTTTTGGCACCAAAATCAACGGGACTTTCCAAAATGTCGTAATA | |
| | | ACCCCGCCCCGTTGACGCAAATGGGCGGTAGGCGTGTACGGTGGGAGGTCTATATAAGCAGAGCTCG | |
| | | TTTAGTGAACCGTC (SEQ ID NO: 18796) | |
| | 423 nt | GGACTTTCCATTGACGTCAATGGGTGGAGTATTTACGGTAAACTGCCCACTTGGCAGTACATCAAGTG | 0 nt Homology 1 |
| | | TATCATATGCCAAGTCCGCCCCCTATTGACGTCAATGACGGTAAATGGCCCGCCTGGCATTATGCCCAG | |
| | | TACATGACCTTACGGGACTTTCCTACTTGGCAGTACATCTACGTATTAGTCATCGCTATTACCATGGTGA | |
| | | TGCGGTTTTGGCAGTACACCAATGGGCGTGGATAGCGGTTTGACTCACGGGGATTTCCAAGTCTCCAC | |
| | | CCCATTGACGTCAATGGGAGTTTGTTTTGGCACCAAAATCAACGGGACTTTCCAAAATGTCGTAATAAC | |
| | | CCCGCCCCGTTGACGCAAATGGGCGGTAGGCGTGTACGGTGGGAGGTCTATATAAGCAGAGCTCGTT | |
| | | TAGTGAACCGTC (SEQ ID NO: 18797) | |
| | 422 nt | GACTTTCCATTGACGTCAATGGGTGGAGTATTTACGGTAAACTGCCCACTTGGCAGTACATCAAGTGT | 0 nt Homology 1 |
| | | ATCATATGCCAAGTCCGCCCCCTATTGACGTCAATGACGGTAAATGGCCCGCCTGGCATTATGCCCAGT | |
| | | ACATGACCTTACGGGACTTTCCTACTTGGCAGTACATCTACGTATTAGTCATCGCTATTACCATGGTGAT | |
| | | GCGGTTTTGGCAGTACACCAATGGGCGTGGATAGCGGTTTGACTCACGGGGATTTCCAAGTCTCCACC | |
| | | CCATTGACGTCAATGGGAGTTTGTTTTGGCACCAAAATCAACGGGACTTTCCAAAATGTCGTAATAACC | |
| | | CCGCCCCGTTGACGCAAATGGGCGGTAGGCGTGTACGGTGGGAGGTCTATATAAGCAGAGCTCGTTT | |
| | | AGTGAACCGTC (SEQ ID NO: 18798) | |
| | 421 nt | ACTTTCCATTGACGTCAATGGGTGGAGTATTTACGGTAAACTGCCCACTTGGCAGTACATCAAGTGTAT | 0 nt Homology 1 |
| | | CATATGCCAAGTCCGCCCCCTATTGACGTCAATGACGGTAAATGGCCCGCCTGGCATTATGCCCAGTAC | |
| | | ATGACCTTACGGGACTTTCCTACTTGGCAGTACATCTACGTATTAGTCATCGCTATTACCATGGTGATG | |
| | | CGGTTTTGGCAGTACACCAATGGGCGTGGATAGCGGTTTGACTCACGGGGATTTCCAAGTCTCCACCC | |
| | | CATTGACGTCAATGGGAGTTTGTTTTGGCACCAAAATCAACGGGACTTTCCAAAATGTCGTAATAACCC | |
| | | CGCCCCGTTGACGCAAATGGGCGGTAGGCGTGTACGGTGGGAGGTCTATATAAGCAGAGCTCGTTTA | |
| | | GTGAACCGTC (SEQ ID NO: 18799) | |
| | 420 nt | CTTTCCATTGACGTCAATGGGTGGAGTATTTACGGTAAACTGCCCACTTGGCAGTACATCAAGTGTATC | 0 nt Homology 1 |
| | | ATATGCCAAGTCCGCCCCCTATTGACGTCAATGACGGTAAATGGCCCGCCTGGCATTATGCCCAGTAC | |
| | | ATGACCTTACGGGACTTTCCTACTTGGCAGTACATCTACGTATTAGTCATCGCTATTACCATGGTGATG | |
| | | CGGTTTTGGCAGTACACCAATGGGCGTGGATAGCGGTTTGACTCACGGGGATTTCCAAGTCTCCACCC | |
| | | CATTGACGTCAATGGGAGTTTGTTTTGGCACCAAAATCAACGGGACTTTCCAAAATGTCGTAATAACCC | |
| | | CGCCCCGTTGACGCAAATGGGCGGTAGGCGTGTACGGTGGGAGGTCTATATAAGCAGAGCTCGTTTA | |
| | | GTGAACCGTC (SEQ ID NO: 18800) | |
| | 419 nt | TTTCCATTGACGTCAATGGGTGGAGTATTTACGGTAAACTGCCCACTTGGCAGTACATCAAGTGTATCA | 0 nt Homology 1 |
| | | TATGCCAAGTCCGCCCCCTATTGACGTCAATGACGGTAAATGGCCCGCCTGGCATTATGCCCAGTACAT | |
| | | GACCTTACGGGACTTTCCTACTTGGCAGTACATCTACGTATTAGTCATCGCTATTACCATGGTGATGCG | |
| | | GTTTTGGCAGTACACCAATGGGCGTGGATAGCGGTTTGACTCACGGGGATTTCCAAGTCTCCACCCCA | |
| | | TTGACGTCAATGGGAGTTTGTTTTGGCACCAAAATCAACGGGACTTTCCAAAATGTCGTAATAACCCCG | |
| | | CCCCGTTGACGCAAATGGGCGGTAGGCGTGTACGGTGGGAGGTCTATATAAGCAGAGCTCGTTTAGT | |
| | | GAACCGTC (SEQ ID NO: 18801) | |
| | 418 nt | TTCCATTGACGTCAATGGGTGGAGTATTTACGGTAAACTGCCCACTTGGCAGTACATCAAGTGTATCAT | 0 nt Homology 1 |
| | | ATGCCAAGTCCGCCCCCTATTGACGTCAATGACGGTAAATGGCCCGCCTGGCATTATGCCCAGTACAT | |
| | | GACCTTACGGGACTTTCCTACTTGGCAGTACATCTACGTATTAGTCATCGCTATTACCATGGTGATGCG | |
| | | GTTTTGGCAGTACACCAATGGGCGTGGATAGCGGTTTGACTCACGGGGATTTCCAAGTCTCCACCCCA | |
| | | TTGACGTCAATGGGAGTTTGTTTTGGCACCAAAATCAACGGGACTTTCCAAAATGTCGTAATAACCCCG | |
| | | CCCCGTTGACGCAAATGGGCGGTAGGCGTGTACGGTGGGAGGTCTATATAAGCAGAGCTCGTTTAGT | |
| | | GAACCGTC (SEQ ID NO: 18802) | |
| | 417 nt | TCCATTGACGTCAATGGGTGGAGTATTTACGGTAAACTGCCCACTTGGCAGTACATCAAGTGTATCATA | 0 nt Homology 1 |
| | | TGCCAAGTCCGCCCCCTATTGACGTCAATGACGGTAAATGGCCCGCCTGGCATTATGCCCAGTACATG | |
| | | ACCTTACGGGACTTTCCTACTTGGCAGTACATCTACGTATTAGTCATCGCTATTACCATGGTGATGCGG | |
| | | TTTTGGCAGTACACCAATGGGCGTGGATAGCGGTTTGACTCACGGGGATTTCCAAGTCTCCACCCCATT | |
| | | GACGTCAATGGGAGTTTGTTTTGGCACCAAAATCAACGGGACTTTCCAAAATGTCGTAATAACCCCGC | |
| | | CCCGTTGACGCAAATGGGCGGTAGGCGTGTACGGTGGGAGGTCTATATAAGCAGAGCTCGTTTAGTG | |
| | | AACCGTC (SEQ ID NO: 18803) | |
| | 416 nt | CCATTGACGTCAATGGGTGGAGTATTTACGGTAAACTGCCCACTTGGCAGTACATCAAGTGTATCATAT | 0 nt Homology 1 |
| | | GCCAAGTCCGCCCCCTATTGACGTCAATGACGGTAAATGGCCCGCCTGGCATTATGCCCAGTACATGA | |
| | | CCTTACGGGACTTTCCTACTTGGCAGTACATCTACGTATTAGTCATCGCTATTACCATGGTGATGCGGT | |
| | | TTTGGCAGTACACCAATGGGCGTGGATAGCGGTTTGACTCACGGGGATTTCCAAGTCTCCACCCCATT | |
| | | GACGTCAATGGGAGTTTGTTTTGGCACCAAAATCAACGGGACTTTCCAAAATGTCGTAATAACCCCGC | |
| | | CCCGTTGACGCAAATGGGCGGTAGGCGTGTACGGTGGGAGGTCTATATAAGCAGAGCTCGTTTAGTG | |
| | | AACCGTC (SEQ ID NO: 18804) | |
| | 415 nt | CATTGACGTCAATGGGTGGAGTATTTACGGTAAACTGCCCACTTGGCAGTACATCAAGTGTATCATAT | 0 nt Homology 1 |
| | | GCCAAGTCCGCCCCCTATTGACGTCAATGACGGTAAATGGCCCGCCTGGCATTATGCCCAGTACATGA | |
| | | CCTTACGGGACTTTCCTACTTGGCAGTACATCTACGTATTAGTCATCGCTATTACCATGGTGATGCGGT | |
| | | TTTGGCAGTACACCAATGGGCGTGGATAGCGGTTTGACTCACGGGGATTTCCAAGTCTCCACCCCATT | |
| | | GACGTCAATGGGAGTTTGTTTTGGCACCAAAATCAACGGGACTTTCCAAAATGTCGTAATAACCCCGC | |
| | | CCCGTTGACGCAAATGGGCGGTAGGCGTGTACGGTGGGAGGTCTATATAAGCAGAGCTCGTTTAGTG | |
| | | AACCGTC (SEQ ID NO: 18805) | |
| | 414 nt | ATTGACGTCAATGGGTGGAGTATTTACGGTAAACTGCCCACTTGGCAGTACATCAAGTGTATCATATG | 0 nt Homology 1 |
| | | CCAAGTCCGCCCCCTATTGACGTCAATGACGGTAAATGGCCCGCCTGGCATTATGCCCAGTACATGAC | |
| | | CTTACGGGACTTTCCTACTTGGCAGTACATCTACGTATTAGTCATCGCTATTACCATGGTGATGCGGTTT | |
| | | TGGCAGTACACCAATGGGCGTGGATAGCGGTTTGACTCACGGGGATTTCCAAGTCTCCACCCCATTGA | |
| | | CGTCAATGGGAGTTTGTTTTGGCACCAAAATCAACGGGACTTTCCAAAATGTCGTAATAACCCCGCCCC | |
| | | GTTGACGCAAATGGGCGGTAGGCGTGTACGGTGGGAGGTCTATATAAGCAGAGCTCGTTTAGTGAAC | |
| | | CGTC (SEQ ID NO: 18806) | |
| | 413 nt | TTGACGTCAATGGGTGGAGTATTTACGGTAAACTGCCCACTTGGCAGTACATCAAGTGTATCATATGC | 0 nt Homology 1 |
| | | CAAGTCCGCCCCCTATTGACGTCAATGACGGTAAATGGCCCGCCTGGCATTATGCCCAGTACATGACCT | |
| | | TACGGGACTTTCCTACTTGGCAGTACATCTACGTATTAGTCATCGCTATTACCATGGTGATGCGGTTTT | |
| | | GGCAGTACACCAATGGGCGTGGATAGCGGTTTGACTCACGGGGATTTCCAAGTCTCCACCCCATTGAC | |
| | | GTCAATGGGAGTTTGTTTTGGCACCAAAATCAACGGGACTTTCCAAAATGTCGTAATAACCCCGCCCC | |
| | | GTTGACGCAAATGGGCGGTAGGCGTGTACGGTGGGAGGTCTATATAAGCAGAGCTCGTTTAGTGAAC | |
| | | CGTC (SEQ ID NO: 18807) | |
| | 412 nt | TGACGTCAATGGGTGGAGTATTTACGGTAAACTGCCCACTTGGCAGTACATCAAGTGTATCATATGCC | 0 nt Homology 1 |
| | | AAGTCCGCCCCCTATTGACGTCAATGACGGTAAATGGCCCGCCTGGCATTATGCCCAGTACATGACCTT | |
| | | ACGGGACTTTCCTACTTGGCAGTACATCTACGTATTAGTCATCGCTATTACCATGGTGATGCGGTTTTG | |
| | | GCAGTACACCAATGGGCGTGGATAGCGGTTTGACTCACGGGGATTTCCAAGTCTCCACCCCATTGACG | |
| | | TCAATGGGAGTTTGTTTTGGCACCAAAATCAACGGGACTTTCCAAAATGTCGTAATAACCCCGCCCCGT | |
| | | TGACGCAAATGGGCGGTAGGCGTGTACGGTGGGAGGTCTATATAAGCAGAGCTCGTTTAGTGAACCG | |
| | | TC (SEQ ID NO: 18808) | |
| | 411 nt | GACGTCAATGGGTGGAGTATTTACGGTAAACTGCCCACTTGGCAGTACATCAAGTGTATCATATGCCA | 0 nt Homology 1 |
| | | AGTCCGCCCCCTATTGACGTCAATGACGGTAAATGGCCCGCCTGGCATTATGCCCAGTACATGACCTTA | |
| | | CGGGACTTTCCTACTTGGCAGTACATCTACGTATTAGTCATCGCTATTACCATGGTGATGCGGTTTTGG | |
| | | CAGTACACCAATGGGCGTGGATAGCGGTTTGACTCACGGGGATTTCCAAGTCTCCACCCCATTGACGT | |
| | | CAATGGGAGTTTGTTTTGGCACCAAAATCAACGGGACTTTCCAAAATGTCGTAATAACCCCGCCCCGTT | |
| | | GACGCAAATGGGCGGTAGGCGTGTACGGTGGGAGGTCTATATAAGCAGAGCTCGTTTAGTGAACCGT | |
| | | C (SEQ ID NO: 18809) | |
| | 410 nt | ACGTCAATGGGTGGAGTATTTACGGTAAACTGCCCACTTGGCAGTACATCAAGTGTATCATATGCCAA | 0 nt Homology 1 |
| | | GTCCGCCCCCTATTGACGTCAATGACGGTAAATGGCCCGCCTGGCATTATGCCCAGTACATGACCTTAC | |
| | | GGGACTTTCCTACTTGGCAGTACATCTACGTATTAGTCATCGCTATTACCATGGTGATGCGGTTTTGGC | |
| | | AGTACACCAATGGGCGTGGATAGCGGTTTGACTCACGGGGATTTCCAAGTCTCCACCCCATTGACGTC | |
| | | AATGGGAGTTTGTTTTGGCACCAAAATCAACGGGACTTTCCAAAATGTCGTAATAACCCCGCCCCGTTG | |
| | | ACGCAAATGGGCGGTAGGCGTGTACGGTGGGAGGTCTATATAAGCAGAGCTCGTTTAGTGAACCGTC | |
| | | (SEQ ID NO: 18810) | |
| | 409 nt | CGTCAATGGGTGGAGTATTTACGGTAAACTGCCCACTTGGCAGTACATCAAGTGTATCATATGCCAAG | 0 nt Homology 1 |
| | | TCCGCCCCCTATTGACGTCAATGACGGTAAATGGCCCGCCTGGCATTATGCCCAGTACATGACCTTACG | |
| | | GGACTTTCCTACTTGGCAGTACATCTACGTATTAGTCATCGCTATTACCATGGTGATGCGGTTTTGGCA | |
| | | GTACACCAATGGGCGTGGATAGCGGTTTGACTCACGGGGATTTCCAAGTCTCCACCCCATTGACGTCA | |
| | | ATGGGAGTTTGTTTTGGCACCAAAATCAACGGGACTTTCCAAAATGTCGTAATAACCCCGCCCCGTTGA | |
| | | CGCAAATGGGCGGTAGGCGTGTACGGTGGGAGGTCTATATAAGCAGAGCTCGTTTAGTGAACCGTC | |
| | | (SEQ ID NO: 18811) | |
| | 408 nt | GTCAATGGGTGGAGTATTTACGGTAAACTGCCCACTTGGCAGTACATCAAGTGTATCATATGCCAAGT | 0 nt Homology 1 |
| | | CCGCCCCCTATTGACGTCAATGACGGTAAATGGCCCGCCTGGCATTATGCCCAGTACATGACCTTACG | |
| | | GGACTTTCCTACTTGGCAGTACATCTACGTATTAGTCATCGCTATTACCATGGTGATGCGGTTTTGGCA | |
| | | GTACACCAATGGGCGTGGATAGCGGTTTGACTCACGGGGATTTCCAAGTCTCCACCCCATTGACGTCA | |
| | | ATGGGAGTTTGTTTTGGCACCAAAATCAACGGGACTTTCCAAAATGTCGTAATAACCCCGCCCCGTTGA | |
| | | CGCAAATGGGCGGTAGGCGTGTACGGTGGGAGGTCTATATAAGCAGAGCTCGTTTAGTGAACCGTC | |
| | | (SEQ ID NO: 18812) | |
| | 407 nt | TCAATGGGTGGAGTATTTACGGTAAACTGCCCACTTGGCAGTACATCAAGTGTATCATATGCCAAGTC | 0 nt Homology 1 |
| | | CGCCCCCTATTGACGTCAATGACGGTAAATGGCCCGCCTGGCATTATGCCCAGTACATGACCTTACGG | |
| | | GACTTTCCTACTTGGCAGTACATCTACGTATTAGTCATCGCTATTACCATGGTGATGCGGTTTTGGCAG | |
| | | TACACCAATGGGCGTGGATAGCGGTTTGACTCACGGGGATTTCCAAGTCTCCACCCCATTGACGTCAA | |
| | | TGGGAGTTTGTTTTGGCACCAAAATCAACGGGACTTTCCAAAATGTCGTAATAACCCCGCCCCGTTGAC | |
| | | GCAAATGGGCGGTAGGCGTGTACGGTGGGAGGTCTATATAAGCAGAGCTCGTTTAGTGAACCGTC | |
| | | (SEQ ID NO: 18813) | |
| | 406 nt | CAATGGGTGGAGTATTTACGGTAAACTGCCCACTTGGCAGTACATCAAGTGTATCATATGCCAAGTCC | 0 nt Homology 1 |
| | | GCCCCCTATTGACGTCAATGACGGTAAATGGCCCGCCTGGCATTATGCCCAGTACATGACCTTACGGG | |
| | | ACTTTCCTACTTGGCAGTACATCTACGTATTAGTCATCGCTATTACCATGGTGATGCGGTTTTGGCAGT | |
| | | ACACCAATGGGCGTGGATAGCGGTTTGACTCACGGGGATTTCCAAGTCTCCACCCCATTGACGTCAAT | |
| | | GGGAGTTTGTTTTGGCACCAAAATCAACGGGACTTTCCAAAATGTCGTAATAACCCCGCCCCGTTGAC | |
| | | GCAAATGGGCGGTAGGCGTGTACGGTGGGAGGTCTATATAAGCAGAGCTCGTTTAGTGAACCGTC | |
| | | (SEQ ID NO: 18814) | |
| | 405 nt | AATGGGTGGAGTATTTACGGTAAACTGCCCACTTGGCAGTACATCAAGTGTATCATATGCCAAGTCCG | 0 nt Homology 1 |
| | | CCCCCTATTGACGTCAATGACGGTAAATGGCCCGCCTGGCATTATGCCCAGTACATGACCTTACGGGA | |
| | | CTTTCCTACTTGGCAGTACATCTACGTATTAGTCATCGCTATTACCATGGTGATGCGGTTTTGGCAGTAC | |
| | | ACCAATGGGCGTGGATAGCGGTTTGACTCACGGGGATTTCCAAGTCTCCACCCCATTGACGTCAATGG | |
| | | GAGTTTGTTTTGGCACCAAAATCAACGGGACTTTCCAAAATGTCGTAATAACCCCGCCCCGTTGACGCA | |
| | | AATGGGCGGTAGGCGTGTACGGTGGGAGGTCTATATAAGCAGAGCTCGTTTAGTGAACCGTC (SEQ | |
| | | ID NO: 18815) | |
| | 404 nt | ATGGGTGGAGTATTTACGGTAAACTGCCCACTTGGCAGTACATCAAGTGTATCATATGCCAAGTCCGC | 0 nt Homology 1 |
| | | CCCCTATTGACGTCAATGACGGTAAATGGCCCGCCTGGCATTATGCCCAGTACATGACCTTACGGGAC | |
| | | TTTCCTACTTGGCAGTACATCTACGTATTAGTCATCGCTATTACCATGGTGATGCGGTTTTGGCAGTAC | |
| | | ACCAATGGGCGTGGATAGCGGTTTGACTCACGGGGATTTCCAAGTCTCCACCCCATTGACGTCAATGG | |
| | | GAGTTTGTTTTGGCACCAAAATCAACGGGACTTTCCAAAATGTCGTAATAACCCCGCCCCGTTGACGCA | |
| | | AATGGGCGGTAGGCGTGTACGGTGGGAGGTCTATATAAGCAGAGCTCGTTTAGTGAACCGTC (SEQ | |
| | | ID NO: 18816) | |
| | 403 nt | TGGGTGGAGTATTTACGGTAAACTGCCCACTTGGCAGTACATCAAGTGTATCATATGCCAAGTCCGCC | 0 nt Homology 1 |
| | | CCCTATTGACGTCAATGACGGTAAATGGCCCGCCTGGCATTATGCCCAGTACATGACCTTACGGGACTT | |
| | | TCCTACTTGGCAGTACATCTACGTATTAGTCATCGCTATTACCATGGTGATGCGGTTTTGGCAGTACAC | |
| | | CAATGGGCGTGGATAGCGGTTTGACTCACGGGGATTTCCAAGTCTCCACCCCATTGACGTCAATGGGA | |
| | | GTTTGTTTTGGCACCAAAATCAACGGGACTTTCCAAAATGTCGTAATAACCCCGCCCCGTTGACGCAAA | |
| | | TGGGCGGTAGGCGTGTACGGTGGGAGGTCTATATAAGCAGAGCTCGTTTAGTGAACCGTC (SEQ ID | |
| | | NO: 18817) | |
| | 402 nt | GGGTGGAGTATTTACGGTAAACTGCCCACTTGGCAGTACATCAAGTGTATCATATGCCAAGTCCGCCC | 0 nt Homology 1 |
| | | CCTATTGACGTCAATGACGGTAAATGGCCCGCCTGGCATTATGCCCAGTACATGACCTTACGGGACTTT | |
| | | CCTACTTGGCAGTACATCTACGTATTAGTCATCGCTATTACCATGGTGATGCGGTTTTGGCAGTACACC | |
| | | AATGGGCGTGGATAGCGGTTTGACTCACGGGGATTTCCAAGTCTCCACCCCATTGACGTCAATGGGAG | |
| | | TTTGTTTTGGCACCAAAATCAACGGGACTTTCCAAAATGTCGTAATAACCCCGCCCCGTTGACGCAAAT | |
| | | GGGCGGTAGGCGTGTACGGTGGGAGGTCTATATAAGCAGAGCTCGTTTAGTGAACCGTC (SEQ ID | |
| | | NO: 18818) | |
| | 401 nt | GGTGGAGTATTTACGGTAAACTGCCCACTTGGCAGTACATCAAGTGTATCATATGCCAAGTCCGCCCC | 0 nt Homology 1 |
| | | CTATTGACGTCAATGACGGTAAATGGCCCGCCTGGCATTATGCCCAGTACATGACCTTACGGGACTTTC | |
| | | CTACTTGGCAGTACATCTACGTATTAGTCATCGCTATTACCATGGTGATGCGGTTTTGGCAGTACACCA | |
| | | ATGGGCGTGGATAGCGGTTTGACTCACGGGGATTTCCAAGTCTCCACCCCATTGACGTCAATGGGAGT | |
| | | TTGTTTTGGCACCAAAATCAACGGGACTTTCCAAAATGTCGTAATAACCCCGCCCCGTTGACGCAAATG | |
| | | GGCGGTAGGCGTGTACGGTGGGAGGTCTATATAAGCAGAGCTCGTTTAGTGAACCGTC (SEQ ID NO: | |
| | | 18819) | |
| | 400 nt | GTGGAGTATTTACGGTAAACTGCCCACTTGGCAGTACATCAAGTGTATCATATGCCAAGTCCGCCCCCT | 0 nt Homology 1 |
| | | ATTGACGTCAATGACGGTAAATGGCCCGCCTGGCATTATGCCCAGTACATGACCTTACGGGACTTTCCT | |
| | | ACTTGGCAGTACATCTACGTATTAGTCATCGCTATTACCATGGTGATGCGGTTTTGGCAGTACACCAAT | |
| | | GGGCGTGGATAGCGGTTTGACTCACGGGGATTTCCAAGTCTCCACCCCATTGACGTCAATGGGAGTTT | |
| | | GTTTTGGCACCAAAATCAACGGGACTTTCCAAAATGTCGTAATAACCCCGCCCCGTTGACGCAAATGG | |
| | | GCGGTAGGCGTGTACGGTGGGAGGTCTATATAAGCAGAGCTCGTTTAGTGAACCGTC (SEQ ID NO: | |
| | | 18820) | |
| | 399 nt | TGGAGTATTTACGGTAAACTGCCCACTTGGCAGTACATCAAGTGTATCATATGCCAAGTCCGCCCCCTA | 0 nt Homology 1 |
| | | TTGACGTCAATGACGGTAAATGGCCCGCCTGGCATTATGCCCAGTACATGACCTTACGGGACTTTCCTA | |
| | | CTTGGCAGTACATCTACGTATTAGTCATCGCTATTACCATGGTGATGCGGTTTTGGCAGTACACCAATG | |
| | | GGCGTGGATAGCGGTTTGACTCACGGGGATTTCCAAGTCTCCACCCCATTGACGTCAATGGGAGTTTG | |
| | | TTTTGGCACCAAAATCAACGGGACTTTCCAAAATGTCGTAATAACCCCGCCCCGTTGACGCAAATGGG | |
| | | CGGTAGGCGTGTACGGTGGGAGGTCTATATAAGCAGAGCTCGTTTAGTGAACCGTC (SEQ ID NO: | |
| | | 18821) | |
| | 398 nt | GGAGTATTTACGGTAAACTGCCCACTTGGCAGTACATCAAGTGTATCATATGCCAAGTCCGCCCCCTAT | 0 nt Homology 1 |
| | | TGACGTCAATGACGGTAAATGGCCCGCCTGGCATTATGCCCAGTACATGACCTTACGGGACTTTCCTAC | |
| | | TTGGCAGTACATCTACGTATTAGTCATCGCTATTACCATGGTGATGCGGTTTTGGCAGTACACCAATGG | |
| | | GCGTGGATAGCGGTTTGACTCACGGGGATTTCCAAGTCTCCACCCCATTGACGTCAATGGGAGTTTGT | |
| | | TTTGGCACCAAAATCAACGGGACTTTCCAAAATGTCGTAATAACCCCGCCCCGTTGACGCAAATGGGC | |
| | | GGTAGGCGTGTACGGTGGGAGGTCTATATAAGCAGAGCTCGTTTAGTGAACCGTC (SEQ ID NO: | |
| | | 18822) | |
| | 397 nt | GAGTATTTACGGTAAACTGCCCACTTGGCAGTACATCAAGTGTATCATATGCCAAGTCCGCCCCCTATT | 0 nt Homology 1 |
| | | GACGTCAATGACGGTAAATGGCCCGCCTGGCATTATGCCCAGTACATGACCTTACGGGACTTTCCTACT | |
| | | TGGCAGTACATCTACGTATTAGTCATCGCTATTACCATGGTGATGCGGTTTTGGCAGTACACCAATGGG | |
| | | CGTGGATAGCGGTTTGACTCACGGGGATTTCCAAGTCTCCACCCCATTGACGTCAATGGGAGTTTGTTT | |
| | | TGGCACCAAAATCAACGGGACTTTCCAAAATGTCGTAATAACCCCGCCCCGTTGACGCAAATGGGCGG | |
| | | TAGGCGTGTACGGTGGGAGGTCTATATAAGCAGAGCTCGTTTAGTGAACCGTC (SEQ ID NO: 18823) | |
| | 396 nt | AGTATTTACGGTAAACTGCCCACTTGGCAGTACATCAAGTGTATCATATGCCAAGTCCGCCCCCTATTG | 0 nt Homology 1 |
| | | ACGTCAATGACGGTAAATGGCCCGCCTGGCATTATGCCCAGTACATGACCTTACGGGACTTTCCTACTT | |
| | | GGCAGTACATCTACGTATTAGTCATCGCTATTACCATGGTGATGCGGTTTTGGCAGTACACCAATGGG | |
| | | CGTGGATAGCGGTTTGACTCACGGGGATTTCCAAGTCTCCACCCCATTGACGTCAATGGGAGTTTGTTT | |
| | | TGGCACCAAAATCAACGGGACTTTCCAAAATGTCGTAATAACCCCGCCCCGTTGACGCAAATGGGCGG | |
| | | TAGGCGTGTACGGTGGGAGGTCTATATAAGCAGAGCTCGTTTAGTGAACCGTC (SEQ ID NO: 18824) | |
| | 395 nt | GTATTTACGGTAAACTGCCCACTTGGCAGTACATCAAGTGTATCATATGCCAAGTCCGCCCCCTATTGA | 0 nt Homology 1 |
| | | CGTCAATGACGGTAAATGGCCCGCCTGGCATTATGCCCAGTACATGACCTTACGGGACTTTCCTACTTG | |
| | | GCAGTACATCTACGTATTAGTCATCGCTATTACCATGGTGATGCGGTTTTGGCAGTACACCAATGGGC | |
| | | GTGGATAGCGGTTTGACTCACGGGGATTTCCAAGTCTCCACCCCATTGACGTCAATGGGAGTTTGTTTT | |
| | | GGCACCAAAATCAACGGGACTTTCCAAAATGTCGTAATAACCCCGCCCCGTTGACGCAAATGGGCGGT | |
| | | AGGCGTGTACGGTGGGAGGTCTATATAAGCAGAGCTCGTTTAGTGAACCGTC (SEQ ID NO: 18825) | |
| | 394 nt | TATTTACGGTAAACTGCCCACTTGGCAGTACATCAAGTGTATCATATGCCAAGTCCGCCCCCTATTGAC | 0 nt Homology 1 |
| | | GTCAATGACGGTAAATGGCCCGCCTGGCATTATGCCCAGTACATGACCTTACGGGACTTTCCTACTTGG | |
| | | CAGTACATCTACGTATTAGTCATCGCTATTACCATGGTGATGCGGTTTTGGCAGTACACCAATGGGCGT | |
| | | GGATAGCGGTTTGACTCACGGGGATTTCCAAGTCTCCACCCCATTGACGTCAATGGGAGTTTGTTTTG | |
| | | GCACCAAAATCAACGGGACTTTCCAAAATGTCGTAATAACCCCGCCCCGTTGACGCAAATGGGCGGTA | |
| | | GGCGTGTACGGTGGGAGGTCTATATAAGCAGAGCTCGTTTAGTGAACCGTC (SEQ ID NO: 18826) | |
| | 393 nt | ATTTACGGTAAACTGCCCACTTGGCAGTACATCAAGTGTATCATATGCCAAGTCCGCCCCCTATTGACG | 0 nt Homology 1 |
| | | TCAATGACGGTAAATGGCCCGCCTGGCATTATGCCCAGTACATGACCTTACGGGACTTTCCTACTTGGC | |
| | | AGTACATCTACGTATTAGTCATCGCTATTACCATGGTGATGCGGTTTTGGCAGTACACCAATGGGCGTG | |
| | | GATAGCGGTTTGACTCACGGGGATTTCCAAGTCTCCACCCCATTGACGTCAATGGGAGTTTGTTTTGGC | |
| | | ACCAAAATCAACGGGACTTTCCAAAATGTCGTAATAACCCCGCCCCGTTGACGCAAATGGGCGGTAGG | |
| | | CGTGTACGGTGGGAGGTCTATATAAGCAGAGCTCGTTTAGTGAACCGTC (SEQ ID NO: 18827) | |
| | 392 nt | TTTACGGTAAACTGCCCACTTGGCAGTACATCAAGTGTATCATATGCCAAGTCCGCCCCCTATTGACGT | 0 nt Homology 1 |
| | | CAATGACGGTAAATGGCCCGCCTGGCATTATGCCCAGTACATGACCTTACGGGACTTTCCTACTTGGCA | |
| | | GTACATCTACGTATTAGTCATCGCTATTACCATGGTGATGCGGTTTTGGCAGTACACCAATGGGCGTG | |
| | | GATAGCGGTTTGACTCACGGGGATTTCCAAGTCTCCACCCCATTGACGTCAATGGGAGTTTGTTTTGGC | |
| | | ACCAAAATCAACGGGACTTTCCAAAATGTCGTAATAACCCCGCCCCGTTGACGCAAATGGGCGGTAGG | |
| | | CGTGTACGGTGGGAGGTCTATATAAGCAGAGCTCGTTTAGTGAACCGTC (SEQ ID NO: 18828) | |
| | 391 nt | TTACGGTAAACTGCCCACTTGGCAGTACATCAAGTGTATCATATGCCAAGTCCGCCCCCTATTGACGTC | 0 nt Homology 1 |
| | | AATGACGGTAAATGGCCCGCCTGGCATTATGCCCAGTACATGACCTTACGGGACTTTCCTACTTGGCA | |
| | | GTACATCTACGTATTAGTCATCGCTATTACCATGGTGATGCGGTTTTGGCAGTACACCAATGGGCGTG | |
| | | GATAGCGGTTTGACTCACGGGGATTTCCAAGTCTCCACCCCATTGACGTCAATGGGAGTTTGTTTTGGC | |
| | | ACCAAAATCAACGGGACTTTCCAAAATGTCGTAATAACCCCGCCCCGTTGACGCAAATGGGCGGTAGG | |
| | | CGTGTACGGTGGGAGGTCTATATAAGCAGAGCTCGTTTAGTGAACCGTC (SEQ ID NO: 18829) | |
| | 390 nt | TACGGTAAACTGCCCACTTGGCAGTACATCAAGTGTATCATATGCCAAGTCCGCCCCCTATTGACGTCA | 0 nt Homology 1 |
| | | ATGACGGTAAATGGCCCGCCTGGCATTATGCCCAGTACATGACCTTACGGGACTTTCCTACTTGGCAGT | |
| | | ACATCTACGTATTAGTCATCGCTATTACCATGGTGATGCGGTTTTGGCAGTACACCAATGGGCGTGGAT | |
| | | AGCGGTTTGACTCACGGGGATTTCCAAGTCTCCACCCCATTGACGTCAATGGGAGTTTGTTTTGGCACC | |
| | | AAAATCAACGGGACTTTCCAAAATGTCGTAATAACCCCGCCCCGTTGACGCAAATGGGCGGTAGGCGT | |
| | | GTACGGTGGGAGGTCTATATAAGCAGAGCTCGTTTAGTGAACCGTC (SEQ ID NO: 18830) | |
| | 389 nt | ACGGTAAACTGCCCACTTGGCAGTACATCAAGTGTATCATATGCCAAGTCCGCCCCCTATTGACGTCAA | 0 nt Homology 1 |
| | | TGACGGTAAATGGCCCGCCTGGCATTATGCCCAGTACATGACCTTACGGGACTTTCCTACTTGGCAGTA | |
| | | CATCTACGTATTAGTCATCGCTATTACCATGGTGATGCGGTTTTGGCAGTACACCAATGGGCGTGGATA | |
| | | GCGGTTTGACTCACGGGGATTTCCAAGTCTCCACCCCATTGACGTCAATGGGAGTTTGTTTTGGCACCA | |
| | | AAATCAACGGGACTTTCCAAAATGTCGTAATAACCCCGCCCCGTTGACGCAAATGGGCGGTAGGCGTG | |
| | | TACGGTGGGAGGTCTATATAAGCAGAGCTCGTTTAGTGAACCGTC (SEQ ID NO: 18831) | |
| | 388 nt | CGGTAAACTGCCCACTTGGCAGTACATCAAGTGTATCATATGCCAAGTCCGCCCCCTATTGACGTCAAT | 0 nt Homology 1 |
| | | GACGGTAAATGGCCCGCCTGGCATTATGCCCAGTACATGACCTTACGGGACTTTCCTACTTGGCAGTA | |
| | | CATCTACGTATTAGTCATCGCTATTACCATGGTGATGCGGTTTTGGCAGTACACCAATGGGCGTGGATA | |
| | | GCGGTTTGACTCACGGGGATTTCCAAGTCTCCACCCCATTGACGTCAATGGGAGTTTGTTTTGGCACCA | |
| | | AAATCAACGGGACTTTCCAAAATGTCGTAATAACCCCGCCCCGTTGACGCAAATGGGCGGTAGGCGTG | |
| | | TACGGTGGGAGGTCTATATAAGCAGAGCTCGTTTAGTGAACCGTC (SEQ ID NO: 18832) | |
| | 387 nt | GGTAAACTGCCCACTTGGCAGTACATCAAGTGTATCATATGCCAAGTCCGCCCCCTATTGACGTCAATG | 0 nt Homology 1 |
| | | ACGGTAAATGGCCCGCCTGGCATTATGCCCAGTACATGACCTTACGGGACTTTCCTACTTGGCAGTACA | |
| | | TCTACGTATTAGTCATCGCTATTACCATGGTGATGCGGTTTTGGCAGTACACCAATGGGCGTGGATAG | |
| | | CGGTTTGACTCACGGGGATTTCCAAGTCTCCACCCCATTGACGTCAATGGGAGTTTGTTTTGGCACCAA | |
| | | AATCAACGGGACTTTCCAAAATGTCGTAATAACCCCGCCCCGTTGACGCAAATGGGCGGTAGGCGTGT | |
| | | ACGGTGGGAGGTCTATATAAGCAGAGCTCGTTTAGTGAACCGTC (SEQ ID NO: 18833) | |
| | 386 nt | GTAAACTGCCCACTTGGCAGTACATCAAGTGTATCATATGCCAAGTCCGCCCCCTATTGACGTCAATGA | 0 nt Homology 1 |
| | | CGGTAAATGGCCCGCCTGGCATTATGCCCAGTACATGACCTTACGGGACTTTCCTACTTGGCAGTACAT | |
| | | CTACGTATTAGTCATCGCTATTACCATGGTGATGCGGTTTTGGCAGTACACCAATGGGCGTGGATAGC | |
| | | GGTTTGACTCACGGGGATTTCCAAGTCTCCACCCCATTGACGTCAATGGGAGTTTGTTTTGGCACCAAA | |
| | | ATCAACGGGACTTTCCAAAATGTCGTAATAACCCCGCCCCGTTGACGCAAATGGGCGGTAGGCGTGTA | |
| | | CGGTGGGAGGTCTATATAAGCAGAGCTCGTTTAGTGAACCGTC (SEQ ID NO: 18834) | |
| | 385 nt | TAAACTGCCCACTTGGCAGTACATCAAGTGTATCATATGCCAAGTCCGCCCCCTATTGACGTCAATGAC | 0 nt Homology 1 |
| | | GGTAAATGGCCCGCCTGGCATTATGCCCAGTACATGACCTTACGGGACTTTCCTACTTGGCAGTACATC | |
| | | TACGTATTAGTCATCGCTATTACCATGGTGATGCGGTTTTGGCAGTACACCAATGGGCGTGGATAGCG | |
| | | GTTTGACTCACGGGGATTTCCAAGTCTCCACCCCATTGACGTCAATGGGAGTTTGTTTTGGCACCAAAA | |
| | | TCAACGGGACTTTCCAAAATGTCGTAATAACCCCGCCCCGTTGACGCAAATGGGCGGTAGGCGTGTAC | |
| | | GGTGGGAGGTCTATATAAGCAGAGCTCGTTTAGTGAACCGTC (SEQ ID NO: 18835) | |
| | 384 nt | AAACTGCCCACTTGGCAGTACATCAAGTGTATCATATGCCAAGTCCGCCCCCTATTGACGTCAATGACG | 0 nt Homology 1 |
| | | GTAAATGGCCCGCCTGGCATTATGCCCAGTACATGACCTTACGGGACTTTCCTACTTGGCAGTACATCT | |
| | | ACGTATTAGTCATCGCTATTACCATGGTGATGCGGTTTTGGCAGTACACCAATGGGCGTGGATAGCGG | |
| | | TTTGACTCACGGGGATTTCCAAGTCTCCACCCCATTGACGTCAATGGGAGTTTGTTTTGGCACCAAAAT | |
| | | CAACGGGACTTTCCAAAATGTCGTAATAACCCCGCCCCGTTGACGCAAATGGGCGGTAGGCGTGTACG | |
| | | GTGGGAGGTCTATATAAGCAGAGCTCGTTTAGTGAACCGTC (SEQ ID NO: 18836) | |
| | 383 nt | AACTGCCCACTTGGCAGTACATCAAGTGTATCATATGCCAAGTCCGCCCCCTATTGACGTCAATGACGG | 0 nt Homology 1 |
| | | TAAATGGCCCGCCTGGCATTATGCCCAGTACATGACCTTACGGGACTTTCCTACTTGGCAGTACATCTA | |
| | | CGTATTAGTCATCGCTATTACCATGGTGATGCGGTTTTGGCAGTACACCAATGGGCGTGGATAGCGGT | |
| | | TTGACTCACGGGGATTTCCAAGTCTCCACCCCATTGACGTCAATGGGAGTTTGTTTTGGCACCAAAATC | |
| | | AACGGGACTTTCCAAAATGTCGTAATAACCCCGCCCCGTTGACGCAAATGGGCGGTAGGCGTGTACG | |
| | | GTGGGAGGTCTATATAAGCAGAGCTCGTTTAGTGAACCGTC (SEQ ID NO: 18837) | |
| | 382 nt | ACTGCCCACTTGGCAGTACATCAAGTGTATCATATGCCAAGTCCGCCCCCTATTGACGTCAATGACGGT | 0 nt Homology 1 |
| | | AAATGGCCCGCCTGGCATTATGCCCAGTACATGACCTTACGGGACTTTCCTACTTGGCAGTACATCTAC | |
| | | GTATTAGTCATCGCTATTACCATGGTGATGCGGTTTTGGCAGTACACCAATGGGCGTGGATAGCGGTT | |
| | | TGACTCACGGGGATTTCCAAGTCTCCACCCCATTGACGTCAATGGGAGTTTGTTTTGGCACCAAAATCA | |
| | | ACGGGACTTTCCAAAATGTCGTAATAACCCCGCCCCGTTGACGCAAATGGGCGGTAGGCGTGTACGGT | |
| | | GGGAGGTCTATATAAGCAGAGCTCGTTTAGTGAACCGTC (SEQ ID NO: 18838) | |
| | 381 nt | CTGCCCACTTGGCAGTACATCAAGTGTATCATATGCCAAGTCCGCCCCCTATTGACGTCAATGACGGTA | 0 nt Homology 1 |
| | | AATGGCCCGCCTGGCATTATGCCCAGTACATGACCTTACGGGACTTTCCTACTTGGCAGTACATCTACG | |
| | | TATTAGTCATCGCTATTACCATGGTGATGCGGTTTTGGCAGTACACCAATGGGCGTGGATAGCGGTTT | |
| | | GACTCACGGGGATTTCCAAGTCTCCACCCCATTGACGTCAATGGGAGTTTGTTTTGGCACCAAAATCAA | |
| | | CGGGACTTTCCAAAATGTCGTAATAACCCCGCCCCGTTGACGCAAATGGGCGGTAGGCGTGTACGGT | |
| | | GGGAGGTCTATATAAGCAGAGCTCGTTTAGTGAACCGTC (SEQ ID NO: 18839) | |
| | 380 nt | TGCCCACTTGGCAGTACATCAAGTGTATCATATGCCAAGTCCGCCCCCTATTGACGTCAATGACGGTAA | 0 nt Homology 1 |
| | | ATGGCCCGCCTGGCATTATGCCCAGTACATGACCTTACGGGACTTTCCTACTTGGCAGTACATCTACGT | |
| | | ATTAGTCATCGCTATTACCATGGTGATGCGGTTTTGGCAGTACACCAATGGGCGTGGATAGCGGTTTG | |
| | | ACTCACGGGGATTTCCAAGTCTCCACCCCATTGACGTCAATGGGAGTTTGTTTTGGCACCAAAATCAAC | |
| | | GGGACTTTCCAAAATGTCGTAATAACCCCGCCCCGTTGACGCAAATGGGCGGTAGGCGTGTACGGTG | |
| | | GGAGGTCTATATAAGCAGAGCTCGTTTAGTGAACCGTC (SEQ ID NO: 18840) | |
| | 379 nt | GCCCACTTGGCAGTACATCAAGTGTATCATATGCCAAGTCCGCCCCCTATTGACGTCAATGACGGTAAA | 0 nt Homology 1 |
| | | TGGCCCGCCTGGCATTATGCCCAGTACATGACCTTACGGGACTTTCCTACTTGGCAGTACATCTACGTA | |
| | | TTAGTCATCGCTATTACCATGGTGATGCGGTTTTGGCAGTACACCAATGGGCGTGGATAGCGGTTTGA | |
| | | CTCACGGGGATTTCCAAGTCTCCACCCCATTGACGTCAATGGGAGTTTGTTTTGGCACCAAAATCAACG | |
| | | GGACTTTCCAAAATGTCGTAATAACCCCGCCCCGTTGACGCAAATGGGCGGTAGGCGTGTACGGTGG | |
| | | GAGGTCTATATAAGCAGAGCTCGTTTAGTGAACCGTC (SEQ ID NO: 18841) | |
| | 378 nt | CCCACTTGGCAGTACATCAAGTGTATCATATGCCAAGTCCGCCCCCTATTGACGTCAATGACGGTAAAT | 0 nt Homology 1 |
| | | GGCCCGCCTGGCATTATGCCCAGTACATGACCTTACGGGACTTTCCTACTTGGCAGTACATCTACGTAT | |
| | | TAGTCATCGCTATTACCATGGTGATGCGGTTTTGGCAGTACACCAATGGGCGTGGATAGCGGTTTGAC | |
| | | TCACGGGGATTTCCAAGTCTCCACCCCATTGACGTCAATGGGAGTTTGTTTTGGCACCAAAATCAACGG | |
| | | GACTTTCCAAAATGTCGTAATAACCCCGCCCCGTTGACGCAAATGGGCGGTAGGCGTGTACGGTGGG | |
| | | AGGTCTATATAAGCAGAGCTCGTTTAGTGAACCGTC (SEQ ID NO: 18842) | |
| | 377 nt | CCACTTGGCAGTACATCAAGTGTATCATATGCCAAGTCCGCCCCCTATTGACGTCAATGACGGTAAATG | 0 nt Homology 1 |
| | | GCCCGCCTGGCATTATGCCCAGTACATGACCTTACGGGACTTTCCTACTTGGCAGTACATCTACGTATT | |
| | | AGTCATCGCTATTACCATGGTGATGCGGTTTTGGCAGTACACCAATGGGCGTGGATAGCGGTTTGACT | |
| | | CACGGGGATTTCCAAGTCTCCACCCCATTGACGTCAATGGGAGTTTGTTTTGGCACCAAAATCAACGG | |
| | | GACTTTCCAAAATGTCGTAATAACCCCGCCCCGTTGACGCAAATGGGCGGTAGGCGTGTACGGTGGG | |
| | | AGGTCTATATAAGCAGAGCTCGTTTAGTGAACCGTC (SEQ ID NO: 18843) | |
| | 376 nt | CACTTGGCAGTACATCAAGTGTATCATATGCCAAGTCCGCCCCCTATTGACGTCAATGACGGTAAATG | 0 nt Homology 1 |
| | | GCCCGCCTGGCATTATGCCCAGTACATGACCTTACGGGACTTTCCTACTTGGCAGTACATCTACGTATT | |
| | | AGTCATCGCTATTACCATGGTGATGCGGTTTTGGCAGTACACCAATGGGCGTGGATAGCGGTTTGACT | |
| | | CACGGGGATTTCCAAGTCTCCACCCCATTGACGTCAATGGGAGTTTGTTTTGGCACCAAAATCAACGG | |
| | | GACTTTCCAAAATGTCGTAATAACCCCGCCCCGTTGACGCAAATGGGCGGTAGGCGTGTACGGTGGG | |
| | | AGGTCTATATAAGCAGAGCTCGTTTAGTGAACCGTC (SEQ ID NO: 18844) | |
| | 375 nt | ACTTGGCAGTACATCAAGTGTATCATATGCCAAGTCCGCCCCCTATTGACGTCAATGACGGTAAATGG | 0 nt Homology 1 |
| | | CCCGCCTGGCATTATGCCCAGTACATGACCTTACGGGACTTTCCTACTTGGCAGTACATCTACGTATTA | |
| | | GTCATCGCTATTACCATGGTGATGCGGTTTTGGCAGTACACCAATGGGCGTGGATAGCGGTTTGACTC | |
| | | ACGGGGATTTCCAAGTCTCCACCCCATTGACGTCAATGGGAGTTTGTTTTGGCACCAAAATCAACGGG | |
| | | ACTTTCCAAAATGTCGTAATAACCCCGCCCCGTTGACGCAAATGGGGGTAGGCGTGTACGGTGGGA | |
| | | GGTCTATATAAGCAGAGCTCGTTTAGTGAACCGTC (SEQ ID NO: 18845) | |
| | 374 nt | CTTGGCAGTACATCAAGTGTATCATATGCCAAGTCCGCCCCCTATTGACGTCAATGACGGTAAATGGCC | 0 nt Homology 1 |
| | | CGCCTGGCATTATGCCCAGTACATGACCTTACGGGACTTTCCTACTTGGCAGTACATCTACGTATTAGT | |
| | | CATCGCTATTACCATGGTGATGCGGTTTTGGCAGTACACCAATGGGCGTGGATAGCGGTTTGACTCAC | |
| | | GGGGATTTCCAAGTCTCCACCCCATTGACGTCAATGGGAGTTTGTTTTGGCACCAAAATCAACGGGAC | |
| | | TTTCCAAAATGTCGTAATAACCCCGCCCCGTTGACGCAAATGGGCGGTAGGCGTGTACGGTGGGAGG | |
| | | TCTATATAAGCAGAGCTCGTTTAGTGAACCGTC (SEQ ID NO: 18846) | |
| | 373 nt | TTGGCAGTACATCAAGTGTATCATATGCCAAGTCCGCCCCCTATTGACGTCAATGACGGTAAATGGCCC | 0 nt Homology 1 |
| | | GCCTGGCATTATGCCCAGTACATGACCTTACGGGACTTTCCTACTTGGCAGTACATCTACGTATTAGTC | |
| | | ATCGCTATTACCATGGTGATGCGGTTTTGGCAGTACACCAATGGGCGTGGATAGCGGTTTGACTCACG | |
| | | GGGATTTCCAAGTCTCCACCCCATTGACGTCAATGGGAGTTTGTTTTGGCACCAAAATCAACGGGACTT | |
| | | TCCAAAATGTCGTAATAACCCCGCCCCGTTGACGCAAATGGGCGGTAGGCGTGTACGGTGGGAGGTC | |
| | | TATATAAGCAGAGCTCGTTTAGTGAACCGTC (SEQ ID NO: 18847) | |
| | 372 nt | TGGCAGTACATCAAGTGTATCATATGCCAAGTCCGCCCCCTATTGACGTCAATGACGGTAAATGGCCC | 0 nt Homology 1 |
| | | GCCTGGCATTATGCCCAGTACATGACCTTACGGGACTTTCCTACTTGGCAGTACATCTACGTATTAGTC | |
| | | ATCGCTATTACCATGGTGATGCGGTTTTGGCAGTACACCAATGGGCGTGGATAGCGGTTTGACTCACG | |
| | | GGGATTTCCAAGTCTCCACCCCATTGACGTCAATGGGAGTTTGTTTTGGCACCAAAATCAACGGGACTT | |
| | | TCCAAAATGTCGTAATAACCCCGCCCCGTTGACGCAAATGGGCGGTAGGCGTGTACGGTGGGAGGTC | |
| | | TATATAAGCAGAGCTCGTTTAGTGAACCGTC (SEQ ID NO: 18848) | |
| | 371 nt | GGCAGTACATCAAGTGTATCATATGCCAAGTCCGCCCCCTATTGACGTCAATGACGGTAAATGGCCCG | 0 nt Homology 1 |
| | | CCTGGCATTATGCCCAGTACATGACCTTACGGGACTTTCCTACTTGGCAGTACATCTACGTATTAGTCAT | |
| | | CGCTATTACCATGGTGATGCGGTTTTGGCAGTACACCAATGGGCGTGGATAGCGGTTTGACTCACGGG | |
| | | GATTTCCAAGTCTCCACCCCATTGACGTCAATGGGAGTTTGTTTTGGCACCAAAATCAACGGGACTTTC | |
| | | CAAAATGTCGTAATAACCCCGCCCCGTTGACGCAAATGGGCGGTAGGCGTGTACGGTGGGAGGTCTA | |
| | | TATAAGCAGAGCTCGTTTAGTGAACCGTC (SEQ ID NO: 18849) | |
| | 370 nt | GCAGTACATCAAGTGTATCATATGCCAAGTCCGCCCCCTATTGACGTCAATGACGGTAAATGGCCCGC | 0 nt Homology 1 |
| | | CTGGCATTATGCCCAGTACATGACCTTACGGGACTTTCCTACTTGGCAGTACATCTACGTATTAGTCATC | |
| | | GCTATTACCATGGTGATGCGGTTTTGGCAGTACACCAATGGGCGTGGATAGCGGTTTGACTCACGGG | |
| | | GATTTCCAAGTCTCCACCCCATTGACGTCAATGGGAGTTTGTTTTGGCACCAAAATCAACGGGACTTTC | |
| | | CAAAATGTCGTAATAACCCCGCCCCGTTGACGCAAATGGGCGGTAGGCGTGTACGGTGGGAGGTCTA | |
| | | TATAAGCAGAGCTCGTTTAGTGAACCGTC (SEQ ID NO: 18850) | |
| | 369 nt | CAGTACATCAAGTGTATCATATGCCAAGTCCGCCCCCTATTGACGTCAATGACGGTAAATGGCCCGCCT | 0 nt Homology 1 |
| | | GGCATTATGCCCAGTACATGACCTTACGGGACTTTCCTACTTGGCAGTACATCTACGTATTAGTCATCG | |
| | | CTATTACCATGGTGATGCGGTTTTGGCAGTACACCAATGGGCGTGGATAGCGGTTTGACTCACGGGGA | |
| | | TTTCCAAGTCTCCACCCCATTGACGTCAATGGGAGTTTGTTTTGGCACCAAAATCAACGGGACTTTCCA | |
| | | AAATGTCGTAATAACCCCGCCCCGTTGACGCAAATGGGCGGTAGGCGTGTACGGTGGGAGGTCTATA | |
| | | TAAGCAGAGCTCGTTTAGTGAACCGTC (SEQ ID NO: 18851) | |
| | 368 nt | AGTACATCAAGTGTATCATATGCCAAGTCCGCCCCCTATTGACGTCAATGACGGTAAATGGCCCGCCT | 0 nt Homology 1 |
| | | GGCATTATGCCCAGTACATGACCTTACGGGACTTTCCTACTTGGCAGTACATCTACGTATTAGTCATCG | |
| | | CTATTACCATGGTGATGCGGTTTTGGCAGTACACCAATGGGCGTGGATAGCGGTTTGACTCACGGGGA | |
| | | TTTCCAAGTCTCCACCCCATTGACGTCAATGGGAGTTTGTTTTGGCACCAAAATCAACGGGACTTTCCA | |
| | | AAATGTCGTAATAACCCCGCCCCGTTGACGCAAATGGGCGGTAGGCGTGTACGGTGGGAGGTCTATA | |
| | | TAAGCAGAGCTCGTTTAGTGAACCGTC (SEQ ID NO: 18852) | |
| | 367 nt | GTACATCAAGTGTATCATATGCCAAGTCCGCCCCCTATTGACGTCAATGACGGTAAATGGCCCGCCTG | 0 nt Homology 1 |
| | | GCATTATGCCCAGTACATGACCTTACGGGACTTTCCTACTTGGCAGTACATCTACGTATTAGTCATCGCT | |
| | | ATTACCATGGTGATGCGGTTTTGGCAGTACACCAATGGGCGTGGATAGCGGTTTGACTCACGGGGATT | |
| | | TCCAAGTCTCCACCCCATTGACGTCAATGGGAGTTTGTTTTGGCACCAAAATCAACGGGACTTTCCAAA | |
| | | ATGTCGTAATAACCCCGCCCCGTTGACGCAAATGGGCGGTAGGCGTGTACGGTGGGAGGTCTATATA | |
| | | AGCAGAGCTCGTTTAGTGAACCGTC (SEQ ID NO: 18853) | |
| | 366 nt | TACATCAAGTGTATCATATGCCAAGTCCGCCCCCTATTGACGTCAATGACGGTAAATGGCCCGCCTGGC | 0 nt Homology 1 |
| | | ATTATGCCCAGTACATGACCTTACGGGACTTTCCTACTTGGCAGTACATCTACGTATTAGTCATCGCTAT | |
| | | TACCATGGTGATGCGGTTTTGGCAGTACACCAATGGGCGTGGATAGCGGTTTGACTCACGGGGATTTC | |
| | | CAAGTCTCCACCCCATTGACGTCAATGGGAGTTTGTTTTGGCACCAAAATCAACGGGACTTTCCAAAAT | |
| | | GTCGTAATAACCCCGCCCCGTTGACGCAAATGGGCGGTAGGCGTGTACGGTGGGAGGTCTATATAAG | |
| | | CAGAGCTCGTTTAGTGAACCGTC (SEQ ID NO: 18854) | |
| | 365 nt | ACATCAAGTGTATCATATGCCAAGTCCGCCCCCTATTGACGTCAATGACGGTAAATGGCCCGCCTGGC | 0 nt Homology 1 |
| | | ATTATGCCCAGTACATGACCTTACGGGACTTTCCTACTTGGCAGTACATCTACGTATTAGTCATCGCTAT | |
| | | TACCATGGTGATGCGGTTTTGGCAGTACACCAATGGGCGTGGATAGCGGTTTGACTCACGGGGATTTC | |
| | | CAAGTCTCCACCCCATTGACGTCAATGGGAGTTTGTTTTGGCACCAAAATCAACGGGACTTTCCAAAAT | |
| | | GTCGTAATAACCCCGCCCCGTTGACGCAAATGGGCGGTAGGCGTGTACGGTGGGAGGTCTATATAAG | |
| | | CAGAGCTCGTTTAGTGAACCGTC (SEQ ID NO: 18855) | |
| | 364 nt | CATCAAGTGTATCATATGCCAAGTCCGCCCCCTATTGACGTCAATGACGGTAAATGGCCCGCCTGGCAT | 0 nt Homology 1 |
| | | TATGCCCAGTACATGACCTTACGGGACTTTCCTACTTGGCAGTACATCTACGTATTAGTCATCGCTATTA | |
| | | CCATGGTGATGCGGTTTTGGCAGTACACCAATGGGCGTGGATAGCGGTTTGACTCACGGGGATTTCCA | |
| | | AGTCTCCACCCCATTGACGTCAATGGGAGTTTGTTTTGGCACCAAAATCAACGGGACTTTCCAAAATGT | |
| | | CGTAATAACCCCGCCCCGTTGACGCAAATGGGCGGTAGGCGTGTACGGTGGGAGGTCTATATAAGCA | |
| | | GAGCTCGTTTAGTGAACCGTC (SEQ ID NO: 18856) | |
| | 363 nt | ATCAAGTGTATCATATGCCAAGTCCGCCCCCTATTGACGTCAATGACGGTAAATGGCCCGCCTGGCATT | 0 nt Homology 1 |
| | | ATGCCCAGTACATGACCTTACGGGACTTTCCTACTTGGCAGTACATCTACGTATTAGTCATCGCTATTAC | |
| | | CATGGTGATGCGGTTTTGGCAGTACACCAATGGGCGTGGATAGCGGTTTGACTCACGGGGATTTCCAA | |
| | | GTCTCCACCCCATTGACGTCAATGGGAGTTTGTTTTGGCACCAAAATCAACGGGACTTTCCAAAATGTC | |
| | | GTAATAACCCCGCCCCGTTGACGCAAATGGGCGGTAGGCGTGTACGGTGGGAGGTCTATATAAGCAG | |
| | | AGCTCGTTTAGTGAACCGTC (SEQ ID NO: 18857) | |
| | 362 nt | TCAAGTGTATCATATGCCAAGTCCGCCCCCTATTGACGTCAATGACGGTAAATGGCCCGCCTGGCATTA | 0 nt Homology 1 |
| | | TGCCCAGTACATGACCTTACGGGACTTTCCTACTTGGCAGTACATCTACGTATTAGTCATCGCTATTACC | |
| | | ATGGTGATGCGGTTTTGGCAGTACACCAATGGGCGTGGATAGCGGTTTGACTCACGGGGATTTCCAA | |
| | | GTCTCCACCCCATTGACGTCAATGGGAGTTTGTTTTGGCACCAAAATCAACGGGACTTTCCAAAATGTC | |
| | | GTAATAACCCCGCCCCGTTGACGCAAATGGGCGGTAGGCGTGTACGGTGGGAGGTCTATATAAGCAG | |
| | | AGCTCGTTTAGTGAACCGTC (SEQ ID NO: 18858) | |
| | 361 nt | CAAGTGTATCATATGCCAAGTCCGCCCCCTATTGACGTCAATGACGGTAAATGGCCCGCCTGGCATTAT | 0 nt Homology 1 |
| | | GCCCAGTACATGACCTTACGGGACTTTCCTACTTGGCAGTACATCTACGTATTAGTCATCGCTATTACCA | |
| | | TGGTGATGCGGTTTTGGCAGTACACCAATGGGCGTGGATAGCGGTTTGACTCACGGGGATTTCCAAG | |
| | | TCTCCACCCCATTGACGTCAATGGGAGTTTGTTTTGGCACCAAAATCAACGGGACTTTCCAAAATGTCG | |
| | | TAATAACCCCGCCCCGTTGACGCAAATGGGCGGTAGGCGTGTACGGTGGGAGGTCTATATAAGCAGA | |
| | | GCTCGTTTAGTGAACCGTC (SEQ ID NO: 18859) | |
| | 360 nt | AAGTGTATCATATGCCAAGTCCGCCCCCTATTGACGTCAATGACGGTAAATGGCCCGCCTGGCATTAT | 0 nt Homology 1 |
| | | GCCCAGTACATGACCTTACGGGACTTTCCTACTTGGCAGTACATCTACGTATTAGTCATCGCTATTACCA | |
| | | TGGTGATGCGGTTTTGGCAGTACACCAATGGGCGTGGATAGCGGTTTGACTCACGGGGATTTCCAAG | |
| | | TCTCCACCCCATTGACGTCAATGGGAGTTTGTTTTGGCACCAAAATCAACGGGACTTTCCAAAATGTCG | |
| | | TAATAACCCCGCCCCGTTGACGCAAATGGGCGGTAGGCGTGTACGGTGGGAGGTCTATATAAGCAGA | |
| | | GCTCGTTTAGTGAACCGTC (SEQ ID NO: 18860) | |
| | 359 nt | AGTGTATCATATGCCAAGTCCGCCCCCTATTGACGTCAATGACGGTAAATGGCCCGCCTGGCATTATGC | 0 nt Homology 1 |
| | | CCAGTACATGACCTTACGGGACTTTCCTACTTGGCAGTACATCTACGTATTAGTCATCGCTATTACCATG | |
| | | GTGATGCGGTTTTGGCAGTACACCAATGGGCGTGGATAGCGGTTTGACTCACGGGGATTTCCAAGTCT | |
| | | CCACCCCATTGACGTCAATGGGAGTTTGTTTTGGCACCAAAATCAACGGGACTTTCCAAAATGTCGTAA | |
| | | TAACCCCGCCCCGTTGACGCAAATGGGCGGTAGGCGTGTACGGTGGGAGGTCTATATAAGCAGAGCT | |
| | | CGTTTAGTGAACCGTC (SEQ ID NO: 18861) | |
| | 358 nt | GTGTATCATATGCCAAGTCCGCCCCCTATTGACGTCAATGACGGTAAATGGCCCGCCTGGCATTATGCC | 0 nt Homology 1 |
| | | CAGTACATGACCTTACGGGACTTTCCTACTTGGCAGTACATCTACGTATTAGTCATCGCTATTACCATG | |
| | | GTGATGCGGTTTTGGCAGTACACCAATGGGCGTGGATAGCGGTTTGACTCACGGGGATTTCCAAGTCT | |
| | | CCACCCCATTGACGTCAATGGGAGTTTGTTTTGGCACCAAAATCAACGGGACTTTCCAAAATGTCGTAA | |
| | | TAACCCCGCCCCGTTGACGCAAATGGGCGGTAGGCGTGTACGGTGGGAGGTCTATATAAGCAGAGCT | |
| | | CGTTTAGTGAACCGTC (SEQ ID NO: 18862) | |
| | 357 nt | TGTATCATATGCCAAGTCCGCCCCCTATTGACGTCAATGACGGTAAATGGCCCGCCTGGCATTATGCCC | 0 nt Homology 1 |
| | | AGTACATGACCTTACGGGACTTTCCTACTTGGCAGTACATCTACGTATTAGTCATCGCTATTACCATGGT | |
| | | GATGCGGTTTTGGCAGTACACCAATGGGCGTGGATAGCGGTTTGACTCACGGGGATTTCCAAGTCTCC | |
| | | ACCCCATTGACGTCAATGGGAGTTTGTTTTGGCACCAAAATCAACGGGACTTTCCAAAATGTCGTAATA | |
| | | ACCCCGCCCCGTTGACGCAAATGGGCGGTAGGCGTGTACGGTGGGAGGTCTATATAAGCAGAGCTCG | |
| | | TTTAGTGAACCGTC (SEQ ID NO: 18863) | |
| | 356 nt | GTATCATATGCCAAGTCCGCCCCCTATTGACGTCAATGACGGTAAATGGCCCGCCTGGCATTATGCCCA | 0 nt Homology 1 |
| | | GTACATGACCTTACGGGACTTTCCTACTTGGCAGTACATCTACGTATTAGTCATCGCTATTACCATGGT | |
| | | GATGCGGTTTTGGCAGTACACCAATGGGCGTGGATAGCGGTTTGACTCACGGGGATTTCCAAGTCTCC | |
| | | ACCCCATTGACGTCAATGGGAGTTTGTTTTGGCACCAAAATCAACGGGACTTTCCAAAATGTCGTAATA | |
| | | ACCCCGCCCCGTTGACGCAAATGGGCGGTAGGCGTGTACGGTGGGAGGTCTATATAAGCAGAGCTCG | |
| | | TTTAGTGAACCGTC (SEQ ID NO: 18864) | |
| | 355 nt | TATCATATGCCAAGTCCGCCCCCTATTGACGTCAATGACGGTAAATGGCCCGCCTGGCATTATGCCCAG | 0 nt Homology 1 |
| | | TACATGACCTTACGGGACTTTCCTACTTGGCAGTACATCTACGTATTAGTCATCGCTATTACCATGGTGA | |
| | | TGCGGTTTTGGCAGTACACCAATGGGCGTGGATAGCGGTTTGACTCACGGGGATTTCCAAGTCTCCAC | |
| | | CCCATTGACGTCAATGGGAGTTTGTTTTGGCACCAAAATCAACGGGACTTTCCAAAATGTCGTAATAAC | |
| | | CCCGCCCCGTTGACGCAAATGGGCGGTAGGCGTGTACGGTGGGAGGTCTATATAAGCAGAGCTCGTT | |
| | | TAGTGAACCGTC (SEQ ID NO: 18865) | |
| | 354 nt | ATCATATGCCAAGTCCGCCCCCTATTGACGTCAATGACGGTAAATGGCCCGCCTGGCATTATGCCCAGT | 0 nt Homology 1 |
| | | ACATGACCTTACGGGACTTTCCTACTTGGCAGTACATCTACGTATTAGTCATCGCTATTACCATGGTGAT | |
| | | GCGGTTTTGGCAGTACACCAATGGGCGTGGATAGCGGTTTGACTCACGGGGATTTCCAAGTCTCCACC | |
| | | CCATTGACGTCAATGGGAGTTTGTTTTGGCACCAAAATCAACGGGACTTTCCAAAATGTCGTAATAACC | |
| | | CCGCCCCGTTGACGCAAATGGGCGGTAGGCGTGTACGGTGGGAGGTCTATATAAGCAGAGCTCGTTT | |
| | | AGTGAACCGTC (SEQ ID NO: 18866) | |
| | 353 nt | TCATATGCCAAGTCCGCCCCCTATTGACGTCAATGACGGTAAATGGCCCGCCTGGCATTATGCCCAGTA | 0 nt Homology 1 |
| | | CATGACCTTACGGGACTTTCCTACTTGGCAGTACATCTACGTATTAGTCATCGCTATTACCATGGTGAT | |
| | | GCGGTTTTGGCAGTACACCAATGGGCGTGGATAGCGGTTTGACTCACGGGGATTTCCAAGTCTCCACC | |
| | | CCATTGACGTCAATGGGAGTTTGTTTTGGCACCAAAATCAACGGGACTTTCCAAAATGTCGTAATAACC | |
| | | CCGCCCCGTTGACGCAAATGGGCGGTAGGCGTGTACGGTGGGAGGTCTATATAAGCAGAGCTCGTTT | |
| | | AGTGAACCGTC (SEQ ID NO: 18867) | |
| | 352 nt | CATATGCCAAGTCCGCCCCCTATTGACGTCAATGACGGTAAATGGCCCGCCTGGCATTATGCCCAGTAC | 0 nt Homology 1 |
| | | ATGACCTTACGGGACTTTCCTACTTGGCAGTACATCTACGTATTAGTCATCGCTATTACCATGGTGATG | |
| | | CGGTTTTGGCAGTACACCAATGGGCGTGGATAGCGGTTTGACTCACGGGGATTTCCAAGTCTCCACCC | |
| | | CATTGACGTCAATGGGAGTTTGTTTTGGCACCAAAATCAACGGGACTTTCCAAAATGTCGTAATAACCC | |
| | | CGCCCCGTTGACGCAAATGGGCGGTAGGCGTGTACGGTGGGAGGTCTATATAAGCAGAGCTCGTTTA | |
| | | GTGAACCGTC (SEQ ID NO: 18868) | |
| | 351 nt | ATATGCCAAGTCCGCCCCCTATTGACGTCAATGACGGTAAATGGCCCGCCTGGCATTATGCCCAGTAC | 0 nt Homology 1 |
| | | ATGACCTTACGGGACTTTCCTACTTGGCAGTACATCTACGTATTAGTCATCGCTATTACCATGGTGATG | |
| | | CGGTTTTGGCAGTACACCAATGGGCGTGGATAGCGGTTTGACTCACGGGGATTTCCAAGTCTCCACCC | |
| | | CATTGACGTCAATGGGAGTTTGTTTTGGCACCAAAATCAACGGGACTTTCCAAAATGTCGTAATAACCC | |
| | | CGCCCCGTTGACGCAAATGGGCGGTAGGCGTGTACGGTGGGAGGTCTATATAAGCAGAGCTCGTTTA | |
| | | GTGAACCGTC (SEQ ID NO: 18869) | |
| | 350 nt | TATGCCAAGTCCGCCCCCTATTGACGTCAATGACGGTAAATGGCCCGCCTGGCATTATGCCCAGTACAT | 0 nt Homology 1 |
| | | GACCTTACGGGACTTTCCTACTTGGCAGTACATCTACGTATTAGTCATCGCTATTACCATGGTGATGCG | |
| | | GTTTTGGCAGTACACCAATGGGCGTGGATAGCGGTTTGACTCACGGGGATTTCCAAGTCTCCACCCCA | |
| | | TTGACGTCAATGGGAGTTTGTTTTGGCACCAAAATCAACGGGACTTTCCAAAATGTCGTAATAACCCCG | |
| | | CCCCGTTGACGCAAATGGGCGGTAGGCGTGTACGGTGGGAGGTCTATATAAGCAGAGCTCGTTTAGT | |
| | | GAACCGTC (SEQ ID NO: 18870) | |
| | 349 nt | ATGCCAAGTCCGCCCCCTATTGACGTCAATGACGGTAAATGGCCCGCCTGGCATTATGCCCAGTACAT | 0 nt Homology 1 |
| | | GACCTTACGGGACTTTCCTACTTGGCAGTACATCTACGTATTAGTCATCGCTATTACCATGGTGATGCG | |
| | | GTTTTGGCAGTACACCAATGGGCGTGGATAGCGGTTTGACTCACGGGGATTTCCAAGTCTCCACCCCA | |
| | | TTGACGTCAATGGGAGTTTGTTTTGGCACCAAAATCAACGGGACTTTCCAAAATGTCGTAATAACCCCG | |
| | | CCCCGTTGACGCAAATGGGCGGTAGGCGTGTACGGTGGGAGGTCTATATAAGCAGAGCTCGTTTAGT | |
| | | GAACCGTC (SEQ ID NO: 18871) | |
| | 348 nt | TGCCAAGTCCGCCCCCTATTGACGTCAATGACGGTAAATGGCCCGCCTGGCATTATGCCCAGTACATG | 0 nt Homology 1 |
| | | ACCTTACGGGACTTTCCTACTTGGCAGTACATCTACGTATTAGTCATCGCTATTACCATGGTGATGCGG | |
| | | TTTTGGCAGTACACCAATGGGCGTGGATAGCGGTTTGACTCACGGGGATTTCCAAGTCTCCACCCCATT | |
| | | GACGTCAATGGGAGTTTGTTTTGGCACCAAAATCAACGGGACTTTCCAAAATGTCGTAATAACCCCGC | |
| | | CCCGTTGACGCAAATGGGCGGTAGGCGTGTACGGTGGGAGGTCTATATAAGCAGAGCTCGTTTAGTG | |
| | | AACCGTC (SEQ ID NO: 18872) | |
| | 347 nt | GCCAAGTCCGCCCCCTATTGACGTCAATGACGGTAAATGGCCCGCCTGGCATTATGCCCAGTACATGA | 0 nt Homology 1 |
| | | CCTTACGGGACTTTCCTACTTGGCAGTACATCTACGTATTAGTCATCGCTATTACCATGGTGATGCGGT | |
| | | TTTGGCAGTACACCAATGGGCGTGGATAGCGGTTTGACTCACGGGGATTTCCAAGTCTCCACCCCATT | |
| | | GACGTCAATGGGAGTTTGTTTTGGCACCAAAATCAACGGGACTTTCCAAAATGTCGTAATAACCCCGC | |
| | | CCCGTTGACGCAAATGGGCGGTAGGCGTGTACGGTGGGAGGTCTATATAAGCAGAGCTCGTTTAGTG | |
| | | AACCGTC (SEQ ID NO: 18873) | |
| | 346 nt | CCAAGTCCGCCCCCTATTGACGTCAATGACGGTAAATGGCCCGCCTGGCATTATGCCCAGTACATGAC | 0 nt Homology 1 |
| | | CTTACGGGACTTTCCTACTTGGCAGTACATCTACGTATTAGTCATCGCTATTACCATGGTGATGCGGTTT | |
| | | TGGCAGTACACCAATGGGCGTGGATAGCGGTTTGACTCACGGGGATTTCCAAGTCTCCACCCCATTGA | |
| | | CGTCAATGGGAGTTTGTTTTGGCACCAAAATCAACGGGACTTTCCAAAATGTCGTAATAACCCCGCCCC | |
| | | GTTGACGCAAATGGGCGGTAGGCGTGTACGGTGGGAGGTCTATATAAGCAGAGCTCGTTTAGTGAAC | |
| | | CGTC (SEQ ID NO: 18874) | |
| | 345 nt | CAAGTCCGCCCCCTATTGACGTCAATGACGGTAAATGGCCCGCCTGGCATTATGCCCAGTACATGACCT | 0 nt Homology 1 |
| | | TACGGGACTTTCCTACTTGGCAGTACATCTACGTATTAGTCATCGCTATTACCATGGTGATGCGGTTTT | |
| | | GGCAGTACACCAATGGGCGTGGATAGCGGTTTGACTCACGGGGATTTCCAAGTCTCCACCCCATTGAC | |
| | | GTCAATGGGAGTTTGTTTTGGCACCAAAATCAACGGGACTTTCCAAAATGTCGTAATAACCCCGCCCC | |
| | | GTTGACGCAAATGGGCGGTAGGCGTGTACGGTGGGAGGTCTATATAAGCAGAGCTCGTTTAGTGAAC | |
| | | CGTC (SEQ ID NO: 18875) | |
| | 344 nt | AAGTCCGCCCCCTATTGACGTCAATGACGGTAAATGGCCCGCCTGGCATTATGCCCAGTACATGACCTT | 0 nt Homology 1 |
| | | ACGGGACTTTCCTACTTGGCAGTACATCTACGTATTAGTCATCGCTATTACCATGGTGATGCGGTTTTG | |
| | | GCAGTACACCAATGGGCGTGGATAGCGGTTTGACTCACGGGGATTTCCAAGTCTCCACCCCATTGACG | |
| | | TCAATGGGAGTTTGTTTTGGCACCAAAATCAACGGGACTTTCCAAAATGTCGTAATAACCCCGCCCCGT | |
| | | TGACGCAAATGGGCGGTAGGCGTGTACGGTGGGAGGTCTATATAAGCAGAGCTCGTTTAGTGAACCG | |
| | | TC (SEQ ID NO: 18876) | |
| | 343 nt | AGTCCGCCCCCTATTGACGTCAATGACGGTAAATGGCCCGCCTGGCATTATGCCCAGTACATGACCTTA | 0 nt Homology 1 |
| | | CGGGACTTTCCTACTTGGCAGTACATCTACGTATTAGTCATCGCTATTACCATGGTGATGCGGTTTTGG | |
| | | CAGTACACCAATGGGCGTGGATAGCGGTTTGACTCACGGGGATTTCCAAGTCTCCACCCCATTGACGT | |
| | | CAATGGGAGTTTGTTTTGGCACCAAAATCAACGGGACTTTCCAAAATGTCGTAATAACCCCGCCCCGTT | |
| | | GACGCAAATGGGCGGTAGGCGTGTACGGTGGGAGGTCTATATAAGCAGAGCTCGTTTAGTGAACCGT | |
| | | C (SEQ ID NO: 18877) | |
| | 342 nt | GTCCGCCCCCTATTGACGTCAATGACGGTAAATGGCCCGCCTGGCATTATGCCCAGTACATGACCTTAC | 0 nt Homology 1 |
| | | GGGACTTTCCTACTTGGCAGTACATCTACGTATTAGTCATCGCTATTACCATGGTGATGCGGTTTTGGC | |
| | | AGTACACCAATGGGCGTGGATAGCGGTTTGACTCACGGGGATTTCCAAGTCTCCACCCCATTGACGTC | |
| | | AATGGGAGTTTGTTTTGGCACCAAAATCAACGGGACTTTCCAAAATGTCGTAATAACCCCGCCCCGTTG | |
| | | ACGCAAATGGGCGGTAGGCGTGTACGGTGGGAGGTCTATATAAGCAGAGCTCGTTTAGTGAACCGTC | |
| | | (SEQ ID NO: 18878) | |
| | 341 nt | TCCGCCCCCTATTGACGTCAATGACGGTAAATGGCCCGCCTGGCATTATGCCCAGTACATGACCTTACG | 0 nt Homology 1 |
| | | GGACTTTCCTACTTGGCAGTACATCTACGTATTAGTCATCGCTATTACCATGGTGATGCGGTTTTGGCA | |
| | | GTACACCAATGGGCGTGGATAGCGGTTTGACTCACGGGGATTTCCAAGTCTCCACCCCATTGACGTCA | |
| | | ATGGGAGTTTGTTTTGGCACCAAAATCAACGGGACTTTCCAAAATGTCGTAATAACCCCGCCCCGTTGA | |
| | | CGCAAATGGGCGGTAGGCGTGTACGGTGGGAGGTCTATATAAGCAGAGCTCGTTTAGTGAACCGTC | |
| | | (SEQ ID NO: 18879) | |
| | 340 nt | CCGCCCCCTATTGACGTCAATGACGGTAAATGGCCCGCCTGGCATTATGCCCAGTACATGACCTTACG | 0 nt Homology 1 |
| | | GGACTTTCCTACTTGGCAGTACATCTACGTATTAGTCATCGCTATTACCATGGTGATGCGGTTTTGGCA | |
| | | GTACACCAATGGGCGTGGATAGCGGTTTGACTCACGGGGATTTCCAAGTCTCCACCCCATTGACGTCA | |
| | | ATGGGAGTTTGTTTTGGCACCAAAATCAACGGGACTTTCCAAAATGTCGTAATAACCCCGCCCCGTTGA | |
| | | CGCAAATGGGCGGTAGGCGTGTACGGTGGGAGGTCTATATAAGCAGAGCTCGTTTAGTGAACCGTC | |
| | | (SEQ ID NO: 18880) | |
| | 339 nt | CGCCCCCTATTGACGTCAATGACGGTAAATGGCCCGCCTGGCATTATGCCCAGTACATGACCTTACGG | 0 nt Homology 1 |
| | | GACTTTCCTACTTGGCAGTACATCTACGTATTAGTCATCGCTATTACCATGGTGATGCGGTTTTGGCAG | |
| | | TACACCAATGGGCGTGGATAGCGGTTTGACTCACGGGGATTTCCAAGTCTCCACCCCATTGACGTCAA | |
| | | TGGGAGTTTGTTTTGGCACCAAAATCAACGGGACTTTCCAAAATGTCGTAATAACCCCGCCCCGTTGAC | |
| | | GCAAATGGGCGGTAGGCGTGTACGGTGGGAGGTCTATATAAGCAGAGCTCGTTTAGTGAACCGTC | |
| | | (SEQ ID NO: 18881) | |
| | 338 nt | GCCCCCTATTGACGTCAATGACGGTAAATGGCCCGCCTGGCATTATGCCCAGTACATGACCTTACGGG | 0 nt Homology 1 |
| | | ACTTTCCTACTTGGCAGTACATCTACGTATTAGTCATCGCTATTACCATGGTGATGCGGTTTTGGCAGT | |
| | | ACACCAATGGGCGTGGATAGCGGTTTGACTCACGGGGATTTCCAAGTCTCCACCCCATTGACGTCAAT | |
| | | GGGAGTTTGTTTTGGCACCAAAATCAACGGGACTTTCCAAAATGTCGTAATAACCCCGCCCCGTTGAC | |
| | | GCAAATGGGCGGTAGGCGTGTACGGTGGGAGGTCTATATAAGCAGAGCTCGTTTAGTGAACCGTC | |
| | | (SEQ ID NO: 18882) | |
| | 337 nt | CCCCCTATTGACGTCAATGACGGTAAATGGCCCGCCTGGCATTATGCCCAGTACATGACCTTACGGGA | 0 nt Homology 1 |
| | | CTTTCCTACTTGGCAGTACATCTACGTATTAGTCATCGCTATTACCATGGTGATGCGGTTTTGGCAGTAC | |
| | | ACCAATGGGCGTGGATAGCGGTTTGACTCACGGGGATTTCCAAGTCTCCACCCCATTGACGTCAATGG | |
| | | GAGTTTGTTTTGGCACCAAAATCAACGGGACTTTCCAAAATGTCGTAATAACCCCGCCCCGTTGACGCA | |
| | | AATGGGCGGTAGGCGTGTACGGTGGGAGGTCTATATAAGCAGAGCTCGTTTAGTGAACCGTC (SEQ | |
| | | ID NO: 18883) | |
| | 336 nt | CCCCTATTGACGTCAATGACGGTAAATGGCCCGCCTGGCATTATGCCCAGTACATGACCTTACGGGAC | 0 nt Homology 1 |
| | | TTTCCTACTTGGCAGTACATCTACGTATTAGTCATCGCTATTACCATGGTGATGCGGTTTTGGCAGTAC | |
| | | ACCAATGGGCGTGGATAGCGGTTTGACTCACGGGGATTTCCAAGTCTCCACCCCATTGACGTCAATGG | |
| | | GAGTTTGTTTTGGCACCAAAATCAACGGGACTTTCCAAAATGTCGTAATAACCCCGCCCCGTTGACGCA | |
| | | AATGGGCGGTAGGCGTGTACGGTGGGAGGTCTATATAAGCAGAGCTCGTTTAGTGAACCGTC (SEQ | |
| | | ID NO: 18884) | |
| | 335 nt | CCCTATTGACGTCAATGACGGTAAATGGCCCGCCTGGCATTATGCCCAGTACATGACCTTACGGGACTT | 0 nt Homology 1 |
| | | TCCTACTTGGCAGTACATCTACGTATTAGTCATCGCTATTACCATGGTGATGCGGTTTTGGCAGTACAC | |
| | | CAATGGGCGTGGATAGCGGTTTGACTCACGGGGATTTCCAAGTCTCCACCCCATTGACGTCAATGGGA | |
| | | GTTTGTTTTGGCACCAAAATCAACGGGACTTTCCAAAATGTCGTAATAACCCCGCCCCGTTGACGCAAA | |
| | | TGGGCGGTAGGCGTGTACGGTGGGAGGTCTATATAAGCAGAGCTCGTTTAGTGAACCGTC (SEQ ID | |
| | | NO: 18885) | |
| | 334 nt | CCTATTGACGTCAATGACGGTAAATGGCCCGCCTGGCATTATGCCCAGTACATGACCTTACGGGACTTT | 0 nt Homology 1 |
| | | CCTACTTGGCAGTACATCTACGTATTAGTCATCGCTATTACCATGGTGATGCGGTTTTGGCAGTACACC | |
| | | AATGGGCGTGGATAGCGGTTTGACTCACGGGGATTTCCAAGTCTCCACCCCATTGACGTCAATGGGAG | |
| | | TTTGTTTTGGCACCAAAATCAACGGGACTTTCCAAAATGTCGTAATAACCCCGCCCCGTTGACGCAAAT | |
| | | GGGCGGTAGGCGTGTACGGTGGGAGGTCTATATAAGCAGAGCTCGTTTAGTGAACCGTC (SEQ ID | |
| | | NO: 18886) | |
| | 333 nt | CTATTGACGTCAATGACGGTAAATGGCCCGCCTGGCATTATGCCCAGTACATGACCTTACGGGACTTTC | 0 nt Homology 1 |
| | | CTACTTGGCAGTACATCTACGTATTAGTCATCGCTATTACCATGGTGATGCGGTTTTGGCAGTACACCA | |
| | | ATGGGCGTGGATAGCGGTTTGACTCACGGGGATTTCCAAGTCTCCACCCCATTGACGTCAATGGGAGT | |
| | | TTGTTTTGGCACCAAAATCAACGGGACTTTCCAAAATGTCGTAATAACCCCGCCCCGTTGACGCAAATG | |
| | | GGCGGTAGGCGTGTACGGTGGGAGGTCTATATAAGCAGAGCTCGTTTAGTGAACCGTC (SEQ ID NO: | |
| | | 18887) | |
| | 332 nt | TATTGACGTCAATGACGGTAAATGGCCCGCCTGGCATTATGCCCAGTACATGACCTTACGGGACTTTCC | 0 nt Homology 1 |
| | | TACTTGGCAGTACATCTACGTATTAGTCATCGCTATTACCATGGTGATGCGGTTTTGGCAGTACACCAA | |
| | | TGGGCGTGGATAGCGGTTTGACTCACGGGGATTTCCAAGTCTCCACCCCATTGACGTCAATGGGAGTT | |
| | | TGTTTTGGCACCAAAATCAACGGGACTTTCCAAAATGTCGTAATAACCCCGCCCCGTTGACGCAAATG | |
| | | GGCGGTAGGCGTGTACGGTGGGAGGTCTATATAAGCAGAGCTCGTTTAGTGAACCGTC (SEQ ID NO: | |
| | | 18888) | |
| | 331 nt | ATTGACGTCAATGACGGTAAATGGCCCGCCTGGCATTATGCCCAGTACATGACCTTACGGGACTTTCCT | 0 nt Homology 1 |
| | | ACTTGGCAGTACATCTACGTATTAGTCATCGCTATTACCATGGTGATGCGGTTTTGGCAGTACACCAAT | |
| | | GGGCGTGGATAGCGGTTTGACTCACGGGGATTTCCAAGTCTCCACCCCATTGACGTCAATGGGAGTTT | |
| | | GTTTTGGCACCAAAATCAACGGGACTTTCCAAAATGTCGTAATAACCCCGCCCCGTTGACGCAAATGG | |
| | | GCGGTAGGCGTGTACGGTGGGAGGTCTATATAAGCAGAGCTCGTTTAGTGAACCGTC (SEQ ID NO: | |
| | | 18889) | |
| | 330 nt | TTGACGTCAATGACGGTAAATGGCCCGCCTGGCATTATGCCCAGTACATGACCTTACGGGACTTTCCTA | 0 nt Homology 1 |
| | | CTTGGCAGTACATCTACGTATTAGTCATCGCTATTACCATGGTGATGCGGTTTTGGCAGTACACCAATG | |
| | | GGCGTGGATAGCGGTTTGACTCACGGGGATTTCCAAGTCTCCACCCCATTGACGTCAATGGGAGTTTG | |
| | | TTTTGGCACCAAAATCAACGGGACTTTCCAAAATGTCGTAATAACCCCGCCCCGTTGACGCAAATGGG | |
| | | CGGTAGGCGTGTACGGTGGGAGGTCTATATAAGCAGAGCTCGTTTAGTGAACCGTC (SEQ ID NO: | |
| | | 18890) | |
| | 329 nt | TGACGTCAATGACGGTAAATGGCCCGCCTGGCATTATGCCCAGTACATGACCTTACGGGACTTTCCTAC | 0 nt Homology 1 |
| | | TTGGCAGTACATCTACGTATTAGTCATCGCTATTACCATGGTGATGCGGTTTTGGCAGTACACCAATGG | |
| | | GCGTGGATAGCGGTTTGACTCACGGGGATTTCCAAGTCTCCACCCCATTGACGTCAATGGGAGTTTGT | |
| | | TTTGGCACCAAAATCAACGGGACTTTCCAAAATGTCGTAATAACCCCGCCCCGTTGACGCAAATGGGC | |
| | | GGTAGGCGTGTACGGTGGGAGGTCTATATAAGCAGAGCTCGTTTAGTGAACCGTC (SEQ ID NO: | |
| | | 18891) | |
| | 328 nt | GACGTCAATGACGGTAAATGGCCCGCCTGGCATTATGCCCAGTACATGACCTTACGGGACTTTCCTACT | 0 nt Homology 1 |
| | | TGGCAGTACATCTACGTATTAGTCATCGCTATTACCATGGTGATGCGGTTTTGGCAGTACACCAATGGG | |
| | | CGTGGATAGCGGTTTGACTCACGGGGATTTCCAAGTCTCCACCCCATTGACGTCAATGGGAGTTTGTTT | |
| | | TGGCACCAAAATCAACGGGACTTTCCAAAATGTCGTAATAACCCCGCCCCGTTGACGCAAATGGGCGG | |
| | | TAGGCGTGTACGGTGGGAGGTCTATATAAGCAGAGCTCGTTTAGTGAACCGTC (SEQ ID NO: 18892) | |
| | 327 nt | ACGTCAATGACGGTAAATGGCCCGCCTGGCATTATGCCCAGTACATGACCTTACGGGACTTTCCTACTT | 0 nt Homology 1 |
| | | GGCAGTACATCTACGTATTAGTCATCGCTATTACCATGGTGATGCGGTTTTGGCAGTACACCAATGGG | |
| | | CGTGGATAGCGGTTTGACTCACGGGGATTTCCAAGTCTCCACCCCATTGACGTCAATGGGAGTTTGTTT | |
| | | TGGCACCAAAATCAACGGGACTTTCCAAAATGTCGTAATAACCCCGCCCCGTTGACGCAAATGGGCGG | |
| | | TAGGCGTGTACGGTGGGAGGTCTATATAAGCAGAGCTCGTTTAGTGAACCGTC (SEQ ID NO: 18893) | |
| | 326 nt | CGTCAATGACGGTAAATGGCCCGCCTGGCATTATGCCCAGTACATGACCTTACGGGACTTTCCTACTTG | 0 nt Homology 1 |
| | | GCAGTACATCTACGTATTAGTCATCGCTATTACCATGGTGATGCGGTTTTGGCAGTACACCAATGGGC | |
| | | GTGGATAGCGGTTTGACTCACGGGGATTTCCAAGTCTCCACCCCATTGACGTCAATGGGAGTTTGTTTT | |
| | | GGCACCAAAATCAACGGGACTTTCCAAAATGTCGTAATAACCCCGCCCCGTTGACGCAAATGGGCGGT | |
| | | AGGCGTGTACGGTGGGAGGTCTATATAAGCAGAGCTCGTTTAGTGAACCGTC (SEQ ID NO: 18894) | |
| | 325 nt | GTCAATGACGGTAAATGGCCCGCCTGGCATTATGCCCAGTACATGACCTTACGGGACTTTCCTACTTGG | 0 nt Homology 1 |
| | | CAGTACATCTACGTATTAGTCATCGCTATTACCATGGTGATGCGGTTTTGGCAGTACACCAATGGGCGT | |
| | | GGATAGCGGTTTGACTCACGGGGATTTCCAAGTCTCCACCCCATTGACGTCAATGGGAGTTTGTTTTG | |
| | | GCACCAAAATCAACGGGACTTTCCAAAATGTCGTAATAACCCCGCCCCGTTGACGCAAATGGGCGGTA | |
| | | GGCGTGTACGGTGGGAGGTCTATATAAGCAGAGCTCGTTTAGTGAACCGTC (SEQ ID NO: 18895) | |
| | 324 nt | TCAATGACGGTAAATGGCCCGCCTGGCATTATGCCCAGTACATGACCTTACGGGACTTTCCTACTTGGC | 0 nt Homology 1 |
| | | AGTACATCTACGTATTAGTCATCGCTATTACCATGGTGATGCGGTTTTGGCAGTACACCAATGGGCGTG | |
| | | GATAGCGGTTTGACTCACGGGGATTTCCAAGTCTCCACCCCATTGACGTCAATGGGAGTTTGTTTTGGC | |
| | | ACCAAAATCAACGGGACTTTCCAAAATGTCGTAATAACCCCGCCCCGTTGACGCAAATGGGCGGTAGG | |
| | | CGTGTACGGTGGGAGGTCTATATAAGCAGAGCTCGTTTAGTGAACCGTC (SEQ ID NO: 18896) | |
| | 323 nt | CAATGACGGTAAATGGCCCGCCTGGCATTATGCCCAGTACATGACCTTACGGGACTTTCCTACTTGGCA | 0 nt Homology 1 |
| | | GTACATCTACGTATTAGTCATCGCTATTACCATGGTGATGCGGTTTTGGCAGTACACCAATGGGCGTG | |
| | | GATAGCGGTTTGACTCACGGGGATTTCCAAGTCTCCACCCCATTGACGTCAATGGGAGTTTGTTTTGGC | |
| | | ACCAAAATCAACGGGACTTTCCAAAATGTCGTAATAACCCCGCCCCGTTGACGCAAATGGGCGGTAGG | |
| | | CGTGTACGGTGGGAGGTCTATATAAGCAGAGCTCGTTTAGTGAACCGTC (SEQ ID NO: 18897) | |
| | 322 nt | AATGACGGTAAATGGCCCGCCTGGCATTATGCCCAGTACATGACCTTACGGGACTTTCCTACTTGGCA | 0 nt Homology 1 |
| | | GTACATCTACGTATTAGTCATCGCTATTACCATGGTGATGCGGTTTTGGCAGTACACCAATGGGCGTG | |
| | | GATAGCGGTTTGACTCACGGGGATTTCCAAGTCTCCACCCCATTGACGTCAATGGGAGTTTGTTTTGGC | |
| | | ACCAAAATCAACGGGACTTTCCAAAATGTCGTAATAACCCCGCCCCGTTGACGCAAATGGGCGGTAGG | |
| | | CGTGTACGGTGGGAGGTCTATATAAGCAGAGCTCGTTTAGTGAACCGTC (SEQ ID NO: 18898) | |
| | 321 nt | ATGACGGTAAATGGCCCGCCTGGCATTATGCCCAGTACATGACCTTACGGGACTTTCCTACTTGGCAGT | 0 nt Homology 1 |
| | | ACATCTACGTATTAGTCATCGCTATTACCATGGTGATGCGGTTTTGGCAGTACACCAATGGGCGTGGAT | |
| | | AGCGGTTTGACTCACGGGGATTTCCAAGTCTCCACCCCATTGACGTCAATGGGAGTTTGTTTTGGCACC | |
| | | AAAATCAACGGGACTTTCCAAAATGTCGTAATAACCCCGCCCCGTTGACGCAAATGGGCGGTAGGCGT | |
| | | GTACGGTGGGAGGTCTATATAAGCAGAGCTCGTTTAGTGAACCGTC (SEQ ID NO: 18899) | |
| | 320 nt | TGACGGTAAATGGCCCGCCTGGCATTATGCCCAGTACATGACCTTACGGGACTTTCCTACTTGGCAGTA | 0 nt Homology 1 |
| | | CATCTACGTATTAGTCATCGCTATTACCATGGTGATGCGGTTTTGGCAGTACACCAATGGGCGTGGATA | |
| | | GCGGTTTGACTCACGGGGATTTCCAAGTCTCCACCCCATTGACGTCAATGGGAGTTTGTTTTGGCACCA | |
| | | AAATCAACGGGACTTTCCAAAATGTCGTAATAACCCCGCCCCGTTGACGCAAATGGGCGGTAGGCGTG | |
| | | TACGGTGGGAGGTCTATATAAGCAGAGCTCGTTTAGTGAACCGTC (SEQ ID NO: 18900) | |
| | 319 nt | GACGGTAAATGGCCCGCCTGGCATTATGCCCAGTACATGACCTTACGGGACTTTCCTACTTGGCAGTA | 0 nt Homology 1 |
| | | CATCTACGTATTAGTCATCGCTATTACCATGGTGATGCGGTTTTGGCAGTACACCAATGGGCGTGGATA | |
| | | GCGGTTTGACTCACGGGGATTTCCAAGTCTCCACCCCATTGACGTCAATGGGAGTTTGTTTTGGCACCA | |
| | | AAATCAACGGGACTTTCCAAAATGTCGTAATAACCCCGCCCCGTTGACGCAAATGGGCGGTAGGCGTG | |
| | | TACGGTGGGAGGTCTATATAAGCAGAGCTCGTTTAGTGAACCGTC (SEQ ID NO: 18901) | |
| | 318 nt | ACGGTAAATGGCCCGCCTGGCATTATGCCCAGTACATGACCTTACGGGACTTTCCTACTTGGCAGTACA | 0 nt Homology 1 |
| | | TCTACGTATTAGTCATCGCTATTACCATGGTGATGCGGTTTTGGCAGTACACCAATGGGCGTGGATAG | |
| | | CGGTTTGACTCACGGGGATTTCCAAGTCTCCACCCCATTGACGTCAATGGGAGTTTGTTTTGGCACCAA | |
| | | AATCAACGGGACTTTCCAAAATGTCGTAATAACCCCGCCCCGTTGACGCAAATGGGCGGTAGGCGTGT | |
| | | ACGGTGGGAGGTCTATATAAGCAGAGCTCGTTTAGTGAACCGTC (SEQ ID NO: 18902) | |
| | 317 nt | CGGTAAATGGCCCGCCTGGCATTATGCCCAGTACATGACCTTACGGGACTTTCCTACTTGGCAGTACAT | 0 nt Homology 1 |
| | | CTACGTATTAGTCATCGCTATTACCATGGTGATGCGGTTTTGGCAGTACACCAATGGGCGTGGATAGC | |
| | | GGTTTGACTCACGGGGATTTCCAAGTCTCCACCCCATTGACGTCAATGGGAGTTTGTTTTGGCACCAAA | |
| | | ATCAACGGGACTTTCCAAAATGTCGTAATAACCCCGCCCCGTTGACGCAAATGGGGGTAGGCGTGTA | |
| | | CGGTGGGAGGTCTATATAAGCAGAGCTCGTTTAGTGAACCGTC (SEQ ID NO: 18903) | |
| | 316 nt | GGTAAATGGCCCGCCTGGCATTATGCCCAGTACATGACCTTACGGGACTTTCCTACTTGGCAGTACATC | 0 nt Homology 1 |
| | | TACGTATTAGTCATCGCTATTACCATGGTGATGCGGTTTTGGCAGTACACCAATGGGCGTGGATAGCG | |
| | | GTTTGACTCACGGGGATTTCCAAGTCTCCACCCCATTGACGTCAATGGGAGTTTGTTTTGGCACCAAAA | |
| | | TCAACGGGACTTTCCAAAATGTCGTAATAACCCCGCCCCGTTGACGCAAATGGGCGGTAGGCGTGTAC | |
| | | GGTGGGAGGTCTATATAAGCAGAGCTCGTTTAGTGAACCGTC (SEQ ID NO: 18904) | |
| | 315 nt | GTAAATGGCCCGCCTGGCATTATGCCCAGTACATGACCTTACGGGACTTTCCTACTTGGCAGTACATCT | 0 nt Homology 1 |
| | | ACGTATTAGTCATCGCTATTACCATGGTGATGCGGTTTTGGCAGTACACCAATGGGCGTGGATAGCGG | |
| | | TTTGACTCACGGGGATTTCCAAGTCTCCACCCCATTGACGTCAATGGGAGTTTGTTTTGGCACCAAAAT | |
| | | CAACGGGACTTTCCAAAATGTCGTAATAACCCCGCCCCGTTGACGCAAATGGGCGGTAGGCGTGTACG | |
| | | GTGGGAGGTCTATATAAGCAGAGCTCGTTTAGTGAACCGTC (SEQ ID NO: 18905) | |
| | 314 nt | TAAATGGCCCGCCTGGCATTATGCCCAGTACATGACCTTACGGGACTTTCCTACTTGGCAGTACATCTA | 0 nt Homology 1 |
| | | CGTATTAGTCATCGCTATTACCATGGTGATGCGGTTTTGGCAGTACACCAATGGGCGTGGATAGCGGT | |
| | | TTGACTCACGGGGATTTCCAAGTCTCCACCCCATTGACGTCAATGGGAGTTTGTTTTGGCACCAAAATC | |
| | | AACGGGACTTTCCAAAATGTCGTAATAACCCCGCCCCGTTGACGCAAATGGGCGGTAGGCGTGTACG | |
| | | GTGGGAGGTCTATATAAGCAGAGCTCGTTTAGTGAACCGTC (SEQ ID NO: 18906) | |
| | 313 nt | AAATGGCCCGCCTGGCATTATGCCCAGTACATGACCTTACGGGACTTTCCTACTTGGCAGTACATCTAC | 0 nt Homology 1 |
| | | GTATTAGTCATCGCTATTACCATGGTGATGCGGTTTTGGCAGTACACCAATGGGCGTGGATAGCGGTT | |
| | | TGACTCACGGGGATTTCCAAGTCTCCACCCCATTGACGTCAATGGGAGTTTGTTTTGGCACCAAAATCA | |
| | | ACGGGACTTTCCAAAATGTCGTAATAACCCCGCCCCGTTGACGCAAATGGGCGGTAGGCGTGTACGGT | |
| | | GGGAGGTCTATATAAGCAGAGCTCGTTTAGTGAACCGTC (SEQ ID NO: 18907) | |
| | 312 nt | AATGGCCCGCCTGGCATTATGCCCAGTACATGACCTTACGGGACTTTCCTACTTGGCAGTACATCTACG | 0 nt Homology 1 |
| | | TATTAGTCATCGCTATTACCATGGTGATGCGGTTTTGGCAGTACACCAATGGGCGTGGATAGCGGTTT | |
| | | GACTCACGGGGATTTCCAAGTCTCCACCCCATTGACGTCAATGGGAGTTTGTTTTGGCACCAAAATCAA | |
| | | CGGGACTTTCCAAAATGTCGTAATAACCCCGCCCCGTTGACGCAAATGGGCGGTAGGCGTGTACGGT | |
| | | GGGAGGTCTATATAAGCAGAGCTCGTTTAGTGAACCGTC (SEQ ID NO: 18908) | |
| | 311 nt | ATGGCCCGCCTGGCATTATGCCCAGTACATGACCTTACGGGACTTTCCTACTTGGCAGTACATCTACGT | 0 nt Homology 1 |
| | | ATTAGTCATCGCTATTACCATGGTGATGCGGTTTTGGCAGTACACCAATGGGCGTGGATAGCGGTTTG | |
| | | ACTCACGGGGATTTCCAAGTCTCCACCCCATTGACGTCAATGGGAGTTTGTTTTGGCACCAAAATCAAC | |
| | | GGGACTTTCCAAAATGTCGTAATAACCCCGCCCCGTTGACGCAAATGGGCGGTAGGCGTGTACGGTG | |
| | | GGAGGTCTATATAAGCAGAGCTCGTTTAGTGAACCGTC (SEQ ID NO: 18909) | |
| | 310 nt | TGGCCCGCCTGGCATTATGCCCAGTACATGACCTTACGGGACTTTCCTACTTGGCAGTACATCTACGTA | 0 nt Homology 1 |
| | | TTAGTCATCGCTATTACCATGGTGATGCGGTTTTGGCAGTACACCAATGGGCGTGGATAGCGGTTTGA | |
| | | CTCACGGGGATTTCCAAGTCTCCACCCCATTGACGTCAATGGGAGTTTGTTTTGGCACCAAAATCAACG | |
| | | GGACTTTCCAAAATGTCGTAATAACCCCGCCCCGTTGACGCAAATGGGCGGTAGGCGTGTACGGTGG | |
| | | GAGGTCTATATAAGCAGAGCTCGTTTAGTGAACCGTC (SEQ ID NO: 18910) | |
| | 309 nt | GGCCCGCCTGGCATTATGCCCAGTACATGACCTTACGGGACTTTCCTACTTGGCAGTACATCTACGTAT | 0 nt Homology 1 |
| | | TAGTCATCGCTATTACCATGGTGATGCGGTTTTGGCAGTACACCAATGGGCGTGGATAGCGGTTTGAC | |
| | | TCACGGGGATTTCCAAGTCTCCACCCCATTGACGTCAATGGGAGTTTGTTTTGGCACCAAAATCAACGG | |
| | | GACTTTCCAAAATGTCGTAATAACCCCGCCCCGTTGACGCAAATGGGCGGTAGGCGTGTACGGTGGG | |
| | | AGGTCTATATAAGCAGAGCTCGTTTAGTGAACCGTC (SEQ ID NO: 18911) | |
| | 308 nt | GCCCGCCTGGCATTATGCCCAGTACATGACCTTACGGGACTTTCCTACTTGGCAGTACATCTACGTATT | 0 nt Homology 1 |
| | | AGTCATCGCTATTACCATGGTGATGCGGTTTTGGCAGTACACCAATGGGCGTGGATAGCGGTTTGACT | |
| | | CACGGGGATTTCCAAGTCTCCACCCCATTGACGTCAATGGGAGTTTGTTTTGGCACCAAAATCAACGG | |
| | | GACTTTCCAAAATGTCGTAATAACCCCGCCCCGTTGACGCAAATGGGCGGTAGGCGTGTACGGTGGG | |
| | | AGGTCTATATAAGCAGAGCTCGTTTAGTGAACCGTC (SEQ ID NO: 18912) | |
| | 307 nt | CCCGCCTGGCATTATGCCCAGTACATGACCTTACGGGACTTTCCTACTTGGCAGTACATCTACGTATTA | 0 nt Homology 1 |
| | | GTCATCGCTATTACCATGGTGATGCGGTTTTGGCAGTACACCAATGGGCGTGGATAGCGGTTTGACTC | |
| | | ACGGGGATTTCCAAGTCTCCACCCCATTGACGTCAATGGGAGTTTGTTTTGGCACCAAAATCAACGGG | |
| | | ACTTTCCAAAATGTCGTAATAACCCCGCCCCGTTGACGCAAATGGGCGGTAGGCGTGTACGGTGGGA | |
| | | GGTCTATATAAGCAGAGCTCGTTTAGTGAACCGTC (SEQ ID NO: 18913) | |
| | 306 nt | CCGCCTGGCATTATGCCCAGTACATGACCTTACGGGACTTTCCTACTTGGCAGTACATCTACGTATTAG | 0 nt Homology 1 |
| | | TCATCGCTATTACCATGGTGATGCGGTTTTGGCAGTACACCAATGGGCGTGGATAGCGGTTTGACTCA | |
| | | CGGGGATTTCCAAGTCTCCACCCCATTGACGTCAATGGGAGTTTGTTTTGGCACCAAAATCAACGGGA | |
| | | CTTTCCAAAATGTCGTAATAACCCCGCCCCGTTGACGCAAATGGGCGGTAGGCGTGTACGGTGGGAG | |
| | | GTCTATATAAGCAGAGCTCGTTTAGTGAACCGTC (SEQ ID NO: 18914) | |
| | 305 nt | CGCCTGGCATTATGCCCAGTACATGACCTTACGGGACTTTCCTACTTGGCAGTACATCTACGTATTAGT | 0 nt Homology 1 |
| | | CATCGCTATTACCATGGTGATGCGGTTTTGGCAGTACACCAATGGGCGTGGATAGCGGTTTGACTCAC | |
| | | GGGGATTTCCAAGTCTCCACCCCATTGACGTCAATGGGAGTTTGTTTTGGCACCAAAATCAACGGGAC | |
| | | TTTCCAAAATGTCGTAATAACCCCGCCCCGTTGACGCAAATGGGCGGTAGGCGTGTACGGTGGGAGG | |
| | | TCTATATAAGCAGAGCTCGTTTAGTGAACCGTC (SEQ ID NO: 18915) | |
| | 304 nt | GCCTGGCATTATGCCCAGTACATGACCTTACGGGACTTTCCTACTTGGCAGTACATCTACGTATTAGTC | 0 nt Homology 1 |
| | | ATCGCTATTACCATGGTGATGCGGTTTTGGCAGTACACCAATGGGCGTGGATAGCGGTTTGACTCACG | |
| | | GGGATTTCCAAGTCTCCACCCCATTGACGTCAATGGGAGTTTGTTTTGGCACCAAAATCAACGGGACTT | |
| | | TCCAAAATGTCGTAATAACCCCGCCCCGTTGACGCAAATGGGCGGTAGGCGTGTACGGTGGGAGGTC | |
| | | TATATAAGCAGAGCTCGTTTAGTGAACCGTC (SEQ ID NO: 18916) | |
| | 303 nt | CCTGGCATTATGCCCAGTACATGACCTTACGGGACTTTCCTACTTGGCAGTACATCTACGTATTAGTCAT | 0 nt Homology 1 |
| | | CGCTATTACCATGGTGATGCGGTTTTGGCAGTACACCAATGGGCGTGGATAGCGGTTTGACTCACGGG | |
| | | GATTTCCAAGTCTCCACCCCATTGACGTCAATGGGAGTTTGTTTTGGCACCAAAATCAACGGGACTTTC | |
| | | CAAAATGTCGTAATAACCCCGCCCCGTTGACGCAAATGGGCGGTAGGCGTGTACGGTGGGAGGTCTA | |
| | | TATAAGCAGAGCTCGTTTAGTGAACCGTC (SEQ ID NO: 18917) | |
| | 302 nt | CTGGCATTATGCCCAGTACATGACCTTACGGGACTTTCCTACTTGGCAGTACATCTACGTATTAGTCATC | 0 nt Homology 1 |
| | | GCTATTACCATGGTGATGCGGTTTTGGCAGTACACCAATGGGCGTGGATAGCGGTTTGACTCACGGG | |
| | | GATTTCCAAGTCTCCACCCCATTGACGTCAATGGGAGTTTGTTTTGGCACCAAAATCAACGGGACTTTC | |
| | | CAAAATGTCGTAATAACCCCGCCCCGTTGACGCAAATGGGCGGTAGGCGTGTACGGTGGGAGGTCTA | |
| | | TATAAGCAGAGCTCGTTTAGTGAACCGTC (SEQ ID NO: 18918) | |
| | 301 nt | TGGCATTATGCCCAGTACATGACCTTACGGGACTTTCCTACTTGGCAGTACATCTACGTATTAGTCATC | 0 nt Homology 1 |
| | | GCTATTACCATGGTGATGCGGTTTTGGCAGTACACCAATGGGCGTGGATAGCGGTTTGACTCACGGG | |
| | | GATTTCCAAGTCTCCACCCCATTGACGTCAATGGGAGTTTGTTTTGGCACCAAAATCAACGGGACTTTC | |
| | | CAAAATGTCGTAATAACCCCGCCCCGTTGACGCAAATGGGCGGTAGGCGTGTACGGTGGGAGGTCTA | |
| | | TATAAGCAGAGCTCGTTTAGTGAACCGTC (SEQ ID NO: 18919) | |
| | 300 nt | GGCATTATGCCCAGTACATGACCTTACGGGACTTTCCTACTTGGCAGTACATCTACGTATTAGTCATCG | 0 nt Homology 1 |
| | | CTATTACCATGGTGATGCGGTTTTGGCAGTACACCAATGGGCGTGGATAGCGGTTTGACTCACGGGGA | |
| | | TTTCCAAGTCTCCACCCCATTGACGTCAATGGGAGTTTGTTTTGGCACCAAAATCAACGGGACTTTCCA | |
| | | AAATGTCGTAATAACCCCGCCCCGTTGACGCAAATGGGCGGTAGGCGTGTACGGTGGGAGGTCTATA | |
| | | TAAGCAGAGCTCGTTTAGTGAACCGTC (SEQ ID NO: 18920) | |
| | 299 nt | GCATTATGCCCAGTACATGACCTTACGGGACTTTCCTACTTGGCAGTACATCTACGTATTAGTCATCGCT | 0 nt Homology 1 |
| | | ATTACCATGGTGATGCGGTTTTGGCAGTACACCAATGGGCGTGGATAGCGGTTTGACTCACGGGGATT | |
| | | TCCAAGTCTCCACCCCATTGACGTCAATGGGAGTTTGTTTTGGCACCAAAATCAACGGGACTTTCCAAA | |
| | | ATGTCGTAATAACCCCGCCCCGTTGACGCAAATGGGGGTAGGCGTGTACGGTGGGAGGTCTATATA | |
| | | AGCAGAGCTCGTTTAGTGAACCGTC (SEQ ID NO: 18921) | |
| | 298 nt | CATTATGCCCAGTACATGACCTTACGGGACTTTCCTACTTGGCAGTACATCTACGTATTAGTCATCGCTA | 0 nt Homology 1 |
| | | TTACCATGGTGATGCGGTTTTGGCAGTACACCAATGGGCGTGGATAGCGGTTTGACTCACGGGGATTT | |
| | | CCAAGTCTCCACCCCATTGACGTCAATGGGAGTTTGTTTTGGCACCAAAATCAACGGGACTTTCCAAAA | |
| | | TGTCGTAATAACCCCGCCCCGTTGACGCAAATGGGCGGTAGGCGTGTACGGTGGGAGGTCTATATAA | |
| | | GCAGAGCTCGTTTAGTGAACCGTC (SEQ ID NO: 18922) | |
| | 297 nt | ATTATGCCCAGTACATGACCTTACGGGACTTTCCTACTTGGCAGTACATCTACGTATTAGTCATCGCTAT | 0 nt Homology 1 |
| | | TACCATGGTGATGCGGTTTTGGCAGTACACCAATGGGCGTGGATAGCGGTTTGACTCACGGGGATTTC | |
| | | CAAGTCTCCACCCCATTGACGTCAATGGGAGTTTGTTTTGGCACCAAAATCAACGGGACTTTCCAAAAT | |
| | | GTCGTAATAACCCCGCCCCGTTGACGCAAATGGGCGGTAGGCGTGTACGGTGGGAGGTCTATATAAG | |
| | | CAGAGCTCGTTTAGTGAACCGTC (SEQ ID NO: 18923) | |
| | 296 nt | TTATGCCCAGTACATGACCTTACGGGACTTTCCTACTTGGCAGTACATCTACGTATTAGTCATCGCTATT | 0 nt Homology 1 |
| | | ACCATGGTGATGCGGTTTTGGCAGTACACCAATGGGCGTGGATAGCGGTTTGACTCACGGGGATTTCC | |
| | | AAGTCTCCACCCCATTGACGTCAATGGGAGTTTGTTTTGGCACCAAAATCAACGGGACTTTCCAAAATG | |
| | | TCGTAATAACCCCGCCCCGTTGACGCAAATGGGCGGTAGGCGTGTACGGTGGGAGGTCTATATAAGC | |
| | | AGAGCTCGTTTAGTGAACCGTC (SEQ ID NO: 18924) | |
| | 295 nt | TATGCCCAGTACATGACCTTACGGGACTTTCCTACTTGGCAGTACATCTACGTATTAGTCATCGCTATTA | 0 nt Homology 1 |
| | | CCATGGTGATGCGGTTTTGGCAGTACACCAATGGGCGTGGATAGCGGTTTGACTCACGGGGATTTCCA | |
| | | AGTCTCCACCCCATTGACGTCAATGGGAGTTTGTTTTGGCACCAAAATCAACGGGACTTTCCAAAATGT | |
| | | CGTAATAACCCCGCCCCGTTGACGCAAATGGGCGGTAGGCGTGTACGGTGGGAGGTCTATATAAGCA | |
| | | GAGCTCGTTTAGTGAACCGTC (SEQ ID NO: 18925) | |
| | 294 nt | ATGCCCAGTACATGACCTTACGGGACTTTCCTACTTGGCAGTACATCTACGTATTAGTCATCGCTATTAC | 0 nt Homology 1 |
| | | CATGGTGATGCGGTTTTGGCAGTACACCAATGGGCGTGGATAGCGGTTTGACTCACGGGGATTTCCAA | |
| | | GTCTCCACCCCATTGACGTCAATGGGAGTTTGTTTTGGCACCAAAATCAACGGGACTTTCCAAAATGTC | |
| | | GTAATAACCCCGCCCCGTTGACGCAAATGGGCGGTAGGCGTGTACGGTGGGAGGTCTATATAAGCAG | |
| | | AGCTCGTTTAGTGAACCGTC (SEQ ID NO: 18926) | |
| | 293 nt | TGCCCAGTACATGACCTTACGGGACTTTCCTACTTGGCAGTACATCTACGTATTAGTCATCGCTATTACC | 0 nt Homology 1 |
| | | ATGGTGATGCGGTTTTGGCAGTACACCAATGGGCGTGGATAGCGGTTTGACTCACGGGGATTTCCAA | |
| | | GTCTCCACCCCATTGACGTCAATGGGAGTTTGTTTTGGCACCAAAATCAACGGGACTTTCCAAAATGTC | |
| | | GTAATAACCCCGCCCCGTTGACGCAAATGGGCGGTAGGCGTGTACGGTGGGAGGTCTATATAAGCAG | |
| | | AGCTCGTTTAGTGAACCGTC (SEQ ID NO: 18927) | |
| | 292 nt | GCCCAGTACATGACCTTACGGGACTTTCCTACTTGGCAGTACATCTACGTATTAGTCATCGCTATTACCA | 0 nt Homology 1 |
| | | TGGTGATGCGGTTTTGGCAGTACACCAATGGGCGTGGATAGCGGTTTGACTCACGGGGATTTCCAAG | |
| | | TCTCCACCCCATTGACGTCAATGGGAGTTTGTTTTGGCACCAAAATCAACGGGACTTTCCAAAATGTCG | |
| | | TAATAACCCCGCCCCGTTGACGCAAATGGGCGGTAGGCGTGTACGGTGGGAGGTCTATATAAGCAGA | |
| | | GCTCGTTTAGTGAACCGTC (SEQ ID NO: 18928) | |
| | 291 nt | CCCAGTACATGACCTTACGGGACTTTCCTACTTGGCAGTACATCTACGTATTAGTCATCGCTATTACCAT | 0 nt Homology 1 |
| | | GGTGATGCGGTTTTGGCAGTACACCAATGGGCGTGGATAGCGGTTTGACTCACGGGGATTTCCAAGT | |
| | | CTCCACCCCATTGACGTCAATGGGAGTTTGTTTTGGCACCAAAATCAACGGGACTTTCCAAAATGTCGT | |
| | | AATAACCCCGCCCCGTTGACGCAAATGGGCGGTAGGCGTGTACGGTGGGAGGTCTATATAAGCAGAG | |
| | | CTCGTTTAGTGAACCGTC (SEQ ID NO: 18929) | |
| | 290 nt | CCAGTACATGACCTTACGGGACTTTCCTACTTGGCAGTACATCTACGTATTAGTCATCGCTATTACCATG | 0 nt Homology 1 |
| | | GTGATGCGGTTTTGGCAGTACACCAATGGGCGTGGATAGCGGTTTGACTCACGGGGATTTCCAAGTCT | |
| | | CCACCCCATTGACGTCAATGGGAGTTTGTTTTGGCACCAAAATCAACGGGACTTTCCAAAATGTCGTAA | |
| | | TAACCCCGCCCCGTTGACGCAAATGGGCGGTAGGCGTGTACGGTGGGAGGTCTATATAAGCAGAGCT | |
| | | CGTTTAGTGAACCGTC (SEQ ID NO: 18930) | |
| | 289 nt | CAGTACATGACCTTACGGGACTTTCCTACTTGGCAGTACATCTACGTATTAGTCATCGCTATTACCATG | 0 nt Homology 1 |
| | | GTGATGCGGTTTTGGCAGTACACCAATGGGCGTGGATAGCGGTTTGACTCACGGGGATTTCCAAGTCT | |
| | | CCACCCCATTGACGTCAATGGGAGTTTGTTTTGGCACCAAAATCAACGGGACTTTCCAAAATGTCGTAA | |
| | | TAACCCCGCCCCGTTGACGCAAATGGGCGGTAGGCGTGTACGGTGGGAGGTCTATATAAGCAGAGCT | |
| | | CGTTTAGTGAACCGTC (SEQ ID NO: 18931) | |
| | 288 nt | AGTACATGACCTTACGGGACTTTCCTACTTGGCAGTACATCTACGTATTAGTCATCGCTATTACCATGGT | 0 nt Homology 1 |
| | | GATGCGGTTTTGGCAGTACACCAATGGGCGTGGATAGCGGTTTGACTCACGGGGATTTCCAAGTCTCC | |
| | | ACCCCATTGACGTCAATGGGAGTTTGTTTTGGCACCAAAATCAACGGGACTTTCCAAAATGTCGTAATA | |
| | | ACCCCGCCCCGTTGACGCAAATGGGCGGTAGGCGTGTACGGTGGGAGGTCTATATAAGCAGAGCTCG | |
| | | TTTAGTGAACCGTC (SEQ ID NO: 18932) | |
| | 287 nt | GTACATGACCTTACGGGACTTTCCTACTTGGCAGTACATCTACGTATTAGTCATCGCTATTACCATGGT | 0 nt Homology 1 |
| | | GATGCGGTTTTGGCAGTACACCAATGGGCGTGGATAGCGGTTTGACTCACGGGGATTTCCAAGTCTCC | |
| | | ACCCCATTGACGTCAATGGGAGTTTGTTTTGGCACCAAAATCAACGGGACTTTCCAAAATGTCGTAATA | |
| | | ACCCCGCCCCGTTGACGCAAATGGGCGGTAGGCGTGTACGGTGGGAGGTCTATATAAGCAGAGCTCG | |
| | | TTTAGTGAACCGTC (SEQ ID NO: 18933) | |
| | 286 nt | TACATGACCTTACGGGACTTTCCTACTTGGCAGTACATCTACGTATTAGTCATCGCTATTACCATGGTGA | 0 nt Homology 1 |
| | | TGCGGTTTTGGCAGTACACCAATGGGCGTGGATAGCGGTTTGACTCACGGGGATTTCCAAGTCTCCAC | |
| | | CCCATTGACGTCAATGGGAGTTTGTTTTGGCACCAAAATCAACGGGACTTTCCAAAATGTCGTAATAAC | |
| | | CCCGCCCCGTTGACGCAAATGGGCGGTAGGCGTGTACGGTGGGAGGTCTATATAAGCAGAGCTCGTT | |
| | | TAGTGAACCGTC (SEQ ID NO: 18934) | |
| | 285 nt | ACATGACCTTACGGGACTTTCCTACTTGGCAGTACATCTACGTATTAGTCATCGCTATTACCATGGTGAT | 0 nt Homology 1 |
| | | GCGGTTTTGGCAGTACACCAATGGGCGTGGATAGCGGTTTGACTCACGGGGATTTCCAAGTCTCCACC | |
| | | CCATTGACGTCAATGGGAGTTTGTTTTGGCACCAAAATCAACGGGACTTTCCAAAATGTCGTAATAACC | |
| | | CCGCCCCGTTGACGCAAATGGGGGTAGGCGTGTACGGTGGGAGGTCTATATAAGCAGAGCTCGTTT | |
| | | AGTGAACCGTC (SEQ ID NO: 18935) | |
| | 284 nt | CATGACCTTACGGGACTTTCCTACTTGGCAGTACATCTACGTATTAGTCATCGCTATTACCATGGTGAT | 0 nt Homology 1 |
| | | GCGGTTTTGGCAGTACACCAATGGGCGTGGATAGCGGTTTGACTCACGGGGATTTCCAAGTCTCCACC | |
| | | CCATTGACGTCAATGGGAGTTTGTTTTGGCACCAAAATCAACGGGACTTTCCAAAATGTCGTAATAACC | |
| | | CCGCCCCGTTGACGCAAATGGGCGGTAGGCGTGTACGGTGGGAGGTCTATATAAGCAGAGCTCGTTT | |
| | | AGTGAACCGTC (SEQ ID NO: 18936) | |
| | 283 nt | ATGACCTTACGGGACTTTCCTACTTGGCAGTACATCTACGTATTAGTCATCGCTATTACCATGGTGATG | 0 nt Homology 1 |
| | | CGGTTTTGGCAGTACACCAATGGGCGTGGATAGCGGTTTGACTCACGGGGATTTCCAAGTCTCCACCC | |
| | | CATTGACGTCAATGGGAGTTTGTTTTGGCACCAAAATCAACGGGACTTTCCAAAATGTCGTAATAACCC | |
| | | CGCCCCGTTGACGCAAATGGGCGGTAGGCGTGTACGGTGGGAGGTCTATATAAGCAGAGCTCGTTTA | |
| | | GTGAACCGTC (SEQ ID NO: 18937) | |
| | 282 nt | TGACCTTACGGGACTTTCCTACTTGGCAGTACATCTACGTATTAGTCATCGCTATTACCATGGTGATGC | 0 nt Homology 1 |
| | | GGTTTTGGCAGTACACCAATGGGCGTGGATAGCGGTTTGACTCACGGGGATTTCCAAGTCTCCACCCC | |
| | | ATTGACGTCAATGGGAGTTTGTTTTGGCACCAAAATCAACGGGACTTTCCAAAATGTCGTAATAACCCC | |
| | | GCCCCGTTGACGCAAATGGGCGGTAGGCGTGTACGGTGGGAGGTCTATATAAGCAGAGCTCGTTTAG | |
| | | TGAACCGTC (SEQ ID NO: 18938) | |
| | 281 nt | GACCTTACGGGACTTTCCTACTTGGCAGTACATCTACGTATTAGTCATCGCTATTACCATGGTGATGCG | 0 nt Homology 1 |
| | | GTTTTGGCAGTACACCAATGGGCGTGGATAGCGGTTTGACTCACGGGGATTTCCAAGTCTCCACCCCA | |
| | | TTGACGTCAATGGGAGTTTGTTTTGGCACCAAAATCAACGGGACTTTCCAAAATGTCGTAATAACCCCG | |
| | | CCCCGTTGACGCAAATGGGCGGTAGGCGTGTACGGTGGGAGGTCTATATAAGCAGAGCTCGTTTAGT | |
| | | GAACCGTC (SEQ ID NO: 18939) | |
| | 280 nt | ACCTTACGGGACTTTCCTACTTGGCAGTACATCTACGTATTAGTCATCGCTATTACCATGGTGATGCGG | 0 nt Homology 1 |
| | | TTTTGGCAGTACACCAATGGGCGTGGATAGCGGTTTGACTCACGGGGATTTCCAAGTCTCCACCCCATT | |
| | | GACGTCAATGGGAGTTTGTTTTGGCACCAAAATCAACGGGACTTTCCAAAATGTCGTAATAACCCCGC | |
| | | CCCGTTGACGCAAATGGGCGGTAGGCGTGTACGGTGGGAGGTCTATATAAGCAGAGCTCGTTTAGTG | |
| | | AACCGTC (SEQ ID NO: 18940) | |
| | 279 nt | CCTTACGGGACTTTCCTACTTGGCAGTACATCTACGTATTAGTCATCGCTATTACCATGGTGATGCGGT | 0 nt Homology 1 |
| | | TTTGGCAGTACACCAATGGGCGTGGATAGCGGTTTGACTCACGGGGATTTCCAAGTCTCCACCCCATT | |
| | | GACGTCAATGGGAGTTTGTTTTGGCACCAAAATCAACGGGACTTTCCAAAATGTCGTAATAACCCCGC | |
| | | CCCGTTGACGCAAATGGGCGGTAGGCGTGTACGGTGGGAGGTCTATATAAGCAGAGCTCGTTTAGTG | |
| | | AACCGTC (SEQ ID NO: 18941) | |
| | 278 nt | CTTACGGGACTTTCCTACTTGGCAGTACATCTACGTATTAGTCATCGCTATTACCATGGTGATGCGGTTT | 0 nt Homology 1 |
| | | TGGCAGTACACCAATGGGCGTGGATAGCGGTTTGACTCACGGGGATTTCCAAGTCTCCACCCCATTGA | |
| | | CGTCAATGGGAGTTTGTTTTGGCACCAAAATCAACGGGACTTTCCAAAATGTCGTAATAACCCCGCCCC | |
| | | GTTGACGCAAATGGGCGGTAGGCGTGTACGGTGGGAGGTCTATATAAGCAGAGCTCGTTTAGTGAAC | |
| | | CGTC (SEQ ID NO: 18942) | |
| | 277 nt | TTACGGGACTTTCCTACTTGGCAGTACATCTACGTATTAGTCATCGCTATTACCATGGTGATGCGGTTTT | 0 nt Homology 1 |
| | | GGCAGTACACCAATGGGCGTGGATAGCGGTTTGACTCACGGGGATTTCCAAGTCTCCACCCCATTGAC | |
| | | GTCAATGGGAGTTTGTTTTGGCACCAAAATCAACGGGACTTTCCAAAATGTCGTAATAACCCCGCCCC | |
| | | GTTGACGCAAATGGGCGGTAGGCGTGTACGGTGGGAGGTCTATATAAGCAGAGCTCGTTTAGTGAAC | |
| | | CGTC (SEQ ID NO: 18943) | |
| | 276 nt | TACGGGACTTTCCTACTTGGCAGTACATCTACGTATTAGTCATCGCTATTACCATGGTGATGCGGTTTT | 0 nt Homology 1 |
| | | GGCAGTACACCAATGGGCGTGGATAGCGGTTTGACTCACGGGGATTTCCAAGTCTCCACCCCATTGAC | |
| | | GTCAATGGGAGTTTGTTTTGGCACCAAAATCAACGGGACTTTCCAAAATGTCGTAATAACCCCGCCCC | |
| | | GTTGACGCAAATGGGCGGTAGGCGTGTACGGTGGGAGGTCTATATAAGCAGAGCTCGTTTAGTGAAC | |
| | | CGTC (SEQ ID NO: 18944) | |
| | 275 nt | ACGGGACTTTCCTACTTGGCAGTACATCTACGTATTAGTCATCGCTATTACCATGGTGATGCGGTTTTG | 0 nt Homology 1 |
| | | GCAGTACACCAATGGGCGTGGATAGCGGTTTGACTCACGGGGATTTCCAAGTCTCCACCCCATTGACG | |
| | | TCAATGGGAGTTTGTTTTGGCACCAAAATCAACGGGACTTTCCAAAATGTCGTAATAACCCCGCCCCGT | |
| | | TGACGCAAATGGGCGGTAGGCGTGTACGGTGGGAGGTCTATATAAGCAGAGCTCGTTTAGTGAACCG | |
| | | TC (SEQ ID NO: 18945) | |
| | 274 nt | CGGGACTTTCCTACTTGGCAGTACATCTACGTATTAGTCATCGCTATTACCATGGTGATGCGGTTTTGG | 0 nt Homology 1 |
| | | CAGTACACCAATGGGCGTGGATAGCGGTTTGACTCACGGGGATTTCCAAGTCTCCACCCCATTGACGT | |
| | | CAATGGGAGTTTGTTTTGGCACCAAAATCAACGGGACTTTCCAAAATGTCGTAATAACCCCGCCCCGTT | |
| | | GACGCAAATGGGCGGTAGGCGTGTACGGTGGGAGGTCTATATAAGCAGAGCTCGTTTAGTGAACCGT | |
| | | C (SEQ ID NO: 18946) | |
| | 273 nt | GGGACTTTCCTACTTGGCAGTACATCTACGTATTAGTCATCGCTATTACCATGGTGATGCGGTTTTGGC | 0 nt Homology 1 |
| | | AGTACACCAATGGGCGTGGATAGCGGTTTGACTCACGGGGATTTCCAAGTCTCCACCCCATTGACGTC | |
| | | AATGGGAGTTTGTTTTGGCACCAAAATCAACGGGACTTTCCAAAATGTCGTAATAACCCCGCCCCGTTG | |
| | | ACGCAAATGGGCGGTAGGCGTGTACGGTGGGAGGTCTATATAAGCAGAGCTCGTTTAGTGAACCGTC | |
| | | (SEQ ID NO: 18947) | |
| | 272 nt | GGACTTTCCTACTTGGCAGTACATCTACGTATTAGTCATCGCTATTACCATGGTGATGCGGTTTTGGCA | 0 nt Homology 1 |
| | | GTACACCAATGGGCGTGGATAGCGGTTTGACTCACGGGGATTTCCAAGTCTCCACCCCATTGACGTCA | |
| | | ATGGGAGTTTGTTTTGGCACCAAAATCAACGGGACTTTCCAAAATGTCGTAATAACCCCGCCCCGTTGA | |
| | | CGCAAATGGGCGGTAGGCGTGTACGGTGGGAGGTCTATATAAGCAGAGCTCGTTTAGTGAACCGTC | |
| | | (SEQ ID NO: 18948) | |
| | 271 nt | GACTTTCCTACTTGGCAGTACATCTACGTATTAGTCATCGCTATTACCATGGTGATGCGGTTTTGGCAG | 0 nt Homology 1 |
| | | TACACCAATGGGCGTGGATAGCGGTTTGACTCACGGGGATTTCCAAGTCTCCACCCCATTGACGTCAA | |
| | | TGGGAGTTTGTTTTGGCACCAAAATCAACGGGACTTTCCAAAATGTCGTAATAACCCCGCCCCGTTGAC | |
| | | GCAAATGGGGGTAGGCGTGTACGGTGGGAGGTCTATATAAGCAGAGCTCGTTTAGTGAACCGTC | |
| | | (SEQ ID NO: 18949) | |
| | 270 nt | ACTTTCCTACTTGGCAGTACATCTACGTATTAGTCATCGCTATTACCATGGTGATGCGGTTTTGGCAGT | 0 nt Homology 1 |
| | | ACACCAATGGGCGTGGATAGCGGTTTGACTCACGGGGATTTCCAAGTCTCCACCCCATTGACGTCAAT | |
| | | GGGAGTTTGTTTTGGCACCAAAATCAACGGGACTTTCCAAAATGTCGTAATAACCCCGCCCCGTTGAC | |
| | | GCAAATGGGCGGTAGGCGTGTACGGTGGGAGGTCTATATAAGCAGAGCTCGTTTAGTGAACCGTC | |
| | | (SEQ ID NO: 18950) | |
| | 269 nt | CTTTCCTACTTGGCAGTACATCTACGTATTAGTCATCGCTATTACCATGGTGATGCGGTTTTGGCAGTAC | 0 nt Homology 1 |
| | | ACCAATGGGCGTGGATAGCGGTTTGACTCACGGGGATTTCCAAGTCTCCACCCCATTGACGTCAATGG | |
| | | GAGTTTGTTTTGGCACCAAAATCAACGGGACTTTCCAAAATGTCGTAATAACCCCGCCCCGTTGACGCA | |
| | | AATGGGCGGTAGGCGTGTACGGTGGGAGGTCTATATAAGCAGAGCTCGTTTAGTGAACCGTC (SEQ | |
| | | ID NO: 18951) | |
| | 268 nt | TTTCCTACTTGGCAGTACATCTACGTATTAGTCATCGCTATTACCATGGTGATGCGGTTTTGGCAGTAC | 0 nt Homology 1 |
| | | ACCAATGGGCGTGGATAGCGGTTTGACTCACGGGGATTTCCAAGTCTCCACCCCATTGACGTCAATGG | |
| | | GAGTTTGTTTTGGCACCAAAATCAACGGGACTTTCCAAAATGTCGTAATAACCCCGCCCCGTTGACGCA | |
| | | AATGGGCGGTAGGCGTGTACGGTGGGAGGTCTATATAAGCAGAGCTCGTTTAGTGAACCGTC (SEQ | |
| | | ID NO: 18952) | |
| | 267 nt | TTCCTACTTGGCAGTACATCTACGTATTAGTCATCGCTATTACCATGGTGATGCGGTTTTGGCAGTACA | 0 nt Homology 1 |
| | | CCAATGGGCGTGGATAGCGGTTTGACTCACGGGGATTTCCAAGTCTCCACCCCATTGACGTCAATGGG | |
| | | AGTTTGTTTTGGCACCAAAATCAACGGGACTTTCCAAAATGTCGTAATAACCCCGCCCCGTTGACGCAA | |
| | | ATGGGCGGTAGGCGTGTACGGTGGGAGGTCTATATAAGCAGAGCTCGTTTAGTGAACCGTC (SEQ ID | |
| | | NO: 18953) | |
| | 266 nt | TCCTACTTGGCAGTACATCTACGTATTAGTCATCGCTATTACCATGGTGATGCGGTTTTGGCAGTACAC | 0 nt Homology 1 |
| | | CAATGGGCGTGGATAGCGGTTTGACTCACGGGGATTTCCAAGTCTCCACCCCATTGACGTCAATGGGA | |
| | | GTTTGTTTTGGCACCAAAATCAACGGGACTTTCCAAAATGTCGTAATAACCCCGCCCCGTTGACGCAAA | |
| | | TGGGCGGTAGGCGTGTACGGTGGGAGGTCTATATAAGCAGAGCTCGTTTAGTGAACCGTC (SEQ ID | |
| | | NO: 18954) | |
| | 265 nt | CCTACTTGGCAGTACATCTACGTATTAGTCATCGCTATTACCATGGTGATGCGGTTTTGGCAGTACACC | 0 nt Homology 1 |
| | | AATGGGCGTGGATAGCGGTTTGACTCACGGGGATTTCCAAGTCTCCACCCCATTGACGTCAATGGGAG | |
| | | TTTGTTTTGGCACCAAAATCAACGGGACTTTCCAAAATGTCGTAATAACCCCGCCCCGTTGACGCAAAT | |
| | | GGGCGGTAGGCGTGTACGGTGGGAGGTCTATATAAGCAGAGCTCGTTTAGTGAACCGTC (SEQ ID | |
| | | NO: 18955) | |
| | 264 nt | CTACTTGGCAGTACATCTACGTATTAGTCATCGCTATTACCATGGTGATGCGGTTTTGGCAGTACACCA | 0 nt Homology 1 |
| | | ATGGGCGTGGATAGCGGTTTGACTCACGGGGATTTCCAAGTCTCCACCCCATTGACGTCAATGGGAGT | |
| | | TTGTTTTGGCACCAAAATCAACGGGACTTTCCAAAATGTCGTAATAACCCCGCCCCGTTGACGCAAATG | |
| | | GGCGGTAGGCGTGTACGGTGGGAGGTCTATATAAGCAGAGCTCGTTTAGTGAACCGTC (SEQ ID NO: | |
| | | 18956) | |
| | 263 nt | TACTTGGCAGTACATCTACGTATTAGTCATCGCTATTACCATGGTGATGCGGTTTTGGCAGTACACCAA | 0 nt Homology 1 |
| | | TGGGCGTGGATAGCGGTTTGACTCACGGGGATTTCCAAGTCTCCACCCCATTGACGTCAATGGGAGTT | |
| | | TGTTTTGGCACCAAAATCAACGGGACTTTCCAAAATGTCGTAATAACCCCGCCCCGTTGACGCAAATG | |
| | | GGCGGTAGGCGTGTACGGTGGGAGGTCTATATAAGCAGAGCTCGTTTAGTGAACCGTC (SEQ ID NO: | |
| | | 18957) | |
| | 262 nt | ACTTGGCAGTACATCTACGTATTAGTCATCGCTATTACCATGGTGATGCGGTTTTGGCAGTACACCAAT | 0 nt Homology 1 |
| | | GGGCGTGGATAGCGGTTTGACTCACGGGGATTTCCAAGTCTCCACCCCATTGACGTCAATGGGAGTTT | |
| | | GTTTTGGCACCAAAATCAACGGGACTTTCCAAAATGTCGTAATAACCCCGCCCCGTTGACGCAAATGG | |
| | | GCGGTAGGCGTGTACGGTGGGAGGTCTATATAAGCAGAGCTCGTTTAGTGAACCGTC (SEQ ID NO: | |
| | | 18958) | |
| | 261 nt | CTTGGCAGTACATCTACGTATTAGTCATCGCTATTACCATGGTGATGCGGTTTTGGCAGTACACCAATG | 0 nt Homology 1 |
| | | GGCGTGGATAGCGGTTTGACTCACGGGGATTTCCAAGTCTCCACCCCATTGACGTCAATGGGAGTTTG | |
| | | TTTTGGCACCAAAATCAACGGGACTTTCCAAAATGTCGTAATAACCCCGCCCCGTTGACGCAAATGGG | |
| | | CGGTAGGCGTGTACGGTGGGAGGTCTATATAAGCAGAGCTCGTTTAGTGAACCGTC (SEQ ID NO: | |
| | | 18959) | |
| | 260 nt | TTGGCAGTACATCTACGTATTAGTCATCGCTATTACCATGGTGATGCGGTTTTGGCAGTACACCAATGG | 0 nt Homology 1 |
| | | GCGTGGATAGCGGTTTGACTCACGGGGATTTCCAAGTCTCCACCCCATTGACGTCAATGGGAGTTTGT | |
| | | TTTGGCACCAAAATCAACGGGACTTTCCAAAATGTCGTAATAACCCCGCCCCGTTGACGCAAATGGGC | |
| | | GGTAGGCGTGTACGGTGGGAGGTCTATATAAGCAGAGCTCGTTTAGTGAACCGTC (SEQ ID NO: | |
| | | 18960) | |
| | 259 nt | TGGCAGTACATCTACGTATTAGTCATCGCTATTACCATGGTGATGCGGTTTTGGCAGTACACCAATGGG | 0 nt Homology 1 |
| | | CGTGGATAGCGGTTTGACTCACGGGGATTTCCAAGTCTCCACCCCATTGACGTCAATGGGAGTTTGTTT | |
| | | TGGCACCAAAATCAACGGGACTTTCCAAAATGTCGTAATAACCCCGCCCCGTTGACGCAAATGGGCGG | |
| | | TAGGCGTGTACGGTGGGAGGTCTATATAAGCAGAGCTCGTTTAGTGAACCGTC (SEQ ID NO: 18961) | |
| | 258 nt | GGCAGTACATCTACGTATTAGTCATCGCTATTACCATGGTGATGCGGTTTTGGCAGTACACCAATGGG | 0 nt Homology 1 |
| | | CGTGGATAGCGGTTTGACTCACGGGGATTTCCAAGTCTCCACCCCATTGACGTCAATGGGAGTTTGTTT | |
| | | TGGCACCAAAATCAACGGGACTTTCCAAAATGTCGTAATAACCCCGCCCCGTTGACGCAAATGGGCGG | |
| | | TAGGCGTGTACGGTGGGAGGTCTATATAAGCAGAGCTCGTTTAGTGAACCGTC (SEQ ID NO: 18962) | |
| | 257 nt | GCAGTACATCTACGTATTAGTCATCGCTATTACCATGGTGATGCGGTTTTGGCAGTACACCAATGGGC | 0 nt Homology 1 |
| | | GTGGATAGCGGTTTGACTCACGGGGATTTCCAAGTCTCCACCCCATTGACGTCAATGGGAGTTTGTTTT | |
| | | GGCACCAAAATCAACGGGACTTTCCAAAATGTCGTAATAACCCCGCCCCGTTGACGCAAATGGGCGGT | |
| | | AGGCGTGTACGGTGGGAGGTCTATATAAGCAGAGCTCGTTTAGTGAACCGTC (SEQ ID NO: 18963) | |
| | 256 nt | CAGTACATCTACGTATTAGTCATCGCTATTACCATGGTGATGCGGTTTTGGCAGTACACCAATGGGCGT | 0 nt Homology 1 |
| | | GGATAGCGGTTTGACTCACGGGGATTTCCAAGTCTCCACCCCATTGACGTCAATGGGAGTTTGTTTTG | |
| | | GCACCAAAATCAACGGGACTTTCCAAAATGTCGTAATAACCCCGCCCCGTTGACGCAAATGGGCGGTA | |
| | | GGCGTGTACGGTGGGAGGTCTATATAAGCAGAGCTCGTTTAGTGAACCGTC (SEQ ID NO: 18964) | |
| | 255 nt | AGTACATCTACGTATTAGTCATCGCTATTACCATGGTGATGCGGTTTTGGCAGTACACCAATGGGCGTG | 0 nt Homology 1 |
| | | GATAGCGGTTTGACTCACGGGGATTTCCAAGTCTCCACCCCATTGACGTCAATGGGAGTTTGTTTTGGC | |
| | | ACCAAAATCAACGGGACTTTCCAAAATGTCGTAATAACCCCGCCCCGTTGACGCAAATGGGCGGTAGG | |
| | | CGTGTACGGTGGGAGGTCTATATAAGCAGAGCTCGTTTAGTGAACCGTC (SEQ ID NO: 18965) | |
| | 254 nt | GTACATCTACGTATTAGTCATCGCTATTACCATGGTGATGCGGTTTTGGCAGTACACCAATGGGCGTG | 0 nt Homology 1 |
| | | GATAGCGGTTTGACTCACGGGGATTTCCAAGTCTCCACCCCATTGACGTCAATGGGAGTTTGTTTTGGC | |
| | | ACCAAAATCAACGGGACTTTCCAAAATGTCGTAATAACCCCGCCCCGTTGACGCAAATGGGCGGTAGG | |
| | | CGTGTACGGTGGGAGGTCTATATAAGCAGAGCTCGTTTAGTGAACCGTC (SEQ ID NO: 18966) | |
| | 253 nt | TACATCTACGTATTAGTCATCGCTATTACCATGGTGATGCGGTTTTGGCAGTACACCAATGGGCGTGGA | 0 nt Homology 1 |
| | | TAGCGGTTTGACTCACGGGGATTTCCAAGTCTCCACCCCATTGACGTCAATGGGAGTTTGTTTTGGCAC | |
| | | CAAAATCAACGGGACTTTCCAAAATGTCGTAATAACCCCGCCCCGTTGACGCAAATGGGCGGTAGGCG | |
| | | TGTACGGTGGGAGGTCTATATAAGCAGAGCTCGTTTAGTGAACCGTC (SEQ ID NO: 18967) | |
| | 252 nt | ACATCTACGTATTAGTCATCGCTATTACCATGGTGATGCGGTTTTGGCAGTACACCAATGGGCGTGGAT | 0 nt Homology 1 |
| | | AGCGGTTTGACTCACGGGGATTTCCAAGTCTCCACCCCATTGACGTCAATGGGAGTTTGTTTTGGCACC | |
| | | AAAATCAACGGGACTTTCCAAAATGTCGTAATAACCCCGCCCCGTTGACGCAAATGGGCGGTAGGCGT | |
| | | GTACGGTGGGAGGTCTATATAAGCAGAGCTCGTTTAGTGAACCGTC (SEQ ID NO: 18968) | |
| | 251 nt | CATCTACGTATTAGTCATCGCTATTACCATGGTGATGCGGTTTTGGCAGTACACCAATGGGCGTGGATA | 0 nt Homology 1 |
| | | GCGGTTTGACTCACGGGGATTTCCAAGTCTCCACCCCATTGACGTCAATGGGAGTTTGTTTTGGCACCA | |
| | | AAATCAACGGGACTTTCCAAAATGTCGTAATAACCCCGCCCCGTTGACGCAAATGGGCGGTAGGCGTG | |
| | | TACGGTGGGAGGTCTATATAAGCAGAGCTCGTTTAGTGAACCGTC (SEQ ID NO: 18969) | |
| | 250 nt | ATCTACGTATTAGTCATCGCTATTACCATGGTGATGCGGTTTTGGCAGTACACCAATGGGCGTGGATA | 0 nt Homology 1 |
| | | GCGGTTTGACTCACGGGGATTTCCAAGTCTCCACCCCATTGACGTCAATGGGAGTTTGTTTTGGCACCA | |
| | | AAATCAACGGGACTTTCCAAAATGTCGTAATAACCCCGCCCCGTTGACGCAAATGGGCGGTAGGCGTG | |
| | | TACGGTGGGAGGTCTATATAAGCAGAGCTCGTTTAGTGAACCGTC (SEQ ID NO: 18970) | |
| | 249 nt | TCTACGTATTAGTCATCGCTATTACCATGGTGATGCGGTTTTGGCAGTACACCAATGGGCGTGGATAG | 0 nt Homology 1 |
| | | CGGTTTGACTCACGGGGATTTCCAAGTCTCCACCCCATTGACGTCAATGGGAGTTTGTTTTGGCACCAA | |
| | | AATCAACGGGACTTTCCAAAATGTCGTAATAACCCCGCCCCGTTGACGCAAATGGGCGGTAGGCGTGT | |
| | | ACGGTGGGAGGTCTATATAAGCAGAGCTCGTTTAGTGAACCGTC (SEQ ID NO: 18971) | |
| | 248 nt | CTACGTATTAGTCATCGCTATTACCATGGTGATGCGGTTTTGGCAGTACACCAATGGGCGTGGATAGC | 0 nt Homology 1 |
| | | GGTTTGACTCACGGGGATTTCCAAGTCTCCACCCCATTGACGTCAATGGGAGTTTGTTTTGGCACCAAA | |
| | | ATCAACGGGACTTTCCAAAATGTCGTAATAACCCCGCCCCGTTGACGCAAATGGGCGGTAGGCGTGTA | |
| | | CGGTGGGAGGTCTATATAAGCAGAGCTCGTTTAGTGAACCGTC (SEQ ID NO: 18972) | |
| | 247 nt | TACGTATTAGTCATCGCTATTACCATGGTGATGCGGTTTTGGCAGTACACCAATGGGCGTGGATAGCG | 0 nt Homology 1 |
| | | GTTTGACTCACGGGGATTTCCAAGTCTCCACCCCATTGACGTCAATGGGAGTTTGTTTTGGCACCAAAA | |
| | | TCAACGGGACTTTCCAAAATGTCGTAATAACCCCGCCCCGTTGACGCAAATGGGCGGTAGGCGTGTAC | |
| | | GGTGGGAGGTCTATATAAGCAGAGCTCGTTTAGTGAACCGTC (SEQ ID NO: 18973) | |
| | 246 nt | ACGTATTAGTCATCGCTATTACCATGGTGATGCGGTTTTGGCAGTACACCAATGGGCGTGGATAGCGG | 0 nt Homology 1 |
| | | TTTGACTCACGGGGATTTCCAAGTCTCCACCCCATTGACGTCAATGGGAGTTTGTTTTGGCACCAAAAT | |
| | | CAACGGGACTTTCCAAAATGTCGTAATAACCCCGCCCCGTTGACGCAAATGGGCGGTAGGCGTGTACG | |
| | | GTGGGAGGTCTATATAAGCAGAGCTCGTTTAGTGAACCGTC (SEQ ID NO: 18974) | |
| | 245 nt | CGTATTAGTCATCGCTATTACCATGGTGATGCGGTTTTGGCAGTACACCAATGGGCGTGGATAGCGGT | 0 nt Homology 1 |
| | | TTGACTCACGGGGATTTCCAAGTCTCCACCCCATTGACGTCAATGGGAGTTTGTTTTGGCACCAAAATC | |
| | | AACGGGACTTTCCAAAATGTCGTAATAACCCCGCCCCGTTGACGCAAATGGGCGGTAGGCGTGTACG | |
| | | GTGGGAGGTCTATATAAGCAGAGCTCGTTTAGTGAACCGTC (SEQ ID NO: 18975) | |
| | 244 nt | GTATTAGTCATCGCTATTACCATGGTGATGCGGTTTTGGCAGTACACCAATGGGCGTGGATAGCGGTT | 0 nt Homology 1 |
| | | TGACTCACGGGGATTTCCAAGTCTCCACCCCATTGACGTCAATGGGAGTTTGTTTTGGCACCAAAATCA | |
| | | ACGGGACTTTCCAAAATGTCGTAATAACCCCGCCCCGTTGACGCAAATGGGCGGTAGGCGTGTACGGT | |
| | | GGGAGGTCTATATAAGCAGAGCTCGTTTAGTGAACCGTC (SEQ ID NO: 18976) | |
| | 243 nt | TATTAGTCATCGCTATTACCATGGTGATGCGGTTTTGGCAGTACACCAATGGGCGTGGATAGCGGTTT | 0 nt Homology 1 |
| | | GACTCACGGGGATTTCCAAGTCTCCACCCCATTGACGTCAATGGGAGTTTGTTTTGGCACCAAAATCAA | |
| | | CGGGACTTTCCAAAATGTCGTAATAACCCCGCCCCGTTGACGCAAATGGGCGGTAGGCGTGTACGGT | |
| | | GGGAGGTCTATATAAGCAGAGCTCGTTTAGTGAACCGTC (SEQ ID NO: 18977) | |
| | 242 nt | ATTAGTCATCGCTATTACCATGGTGATGCGGTTTTGGCAGTACACCAATGGGCGTGGATAGCGGTTTG | 0 nt Homology 1 |
| | | ACTCACGGGGATTTCCAAGTCTCCACCCCATTGACGTCAATGGGAGTTTGTTTTGGCACCAAAATCAAC | |
| | | GGGACTTTCCAAAATGTCGTAATAACCCCGCCCCGTTGACGCAAATGGGCGGTAGGCGTGTACGGTG | |
| | | GGAGGTCTATATAAGCAGAGCTCGTTTAGTGAACCGTC (SEQ ID NO: 18978) | |
| | 241 nt | TTAGTCATCGCTATTACCATGGTGATGCGGTTTTGGCAGTACACCAATGGGCGTGGATAGCGGTTTGA | 0 nt Homology 1 |
| | | CTCACGGGGATTTCCAAGTCTCCACCCCATTGACGTCAATGGGAGTTTGTTTTGGCACCAAAATCAACG | |
| | | GGACTTTCCAAAATGTCGTAATAACCCCGCCCCGTTGACGCAAATGGGCGGTAGGCGTGTACGGTGG | |
| | | GAGGTCTATATAAGCAGAGCTCGTTTAGTGAACCGTC (SEQ ID NO: 18979) | |
| | 240 nt | TAGTCATCGCTATTACCATGGTGATGCGGTTTTGGCAGTACACCAATGGGCGTGGATAGCGGTTTGAC | 0 nt Homology 1 |
| | | TCACGGGGATTTCCAAGTCTCCACCCCATTGACGTCAATGGGAGTTTGTTTTGGCACCAAAATCAACGG | |
| | | GACTTTCCAAAATGTCGTAATAACCCCGCCCCGTTGACGCAAATGGGCGGTAGGCGTGTACGGTGGG | |
| | | AGGTCTATATAAGCAGAGCTCGTTTAGTGAACCGTC (SEQ ID NO: 18980) | |
| | 239 nt | AGTCATCGCTATTACCATGGTGATGCGGTTTTGGCAGTACACCAATGGGCGTGGATAGCGGTTTGACT | 0 nt Homology 1 |
| | | CACGGGGATTTCCAAGTCTCCACCCCATTGACGTCAATGGGAGTTTGTTTTGGCACCAAAATCAACGG | |
| | | GACTTTCCAAAATGTCGTAATAACCCCGCCCCGTTGACGCAAATGGGCGGTAGGCGTGTACGGTGGG | |
| | | AGGTCTATATAAGCAGAGCTCGTTTAGTGAACCGTC (SEQ ID NO: 18981) | |
| | 238 nt | GTCATCGCTATTACCATGGTGATGCGGTTTTGGCAGTACACCAATGGGCGTGGATAGCGGTTTGACTC | 0 nt Homology 1 |
| | | ACGGGGATTTCCAAGTCTCCACCCCATTGACGTCAATGGGAGTTTGTTTTGGCACCAAAATCAACGGG | |
| | | ACTTTCCAAAATGTCGTAATAACCCCGCCCCGTTGACGCAAATGGGCGGTAGGCGTGTACGGTGGGA | |
| | | GGTCTATATAAGCAGAGCTCGTTTAGTGAACCGTC (SEQ ID NO: 18982) | |
| | 237 nt | TCATCGCTATTACCATGGTGATGCGGTTTTGGCAGTACACCAATGGGCGTGGATAGCGGTTTGACTCA | 0 nt Homology 1 |
| | | CGGGGATTTCCAAGTCTCCACCCCATTGACGTCAATGGGAGTTTGTTTTGGCACCAAAATCAACGGGA | |
| | | CTTTCCAAAATGTCGTAATAACCCCGCCCCGTTGACGCAAATGGGCGGTAGGCGTGTACGGTGGGAG | |
| | | GTCTATATAAGCAGAGCTCGTTTAGTGAACCGTC (SEQ ID NO: 18983) | |
| | 236 nt | CATCGCTATTACCATGGTGATGCGGTTTTGGCAGTACACCAATGGGCGTGGATAGCGGTTTGACTCAC | 0 nt Homology 1 |
| | | GGGGATTTCCAAGTCTCCACCCCATTGACGTCAATGGGAGTTTGTTTTGGCACCAAAATCAACGGGAC | |
| | | TTTCCAAAATGTCGTAATAACCCCGCCCCGTTGACGCAAATGGGCGGTAGGCGTGTACGGTGGGAGG | |
| | | TCTATATAAGCAGAGCTCGTTTAGTGAACCGTC (SEQ ID NO: 18984) | |
| | 235 nt | ATCGCTATTACCATGGTGATGCGGTTTTGGCAGTACACCAATGGGCGTGGATAGCGGTTTGACTCACG | 0 nt Homology 1 |
| | | GGGATTTCCAAGTCTCCACCCCATTGACGTCAATGGGAGTTTGTTTTGGCACCAAAATCAACGGGACTT | |
| | | TCCAAAATGTCGTAATAACCCCGCCCCGTTGACGCAAATGGGGGTAGGCGTGTACGGTGGGAGGTC | |
| | | TATATAAGCAGAGCTCGTTTAGTGAACCGTC (SEQ ID NO: 18985) | |
| | 234 nt | TCGCTATTACCATGGTGATGCGGTTTTGGCAGTACACCAATGGGCGTGGATAGCGGTTTGACTCACGG | 0 nt Homology 1 |
| | | GGATTTCCAAGTCTCCACCCCATTGACGTCAATGGGAGTTTGTTTTGGCACCAAAATCAACGGGACTTT | |
| | | CCAAAATGTCGTAATAACCCCGCCCCGTTGACGCAAATGGGCGGTAGGCGTGTACGGTGGGAGGTCT | |
| | | ATATAAGCAGAGCTCGTTTAGTGAACCGTC (SEQ ID NO: 18986) | |
| | 233 nt | CGCTATTACCATGGTGATGCGGTTTTGGCAGTACACCAATGGGCGTGGATAGCGGTTTGACTCACGGG | 0 nt Homology 1 |
| | | GATTTCCAAGTCTCCACCCCATTGACGTCAATGGGAGTTTGTTTTGGCACCAAAATCAACGGGACTTTC | |
| | | CAAAATGTCGTAATAACCCCGCCCCGTTGACGCAAATGGGCGGTAGGCGTGTACGGTGGGAGGTCTA | |
| | | TATAAGCAGAGCTCGTTTAGTGAACCGTC (SEQ ID NO: 18987) | |
| | 232 nt | GCTATTACCATGGTGATGCGGTTTTGGCAGTACACCAATGGGCGTGGATAGCGGTTTGACTCACGGG | 0 nt Homology 1 |
| | | GATTTCCAAGTCTCCACCCCATTGACGTCAATGGGAGTTTGTTTTGGCACCAAAATCAACGGGACTTTC | |
| | | CAAAATGTCGTAATAACCCCGCCCCGTTGACGCAAATGGGCGGTAGGCGTGTACGGTGGGAGGTCTA | |
| | | TATAAGCAGAGCTCGTTTAGTGAACCGTC (SEQ ID NO: 18988) | |
| | 231 nt | CTATTACCATGGTGATGCGGTTTTGGCAGTACACCAATGGGCGTGGATAGCGGTTTGACTCACGGGGA | 0 nt Homology 1 |
| | | TTTCCAAGTCTCCACCCCATTGACGTCAATGGGAGTTTGTTTTGGCACCAAAATCAACGGGACTTTCCA | |
| | | AAATGTCGTAATAACCCCGCCCCGTTGACGCAAATGGGCGGTAGGCGTGTACGGTGGGAGGTCTATA | |
| | | TAAGCAGAGCTCGTTTAGTGAACCGTC (SEQ ID NO: 18989) | |
| | 230 nt | TATTACCATGGTGATGCGGTTTTGGCAGTACACCAATGGGCGTGGATAGCGGTTTGACTCACGGGGAT | 0 nt Homology 1 |
| | | TTCCAAGTCTCCACCCCATTGACGTCAATGGGAGTTTGTTTTGGCACCAAAATCAACGGGACTTTCCAA | |
| | | AATGTCGTAATAACCCCGCCCCGTTGACGCAAATGGGGGTAGGCGTGTACGGTGGGAGGTCTATAT | |
| | | AAGCAGAGCTCGTTTAGTGAACCGTC (SEQ ID NO: 18990) | |
| | 229 nt | ATTACCATGGTGATGCGGTTTTGGCAGTACACCAATGGGCGTGGATAGCGGTTTGACTCACGGGGATT | 0 nt Homology 1 |
| | | TCCAAGTCTCCACCCCATTGACGTCAATGGGAGTTTGTTTTGGCACCAAAATCAACGGGACTTTCCAAA | |
| | | ATGTCGTAATAACCCCGCCCCGTTGACGCAAATGGGCGGTAGGCGTGTACGGTGGGAGGTCTATATA | |
| | | AGCAGAGCTCGTTTAGTGAACCGTC (SEQ ID NO: 18991) | |
| | 228 nt | TTACCATGGTGATGCGGTTTTGGCAGTACACCAATGGGCGTGGATAGCGGTTTGACTCACGGGGATTT | 0 nt Homology 1 |
| | | CCAAGTCTCCACCCCATTGACGTCAATGGGAGTTTGTTTTGGCACCAAAATCAACGGGACTTTCCAAAA | |
| | | TGTCGTAATAACCCCGCCCCGTTGACGCAAATGGGCGGTAGGCGTGTACGGTGGGAGGTCTATATAA | |
| | | GCAGAGCTCGTTTAGTGAACCGTC (SEQ ID NO: 18992) | |
| | 227 nt | TACCATGGTGATGCGGTTTTGGCAGTACACCAATGGGCGTGGATAGCGGTTTGACTCACGGGGATTTC | 0 nt Homology 1 |
| | | CAAGTCTCCACCCCATTGACGTCAATGGGAGTTTGTTTTGGCACCAAAATCAACGGGACTTTCCAAAAT | |
| | | GTCGTAATAACCCCGCCCCGTTGACGCAAATGGGCGGTAGGCGTGTACGGTGGGAGGTCTATATAAG | |
| | | CAGAGCTCGTTTAGTGAACCGTC (SEQ ID NO: 18993) | |
| | 226 nt | ACCATGGTGATGCGGTTTTGGCAGTACACCAATGGGCGTGGATAGCGGTTTGACTCACGGGGATTTCC | 0 nt Homology 1 |
| | | AAGTCTCCACCCCATTGACGTCAATGGGAGTTTGTTTTGGCACCAAAATCAACGGGACTTTCCAAAATG | |
| | | TCGTAATAACCCCGCCCCGTTGACGCAAATGGGCGGTAGGCGTGTACGGTGGGAGGTCTATATAAGC | |
| | | AGAGCTCGTTTAGTGAACCGTC (SEQ ID NO: 18994) | |
| | 225 nt | CCATGGTGATGCGGTTTTGGCAGTACACCAATGGGCGTGGATAGCGGTTTGACTCACGGGGATTTCCA | 0 nt Homology 1 |
| | | AGTCTCCACCCCATTGACGTCAATGGGAGTTTGTTTTGGCACCAAAATCAACGGGACTTTCCAAAATGT | |
| | | CGTAATAACCCCGCCCCGTTGACGCAAATGGGCGGTAGGCGTGTACGGTGGGAGGTCTATATAAGCA | |
| | | GAGCTCGTTTAGTGAACCGTC (SEQ ID NO: 18995) | |
| | 224 nt | CATGGTGATGCGGTTTTGGCAGTACACCAATGGGCGTGGATAGCGGTTTGACTCACGGGGATTTCCAA | 0 nt Homology 1 |
| | | GTCTCCACCCCATTGACGTCAATGGGAGTTTGTTTTGGCACCAAAATCAACGGGACTTTCCAAAATGTC | |
| | | GTAATAACCCCGCCCCGTTGACGCAAATGGGCGGTAGGCGTGTACGGTGGGAGGTCTATATAAGCAG | |
| | | AGCTCGTTTAGTGAACCGTC (SEQ ID NO: 18996) | |
| | 223 nt | ATGGTGATGCGGTTTTGGCAGTACACCAATGGGCGTGGATAGCGGTTTGACTCACGGGGATTTCCAA | 0 nt Homology 1 |
| | | GTCTCCACCCCATTGACGTCAATGGGAGTTTGTTTTGGCACCAAAATCAACGGGACTTTCCAAAATGTC | |
| | | GTAATAACCCCGCCCCGTTGACGCAAATGGGCGGTAGGCGTGTACGGTGGGAGGTCTATATAAGCAG | |
| | | AGCTCGTTTAGTGAACCGTC (SEQ ID NO: 18997) | |
| | 222 nt | TGGTGATGCGGTTTTGGCAGTACACCAATGGGCGTGGATAGCGGTTTGACTCACGGGGATTTCCAAG | 0 nt Homology 1 |
| | | TCTCCACCCCATTGACGTCAATGGGAGTTTGTTTTGGCACCAAAATCAACGGGACTTTCCAAAATGTCG | |
| | | TAATAACCCCGCCCCGTTGACGCAAATGGGCGGTAGGCGTGTACGGTGGGAGGTCTATATAAGCAGA | |
| | | GCTCGTTTAGTGAACCGTC (SEQ ID NO: 18998) | |
| | 221 nt | GGTGATGCGGTTTTGGCAGTACACCAATGGGCGTGGATAGCGGTTTGACTCACGGGGATTTCCAAGT | 0 nt Homology 1 |
| | | CTCCACCCCATTGACGTCAATGGGAGTTTGTTTTGGCACCAAAATCAACGGGACTTTCCAAAATGTCGT | |
| | | AATAACCCCGCCCCGTTGACGCAAATGGGCGGTAGGCGTGTACGGTGGGAGGTCTATATAAGCAGAG | |
| | | CTCGTTTAGTGAACCGTC (SEQ ID NO: 18999) | |
| | 220 nt | GTGATGCGGTTTTGGCAGTACACCAATGGGCGTGGATAGCGGTTTGACTCACGGGGATTTCCAAGTCT | 0 nt Homology 1 |
| | | CCACCCCATTGACGTCAATGGGAGTTTGTTTTGGCACCAAAATCAACGGGACTTTCCAAAATGTCGTAA | |
| | | TAACCCCGCCCCGTTGACGCAAATGGGCGGTAGGCGTGTACGGTGGGAGGTCTATATAAGCAGAGCT | |
| | | CGTTTAGTGAACCGTC (SEQ ID NO: 19000) | |
| | 219 nt | TGATGCGGTTTTGGCAGTACACCAATGGGCGTGGATAGCGGTTTGACTCACGGGGATTTCCAAGTCTC | 0 nt Homology 1 |
| | | CACCCCATTGACGTCAATGGGAGTTTGTTTTGGCACCAAAATCAACGGGACTTTCCAAAATGTCGTAAT | |
| | | AACCCCGCCCCGTTGACGCAAATGGGCGGTAGGCGTGTACGGTGGGAGGTCTATATAAGCAGAGCTC | |
| | | GTTTAGTGAACCGTC (SEQ ID NO: 19001) | |
| | 218 nt | GATGCGGTTTTGGCAGTACACCAATGGGCGTGGATAGCGGTTTGACTCACGGGGATTTCCAAGTCTCC | 0 nt Homology 1 |
| | | ACCCCATTGACGTCAATGGGAGTTTGTTTTGGCACCAAAATCAACGGGACTTTCCAAAATGTCGTAATA | |
| | | ACCCCGCCCCGTTGACGCAAATGGGCGGTAGGCGTGTACGGTGGGAGGTCTATATAAGCAGAGCTCG | |
| | | TTTAGTGAACCGTC (SEQ ID NO: 19002) | |
| | 217 nt | ATGCGGTTTTGGCAGTACACCAATGGGCGTGGATAGCGGTTTGACTCACGGGGATTTCCAAGTCTCCA | 0 nt Homology 1 |
| | | CCCCATTGACGTCAATGGGAGTTTGTTTTGGCACCAAAATCAACGGGACTTTCCAAAATGTCGTAATAA | |
| | | CCCCGCCCCGTTGACGCAAATGGGCGGTAGGCGTGTACGGTGGGAGGTCTATATAAGCAGAGCTCGT | |
| | | TTAGTGAACCGTC (SEQ ID NO: 19003) | |
| | 216 nt | TGCGGTTTTGGCAGTACACCAATGGGCGTGGATAGCGGTTTGACTCACGGGGATTTCCAAGTCTCCAC | 0 nt Homology 1 |
| | | CCCATTGACGTCAATGGGAGTTTGTTTTGGCACCAAAATCAACGGGACTTTCCAAAATGTCGTAATAAC | |
| | | CCCGCCCCGTTGACGCAAATGGGCGGTAGGCGTGTACGGTGGGAGGTCTATATAAGCAGAGCTCGTT | |
| | | TAGTGAACCGTC (SEQ ID NO: 19004) | |
| | 215 nt | GCGGTTTTGGCAGTACACCAATGGGCGTGGATAGCGGTTTGACTCACGGGGATTTCCAAGTCTCCACC | 0 nt Homology 1 |
| | | CCATTGACGTCAATGGGAGTTTGTTTTGGCACCAAAATCAACGGGACTTTCCAAAATGTCGTAATAACC | |
| | | CCGCCCCGTTGACGCAAATGGGCGGTAGGCGTGTACGGTGGGAGGTCTATATAAGCAGAGCTCGTTT | |
| | | AGTGAACCGTC (SEQ ID NO: 19005) | |
| | 214 nt | CGGTTTTGGCAGTACACCAATGGGCGTGGATAGCGGTTTGACTCACGGGGATTTCCAAGTCTCCACCC | 0 nt Homology 1 |
| | | CATTGACGTCAATGGGAGTTTGTTTTGGCACCAAAATCAACGGGACTTTCCAAAATGTCGTAATAACCC | |
| | | CGCCCCGTTGACGCAAATGGGCGGTAGGCGTGTACGGTGGGAGGTCTATATAAGCAGAGCTCGTTTA | |
| | | GTGAACCGTC (SEQ ID NO: 19006) | |
| | 213 nt | GGTTTTGGCAGTACACCAATGGGCGTGGATAGCGGTTTGACTCACGGGGATTTCCAAGTCTCCACCCC | 0 nt Homology 1 |
| | | ATTGACGTCAATGGGAGTTTGTTTTGGCACCAAAATCAACGGGACTTTCCAAAATGTCGTAATAACCCC | |
| | | GCCCCGTTGACGCAAATGGGCGGTAGGCGTGTACGGTGGGAGGTCTATATAAGCAGAGCTCGTTTAG | |
| | | TGAACCGTC (SEQ ID NO: 19007) | |
| | 212 nt | GTTTTGGCAGTACACCAATGGGCGTGGATAGCGGTTTGACTCACGGGGATTTCCAAGTCTCCACCCCA | 0 nt Homology 1 |
| | | TTGACGTCAATGGGAGTTTGTTTTGGCACCAAAATCAACGGGACTTTCCAAAATGTCGTAATAACCCCG | |
| | | CCCCGTTGACGCAAATGGGCGGTAGGCGTGTACGGTGGGAGGTCTATATAAGCAGAGCTCGTTTAGT | |
| | | GAACCGTC (SEQ ID NO: 19008) | |
| | 211 nt | TTTTGGCAGTACACCAATGGGCGTGGATAGCGGTTTGACTCACGGGGATTTCCAAGTCTCCACCCCATT | 0 nt Homology 1 |
| | | GACGTCAATGGGAGTTTGTTTTGGCACCAAAATCAACGGGACTTTCCAAAATGTCGTAATAACCCCGC | |
| | | CCCGTTGACGCAAATGGGCGGTAGGCGTGTACGGTGGGAGGTCTATATAAGCAGAGCTCGTTTAGTG | |
| | | AACCGTC (SEQ ID NO: 19009) | |
| | 210 nt | TTTGGCAGTACACCAATGGGCGTGGATAGCGGTTTGACTCACGGGGATTTCCAAGTCTCCACCCCATT | 0 nt Homology 1 |
| | | GACGTCAATGGGAGTTTGTTTTGGCACCAAAATCAACGGGACTTTCCAAAATGTCGTAATAACCCCGC | |
| | | CCCGTTGACGCAAATGGGCGGTAGGCGTGTACGGTGGGAGGTCTATATAAGCAGAGCTCGTTTAGTG | |
| | | AACCGTC (SEQ ID NO: 19010) | |
| | 209 nt | TTGGCAGTACACCAATGGGCGTGGATAGCGGTTTGACTCACGGGGATTTCCAAGTCTCCACCCCATTG | 0 nt Homology 1 |
| | | ACGTCAATGGGAGTTTGTTTTGGCACCAAAATCAACGGGACTTTCCAAAATGTCGTAATAACCCCGCCC | |
| | | CGTTGACGCAAATGGGCGGTAGGCGTGTACGGTGGGAGGTCTATATAAGCAGAGCTCGTTTAGTGAA | |
| | | CCGTC (SEQ ID NO: 19011) | |
| | 208 nt | TGGCAGTACACCAATGGGCGTGGATAGCGGTTTGACTCACGGGGATTTCCAAGTCTCCACCCCATTGA | 0 nt Homology 1 |
| | | CGTCAATGGGAGTTTGTTTTGGCACCAAAATCAACGGGACTTTCCAAAATGTCGTAATAACCCCGCCCC | |
| | | GTTGACGCAAATGGGCGGTAGGCGTGTACGGTGGGAGGTCTATATAAGCAGAGCTCGTTTAGTGAAC | |
| | | CGTC (SEQ ID NO: 19012) | |
| | 207 nt | GGCAGTACACCAATGGGCGTGGATAGCGGTTTGACTCACGGGGATTTCCAAGTCTCCACCCCATTGAC | 0 nt Homology 1 |
| | | GTCAATGGGAGTTTGTTTTGGCACCAAAATCAACGGGACTTTCCAAAATGTCGTAATAACCCCGCCCC | |
| | | GTTGACGCAAATGGGCGGTAGGCGTGTACGGTGGGAGGTCTATATAAGCAGAGCTCGTTTAGTGAAC | |
| | | CGTC (SEQ ID NO: 19013) | |
| | 206 nt | GCAGTACACCAATGGGCGTGGATAGCGGTTTGACTCACGGGGATTTCCAAGTCTCCACCCCATTGACG | 0 nt Homology 1 |
| | | TCAATGGGAGTTTGTTTTGGCACCAAAATCAACGGGACTTTCCAAAATGTCGTAATAACCCCGCCCCGT | |
| | | TGACGCAAATGGGCGGTAGGCGTGTACGGTGGGAGGTCTATATAAGCAGAGCTCGTTTAGTGAACCG | |
| | | TC (SEQ ID NO: 19014) | |
| | 205 nt | CAGTACACCAATGGGCGTGGATAGCGGTTTGACTCACGGGGATTTCCAAGTCTCCACCCCATTGACGT | 0 nt Homology 1 |
| | | CAATGGGAGTTTGTTTTGGCACCAAAATCAACGGGACTTTCCAAAATGTCGTAATAACCCCGCCCCGTT | |
| | | GACGCAAATGGGCGGTAGGCGTGTACGGTGGGAGGTCTATATAAGCAGAGCTCGTTTAGTGAACCGT | |
| | | C (SEQ ID NO: 19015) | |
| | 204 nt | AGTACACCAATGGGCGTGGATAGCGGTTTGACTCACGGGGATTTCCAAGTCTCCACCCCATTGACGTC | 0 nt Homology 1 |
| | | AATGGGAGTTTGTTTTGGCACCAAAATCAACGGGACTTTCCAAAATGTCGTAATAACCCCGCCCCGTTG | |
| | | ACGCAAATGGGCGGTAGGCGTGTACGGTGGGAGGTCTATATAAGCAGAGCTCGTTTAGTGAACCGTC | |
| | | (SEQ ID NO: 19016) | |
| | 203 nt | GTACACCAATGGGCGTGGATAGCGGTTTGACTCACGGGGATTTCCAAGTCTCCACCCCATTGACGTCA | 0 nt Homology 1 |
| | | ATGGGAGTTTGTTTTGGCACCAAAATCAACGGGACTTTCCAAAATGTCGTAATAACCCCGCCCCGTTGA | |
| | | CGCAAATGGGCGGTAGGCGTGTACGGTGGGAGGTCTATATAAGCAGAGCTCGTTTAGTGAACCGTC | |
| | | (SEQ ID NO: 19017) | |
| | 202 nt | TACACCAATGGGCGTGGATAGCGGTTTGACTCACGGGGATTTCCAAGTCTCCACCCCATTGACGTCAA | 0 nt Homology 1 |
| | | TGGGAGTTTGTTTTGGCACCAAAATCAACGGGACTTTCCAAAATGTCGTAATAACCCCGCCCCGTTGAC | |
| | | GCAAATGGGCGGTAGGCGTGTACGGTGGGAGGTCTATATAAGCAGAGCTCGTTTAGTGAACCGTC | |
| | | (SEQ ID NO: 19018) | |
| | 201 nt | ACACCAATGGGCGTGGATAGCGGTTTGACTCACGGGGATTTCCAAGTCTCCACCCCATTGACGTCAAT | 0 nt Homology 1 |
| | | GGGAGTTTGTTTTGGCACCAAAATCAACGGGACTTTCCAAAATGTCGTAATAACCCCGCCCCGTTGAC | |
| | | GCAAATGGGCGGTAGGCGTGTACGGTGGGAGGTCTATATAAGCAGAGCTCGTTTAGTGAACCGTC | |
| | | (SEQ ID NO: 19019) | |
| | 200 nt | CACCAATGGGCGTGGATAGCGGTTTGACTCACGGGGATTTCCAAGTCTCCACCCCATTGACGTCAATG | 0 nt Homology 1 |
| | | GGAGTTTGTTTTGGCACCAAAATCAACGGGACTTTCCAAAATGTCGTAATAACCCCGCCCCGTTGACGC | |
| | | AAATGGGCGGTAGGCGTGTACGGTGGGAGGTCTATATAAGCAGAGCTCGTTTAGTGAACCGTC (SEQ | |
| | | ID NO: 19020) | |
| | 199 nt | ACCAATGGGCGTGGATAGCGGTTTGACTCACGGGGATTTCCAAGTCTCCACCCCATTGACGTCAATGG | 0 nt Homology 1 |
| | | GAGTTTGTTTTGGCACCAAAATCAACGGGACTTTCCAAAATGTCGTAATAACCCCGCCCCGTTGACGCA | |
| | | AATGGGCGGTAGGCGTGTACGGTGGGAGGTCTATATAAGCAGAGCTCGTTTAGTGAACCGTC (SEQ | |
| | | ID NO: 19021) | |
| | 198 nt | CCAATGGGCGTGGATAGCGGTTTGACTCACGGGGATTTCCAAGTCTCCACCCCATTGACGTCAATGGG | 0 nt Homology 1 |
| | | AGTTTGTTTTGGCACCAAAATCAACGGGACTTTCCAAAATGTCGTAATAACCCCGCCCCGTTGACGCAA | |
| | | ATGGGCGGTAGGCGTGTACGGTGGGAGGTCTATATAAGCAGAGCTCGTTTAGTGAACCGTC (SEQ ID | |
| | | NO: 19022) | |
| | 197 nt | CAATGGGCGTGGATAGCGGTTTGACTCACGGGGATTTCCAAGTCTCCACCCCATTGACGTCAATGGGA | 0 nt Homology 1 |
| | | GTTTGTTTTGGCACCAAAATCAACGGGACTTTCCAAAATGTCGTAATAACCCCGCCCCGTTGACGCAAA | |
| | | TGGGCGGTAGGCGTGTACGGTGGGAGGTCTATATAAGCAGAGCTCGTTTAGTGAACCGTC (SEQ ID | |
| | | NO: 19023) | |
| | 196 nt | AATGGGCGTGGATAGCGGTTTGACTCACGGGGATTTCCAAGTCTCCACCCCATTGACGTCAATGGGAG | 0 nt Homology 1 |
| | | TTTGTTTTGGCACCAAAATCAACGGGACTTTCCAAAATGTCGTAATAACCCCGCCCCGTTGACGCAAAT | |
| | | GGGCGGTAGGCGTGTACGGTGGGAGGTCTATATAAGCAGAGCTCGTTTAGTGAACCGTC (SEQ ID | |
| | | NO: 19024) | |
| | 195 nt | ATGGGCGTGGATAGCGGTTTGACTCACGGGGATTTCCAAGTCTCCACCCCATTGACGTCAATGGGAGT | 0 nt Homology 1 |
| | | TTGTTTTGGCACCAAAATCAACGGGACTTTCCAAAATGTCGTAATAACCCCGCCCCGTTGACGCAAATG | |
| | | GGCGGTAGGCGTGTACGGTGGGAGGTCTATATAAGCAGAGCTCGTTTAGTGAACCGTC (SEQ ID NO: | |
| | | 19025) | |
| | 194 nt | TGGGCGTGGATAGCGGTTTGACTCACGGGGATTTCCAAGTCTCCACCCCATTGACGTCAATGGGAGTT | 0 nt Homology 1 |
| | | TGTTTTGGCACCAAAATCAACGGGACTTTCCAAAATGTCGTAATAACCCCGCCCCGTTGACGCAAATG | |
| | | GGCGGTAGGCGTGTACGGTGGGAGGTCTATATAAGCAGAGCTCGTTTAGTGAACCGTC (SEQ ID NO: | |
| | | 19026) | |
| | 193 nt | GGGCGTGGATAGCGGTTTGACTCACGGGGATTTCCAAGTCTCCACCCCATTGACGTCAATGGGAGTTT | 0 nt Homology 1 |
| | | GTTTTGGCACCAAAATCAACGGGACTTTCCAAAATGTCGTAATAACCCCGCCCCGTTGACGCAAATGG | |
| | | GCGGTAGGCGTGTACGGTGGGAGGTCTATATAAGCAGAGCTCGTTTAGTGAACCGTC (SEQ ID NO: | |
| | | 19027) | |
| | 192 nt | GGCGTGGATAGCGGTTTGACTCACGGGGATTTCCAAGTCTCCACCCCATTGACGTCAATGGGAGTTTG | 0 nt Homology 1 |
| | | TTTTGGCACCAAAATCAACGGGACTTTCCAAAATGTCGTAATAACCCCGCCCCGTTGACGCAAATGGG | |
| | | CGGTAGGCGTGTACGGTGGGAGGTCTATATAAGCAGAGCTCGTTTAGTGAACCGTC (SEQ ID NO: | |
| | | 19028) | |
| | 191 nt | GCGTGGATAGCGGTTTGACTCACGGGGATTTCCAAGTCTCCACCCCATTGACGTCAATGGGAGTTTGT | 0 nt Homology 1 |
| | | TTTGGCACCAAAATCAACGGGACTTTCCAAAATGTCGTAATAACCCCGCCCCGTTGACGCAAATGGGC | |
| | | GGTAGGCGTGTACGGTGGGAGGTCTATATAAGCAGAGCTCGTTTAGTGAACCGTC (SEQ ID NO: | |
| | | 19029) | |
| | 190 nt | CGTGGATAGCGGTTTGACTCACGGGGATTTCCAAGTCTCCACCCCATTGACGTCAATGGGAGTTTGTTT | 0 nt Homology 1 |
| | | TGGCACCAAAATCAACGGGACTTTCCAAAATGTCGTAATAACCCCGCCCCGTTGACGCAAATGGGCGG | |
| | | TAGGCGTGTACGGTGGGAGGTCTATATAAGCAGAGCTCGTTTAGTGAACCGTC (SEQ ID NO: 19030) | |
| | 189 nt | GTGGATAGCGGTTTGACTCACGGGGATTTCCAAGTCTCCACCCCATTGACGTCAATGGGAGTTTGTTTT | 0 nt Homology 1 |
| | | GGCACCAAAATCAACGGGACTTTCCAAAATGTCGTAATAACCCCGCCCCGTTGACGCAAATGGGCGGT | |
| | | AGGCGTGTACGGTGGGAGGTCTATATAAGCAGAGCTCGTTTAGTGAACCGTC (SEQ ID NO: 19031) | |
| | 188 nt | TGGATAGCGGTTTGACTCACGGGGATTTCCAAGTCTCCACCCCATTGACGTCAATGGGAGTTTGTTTTG | 0 nt Homology 1 |
| | | GCACCAAAATCAACGGGACTTTCCAAAATGTCGTAATAACCCCGCCCCGTTGACGCAAATGGGCGGTA | |
| | | GGCGTGTACGGTGGGAGGTCTATATAAGCAGAGCTCGTTTAGTGAACCGTC (SEQ ID NO: 19032) | |
| | 187 nt | GGATAGCGGTTTGACTCACGGGGATTTCCAAGTCTCCACCCCATTGACGTCAATGGGAGTTTGTTTTG | 0 nt Homology 1 |
| | | GCACCAAAATCAACGGGACTTTCCAAAATGTCGTAATAACCCCGCCCCGTTGACGCAAATGGGCGGTA | |
| | | GGCGTGTACGGTGGGAGGTCTATATAAGCAGAGCTCGTTTAGTGAACCGTC (SEQ ID NO: 19033) | |
| | 186 nt | GATAGCGGTTTGACTCACGGGGATTTCCAAGTCTCCACCCCATTGACGTCAATGGGAGTTTGTTTTGGC | 0 nt Homology 1 |
| | | ACCAAAATCAACGGGACTTTCCAAAATGTCGTAATAACCCCGCCCCGTTGACGCAAATGGGCGGTAGG | |
| | | CGTGTACGGTGGGAGGTCTATATAAGCAGAGCTCGTTTAGTGAACCGTC (SEQ ID NO: 19034) | |
| | 185 nt | ATAGCGGTTTGACTCACGGGGATTTCCAAGTCTCCACCCCATTGACGTCAATGGGAGTTTGTTTTGGCA | 0 nt Homology 1 |
| | | CCAAAATCAACGGGACTTTCCAAAATGTCGTAATAACCCCGCCCCGTTGACGCAAATGGGCGGTAGGC | |
| | | GTGTACGGTGGGAGGTCTATATAAGCAGAGCTCGTTTAGTGAACCGTC (SEQ ID NO: 19035) | |
| | 184 nt | TAGCGGTTTGACTCACGGGGATTTCCAAGTCTCCACCCCATTGACGTCAATGGGAGTTTGTTTTGGCAC | 0 nt Homology 1 |
| | | CAAAATCAACGGGACTTTCCAAAATGTCGTAATAACCCCGCCCCGTTGACGCAAATGGGCGGTAGGCG | |
| | | TGTACGGTGGGAGGTCTATATAAGCAGAGCTCGTTTAGTGAACCGTC (SEQ ID NO: 19036) | |
| | 183 nt | AGCGGTTTGACTCACGGGGATTTCCAAGTCTCCACCCCATTGACGTCAATGGGAGTTTGTTTTGGCACC | 0 nt Homology 1 |
| | | AAAATCAACGGGACTTTCCAAAATGTCGTAATAACCCCGCCCCGTTGACGCAAATGGGCGGTAGGCGT | |
| | | GTACGGTGGGAGGTCTATATAAGCAGAGCTCGTTTAGTGAACCGTC (SEQ ID NO: 19037) | |
| | 182 nt | GCGGTTTGACTCACGGGGATTTCCAAGTCTCCACCCCATTGACGTCAATGGGAGTTTGTTTTGGCACCA | 0 nt Homology 1 |
| | | AAATCAACGGGACTTTCCAAAATGTCGTAATAACCCCGCCCCGTTGACGCAAATGGGCGGTAGGCGTG | |
| | | TACGGTGGGAGGTCTATATAAGCAGAGCTCGTTTAGTGAACCGTC (SEQ ID NO: 19038) | |
| | 181 nt | CGGTTTGACTCACGGGGATTTCCAAGTCTCCACCCCATTGACGTCAATGGGAGTTTGTTTTGGCACCAA | 0 nt Homology 1 |
| | | AATCAACGGGACTTTCCAAAATGTCGTAATAACCCCGCCCCGTTGACGCAAATGGGGGTAGGCGTGT | |
| | | ACGGTGGGAGGTCTATATAAGCAGAGCTCGTTTAGTGAACCGTC (SEQ ID NO: 19039) | |
| | 180 nt | GGTTTGACTCACGGGGATTTCCAAGTCTCCACCCCATTGACGTCAATGGGAGTTTGTTTTGGCACCAAA | 0 nt Homology 1 |
| | | ATCAACGGGACTTTCCAAAATGTCGTAATAACCCCGCCCCGTTGACGCAAATGGGCGGTAGGCGTGTA | |
| | | CGGTGGGAGGTCTATATAAGCAGAGCTCGTTTAGTGAACCGTC (SEQ ID NO: 19040) | |
| | 179 nt | GTTTGACTCACGGGGATTTCCAAGTCTCCACCCCATTGACGTCAATGGGAGTTTGTTTTGGCACCAAAA | 0 nt Homology 1 |
| | | TCAACGGGACTTTCCAAAATGTCGTAATAACCCCGCCCCGTTGACGCAAATGGGCGGTAGGCGTGTAC | |
| | | GGTGGGAGGTCTATATAAGCAGAGCTCGTTTAGTGAACCGTC (SEQ ID NO: 19041) | |
| | 178 nt | TTTGACTCACGGGGATTTCCAAGTCTCCACCCCATTGACGTCAATGGGAGTTTGTTTTGGCACCAAAAT | 0 nt Homology 1 |
| | | CAACGGGACTTTCCAAAATGTCGTAATAACCCCGCCCCGTTGACGCAAATGGGCGGTAGGCGTGTACG | |
| | | GTGGGAGGTCTATATAAGCAGAGCTCGTTTAGTGAACCGTC (SEQ ID NO: 19042) | |
| | 177 nt | TTGACTCACGGGGATTTCCAAGTCTCCACCCCATTGACGTCAATGGGAGTTTGTTTTGGCACCAAAATC | 0 nt Homology 1 |
| | | AACGGGACTTTCCAAAATGTCGTAATAACCCCGCCCCGTTGACGCAAATGGGCGGTAGGCGTGTACG | |
| | | GTGGGAGGTCTATATAAGCAGAGCTCGTTTAGTGAACCGTC (SEQ ID NO: 19043) | |
| | 176 nt | TGACTCACGGGGATTTCCAAGTCTCCACCCCATTGACGTCAATGGGAGTTTGTTTTGGCACCAAAATCA | 0 nt Homology 1 |
| | | ACGGGACTTTCCAAAATGTCGTAATAACCCCGCCCCGTTGACGCAAATGGGCGGTAGGCGTGTACGGT | |
| | | GGGAGGTCTATATAAGCAGAGCTCGTTTAGTGAACCGTC (SEQ ID NO: 19044) | |
| | 175 nt | GACTCACGGGGATTTCCAAGTCTCCACCCCATTGACGTCAATGGGAGTTTGTTTTGGCACCAAAATCAA | 0 nt Homology 1 |
| | | CGGGACTTTCCAAAATGTCGTAATAACCCCGCCCCGTTGACGCAAATGGGCGGTAGGCGTGTACGGT | |
| | | GGGAGGTCTATATAAGCAGAGCTCGTTTAGTGAACCGTC (SEQ ID NO: 19045) | |
| | 174 nt | ACTCACGGGGATTTCCAAGTCTCCACCCCATTGACGTCAATGGGAGTTTGTTTTGGCACCAAAATCAAC | 0 nt Homology 1 |
| | | GGGACTTTCCAAAATGTCGTAATAACCCCGCCCCGTTGACGCAAATGGGCGGTAGGCGTGTACGGTG | |
| | | GGAGGTCTATATAAGCAGAGCTCGTTTAGTGAACCGTC (SEQ ID NO: 19046) | |
| | 173 nt | CTCACGGGGATTTCCAAGTCTCCACCCCATTGACGTCAATGGGAGTTTGTTTTGGCACCAAAATCAACG | 0 nt Homology 1 |
| | | GGACTTTCCAAAATGTCGTAATAACCCCGCCCCGTTGACGCAAATGGGCGGTAGGCGTGTACGGTGG | |
| | | GAGGTCTATATAAGCAGAGCTCGTTTAGTGAACCGTC (SEQ ID NO: 19047) | |
| | 172 nt | TCACGGGGATTTCCAAGTCTCCACCCCATTGACGTCAATGGGAGTTTGTTTTGGCACCAAAATCAACGG | 0 nt Homology 1 |
| | | GACTTTCCAAAATGTCGTAATAACCCCGCCCCGTTGACGCAAATGGGCGGTAGGCGTGTACGGTGGG | |
| | | AGGTCTATATAAGCAGAGCTCGTTTAGTGAACCGTC (SEQ ID NO: 19048) | |
| | 171 nt | CACGGGGATTTCCAAGTCTCCACCCCATTGACGTCAATGGGAGTTTGTTTTGGCACCAAAATCAACGG | 0 nt Homology 1 |
| | | GACTTTCCAAAATGTCGTAATAACCCCGCCCCGTTGACGCAAATGGGCGGTAGGCGTGTACGGTGGG | |
| | | AGGTCTATATAAGCAGAGCTCGTTTAGTGAACCGTC (SEQ ID NO: 19049) | |
| | 170 nt | ACGGGGATTTCCAAGTCTCCACCCCATTGACGTCAATGGGAGTTTGTTTTGGCACCAAAATCAACGGG | 0 nt Homology 1 |
| | | ACTTTCCAAAATGTCGTAATAACCCCGCCCCGTTGACGCAAATGGGCGGTAGGCGTGTACGGTGGGA | |
| | | GGTCTATATAAGCAGAGCTCGTTTAGTGAACCGTC (SEQ ID NO: 19050) | |
| | 169 nt | CGGGGATTTCCAAGTCTCCACCCCATTGACGTCAATGGGAGTTTGTTTTGGCACCAAAATCAACGGGA | 0 nt Homology 1 |
| | | CTTTCCAAAATGTCGTAATAACCCCGCCCCGTTGACGCAAATGGGCGGTAGGCGTGTACGGTGGGAG | |
| | | GTCTATATAAGCAGAGCTCGTTTAGTGAACCGTC (SEQ ID NO: 19051) | |
| | 168 nt | GGGGATTTCCAAGTCTCCACCCCATTGACGTCAATGGGAGTTTGTTTTGGCACCAAAATCAACGGGAC | 0 nt Homology 1 |
| | | TTTCCAAAATGTCGTAATAACCCCGCCCCGTTGACGCAAATGGGCGGTAGGCGTGTACGGTGGGAGG | |
| | | TCTATATAAGCAGAGCTCGTTTAGTGAACCGTC (SEQ ID NO: 19052) | |
| | 167 nt | GGGATTTCCAAGTCTCCACCCCATTGACGTCAATGGGAGTTTGTTTTGGCACCAAAATCAACGGGACTT | 0 nt Homology 1 |
| | | TCCAAAATGTCGTAATAACCCCGCCCCGTTGACGCAAATGGGCGGTAGGCGTGTACGGTGGGAGGTC | |
| | | TATATAAGCAGAGCTCGTTTAGTGAACCGTC (SEQ ID NO: 19053) | |
| | 166 nt | GGATTTCCAAGTCTCCACCCCATTGACGTCAATGGGAGTTTGTTTTGGCACCAAAATCAACGGGACTTT | 0 nt Homology 1 |
| | | CCAAAATGTCGTAATAACCCCGCCCCGTTGACGCAAATGGGCGGTAGGCGTGTACGGTGGGAGGTCT | |
| | | ATATAAGCAGAGCTCGTTTAGTGAACCGTC (SEQ ID NO: 19054) | |
| | 165 nt | GATTTCCAAGTCTCCACCCCATTGACGTCAATGGGAGTTTGTTTTGGCACCAAAATCAACGGGACTTTC | 0 nt Homology 1 |
| | | CAAAATGTCGTAATAACCCCGCCCCGTTGACGCAAATGGGGGTAGGCGTGTACGGTGGGAGGTCTA | |
| | | TATAAGCAGAGCTCGTTTAGTGAACCGTC (SEQ ID NO: 19055) | |
| | 164 nt | ATTTCCAAGTCTCCACCCCATTGACGTCAATGGGAGTTTGTTTTGGCACCAAAATCAACGGGACTTTCC | 0 nt Homology 1 |
| | | AAAATGTCGTAATAACCCCGCCCCGTTGACGCAAATGGGCGGTAGGCGTGTACGGTGGGAGGTCTAT | |
| | | ATAAGCAGAGCTCGTTTAGTGAACCGTC (SEQ ID NO: 19056) | |
| | 163 nt | TTTCCAAGTCTCCACCCCATTGACGTCAATGGGAGTTTGTTTTGGCACCAAAATCAACGGGACTTTCCA | 0 nt Homology 1 |
| | | AAATGTCGTAATAACCCCGCCCCGTTGACGCAAATGGGCGGTAGGCGTGTACGGTGGGAGGTCTATA | |
| | | TAAGCAGAGCTCGTTTAGTGAACCGTC (SEQ ID NO: 19057) | |
| | 162 nt | TTCCAAGTCTCCACCCCATTGACGTCAATGGGAGTTTGTTTTGGCACCAAAATCAACGGGACTTTCCAA | 0 nt Homology 1 |
| | | AATGTCGTAATAACCCCGCCCCGTTGACGCAAATGGGCGGTAGGCGTGTACGGTGGGAGGTCTATAT | |
| | | AAGCAGAGCTCGTTTAGTGAACCGTC (SEQ ID NO: 19058) | |
| | 161 nt | TCCAAGTCTCCACCCCATTGACGTCAATGGGAGTTTGTTTTGGCACCAAAATCAACGGGACTTTCCAAA | 0 nt Homology 1 |
| | | ATGTCGTAATAACCCCGCCCCGTTGACGCAAATGGGCGGTAGGCGTGTACGGTGGGAGGTCTATATA | |
| | | AGCAGAGCTCGTTTAGTGAACCGTC (SEQ ID NO: 19059) | |
| | 160 nt | CCAAGTCTCCACCCCATTGACGTCAATGGGAGTTTGTTTTGGCACCAAAATCAACGGGACTTTCCAAAA | 0 nt Homology 1 |
| | | TGTCGTAATAACCCCGCCCCGTTGACGCAAATGGGCGGTAGGCGTGTACGGTGGGAGGTCTATATAA | |
| | | GCAGAGCTCGTTTAGTGAACCGTC (SEQ ID NO: 19060) | |
| | 159 nt | CAAGTCTCCACCCCATTGACGTCAATGGGAGTTTGTTTTGGCACCAAAATCAACGGGACTTTCCAAAAT | 0 nt Homology 1 |
| | | GTCGTAATAACCCCGCCCCGTTGACGCAAATGGGCGGTAGGCGTGTACGGTGGGAGGTCTATATAAG | |
| | | CAGAGCTCGTTTAGTGAACCGTC (SEQ ID NO: 19061) | |
| | 158 nt | AAGTCTCCACCCCATTGACGTCAATGGGAGTTTGTTTTGGCACCAAAATCAACGGGACTTTCCAAAATG | 0 nt Homology 1 |
| | | TCGTAATAACCCCGCCCCGTTGACGCAAATGGGCGGTAGGCGTGTACGGTGGGAGGTCTATATAAGC | |
| | | AGAGCTCGTTTAGTGAACCGTC (SEQ ID NO: 19062) | |
| | 157 nt | AGTCTCCACCCCATTGACGTCAATGGGAGTTTGTTTTGGCACCAAAATCAACGGGACTTTCCAAAATGT | 0 nt Homology 1 |
| | | CGTAATAACCCCGCCCCGTTGACGCAAATGGGCGGTAGGCGTGTACGGTGGGAGGTCTATATAAGCA | |
| | | GAGCTCGTTTAGTGAACCGTC (SEQ ID NO: 19063) | |
| | 156 nt | GTCTCCACCCCATTGACGTCAATGGGAGTTTGTTTTGGCACCAAAATCAACGGGACTTTCCAAAATGTC | 0 nt Homology 1 |
| | | GTAATAACCCCGCCCCGTTGACGCAAATGGGCGGTAGGCGTGTACGGTGGGAGGTCTATATAAGCAG | |
| | | AGCTCGTTTAGTGAACCGTC (SEQ ID NO: 19064) | |
| | 155 nt | TCTCCACCCCATTGACGTCAATGGGAGTTTGTTTTGGCACCAAAATCAACGGGACTTTCCAAAATGTCG | 0 nt Homology 1 |
| | | TAATAACCCCGCCCCGTTGACGCAAATGGGCGGTAGGCGTGTACGGTGGGAGGTCTATATAAGCAGA | |
| | | GCTCGTTTAGTGAACCGTC (SEQ ID NO: 19065) | |
| | 154 nt | CTCCACCCCATTGACGTCAATGGGAGTTTGTTTTGGCACCAAAATCAACGGGACTTTCCAAAATGTCGT | 0 nt Homology 1 |
| | | AATAACCCCGCCCCGTTGACGCAAATGGGCGGTAGGCGTGTACGGTGGGAGGTCTATATAAGCAGAG | |
| | | CTCGTTTAGTGAACCGTC (SEQ ID NO: 19066) | |
| | 153 nt | TCCACCCCATTGACGTCAATGGGAGTTTGTTTTGGCACCAAAATCAACGGGACTTTCCAAAATGTCGTA | 0 nt Homology 1 |
| | | ATAACCCCGCCCCGTTGACGCAAATGGGCGGTAGGCGTGTACGGTGGGAGGTCTATATAAGCAGAGC | |
| | | TCGTTTAGTGAACCGTC (SEQ ID NO: 19067) | |
| | 152 nt | CCACCCCATTGACGTCAATGGGAGTTTGTTTTGGCACCAAAATCAACGGGACTTTCCAAAATGTCGTAA | 0 nt Homology 1 |
| | | TAACCCCGCCCCGTTGACGCAAATGGGCGGTAGGCGTGTACGGTGGGAGGTCTATATAAGCAGAGCT | |
| | | CGTTTAGTGAACCGTC (SEQ ID NO: 19068) | |
| | 151 nt | CACCCCATTGACGTCAATGGGAGTTTGTTTTGGCACCAAAATCAACGGGACTTTCCAAAATGTCGTAAT | 0 nt Homology 1 |
| | | AACCCCGCCCCGTTGACGCAAATGGGCGGTAGGCGTGTACGGTGGGAGGTCTATATAAGCAGAGCTC | |
| | | GTTTAGTGAACCGTC (SEQ ID NO: 19069) | |
| | 150 nt | ACCCCATTGACGTCAATGGGAGTTTGTTTTGGCACCAAAATCAACGGGACTTTCCAAAATGTCGTAATA | 0 nt Homology 1 |
| | | ACCCCGCCCCGTTGACGCAAATGGGCGGTAGGCGTGTACGGTGGGAGGTCTATATAAGCAGAGCTCG | |
| | | TTTAGTGAACCGTC (SEQ ID NO: 19070) | |
| | 149 nt | CCCCATTGACGTCAATGGGAGTTTGTTTTGGCACCAAAATCAACGGGACTTTCCAAAATGTCGTAATAA | 0 nt Homology 1 |
| | | CCCCGCCCCGTTGACGCAAATGGGCGGTAGGCGTGTACGGTGGGAGGTCTATATAAGCAGAGCTCGT | |
| | | TTAGTGAACCGTC (SEQ ID NO: 19071) | |
| | 148 nt | CCCATTGACGTCAATGGGAGTTTGTTTTGGCACCAAAATCAACGGGACTTTCCAAAATGTCGTAATAAC | 0 nt Homology 1 |
| | | CCCGCCCCGTTGACGCAAATGGGCGGTAGGCGTGTACGGTGGGAGGTCTATATAAGCAGAGCTCGTT | |
| | | TAGTGAACCGTC (SEQ ID NO: 19072) | |
| | 147 nt | CCATTGACGTCAATGGGAGTTTGTTTTGGCACCAAAATCAACGGGACTTTCCAAAATGTCGTAATAACC | 0 nt Homology 1 |
| | | CCGCCCCGTTGACGCAAATGGGCGGTAGGCGTGTACGGTGGGAGGTCTATATAAGCAGAGCTCGTTT | |
| | | AGTGAACCGTC (SEQ ID NO: 19073) | |
| | 146 nt | CATTGACGTCAATGGGAGTTTGTTTTGGCACCAAAATCAACGGGACTTTCCAAAATGTCGTAATAACCC | 0 nt Homology 1 |
| | | CGCCCCGTTGACGCAAATGGGCGGTAGGCGTGTACGGTGGGAGGTCTATATAAGCAGAGCTCGTTTA | |
| | | GTGAACCGTC (SEQ ID NO: 19074) | |
| | 145 nt | ATTGACGTCAATGGGAGTTTGTTTTGGCACCAAAATCAACGGGACTTTCCAAAATGTCGTAATAACCCC | 0 nt Homology 1 |
| | | GCCCCGTTGACGCAAATGGGCGGTAGGCGTGTACGGTGGGAGGTCTATATAAGCAGAGCTCGTTTAG | |
| | | TGAACCGTC (SEQ ID NO: 19075) | |
| | 144 nt | TTGACGTCAATGGGAGTTTGTTTTGGCACCAAAATCAACGGGACTTTCCAAAATGTCGTAATAACCCCG | 0 nt Homology 1 |
| | | CCCCGTTGACGCAAATGGGCGGTAGGCGTGTACGGTGGGAGGTCTATATAAGCAGAGCTCGTTTAGT | |
| | | GAACCGTC (SEQ ID NO: 19076) | |
| | 143 nt | TGACGTCAATGGGAGTTTGTTTTGGCACCAAAATCAACGGGACTTTCCAAAATGTCGTAATAACCCCG | 0 nt Homology 1 |
| | | CCCCGTTGACGCAAATGGGCGGTAGGCGTGTACGGTGGGAGGTCTATATAAGCAGAGCTCGTTTAGT | |
| | | GAACCGTC (SEQ ID NO: 19077) | |
| | 142 nt | GACGTCAATGGGAGTTTGTTTTGGCACCAAAATCAACGGGACTTTCCAAAATGTCGTAATAACCCCGC | 0 nt Homology 1 |
| | | CCCGTTGACGCAAATGGGCGGTAGGCGTGTACGGTGGGAGGTCTATATAAGCAGAGCTCGTTTAGTG | |
| | | AACCGTC (SEQ ID NO: 19078) | |
| | 141 nt | ACGTCAATGGGAGTTTGTTTTGGCACCAAAATCAACGGGACTTTCCAAAATGTCGTAATAACCCCGCCC | 0 nt Homology 1 |
| | | CGTTGACGCAAATGGGCGGTAGGCGTGTACGGTGGGAGGTCTATATAAGCAGAGCTCGTTTAGTGAA | |
| | | CCGTC (SEQ ID NO: 19079) | |
| | 140 nt | CGTCAATGGGAGTTTGTTTTGGCACCAAAATCAACGGGACTTTCCAAAATGTCGTAATAACCCCGCCCC | 0 nt Homology 1 |
| | | GTTGACGCAAATGGGCGGTAGGCGTGTACGGTGGGAGGTCTATATAAGCAGAGCTCGTTTAGTGAAC | |
| | | CGTC (SEQ ID NO: 19080) | |
| | 139 nt | GTCAATGGGAGTTTGTTTTGGCACCAAAATCAACGGGACTTTCCAAAATGTCGTAATAACCCCGCCCC | 0 nt Homology 1 |
| | | GTTGACGCAAATGGGCGGTAGGCGTGTACGGTGGGAGGTCTATATAAGCAGAGCTCGTTTAGTGAAC | |
| | | CGTC (SEQ ID NO: 19081) | |
| | 138 nt | TCAATGGGAGTTTGTTTTGGCACCAAAATCAACGGGACTTTCCAAAATGTCGTAATAACCCCGCCCCGT | 0 nt Homology 1 |
| | | TGACGCAAATGGGCGGTAGGCGTGTACGGTGGGAGGTCTATATAAGCAGAGCTCGTTTAGTGAACCG | |
| | | TC (SEQ ID NO: 19082) | |
| | 137 nt | CAATGGGAGTTTGTTTTGGCACCAAAATCAACGGGACTTTCCAAAATGTCGTAATAACCCCGCCCCGTT | 0 nt Homology 1 |
| | | GACGCAAATGGGCGGTAGGCGTGTACGGTGGGAGGTCTATATAAGCAGAGCTCGTTTAGTGAACCGT | |
| | | C (SEQ ID NO: 19083) | |
| | 136 nt | AATGGGAGTTTGTTTTGGCACCAAAATCAACGGGACTTTCCAAAATGTCGTAATAACCCCGCCCCGTTG | 0 nt Homology 1 |
| | | ACGCAAATGGGCGGTAGGCGTGTACGGTGGGAGGTCTATATAAGCAGAGCTCGTTTAGTGAACCGTC | |
| | | (SEQ ID NO: 19084) | |
| | 135 nt | ATGGGAGTTTGTTTTGGCACCAAAATCAACGGGACTTTCCAAAATGTCGTAATAACCCCGCCCCGTTGA | 0 nt Homology 1 |
| | | CGCAAATGGGCGGTAGGCGTGTACGGTGGGAGGTCTATATAAGCAGAGCTCGTTTAGTGAACCGTC | |
| | | (SEQ ID NO: 19085) | |
| | 134 nt | TGGGAGTTTGTTTTGGCACCAAAATCAACGGGACTTTCCAAAATGTCGTAATAACCCCGCCCCGTTGAC | 0 nt Homology 1 |
| | | GCAAATGGGCGGTAGGCGTGTACGGTGGGAGGTCTATATAAGCAGAGCTCGTTTAGTGAACCGTC | |
| | | (SEQ ID NO: 19086) | |
| | 133 nt | GGGAGTTTGTTTTGGCACCAAAATCAACGGGACTTTCCAAAATGTCGTAATAACCCCGCCCCGTTGAC | 0 nt Homology 1 |
| | | GCAAATGGGCGGTAGGCGTGTACGGTGGGAGGTCTATATAAGCAGAGCTCGTTTAGTGAACCGTC | |
| | | (SEQ ID NO: 19087) | |
| | 132 nt | GGAGTTTGTTTTGGCACCAAAATCAACGGGACTTTCCAAAATGTCGTAATAACCCCGCCCCGTTGACGC | 0 nt Homology 1 |
| | | AAATGGGCGGTAGGCGTGTACGGTGGGAGGTCTATATAAGCAGAGCTCGTTTAGTGAACCGTC (SEQ | |
| | | ID NO: 19088) | |
| | 131 nt | GAGTTTGTTTTGGCACCAAAATCAACGGGACTTTCCAAAATGTCGTAATAACCCCGCCCCGTTGACGCA | 0 nt Homology 1 |
| | | AATGGGCGGTAGGCGTGTACGGTGGGAGGTCTATATAAGCAGAGCTCGTTTAGTGAACCGTC (SEQ | |
| | | ID NO: 19089) | |
| | 130 nt | AGTTTGTTTTGGCACCAAAATCAACGGGACTTTCCAAAATGTCGTAATAACCCCGCCCCGTTGACGCAA | 0 nt Homology 1 |
| | | ATGGGCGGTAGGCGTGTACGGTGGGAGGTCTATATAAGCAGAGCTCGTTTAGTGAACCGTC (SEQ ID | |
| | | NO: 19090) | |
| | 129 nt | GTTTGTTTTGGCACCAAAATCAACGGGACTTTCCAAAATGTCGTAATAACCCCGCCCCGTTGACGCAAA | 0 nt Homology 1 |
| | | TGGGCGGTAGGCGTGTACGGTGGGAGGTCTATATAAGCAGAGCTCGTTTAGTGAACCGTC (SEQ ID | |
| | | NO: 19091) | |
| | 128 nt | TTTGTTTTGGCACCAAAATCAACGGGACTTTCCAAAATGTCGTAATAACCCCGCCCCGTTGACGCAAAT | 0 nt Homology 1 |
| | | GGGCGGTAGGCGTGTACGGTGGGAGGTCTATATAAGCAGAGCTCGTTTAGTGAACCGTC (SEQ ID | |
| | | NO: 19092) | |
| | 127 nt | TTGTTTTGGCACCAAAATCAACGGGACTTTCCAAAATGTCGTAATAACCCCGCCCCGTTGACGCAAATG | 0 nt Homology 1 |
| | | GGCGGTAGGCGTGTACGGTGGGAGGTCTATATAAGCAGAGCTCGTTTAGTGAACCGTC (SEQ ID NO: | |
| | | 19093) | |
| | 126 nt | TGTTTTGGCACCAAAATCAACGGGACTTTCCAAAATGTCGTAATAACCCCGCCCCGTTGACGCAAATG | 0 nt Homology 1 |
| | | GGCGGTAGGCGTGTACGGTGGGAGGTCTATATAAGCAGAGCTCGTTTAGTGAACCGTC (SEQ ID NO: | |
| | | 19094) | |
| | 125 nt | GTTTTGGCACCAAAATCAACGGGACTTTCCAAAATGTCGTAATAACCCCGCCCCGTTGACGCAAATGG | 0 nt Homology 1 |
| | | GCGGTAGGCGTGTACGGTGGGAGGTCTATATAAGCAGAGCTCGTTTAGTGAACCGTC (SEQ ID NO: | |
| | | 19095) | |
| | 124 nt | TTTTGGCACCAAAATCAACGGGACTTTCCAAAATGTCGTAATAACCCCGCCCCGTTGACGCAAATGGG | 0 nt Homology 1 |
| | | CGGTAGGCGTGTACGGTGGGAGGTCTATATAAGCAGAGCTCGTTTAGTGAACCGTC (SEQ ID NO: | |
| | | 19096) | |
| | 123 nt | TTTGGCACCAAAATCAACGGGACTTTCCAAAATGTCGTAATAACCCCGCCCCGTTGACGCAAATGGGC | 0 nt Homology 1 |
| | | GGTAGGCGTGTACGGTGGGAGGTCTATATAAGCAGAGCTCGTTTAGTGAACCGTC (SEQ ID NO: | |
| | | 19097) | |
| | 122 nt | TTGGCACCAAAATCAACGGGACTTTCCAAAATGTCGTAATAACCCCGCCCCGTTGACGCAAATGGGCG | 0 nt Homology 1 |
| | | GTAGGCGTGTACGGTGGGAGGTCTATATAAGCAGAGCTCGTTTAGTGAACCGTC (SEQ ID NO: | |
| | | 19098) | |
| | 121 nt | TGGCACCAAAATCAACGGGACTTTCCAAAATGTCGTAATAACCCCGCCCCGTTGACGCAAATGGGCGG | 0 nt Homology 1 |
| | | TAGGCGTGTACGGTGGGAGGTCTATATAAGCAGAGCTCGTTTAGTGAACCGTC (SEQ ID NO: 19099) | |
| | 120 nt | GGCACCAAAATCAACGGGACTTTCCAAAATGTCGTAATAACCCCGCCCCGTTGACGCAAATGGGCGGT | 0 nt Homology 1 |
| | | AGGCGTGTACGGTGGGAGGTCTATATAAGCAGAGCTCGTTTAGTGAACCGTC (SEQ ID NO: 19100) | |
| | 119 nt | GCACCAAAATCAACGGGACTTTCCAAAATGTCGTAATAACCCCGCCCCGTTGACGCAAATGGGCGGTA | 0 nt Homology 1 |
| | | GGCGTGTACGGTGGGAGGTCTATATAAGCAGAGCTCGTTTAGTGAACCGTC (SEQ ID NO: 19101) | |
| | 118 nt | CACCAAAATCAACGGGACTTTCCAAAATGTCGTAATAACCCCGCCCCGTTGACGCAAATGGGCGGTAG | 0 nt Homology 1 |
| | | GCGTGTACGGTGGGAGGTCTATATAAGCAGAGCTCGTTTAGTGAACCGTC (SEQ ID NO: 19102) | |
| | 117 nt | ACCAAAATCAACGGGACTTTCCAAAATGTCGTAATAACCCCGCCCCGTTGACGCAAATGGGCGGTAGG | 0 nt Homology 1 |
| | | CGTGTACGGTGGGAGGTCTATATAAGCAGAGCTCGTTTAGTGAACCGTC (SEQ ID NO: 19103) | |
| | 116 nt | CCAAAATCAACGGGACTTTCCAAAATGTCGTAATAACCCCGCCCCGTTGACGCAAATGGGCGGTAGGC | 0 nt Homology 1 |
| | | GTGTACGGTGGGAGGTCTATATAAGCAGAGCTCGTTTAGTGAACCGTC (SEQ ID NO: 19104) | |
| | 115 nt | CAAAATCAACGGGACTTTCCAAAATGTCGTAATAACCCCGCCCCGTTGACGCAAATGGGCGGTAGGCG | 0 nt Homology 1 |
| | | TGTACGGTGGGAGGTCTATATAAGCAGAGCTCGTTTAGTGAACCGTC (SEQ ID NO: 19105) | |
| | 114 nt | AAAATCAACGGGACTTTCCAAAATGTCGTAATAACCCCGCCCCGTTGACGCAAATGGGCGGTAGGCGT | 0 nt Homology 1 |
| | | GTACGGTGGGAGGTCTATATAAGCAGAGCTCGTTTAGTGAACCGTC (SEQ ID NO: 19106) | |
| | 113 nt | AAATCAACGGGACTTTCCAAAATGTCGTAATAACCCCGCCCCGTTGACGCAAATGGGCGGTAGGCGTG | 0 nt Homology 1 |
| | | TACGGTGGGAGGTCTATATAAGCAGAGCTCGTTTAGTGAACCGTC (SEQ ID NO: 19107) | |
| | 112 nt | AATCAACGGGACTTTCCAAAATGTCGTAATAACCCCGCCCCGTTGACGCAAATGGGCGGTAGGCGTGT | 0 nt Homology 1 |
| | | ACGGTGGGAGGTCTATATAAGCAGAGCTCGTTTAGTGAACCGTC (SEQ ID NO: 19108) | |
| | 111 nt | ATCAACGGGACTTTCCAAAATGTCGTAATAACCCCGCCCCGTTGACGCAAATGGGCGGTAGGCGTGTA | 0 nt Homology 1 |
| | | CGGTGGGAGGTCTATATAAGCAGAGCTCGTTTAGTGAACCGTC (SEQ ID NO: 19109) | |
| | 110 nt | TCAACGGGACTTTCCAAAATGTCGTAATAACCCCGCCCCGTTGACGCAAATGGGCGGTAGGCGTGTAC | 0 nt Homology 1 |
| | | GGTGGGAGGTCTATATAAGCAGAGCTCGTTTAGTGAACCGTC (SEQ ID NO: 19110) | |
| | 109 nt | CAACGGGACTTTCCAAAATGTCGTAATAACCCCGCCCCGTTGACGCAAATGGGCGGTAGGCGTGTACG | 0 nt Homology 1 |
| | | GTGGGAGGTCTATATAAGCAGAGCTCGTTTAGTGAACCGTC (SEQ ID NO: 19111) | |
| | 108 nt | AACGGGACTTTCCAAAATGTCGTAATAACCCCGCCCCGTTGACGCAAATGGGCGGTAGGCGTGTACG | 0 nt Homology 1 |
| | | GTGGGAGGTCTATATAAGCAGAGCTCGTTTAGTGAACCGTC (SEQ ID NO: 19112) | |
| | 107 nt | ACGGGACTTTCCAAAATGTCGTAATAACCCCGCCCCGTTGACGCAAATGGGCGGTAGGCGTGTACGGT | 0 nt Homology 1 |
| | | GGGAGGTCTATATAAGCAGAGCTCGTTTAGTGAACCGTC (SEQ ID NO: 19113) | |
| | 106 nt | CGGGACTTTCCAAAATGTCGTAATAACCCCGCCCCGTTGACGCAAATGGGCGGTAGGCGTGTACGGT | 0 nt Homology 1 |
| | | GGGAGGTCTATATAAGCAGAGCTCGTTTAGTGAACCGTC (SEQ ID NO: 19114) | |
| | 105 nt | GGGACTTTCCAAAATGTCGTAATAACCCCGCCCCGTTGACGCAAATGGGCGGTAGGCGTGTACGGTG | 0 nt Homology 1 |
| | | GGAGGTCTATATAAGCAGAGCTCGTTTAGTGAACCGTC (SEQ ID NO: 19115) | |
| | 104 nt | GGACTTTCCAAAATGTCGTAATAACCCCGCCCCGTTGACGCAAATGGGCGGTAGGCGTGTACGGTGG | 0 nt Homology 1 |
| | | GAGGTCTATATAAGCAGAGCTCGTTTAGTGAACCGTC (SEQ ID NO: 19116) | |
| | 103 nt | GACTTTCCAAAATGTCGTAATAACCCCGCCCCGTTGACGCAAATGGGCGGTAGGCGTGTACGGTGGG | 0 nt Homology 1 |
| | | AGGTCTATATAAGCAGAGCTCGTTTAGTGAACCGTC (SEQ ID NO: 19117) | |
| | 102 nt | ACTTTCCAAAATGTCGTAATAACCCCGCCCCGTTGACGCAAATGGGCGGTAGGCGTGTACGGTGGGA | 0 nt Homology 1 |
| | | GGTCTATATAAGCAGAGCTCGTTTAGTGAACCGTC (SEQ ID NO: 19118) | |
| | 101 nt | CTTTCCAAAATGTCGTAATAACCCCGCCCCGTTGACGCAAATGGGCGGTAGGCGTGTACGGTGGGAG | 0 nt Homology 1 |
| | | GTCTATATAAGCAGAGCTCGTTTAGTGAACCGTC (SEQ ID NO: 19119) | |
| | 100 nt | TTTCCAAAATGTCGTAATAACCCCGCCCCGTTGACGCAAATGGGCGGTAGGCGTGTACGGTGGGAGG | 0 nt Homology 1 |
| | | TCTATATAAGCAGAGCTCGTTTAGTGAACCGTC (SEQ ID NO: 19120) | |
| | 99 nt | TTCCAAAATGTCGTAATAACCCCGCCCCGTTGACGCAAATGGGCGGTAGGCGTGTACGGTGGGAGGT | 0 nt Homology 1 |
| | | CTATATAAGCAGAGCTCGTTTAGTGAACCGTC (SEQ ID NO: 19121) | |
| | 98 nt | TCCAAAATGTCGTAATAACCCCGCCCCGTTGACGCAAATGGGCGGTAGGCGTGTACGGTGGGAGGTC | 0 nt Homology 1 |
| | | TATATAAGCAGAGCTCGTTTAGTGAACCGTC (SEQ ID NO: 19122) | |
| | 97 nt | CCAAAATGTCGTAATAACCCCGCCCCGTTGACGCAAATGGGCGGTAGGCGTGTACGGTGGGAGGTCT | 0 nt Homology 1 |
| | | ATATAAGCAGAGCTCGTTTAGTGAACCGTC (SEQ ID NO: 19123) | |
| | 96 nt | CAAAATGTCGTAATAACCCCGCCCCGTTGACGCAAATGGGCGGTAGGCGTGTACGGTGGGAGGTCTA | 0 nt Homology 1 |
| | | TATAAGCAGAGCTCGTTTAGTGAACCGTC (SEQ ID NO: 19124) | |
| | 95 nt | AAAATGTCGTAATAACCCCGCCCCGTTGACGCAAATGGGCGGTAGGCGTGTACGGTGGGAGGTCTAT | 0 nt Homology 1 |
| | | ATAAGCAGAGCTCGTTTAGTGAACCGTC (SEQ ID NO: 19125) | |
| | 94 nt | AAATGTCGTAATAACCCCGCCCCGTTGACGCAAATGGGCGGTAGGCGTGTACGGTGGGAGGTCTATA | 0 nt Homology 1 |
| | | TAAGCAGAGCTCGTTTAGTGAACCGTC (SEQ ID NO: 19126) | |
| | 93 nt | AATGTCGTAATAACCCCGCCCCGTTGACGCAAATGGGCGGTAGGCGTGTACGGTGGGAGGTCTATAT | 0 nt Homology 1 |
| | | AAGCAGAGCTCGTTTAGTGAACCGTC (SEQ ID NO: 19127) | |
| | 92 nt | ATGTCGTAATAACCCCGCCCCGTTGACGCAAATGGGCGGTAGGCGTGTACGGTGGGAGGTCTATATA | 0 nt Homology 1 |
| | | AGCAGAGCTCGTTTAGTGAACCGTC (SEQ ID NO: 19128) | |
| | 91 nt | TGTCGTAATAACCCCGCCCCGTTGACGCAAATGGGCGGTAGGCGTGTACGGTGGGAGGTCTATATAA | 0 nt Homology 1 |
| | | GCAGAGCTCGTTTAGTGAACCGTC (SEQ ID NO: 19129) | |
| | 90 nt | GTCGTAATAACCCCGCCCCGTTGACGCAAATGGGCGGTAGGCGTGTACGGTGGGAGGTCTATATAAG | 0 nt Homology 1 |
| | | CAGAGCTCGTTTAGTGAACCGTC (SEQ ID NO: 19130) | |
| | 89 nt | TCGTAATAACCCCGCCCCGTTGACGCAAATGGGCGGTAGGCGTGTACGGTGGGAGGTCTATATAAGC | 0 nt Homology 1 |
| | | AGAGCTCGTTTAGTGAACCGTC (SEQ ID NO: 19131) | |
| | 88 nt | CGTAATAACCCCGCCCCGTTGACGCAAATGGGCGGTAGGCGTGTACGGTGGGAGGTCTATATAAGCA | 0 nt Homology 1 |
| | | GAGCTCGTTTAGTGAACCGTC (SEQ ID NO: 19132) | |
| | 87 nt | GTAATAACCCCGCCCCGTTGACGCAAATGGGGGTAGGCGTGTACGGTGGGAGGTCTATATAAGCAG | 0 nt Homology 1 |
| | | AGCTCGTTTAGTGAACCGTC (SEQ ID NO: 19133) | |
| | 86 nt | TAATAACCCCGCCCCGTTGACGCAAATGGGCGGTAGGCGTGTACGGTGGGAGGTCTATATAAGCAGA | 0 nt Homology 1 |
| | | GCTCGTTTAGTGAACCGTC (SEQ ID NO: 19134) | |
| | 85 nt | AATAACCCCGCCCCGTTGACGCAAATGGGCGGTAGGCGTGTACGGTGGGAGGTCTATATAAGCAGAG | 0 nt Homology 1 |
| | | CTCGTTTAGTGAACCGTC (SEQ ID NO: 19135) | |
| | 84 nt | ATAACCCCGCCCCGTTGACGCAAATGGGCGGTAGGCGTGTACGGTGGGAGGTCTATATAAGCAGAGC | 0 nt Homology 1 |
| | | TCGTTTAGTGAACCGTC (SEQ ID NO: 19136) | |
| | 83 nt | TAACCCCGCCCCGTTGACGCAAATGGGCGGTAGGCGTGTACGGTGGGAGGTCTATATAAGCAGAGCT | 0 nt Homology 1 |
| | | CGTTTAGTGAACCGTC (SEQ ID NO: 19137) | |
| | 82 nt | AACCCCGCCCCGTTGACGCAAATGGGCGGTAGGCGTGTACGGTGGGAGGTCTATATAAGCAGAGCTC | 0 nt Homology 1 |
| | | GTTTAGTGAACCGTC (SEQ ID NO: 19138) | |
| | 81 nt | ACCCCGCCCCGTTGACGCAAATGGGCGGTAGGCGTGTACGGTGGGAGGTCTATATAAGCAGAGCTCG | 0 nt Homology 1 |
| | | TTTAGTGAACCGTC (SEQ ID NO: 19139) | |
| | 80 nt | CCCCGCCCCGTTGACGCAAATGGGCGGTAGGCGTGTACGGTGGGAGGTCTATATAAGCAGAGCTCGT | 0 nt Homology 1 |
| | | TTAGTGAACCGTC (SEQ ID NO: 19140) | |
| | 79 nt | CCCGCCCCGTTGACGCAAATGGGCGGTAGGCGTGTACGGTGGGAGGTCTATATAAGCAGAGCTCGTT | 0 nt Homology 1 |
| | | TAGTGAACCGTC (SEQ ID NO: 19141) | |
| | 78 nt | CCGCCCCGTTGACGCAAATGGGCGGTAGGCGTGTACGGTGGGAGGTCTATATAAGCAGAGCTCGTTT | 0 nt Homology 1 |
| | | AGTGAACCGTC (SEQ ID NO: 19142) | |
| | 77 nt | CGCCCCGTTGACGCAAATGGGCGGTAGGCGTGTACGGTGGGAGGTCTATATAAGCAGAGCTCGTTTA | 0 nt Homology 1 |
| | | GTGAACCGTC (SEQ ID NO: 19143) | |
| | 76 nt | GCCCCGTTGACGCAAATGGGCGGTAGGCGTGTACGGTGGGAGGTCTATATAAGCAGAGCTCGTTTAG | 0 nt Homology 1 |
| | | TGAACCGTC (SEQ ID NO: 19144) | |
| | 75 nt | CCCCGTTGACGCAAATGGGCGGTAGGCGTGTACGGTGGGAGGTCTATATAAGCAGAGCTCGTTTAGT | 0 nt Homology 1 |
| | | GAACCGTC (SEQ ID NO: 19145) | |
| | 74 nt | CCCGTTGACGCAAATGGGCGGTAGGCGTGTACGGTGGGAGGTCTATATAAGCAGAGCTCGTTTAGTG | 0 nt Homology 1 |
| | | AACCGTC (SEQ ID NO: 19146) | |
| | 73 nt | CCGTTGACGCAAATGGGCGGTAGGCGTGTACGGTGGGAGGTCTATATAAGCAGAGCTCGTTTAGTGA | 0 nt Homology 1 |
| | | ACCGTC (SEQ ID NO: 19147) | |
| | 72 nt | CGTTGACGCAAATGGGCGGTAGGCGTGTACGGTGGGAGGTCTATATAAGCAGAGCTCGTTTAGTGAA | 0 nt Homology 1 |
| | | CCGTC (SEQ ID NO: 19148) | |
| | 71 nt | GTTGACGCAAATGGGCGGTAGGCGTGTACGGTGGGAGGTCTATATAAGCAGAGCTCGTTTAGTGAAC | 0 nt Homology 1 |
| | | CGTC (SEQ ID NO: 19149) | |
| | 70 nt | TTGACGCAAATGGGCGGTAGGCGTGTACGGTGGGAGGTCTATATAAGCAGAGCTCGTTTAGTGAACC | 0 nt Homology 1 |
| | | GTC (SEQ ID NO: 19150) | |
| | 69 nt | TGACGCAAATGGGCGGTAGGCGTGTACGGTGGGAGGTCTATATAAGCAGAGCTCGTTTAGTGAACCG | 0 nt Homology 1 |
| | | TC (SEQ ID NO: 19151) | |
| | 68 nt | GACGCAAATGGGCGGTAGGCGTGTACGGTGGGAGGTCTATATAAGCAGAGCTCGTTTAGTGAACCGT | 0 nt Homology 1 |
| | | C (SEQ ID NO: 19152) | |
| | 67 nt | ACGCAAATGGGCGGTAGGCGTGTACGGTGGGAGGTCTATATAAGCAGAGCTCGTTTAGTGAACCGTC | 0 nt Homology 1 |
| | | (SEQ ID NO: 19153) | |
| | 66 nt | CGCAAATGGGCGGTAGGCGTGTACGGTGGGAGGTCTATATAAGCAGAGCTCGTTTAGTGAACCGTC | 0 nt Homology 1 |
| | | (SEQ ID NO: 19154) | |
| | 65 nt | GCAAATGGGCGGTAGGCGTGTACGGTGGGAGGTCTATATAAGCAGAGCTCGTTTAGTGAACCGTC | 0 nt Homology 1 |
| | | (SEQ ID NO: 19155) | |
| | 64 nt | CAAATGGGCGGTAGGCGTGTACGGTGGGAGGTCTATATAAGCAGAGCTCGTTTAGTGAACCGTC | 0 nt Homology 1 |
| | | (SEQ ID NO: 19156) | |
| | 63 nt | AAATGGGCGGTAGGCGTGTACGGTGGGAGGTCTATATAAGCAGAGCTCGTTTAGTGAACCGTC (SEQ | 0 nt Homology 1 |
| | | ID NO: 19157) | |
| | 62 nt | AATGGGCGGTAGGCGTGTACGGTGGGAGGTCTATATAAGCAGAGCTCGTTTAGTGAACCGTC (SEQ | 0 nt Homology 1 |
| | | ID NO: 19158) | |
| | 61 nt | ATGGGCGGTAGGCGTGTACGGTGGGAGGTCTATATAAGCAGAGCTCGTTTAGTGAACCGTC (SEQ ID | 0 nt Homology 1 |
| | | NO: 19159) | |
| | 60 nt | TGGGCGGTAGGCGTGTACGGTGGGAGGTCTATATAAGCAGAGCTCGTTTAGTGAACCGTC (SEQ ID | 0 nt Homology 1 |
| | | NO: 19160) | |
| | 59 nt | GGGCGGTAGGCGTGTACGGTGGGAGGTCTATATAAGCAGAGCTCGTTTAGTGAACCGTC (SEQ ID | 0 nt Homology 1 |
| | | NO: 19161) | |
| | 58 nt | GGCGGTAGGCGTGTACGGTGGGAGGTCTATATAAGCAGAGCTCGTTTAGTGAACCGTC (SEQ ID NO: | 0 nt Homology 1 |
| | | 19162) | |
| | 57 nt | GCGGTAGGCGTGTACGGTGGGAGGTCTATATAAGCAGAGCTCGTTTAGTGAACCGTC (SEQ ID NO: | 0 nt Homology 1 |
| | | 19163) | |
| | 56 nt | CGGTAGGCGTGTACGGTGGGAGGTCTATATAAGCAGAGCTCGTTTAGTGAACCGTC (SEQ ID NO: | 0 nt Homology 1 |
| | | 19164) | |
| | 55 nt | GGTAGGCGTGTACGGTGGGAGGTCTATATAAGCAGAGCTCGTTTAGTGAACCGTC (SEQ ID NO: | 0 nt Homology 1 |
| | | 19165) | |
| | 54 nt | GTAGGCGTGTACGGTGGGAGGTCTATATAAGCAGAGCTCGTTTAGTGAACCGTC (SEQ ID NO: | 0 nt Homology 1 |
| | | 19166) | |
| | 53 nt | TAGGCGTGTACGGTGGGAGGTCTATATAAGCAGAGCTCGTTTAGTGAACCGTC (SEQ ID NO: 19167) | 0 nt Homology 1 |
| | 52 nt | AGGCGTGTACGGTGGGAGGTCTATATAAGCAGAGCTCGTTTAGTGAACCGTC (SEQ ID NO: 19168) | 0 nt Homology 1 |
| | 51 nt | GGCGTGTACGGTGGGAGGTCTATATAAGCAGAGCTCGTTTAGTGAACCGTC (SEQ ID NO: 19169) | 0 nt Homology 1 |
| | 50 nt | GCGTGTACGGTGGGAGGTCTATATAAGCAGAGCTCGTTTAGTGAACCGTC (SEQ ID NO: 19170) | 0 nt Homology 1 |
| | 49 nt | CGTGTACGGTGGGAGGTCTATATAAGCAGAGCTCGTTTAGTGAACCGTC (SEQ ID NO: 19171) | 0 nt Homology 1 |
| | 48 nt | GTGTACGGTGGGAGGTCTATATAAGCAGAGCTCGTTTAGTGAACCGTC (SEQ ID NO: 19172) | 0 nt Homology 1 |
| | 47 nt | TGTACGGTGGGAGGTCTATATAAGCAGAGCTCGTTTAGTGAACCGTC (SEQ ID NO: 19173) | 0 nt Homology 1 |
| | 46 nt | GTACGGTGGGAGGTCTATATAAGCAGAGCTCGTTTAGTGAACCGTC (SEQ ID NO: 19174) | 0 nt Homology 1 |
| | 45 nt | TACGGTGGGAGGTCTATATAAGCAGAGCTCGTTTAGTGAACCGTC (SEQ ID NO: 19175) | 0 nt Homology 1 |
| | 44 nt | ACGGTGGGAGGTCTATATAAGCAGAGCTCGTTTAGTGAACCGTC (SEQ ID NO: 19176) | 0 nt Homology 1 |
| | 43 nt | CGGTGGGAGGTCTATATAAGCAGAGCTCGTTTAGTGAACCGTC (SEQ ID NO: 19177) | 0 nt Homology 1 |
| | 42 nt | GGTGGGAGGTCTATATAAGCAGAGCTCGTTTAGTGAACCGTC (SEQ ID NO: 19178) | 0 nt Homology 1 |
| | 41 nt | GTGGGAGGTCTATATAAGCAGAGCTCGTTTAGTGAACCGTC (SEQ ID NO: 19179) | 0 nt Homology 1 |
| | 40 nt | TGGGAGGTCTATATAAGCAGAGCTCGTTTAGTGAACCGTC (SEQ ID NO: 19180) | 0 nt Homology 1 |
| | 39 nt | GGGAGGTCTATATAAGCAGAGCTCGTTTAGTGAACCGTC (SEQ ID NO: 19181) | 0 nt Homology 1 |
| | 38 nt | GGAGGTCTATATAAGCAGAGCTCGTTTAGTGAACCGTC (SEQ ID NO: 19182) | 0 nt Homology 1 |
| | 37 nt | GAGGTCTATATAAGCAGAGCTCGTTTAGTGAACCGTC (SEQ ID NO: 19183) | 0 nt Homology 1 |
| | 36 nt | AGGTCTATATAAGCAGAGCTCGTTTAGTGAACCGTC (SEQ ID NO: 19184) | 0 nt Homology 1 |
| | 35 nt | GGTCTATATAAGCAGAGCTCGTTTAGTGAACCGTC (SEQ ID NO: 19185) | 0 nt Homology 1 |
| | 34 nt | GTCTATATAAGCAGAGCTCGTTTAGTGAACCGTC (SEQ ID NO: 19186) | 0 nt Homology 1 |
| | 33 nt | TCTATATAAGCAGAGCTCGTTTAGTGAACCGTC (SEQ ID NO: 19187) | 0 nt Homology 1 |
| | 32 nt | CTATATAAGCAGAGCTCGTTTAGTGAACCGTC (SEQ ID NO: 19188) | 0 nt Homology 1 |
| | 31 nt | TATATAAGCAGAGCTCGTTTAGTGAACCGTC (SEQ ID NO: 19189) | 0 nt Homology 1 |
| | 30 nt | ATATAAGCAGAGCTCGTTTAGTGAACCGTC (SEQ ID NO: 19190) | 0 nt Homology 1 |
| | 29 nt | TATAAGCAGAGCTCGTTTAGTGAACCGTC (SEQ ID NO: 19191) | 0 nt Homology 1 |
| | 28 nt | ATAAGCAGAGCTCGTTTAGTGAACCGTC (SEQ ID NO: 19192) | 0 nt Homology 1 |
| | 27 nt | TAAGCAGAGCTCGTTTAGTGAACCGTC (SEQ ID NO: 19193) | 0 nt Homology 1 |
| | 26 nt | AAGCAGAGCTCGTTTAGTGAACCGTC (SEQ ID NO: 19194) | 0 nt Homology 1 |
| | 25 nt | AGCAGAGCTCGTTTAGTGAACCGTC (SEQ ID NO: 19195) | 0 nt Homology 1 |
| | 24 nt | GCAGAGCTCGTTTAGTGAACCGTC (SEQ ID NO: 19196) | 0 nt Homology 1 |
| | 23 nt | CAGAGCTCGTTTAGTGAACCGTC (SEQ ID NO: 19197) | 0 nt Homology 1 |
| | 22 nt | AGAGCTCGTTTAGTGAACCGTC (SEQ ID NO: 19198) | 0 nt Homology 1 |
| | 21 nt | GAGCTCGTTTAGTGAACCGTC (SEQ ID NO: 19199) | 0 nt Homology 1 |
| | 20 nt | AGCTCGTTTAGTGAACCGTC (SEQ ID NO: 19200) | 0 nt Homology 1 |
| | 19 nt | GCTCGTTTAGTGAACCGTC (SEQ ID NO: 19201) | 0 nt Homology 1 |
| | 18 nt | CTCGTTTAGTGAACCGTC (SEQ ID NO: 19202) | 0 nt Homology 1 |
| | 17 nt | TCGTTTAGTGAACCGTC (SEQ ID NO: 19203) | 0 nt Homology 1 |
| | 16 nt | CGTTTAGTGAACCGTC (SEQ ID NO: 19204) | 0 nt Homology 1 |
| | 15 nt | GTTTAGTGAACCGTC (SEQ ID NO: 19205) | 0 nt Homology 1 |
| | 14 nt | TTTAGTGAACCGTC (SEQ ID NO: 19206) | 0 nt Homology 1 |
| | 13 nt | TTAGTGAACCGTC (SEQ ID NO: 19207) | 0 nt Homology 1 |
| | 12 nt | TAGTGAACCGTC (SEQ ID NO: 19208) | 0 nt Homology 1 |
| | 11 nt | AGTGAACCGTC (SEQ ID NO: 19209) | 0 nt Homology 1 |
| | 10 nt | GTGAACCGTC (SEQ ID NO: 19210) | 0 nt Homology 1 |
| | 9 nt | TGAACCGTC | 0 nt Homology 1 |
| | 8 nt | GAACCGTC | 0 nt Homology 1 |
| | 7 nt | AACCGTC | 0 nt Homology 1 |
| | 6 nt | ACCGTC | 0 nt Homology 1 |
| | 5 nt | CCGTC | 0 nt Homology 1 |
| | 4 nt | CGTC | 0 nt Homology 1 |
| | 3 nt | GTC | 0 nt Homology 1 |
| | 2 nt | TC | 0 nt Homology 1 |
| | 1 nt | C | 0 nt Homology 1 |
| | 0 nt | | 0 nt Homology 1 |
| | (0-500 nt) | GCCCGCCTGGCTGACCGCCCAACGACCCCCGCCCATTGACGTCAATAATGACGTATGTTCCCATAGTAA | 1 nt Homology 1 |
| | | CGCCAATAGGGACTTTCCATTGACGTCAATGGGTGGAGTATTTACGGTAAACTGCCCACTTGGCAGTA | |
| | | CATCAAGTGTATCATATGCCAAGTCCGCCCCCTATTGACGTCAATGACGGTAAATGGCCCGCCTGGCAT | |
| | | TATGCCCAGTACATGACCTTACGGGACTTTCCTACTTGGCAGTACATCTACGTATTAGTCATCGCTATTA | |
| | | CCATGGTGATGCGGTTTTGGCAGTACACCAATGGGCGTGGATAGCGGTTTGACTCACGGGGATTTCCA | |
| | | AGTCTCCACCCCATTGACGTCAATGGGAGTTTGTTTTGGCACCAAAATCAACGGGACTTTCCAAAATGT | |
| | | CGTAATAACCCCGCCCCGTTGACGCAAATGGGCGGTAGGCGTGTACGGTGGGAGGTCTATATAAGCA | |
| | | GAGCTCGTTTAGTGAACCGT (SEQ ID NO: 19211) | |
| | (0-500 nt) | GGCCCGCCTGGCTGACCGCCCAACGACCCCCGCCCATTGACGTCAATAATGACGTATGTTCCCATAGT | 2 nt Homology 1 |
| | | AACGCCAATAGGGACTTTCCATTGACGTCAATGGGTGGAGTATTTACGGTAAACTGCCCACTTGGCAG | |
| | | TACATCAAGTGTATCATATGCCAAGTCCGCCCCCTATTGACGTCAATGACGGTAAATGGCCCGCCTGGC | |
| | | ATTATGCCCAGTACATGACCTTACGGGACTTTCCTACTTGGCAGTACATCTACGTATTAGTCATCGCTAT | |
| | | TACCATGGTGATGCGGTTTTGGCAGTACACCAATGGGCGTGGATAGCGGTTTGACTCACGGGGATTTC | |
| | | CAAGTCTCCACCCCATTGACGTCAATGGGAGTTTGTTTTGGCACCAAAATCAACGGGACTTTCCAAAAT | |
| | | GTCGTAATAACCCCGCCCCGTTGACGCAAATGGGCGGTAGGCGTGTACGGTGGGAGGTCTATATAAG | |
| | | CAGAGCTCGTTTAGTGAACCG (SEQ ID NO: 19212) | |
| | (0-500 nt) | TGGCCCGCCTGGCTGACCGCCCAACGACCCCCGCCCATTGACGTCAATAATGACGTATGTTCCCATAGT | 3 nt Homology 1 |
| | | AACGCCAATAGGGACTTTCCATTGACGTCAATGGGTGGAGTATTTACGGTAAACTGCCCACTTGGCAG | |
| | | TACATCAAGTGTATCATATGCCAAGTCCGCCCCCTATTGACGTCAATGACGGTAAATGGCCCGCCTGGC | |
| | | ATTATGCCCAGTACATGACCTTACGGGACTTTCCTACTTGGCAGTACATCTACGTATTAGTCATCGCTAT | |
| | | TACCATGGTGATGCGGTTTTGGCAGTACACCAATGGGCGTGGATAGCGGTTTGACTCACGGGGATTTC | |
| | | CAAGTCTCCACCCCATTGACGTCAATGGGAGTTTGTTTTGGCACCAAAATCAACGGGACTTTCCAAAAT | |
| | | GTCGTAATAACCCCGCCCCGTTGACGCAAATGGGCGGTAGGCGTGTACGGTGGGAGGTCTATATAAG | |
| | | CAGAGCTCGTTTAGTGAACC (SEQ ID NO: 19213) | |
| | (0-500 nt) | ATGGCCCGCCTGGCTGACCGCCCAACGACCCCCGCCCATTGACGTCAATAATGACGTATGTTCCCATA | 4 nt Homology 1 |
| | | GTAACGCCAATAGGGACTTTCCATTGACGTCAATGGGTGGAGTATTTACGGTAAACTGCCCACTTGGC | |
| | | AGTACATCAAGTGTATCATATGCCAAGTCCGCCCCCTATTGACGTCAATGACGGTAAATGGCCCGCCT | |
| | | GGCATTATGCCCAGTACATGACCTTACGGGACTTTCCTACTTGGCAGTACATCTACGTATTAGTCATCG | |
| | | CTATTACCATGGTGATGCGGTTTTGGCAGTACACCAATGGGCGTGGATAGCGGTTTGACTCACGGGGA | |
| | | TTTCCAAGTCTCCACCCCATTGACGTCAATGGGAGTTTGTTTTGGCACCAAAATCAACGGGACTTTCCA | |
| | | AAATGTCGTAATAACCCCGCCCCGTTGACGCAAATGGGCGGTAGGCGTGTACGGTGGGAGGTCTATA | |
| | | TAAGCAGAGCTCGTTTAGTGAAC (SEQ ID NO: 19214) | |
| | (0-500 nt) | AATGGCCCGCCTGGCTGACCGCCCAACGACCCCCGCCCATTGACGTCAATAATGACGTATGTTOCCATA | 5 nt Homology 1 |
| | | GTAACGCCAATAGGGACTTTCCATTGACGTCAATGGGTGGAGTATTTACGGTAAACTGCCCACTTGGC | |
| | | AGTACATCAAGTGTATCATATGCCAAGTCCGCCCCCTATTGACGTCAATGACGGTAAATGGCCCGCCT | |
| | | GGCATTATGCCCAGTACATGACCTTACGGGACTTTCCTACTTGGCAGTACATCTACGTATTAGTCATCG | |
| | | CTATTACCATGGTGATGCGGTTTTGGCAGTACACCAATGGGCGTGGATAGCGGTTTGACTCACGGGGA | |
| | | TTTCCAAGTCTCCACCCCATTGACGTCAATGGGAGTTTGTTTTGGCACCAAAATCAACGGGACTTTCCA | |
| | | AAATGTCGTAATAACCCCGCCCCGTTGACGCAAATGGGCGGTAGGCGTGTACGGTGGGAGGTCTATA | |
| | | TAAGCAGAGCTCGTTTAGTGAA (SEQ ID NO: 19215) | |
| | (0-500 nt) | AAATGGCCCGCCTGGCTGACCGCCCAACGACCCCCGCCCATTGACGTCAATAATGACGTATGTTCCCAT | 6 nt Homology 1 |
| | | AGTAACGCCAATAGGGACTTTCCATTGACGTCAATGGGTGGAGTATTTACGGTAAACTGCCCACTTGG | |
| | | CAGTACATCAAGTGTATCATATGCCAAGTCCGCCCCCTATTGACGTCAATGACGGTAAATGGCCCGCCT | |
| | | GGCATTATGCCCAGTACATGACCTTACGGGACTTTCCTACTTGGCAGTACATCTACGTATTAGTCATCG | |
| | | CTATTACCATGGTGATGCGGTTTTGGCAGTACACCAATGGGCGTGGATAGCGGTTTGACTCACGGGGA | |
| | | TTTCCAAGTCTCCACCCCATTGACGTCAATGGGAGTTTGTTTTGGCACCAAAATCAACGGGACTTTCCA | |
| | | AAATGTCGTAATAACCCCGCCCCGTTGACGCAAATGGGCGGTAGGCGTGTACGGTGGGAGGTCTATA | |
| | | TAAGCAGAGCTCGTTTAGTGA (SEQ ID NO: 19216) | |
| | (0-500 nt) | TAAATGGCCCGCCTGGCTGACCGCCCAACGACCCCCGCCCATTGACGTCAATAATGACGTATGTTCCCA | 7 nt Homology 1 |
| | | TAGTAACGCCAATAGGGACTTTCCATTGACGTCAATGGGTGGAGTATTTACGGTAAACTGCCCACTTG | |
| | | GCAGTACATCAAGTGTATCATATGCCAAGTCCGCCCCCTATTGACGTCAATGACGGTAAATGGCCCGC | |
| | | CTGGCATTATGCCCAGTACATGACCTTACGGGACTTTCCTACTTGGCAGTACATCTACGTATTAGTCATC | |
| | | GCTATTACCATGGTGATGCGGTTTTGGCAGTACACCAATGGGCGTGGATAGCGGTTTGACTCACGGG | |
| | | GATTTCCAAGTCTCCACCCCATTGACGTCAATGGGAGTTTGTTTTGGCACCAAAATCAACGGGACTTTC | |
| | | CAAAATGTCGTAATAACCCCGCCCCGTTGACGCAAATGGGCGGTAGGCGTGTACGGTGGGAGGTCTA | |
| | | TATAAGCAGAGCTCGTTTAGTG (SEQ ID NO: 19217) | |
| | (0-500 nt) | GTAAATGGCCCGCCTGGCTGACCGCCCAACGACCCCCGCCCATTGACGTCAATAATGACGTATGTTCC | 8 nt Homology 1 |
| | | CATAGTAACGCCAATAGGGACTTTCCATTGACGTCAATGGGTGGAGTATTTACGGTAAACTGCCCACT | |
| | | TGGCAGTACATCAAGTGTATCATATGCCAAGTCCGCCCCCTATTGACGTCAATGACGGTAAATGGCCC | |
| | | GCCTGGCATTATGCCCAGTACATGACCTTACGGGACTTTCCTACTTGGCAGTACATCTACGTATTAGTC | |
| | | ATCGCTATTACCATGGTGATGCGGTTTTGGCAGTACACCAATGGGCGTGGATAGCGGTTTGACTCACG | |
| | | GGGATTTCCAAGTCTCCACCCCATTGACGTCAATGGGAGTTTGTTTTGGCACCAAAATCAACGGGACTT | |
| | | TCCAAAATGTCGTAATAACCCCGCCCCGTTGACGCAAATGGGCGGTAGGCGTGTACGGTGGGAGGTC | |
| | | TATATAAGCAGAGCTCGTTTAGT (SEQ ID NO: 19218) | |
| | (0-500 nt) | GGTAAATGGCCCGCCTGGCTGACCGCCCAACGACCCCCGCCCATTGACGTCAATAATGACGTATGTTC | 9 nt Homology 1 |
| | | CCATAGTAACGCCAATAGGGACTTTCCATTGACGTCAATGGGTGGAGTATTTACGGTAAACTGCCCAC | |
| | | TTGGCAGTACATCAAGTGTATCATATGCCAAGTCCGCCCCCTATTGACGTCAATGACGGTAAATGGCCC | |
| | | GCCTGGCATTATGCCCAGTACATGACCTTACGGGACTTTCCTACTTGGCAGTACATCTACGTATTAGTC | |
| | | ATCGCTATTACCATGGTGATGCGGTTTTGGCAGTACACCAATGGGCGTGGATAGCGGTTTGACTCACG | |
| | | GGGATTTCCAAGTCTCCACCCCATTGACGTCAATGGGAGTTTGTTTTGGCACCAAAATCAACGGGACTT | |
| | | TCCAAAATGTCGTAATAACCCCGCCCCGTTGACGCAAATGGGCGGTAGGCGTGTACGGTGGGAGGTC | |
| | | TATATAAGCAGAGCTCGTTTAG (SEQ ID NO: 19219) | |
| | (0-500 nt) | CGGTAAATGGCCCGCCTGGCTGACCGCCCAACGACCCCCGCCCATTGACGTCAATAATGACGTATGTT | 10 nt Homology |
| | | CCCATAGTAACGCCAATAGGGACTTTCCATTGACGTCAATGGGTGGAGTATTTACGGTAAACTGCCCA | 1 |
| | | CTTGGCAGTACATCAAGTGTATCATATGCCAAGTCCGCCCCCTATTGACGTCAATGACGGTAAATGGCC | |
| | | CGCCTGGCATTATGCCCAGTACATGACCTTACGGGACTTTCCTACTTGGCAGTACATCTACGTATTAGT | |
| | | CATCGCTATTACCATGGTGATGCGGTTTTGGCAGTACACCAATGGGCGTGGATAGCGGTTTGACTCAC | |
| | | GGGGATTTCCAAGTCTCCACCCCATTGACGTCAATGGGAGTTTGTTTTGGCACCAAAATCAACGGGAC | |
| | | TTTCCAAAATGTCGTAATAACCCCGCCCCGTTGACGCAAATGGGCGGTAGGCGTGTACGGTGGGAGG | |
| | | TCTATATAAGCAGAGCTCGTTTA (SEQ ID NO: 19220) | |
| | (0-500 nt) | ACGGTAAATGGCCCGCCTGGCTGACCGCCCAACGACCCCCGCCCATTGACGTCAATAATGACGTATGT | 11 nt Homology |
| | | TCCCATAGTAACGCCAATAGGGACTTTCCATTGACGTCAATGGGTGGAGTATTTACGGTAAACTGCCC | 1 |
| | | ACTTGGCAGTACATCAAGTGTATCATATGCCAAGTCCGCCCCCTATTGACGTCAATGACGGTAAATGG | |
| | | CCCGCCTGGCATTATGCCCAGTACATGACCTTACGGGACTTTCCTACTTGGCAGTACATCTACGTATTA | |
| | | GTCATCGCTATTACCATGGTGATGCGGTTTTGGCAGTACACCAATGGGCGTGGATAGCGGTTTGACTC | |
| | | ACGGGGATTTCCAAGTCTCCACCCCATTGACGTCAATGGGAGTTTGTTTTGGCACCAAAATCAACGGG | |
| | | ACTTTCCAAAATGTCGTAATAACCCCGCCCCGTTGACGCAAATGGGCGGTAGGCGTGTACGGTGGGA | |
| | | GGTCTATATAAGCAGAGCTCGTTT (SEQ ID NO: 19221) | |
| | (0-500 nt) | TACGGTAAATGGCCCGCCTGGCTGACCGCCCAACGACCCCCGCCCATTGACGTCAATAATGACGTATG | 12 nt Homology |
| | | TTCCCATAGTAACGCCAATAGGGACTTTCCATTGACGTCAATGGGTGGAGTATTTACGGTAAACTGCCC | 1 |
| | | ACTTGGCAGTACATCAAGTGTATCATATGCCAAGTCCGCCCCCTATTGACGTCAATGACGGTAAATGG | |
| | | CCCGCCTGGCATTATGCCCAGTACATGACCTTACGGGACTTTCCTACTTGGCAGTACATCTACGTATTA | |
| | | GTCATCGCTATTACCATGGTGATGCGGTTTTGGCAGTACACCAATGGGCGTGGATAGCGGTTTGACTC | |
| | | ACGGGGATTTCCAAGTCTCCACCCCATTGACGTCAATGGGAGTTTGTTTTGGCACCAAAATCAACGGG | |
| | | ACTTTCCAAAATGTCGTAATAACCCCGCCCCGTTGACGCAAATGGGCGGTAGGCGTGTACGGTGGGA | |
| | | GGTCTATATAAGCAGAGCTCGTT (SEQ ID NO: 19222) | |
| | (0-500 nt) | TTACGGTAAATGGCCCGCCTGGCTGACCGCCCAACGACCCCCGCCCATTGACGTCAATAATGACGTAT | 13 nt Homology |
| | | GTTCCCATAGTAACGCCAATAGGGACTTTCCATTGACGTCAATGGGTGGAGTATTTACGGTAAACTGC | 1 |
| | | CCACTTGGCAGTACATCAAGTGTATCATATGCCAAGTCCGCCCCCTATTGACGTCAATGACGGTAAATG | |
| | | GCCCGCCTGGCATTATGCCCAGTACATGACCTTACGGGACTTTCCTACTTGGCAGTACATCTACGTATT | |
| | | AGTCATCGCTATTACCATGGTGATGCGGTTTTGGCAGTACACCAATGGGCGTGGATAGCGGTTTGACT | |
| | | CACGGGGATTTCCAAGTCTCCACCCCATTGACGTCAATGGGAGTTTGTTTTGGCACCAAAATCAACGG | |
| | | GACTTTCCAAAATGTCGTAATAACCCCGCCCCGTTGACGCAAATGGGCGGTAGGCGTGTACGGTGGG | |
| | | AGGTCTATATAAGCAGAGCTCGT (SEQ ID NO: 19223) | |
| | (0-500 nt) | CTTACGGTAAATGGCCCGCCTGGCTGACCGCCCAACGACCCCCGCCCATTGACGTCAATAATGACGTA | 14 nt Homology |
| | | TGTTCCCATAGTAACGCCAATAGGGACTTTCCATTGACGTCAATGGGTGGAGTATTTACGGTAAACTG | 1 |
| | | CCCACTTGGCAGTACATCAAGTGTATCATATGCCAAGTCCGCCCCCTATTGACGTCAATGACGGTAAAT | |
| | | GGCCCGCCTGGCATTATGCCCAGTACATGACCTTACGGGACTTTCCTACTTGGCAGTACATCTACGTAT | |
| | | TAGTCATCGCTATTACCATGGTGATGCGGTTTTGGCAGTACACCAATGGGCGTGGATAGCGGTTTGAC | |
| | | TCACGGGGATTTCCAAGTCTCCACCCCATTGACGTCAATGGGAGTTTGTTTTGGCACCAAAATCAACGG | |
| | | GACTTTCCAAAATGTCGTAATAACCCCGCCCCGTTGACGCAAATGGGCGGTAGGCGTGTACGGTGGG | |
| | | AGGTCTATATAAGCAGAGCTCG (SEQ ID NO: 19224) | |
| | (0-500 nt) | ACTTACGGTAAATGGCCCGCCTGGCTGACCGCCCAACGACCCCCGCCCATTGACGTCAATAATGACGT | 15 nt Homology |
| | | ATGTTCCCATAGTAACGCCAATAGGGACTTTCCATTGACGTCAATGGGTGGAGTATTTACGGTAAACT | 1 |
| | | GCCCACTTGGCAGTACATCAAGTGTATCATATGCCAAGTCCGCCCCCTATTGACGTCAATGACGGTAAA | |
| | | TGGCCCGCCTGGCATTATGCCCAGTACATGACCTTACGGGACTTTCCTACTTGGCAGTACATCTACGTA | |
| | | TTAGTCATCGCTATTACCATGGTGATGCGGTTTTGGCAGTACACCAATGGGCGTGGATAGCGGTTTGA | |
| | | CTCACGGGGATTTCCAAGTCTCCACCCCATTGACGTCAATGGGAGTTTGTTTTGGCACCAAAATCAACG | |
| | | GGACTTTCCAAAATGTCGTAATAACCCCGCCCCGTTGACGCAAATGGGCGGTAGGCGTGTACGGTGG | |
| | | GAGGTCTATATAAGCAGAGCTC (SEQ ID NO: 19225) | |
| | (0-500 nt) | AACTTACGGTAAATGGCCCGCCTGGCTGACCGCCCAACGACCCCCGCCCATTGACGTCAATAATGACG | 16 nt Homology |
| | | TATGTTCCCATAGTAACGCCAATAGGGACTTTCCATTGACGTCAATGGGTGGAGTATTTACGGTAAACT | 1 |
| | | GCCCACTTGGCAGTACATCAAGTGTATCATATGCCAAGTCCGCCCCCTATTGACGTCAATGACGGTAAA | |
| | | TGGCCCGCCTGGCATTATGCCCAGTACATGACCTTACGGGACTTTCCTACTTGGCAGTACATCTACGTA | |
| | | TTAGTCATCGCTATTACCATGGTGATGCGGTTTTGGCAGTACACCAATGGGCGTGGATAGCGGTTTGA | |
| | | CTCACGGGGATTTCCAAGTCTCCACCCCATTGACGTCAATGGGAGTTTGTTTTGGCACCAAAATCAACG | |
| | | GGACTTTCCAAAATGTCGTAATAACCCCGCCCCGTTGACGCAAATGGGCGGTAGGCGTGTACGGTGG | |
| | | GAGGTCTATATAAGCAGAGCT (SEQ ID NO: 19226) | |
| | (0-500 nt) | TAACTTACGGTAAATGGCCCGCCTGGCTGACCGCCCAACGACCCCCGCCCATTGACGTCAATAATGAC | 17 nt Homology |
| | | GTATGTTCCCATAGTAACGCCAATAGGGACTTTCCATTGACGTCAATGGGTGGAGTATTTACGGTAAA | 1 |
| | | CTGCCCACTTGGCAGTACATCAAGTGTATCATATGCCAAGTCCGCCCCCTATTGACGTCAATGACGGTA | |
| | | AATGGCCCGCCTGGCATTATGCCCAGTACATGACCTTACGGGACTTTCCTACTTGGCAGTACATCTACG | |
| | | TATTAGTCATCGCTATTACCATGGTGATGCGGTTTTGGCAGTACACCAATGGGCGTGGATAGCGGTTT | |
| | | GACTCACGGGGATTTCCAAGTCTCCACCCCATTGACGTCAATGGGAGTTTGTTTTGGCACCAAAATCAA | |
| | | CGGGACTTTCCAAAATGTCGTAATAACCCCGCCCCGTTGACGCAAATGGGGGTAGGCGTGTACGGT | |
| | | GGGAGGTCTATATAAGCAGAGC (SEQ ID NO: 19227) | |
| | (0-500 nt) | ATAACTTACGGTAAATGGCCCGCCTGGCTGACCGCCCAACGACCCCCGCCCATTGACGTCAATAATGA | 18 nt Homology |
| | | CGTATGTTCCCATAGTAACGCCAATAGGGACTTTCCATTGACGTCAATGGGTGGAGTATTTACGGTAA | 1 |
| | | ACTGCCCACTTGGCAGTACATCAAGTGTATCATATGCCAAGTCCGCCCCCTATTGACGTCAATGACGGT | |
| | | AAATGGCCCGCCTGGCATTATGCCCAGTACATGACCTTACGGGACTTTCCTACTTGGCAGTACATCTAC | |
| | | GTATTAGTCATCGCTATTACCATGGTGATGCGGTTTTGGCAGTACACCAATGGGCGTGGATAGCGGTT | |
| | | TGACTCACGGGGATTTCCAAGTCTCCACCCCATTGACGTCAATGGGAGTTTGTTTTGGCACCAAAATCA | |
| | | ACGGGACTTTCCAAAATGTCGTAATAACCCCGCCCCGTTGACGCAAATGGGCGGTAGGCGTGTACGGT | |
| | | GGGAGGTCTATATAAGCAGAG (SEQ ID NO: 19228) | |
| | (0-500 nt) | CATAACTTACGGTAAATGGCCCGCCTGGCTGACCGCCCAACGACCCCCGCCCATTGACGTCAATAATG | 19 nt Homology |
| | | ACGTATGTTCCCATAGTAACGCCAATAGGGACTTTCCATTGACGTCAATGGGTGGAGTATTTACGGTA | 1 |
| | | AACTGCCCACTTGGCAGTACATCAAGTGTATCATATGCCAAGTCCGCCCCCTATTGACGTCAATGACGG | |
| | | TAAATGGCCCGCCTGGCATTATGCCCAGTACATGACCTTACGGGACTTTCCTACTTGGCAGTACATCTA | |
| | | CGTATTAGTCATCGCTATTACCATGGTGATGCGGTTTTGGCAGTACACCAATGGGCGTGGATAGCGGT | |
| | | TTGACTCACGGGGATTTCCAAGTCTCCACCCCATTGACGTCAATGGGAGTTTGTTTTGGCACCAAAATC | |
| | | AACGGGACTTTCCAAAATGTCGTAATAACCCCGCCCCGTTGACGCAAATGGGCGGTAGGCGTGTACG | |
| | | GTGGGAGGTCTATATAAGCAGA (SEQ ID NO: 19229) | |
| | (0-500 nt) | ACATAACTTACGGTAAATGGCCCGCCTGGCTGACCGCCCAACGACCCCCGCCCATTGACGTCAATAAT | 20 nt Homology |
| | | GACGTATGTTCCCATAGTAACGCCAATAGGGACTTTCCATTGACGTCAATGGGTGGAGTATTTACGGT | 1 |
| | | AAACTGCCCACTTGGCAGTACATCAAGTGTATCATATGCCAAGTCCGCCCCCTATTGACGTCAATGACG | |
| | | GTAAATGGCCCGCCTGGCATTATGCCCAGTACATGACCTTACGGGACTTTCCTACTTGGCAGTACATCT | |
| | | ACGTATTAGTCATCGCTATTACCATGGTGATGCGGTTTTGGCAGTACACCAATGGGCGTGGATAGCGG | |
| | | TTTGACTCACGGGGATTTCCAAGTCTCCACCCCATTGACGTCAATGGGAGTTTGTTTTGGCACCAAAAT | |
| | | CAACGGGACTTTCCAAAATGTCGTAATAACCCCGCCCCGTTGACGCAAATGGGCGGTAGGCGTGTACG | |
| | | GTGGGAGGTCTATATAAGCAG (SEQ ID NO: 19230) | |
| mCherry | (0-500 nt) | ATCTACGTATTAGTCATCGCTATTACCATGGTGATGCGGTTTTGGCAGTACACCAATGGGCGTGGATA | 0 nt Homology 1 |
| insertion | | GCGGTTTGACTCACGGGGATTTCCAAGTCTCCACCCCATTGACGTCAATGGGAGTTTGTTTTGGCACCA | |
| | | AAATCAACGGGACTTTCCAAAATGTCGTAATAACCCCGCCCCGTTGACGCAAATGGGCGGTAGGCGTG | |
| | | TACGGTGGGAGGTCTATATAAGCAGAGCTCGTTTAGTGAACCGTCAGAATTTTGTAATACGACTCACT | |
| | | ATAGGGCGGCCGGGAATTCGCCACCATGGTGAGCAAGGGCGAGGAGCTGTTCACCGGGGTGGTGCC | |
| | | CATCCTGGTCGAGCTGGACGGCGACGTAAACGGCCACAAGTTCAGCGTGTCCGGCGAGGGCGAGGG | |
| | | CGATGCCACCTACGGCAAGCTGACCCTGAAGTTCATCTGCACCACCGGCAAGCTGCCCGTGCCCTGGC | |
| | | CCACCCTCGTGACCACCCTGACGTACG (SEQ ID NO: 19231) | |
| | (0-500 nt) | CATCTACGTATTAGTCATCGCTATTACCATGGTGATGCGGTTTTGGCAGTACACCAATGGGCGTGGATA | 1 nt Homology 1 |
| | | GCGGTTTGACTCACGGGGATTTCCAAGTCTCCACCCCATTGACGTCAATGGGAGTTTGTTTTGGCACCA | |
| | | AAATCAACGGGACTTTCCAAAATGTCGTAATAACCCCGCCCCGTTGACGCAAATGGGCGGTAGGCGTG | |
| | | TACGGTGGGAGGTCTATATAAGCAGAGCTCGTTTAGTGAACCGTCAGAATTTTGTAATACGACTCACT | |
| | | ATAGGGCGGCCGGGAATTCGCCACCATGGTGAGCAAGGGCGAGGAGCTGTTCACCGGGGTGGTGCC | |
| | | CATCCTGGTCGAGCTGGACGGCGACGTAAACGGCCACAAGTTCAGCGTGTCCGGCGAGGGCGAGGG | |
| | | CGATGCCACCTACGGCAAGCTGACCCTGAAGTTCATCTGCACCACCGGCAAGCTGCCCGTGCCCTGGC | |
| | | CCACCCTCGTGACCACCCTGACGTAC (SEQ ID NO: 19232) | |
| | (5-500 nt) | ACATCTACGTATTAGTCATCGCTATTACCATGGTGATGCGGTTTTGGCAGTACACCAATGGGCGTGGAT | 2 nt Homology 1 |
| | | AGCGGTTTGACTCACGGGGATTTCCAAGTCTCCACCCCATTGACGTCAATGGGAGTTTGTTTTGGCACC | |
| | | AAAATCAACGGGACTTTCCAAAATGTCGTAATAACCCCGCCCCGTTGACGCAAATGGGCGGTAGGCGT | |
| | | GTACGGTGGGAGGTCTATATAAGCAGAGCTCGTTTAGTGAACCGTCAGAATTTTGTAATACGACTCAC | |
| | | TATAGGGCGGCCGGGAATTCGCCACCATGGTGAGCAAGGGCGAGGAGCTGTTCACCGGGGTGGTGC | |
| | | CCATCCTGGTCGAGCTGGACGGCGACGTAAACGGCCACAAGTTCAGCGTGTCCGGCGAGGGCGAGG | |
| | | GCGATGCCACCTACGGCAAGCTGACCCTGAAGTTCATCTGCACCACCGGCAAGCTGCCCGTGCCCTGG | |
| | | CCCACCCTCGTGACCACCCTGACGTA (SEQ ID NO: 19233) | |
| | (5-500 nt) | TACATCTACGTATTAGTCATCGCTATTACCATGGTGATGCGGTTTTGGCAGTACACCAATGGGCGTGGA | 3 nt Homology 1 |
| | | TAGCGGTTTGACTCACGGGGATTTCCAAGTCTCCACCCCATTGACGTCAATGGGAGTTTGTTTTGGCAC | |
| | | CAAAATCAACGGGACTTTCCAAAATGTCGTAATAACCCCGCCCCGTTGACGCAAATGGGGGTAGGCG | |
| | | TGTACGGTGGGAGGTCTATATAAGCAGAGCTCGTTTAGTGAACCGTCAGAATTTTGTAATACGACTCA | |
| | | CTATAGGGCGGCCGGGAATTCGCCACCATGGTGAGCAAGGGCGAGGAGCTGTTCACCGGGGTGGTG | |
| | | CCCATCCTGGTCGAGCTGGACGGCGACGTAAACGGCCACAAGTTCAGCGTGTCCGGCGAGGGCGAG | |
| | | GGCGATGCCACCTACGGCAAGCTGACCCTGAAGTTCATCTGCACCACCGGCAAGCTGCCCGTGCCCTG | |
| | | GCCCACCCTCGTGACCACCCTGACGT (SEQ ID NO: 19234) | |
| | (5-500 nt) | GTACATCTACGTATTAGTCATCGCTATTACCATGGTGATGCGGTTTTGGCAGTACACCAATGGGCGTG | 4 nt Homology 1 |
| | | GATAGCGGTTTGACTCACGGGGATTTCCAAGTCTCCACCCCATTGACGTCAATGGGAGTTTGTTTTGGC | |
| | | ACCAAAATCAACGGGACTTTCCAAAATGTCGTAATAACCCCGCCCCGTTGACGCAAATGGGGGGTAGG | |
| | | CGTGTACGGTGGGAGGTCTATATAAGCAGAGCTCGTTTAGTGAACCGTCAGAATTTTGTAATACGACT | |
| | | CACTATAGGGCGGCCGGGAATTCGCCACCATGGTGAGCAAGGGCGAGGAGCTGTTCACCGGGGTGG | |
| | | TGCCCATCCTGGTCGAGCTGGACGGCGACGTAAACGGCCACAAGTTCAGCGTGTCCGGCGAGGGCGA | |
| | | GGGCGATGCCACCTACGGCAAGCTGACCCTGAAGTTCATCTGCACCACCGGCAAGCTGCCCGTGCCCT | |
| | | GGCCCACCCTCGTGACCACCCTGACG (SEQ ID NO: 19235) | |
| | (5-500 nt) | AGTACATCTACGTATTAGTCATCGCTATTACCATGGTGATGCGGTTTTGGCAGTACACCAATGGGCGTG | 5 nt Homology 1 |
| | | GATAGCGGTTTGACTCACGGGGATTTCCAAGTCTCCACCCCATTGACGTCAATGGGAGTTTGTTTTGGC | |
| | | ACCAAAATCAACGGGACTTTCCAAAATGTCGTAATAACCCCGCCCCGTTGACGCAAATGGGCGGTAGG | |
| | | CGTGTACGGTGGGAGGTCTATATAAGCAGAGCTCGTTTAGTGAACCGTCAGAATTTTGTAATACGACT | |
| | | CACTATAGGGCGGCCGGGAATTCGCCACCATGGTGAGCAAGGGCGAGGAGCTGTTCACCGGGGTGG | |
| | | TGCCCATCCTGGTCGAGCTGGACGGCGACGTAAACGGCCACAAGTTCAGCGTGTCCGGCGAGGGCGA | |
| | | GGGCGATGCCACCTACGGCAAGCTGACCCTGAAGTTCATCTGCACCACCGGCAAGCTGCCCGTGCCCT | |
| | | GGCCCACCCTCGTGACCACCCTGAC (SEQ ID NO: 19236) | |
| | (5-500 nt) | CAGTACATCTACGTATTAGTCATCGCTATTACCATGGTGATGCGGTTTTGGCAGTACACCAATGGGCGT | 6 nt Homology 1 |
| | | GGATAGCGGTTTGACTCACGGGGATTTCCAAGTCTCCACCCCATTGACGTCAATGGGAGTTTGTTTTG | |
| | | GCACCAAAATCAACGGGACTTTCCAAAATGTCGTAATAACCCCGCCCCGTTGACGCAAATGGGCGGTA | |
| | | GGCGTGTACGGTGGGAGGTCTATATAAGCAGAGCTCGTTTAGTGAACCGTCAGAATTTTGTAATACGA | |
| | | CTCACTATAGGGCGGCCGGGAATTCGCCACCATGGTGAGCAAGGGCGAGGAGCTGTTCACCGGGGT | |
| | | GGTGCCCATCCTGGTCGAGCTGGACGGCGACGTAAACGGCCACAAGTTCAGCGTGTCCGGCGAGGGC | |
| | | GAGGGCGATGCCACCTACGGCAAGCTGACCCTGAAGTTCATCTGCACCACCGGCAAGCTGCCCGTGCC | |
| | | CTGGCCCACCCTCGTGACCACCCTGA (SEQ ID NO: 19237) | |
| | (5-500 nt) | GCAGTACATCTACGTATTAGTCATCGCTATTACCATGGTGATGCGGTTTTGGCAGTACACCAATGGGC | 7 nt Homology 1 |
| | | GTGGATAGCGGTTTGACTCACGGGGATTTCCAAGTCTCCACCCCATTGACGTCAATGGGAGTTTGTTTT | |
| | | GGCACCAAAATCAACGGGACTTTCCAAAATGTCGTAATAACCCCGCCCCGTTGACGCAAATGGGCGGT | |
| | | AGGCGTGTACGGTGGGAGGTCTATATAAGCAGAGCTCGTTTAGTGAACCGTCAGAATTTTGTAATACG | |
| | | ACTCACTATAGGGCGGCCGGGAATTCGCCACCATGGTGAGCAAGGGCGAGGAGCTGTTCACCGGGGT | |
| | | GGTGCCCATCCTGGTCGAGCTGGACGGCGACGTAAACGGCCACAAGTTCAGCGTGTCCGGCGAGGGC | |
| | | GAGGGCGATGCCACCTACGGCAAGCTGACCCTGAAGTTCATCTGCACCACCGGCAAGCTGCCCGTGCC | |
| | | CTGGCCCACCCTCGTGACCACCCTG (SEQ ID NO: 19238) | |
| | (5-500 nt) | GGCAGTACATCTACGTATTAGTCATCGCTATTACCATGGTGATGCGGTTTTGGCAGTACACCAATGGG | 8 nt Homology 1 |
| | | CGTGGATAGCGGTTTGACTCACGGGGATTTCCAAGTCTCCACCCCATTGACGTCAATGGGAGTTTGTTT | |
| | | TGGCACCAAAATCAACGGGACTTTCCAAAATGTCGTAATAACCCCGCCCCGTTGACGCAAATGGGCGG | |
| | | TAGGCGTGTACGGTGGGAGGTCTATATAAGCAGAGCTCGTTTAGTGAACCGTCAGAATTTTGTAATAC | |
| | | GACTCACTATAGGGCGGCCGGGAATTCGCCACCATGGTGAGCAAGGGCGAGGAGCTGTTCACCGGG | |
| | | GTGGTGCCCATCCTGGTCGAGCTGGACGGCGACGTAAACGGCCACAAGTTCAGCGTGTCCGGCGAGG | |
| | | GCGAGGGCGATGCCACCTACGGCAAGCTGACCCTGAAGTTCATCTGCACCACCGGCAAGCTGCCCGT | |
| | | GCCCTGGCCCACCCTCGTGACCACCCT (SEQ ID NO: 19239) | |
| | (5-500 nt) | TGGCAGTACATCTACGTATTAGTCATCGCTATTACCATGGTGATGCGGTTTTGGCAGTACACCAATGGG | 9 nt Homology 1 |
| | | CGTGGATAGCGGTTTGACTCACGGGGATTTCCAAGTCTCCACCCCATTGACGTCAATGGGAGTTTGTTT | |
| | | TGGCACCAAAATCAACGGGACTTTCCAAAATGTCGTAATAACCCCGCCCCGTTGACGCAAATGGGCGG | |
| | | TAGGCGTGTACGGTGGGAGGTCTATATAAGCAGAGCTCGTTTAGTGAACCGTCAGAATTTTGTAATAC | |
| | | GACTCACTATAGGGCGGCCGGGAATTCGCCACCATGGTGAGCAAGGGCGAGGAGCTGTTCACCGGG | |
| | | GTGGTGCCCATCCTGGTCGAGCTGGACGGCGACGTAAACGGCCACAAGTTCAGCGTGTCCGGCGAGG | |
| | | GCGAGGGCGATGCCACCTACGGCAAGCTGACCCTGAAGTTCATCTGCACCACCGGCAAGCTGCCCGT | |
| | | GCCCTGGCCCACCCTCGTGACCACCC (SEQ ID NO: 19240) | |
| | (5-500 nt) | TTGGCAGTACATCTACGTATTAGTCATCGCTATTACCATGGTGATGCGGTTTTGGCAGTACACCAATGG | 10 nt Homology |
| | | GCGTGGATAGCGGTTTGACTCACGGGGATTTCCAAGTCTCCACCCCATTGACGTCAATGGGAGTTTGT | 1 |
| | | TTTGGCACCAAAATCAACGGGACTTTCCAAAATGTCGTAATAACCCCGCCCCGTTGACGCAAATGGGC | |
| | | GGTAGGCGTGTACGGTGGGAGGTCTATATAAGCAGAGCTCGTTTAGTGAACCGTCAGAATTTTGTAAT | |
| | | ACGACTCACTATAGGGCGGCCGGGAATTCGCCACCATGGTGAGCAAGGGCGAGGAGCTGTTCACCGG | |
| | | GGTGGTGCCCATCCTGGTCGAGCTGGACGGCGACGTAAACGGCCACAAGTTCAGCGTGTCCGGCGAG | |
| | | GGCGAGGGCGATGCCACCTACGGCAAGCTGACCCTGAAGTTCATCTGCACCACCGGCAAGCTGCCCG | |
| | | TGCCCTGGCCCACCCTCGTGACCACC (SEQ ID NO: 19241) | |
| | (5-500 nt) | CTTGGCAGTACATCTACGTATTAGTCATCGCTATTACCATGGTGATGCGGTTTTGGCAGTACACCAATG | 11 nt Homology |
| | | GGCGTGGATAGCGGTTTGACTCACGGGGATTTCCAAGTCTCCACCCCATTGACGTCAATGGGAGTTTG | 1 |
| | | TTTTGGCACCAAAATCAACGGGACTTTCCAAAATGTCGTAATAACCCCGCCCCGTTGACGCAAATGGG | |
| | | CGGTAGGCGTGTACGGTGGGAGGTCTATATAAGCAGAGCTCGTTTAGTGAACCGTCAGAATTTTGTAA | |
| | | TACGACTCACTATAGGGCGGCCGGGAATTCGCCACCATGGTGAGCAAGGGCGAGGAGCTGTTCACCG | |
| | | GGGTGGTGCCCATCCTGGTCGAGCTGGACGGCGACGTAAACGGCCACAAGTTCAGCGTGTCCGGCGA | |
| | | GGGCGAGGGCGATGCCACCTACGGCAAGCTGACCCTGAAGTTCATCTGCACCACCGGCAAGCTGCCC | |
| | | GTGCCCTGGCCCACCCTCGTGACCAC (SEQ ID NO: 19242) | |
| | (5-500 nt) | ACTTGGCAGTACATCTACGTATTAGTCATCGCTATTACCATGGTGATGCGGTTTTGGCAGTACACCAAT | 12 nt Homology |
| | | GGGCGTGGATAGCGGTTTGACTCACGGGGATTTCCAAGTCTCCACCCCATTGACGTCAATGGGAGTTT | 1 |
| | | GTTTTGGCACCAAAATCAACGGGACTTTCCAAAATGTCGTAATAACCCCGCCCCGTTGACGCAAATGG | |
| | | GCGGTAGGCGTGTACGGTGGGAGGTCTATATAAGCAGAGCTCGTTTAGTGAACCGTCAGAATTTTGT | |
| | | AATACGACTCACTATAGGGCGGCCGGGAATTCGCCACCATGGTGAGCAAGGGCGAGGAGCTGTTCAC | |
| | | CGGGGTGGTGCCCATCCTGGTCGAGCTGGACGGCGACGTAAACGGCCACAAGTTCAGCGTGTCCGGC | |
| | | GAGGGCGAGGGCGATGCCACCTACGGCAAGCTGACCCTGAAGTTCATCTGCACCACCGGCAAGCTGC | |
| | | CCGTGCCCTGGCCCACCCTCGTGACCA (SEQ ID NO: 19243) | |
| | (5-500 nt) | TACTTGGCAGTACATCTACGTATTAGTCATCGCTATTACCATGGTGATGCGGTTTTGGCAGTACACCAA | 13 nt Homology |
| | | TGGGCGTGGATAGCGGTTTGACTCACGGGGATTTCCAAGTCTCCACCCCATTGACGTCAATGGGAGTT | 1 |
| | | TGTTTTGGCACCAAAATCAACGGGACTTTCCAAAATGTCGTAATAACCCCGCCCCGTTGACGCAAATG | |
| | | GGCGGTAGGCGTGTACGGTGGGAGGTCTATATAAGCAGAGCTCGTTTAGTGAACCGTCAGAATTTTG | |
| | | TAATACGACTCACTATAGGGCGGCCGGGAATTCGCCACCATGGTGAGCAAGGGCGAGGAGCTGTTCA | |
| | | CCGGGGTGGTGCCCATCCTGGTCGAGCTGGACGGCGACGTAAACGGCCACAAGTTCAGCGTGTCCGG | |
| | | CGAGGGCGAGGGCGATGCCACCTACGGCAAGCTGACCCTGAAGTTCATCTGCACCACCGGCAAGCTG | |
| | | CCCGTGCCCTGGCCCACCCTCGTGACC (SEQ ID NO: 19244) | |
| | (5-500 nt) | CTACTTGGCAGTACATCTACGTATTAGTCATCGCTATTACCATGGTGATGCGGTTTTGGCAGTACACCA | 14 nt Homology |
| | | ATGGGCGTGGATAGCGGTTTGACTCACGGGGATTTCCAAGTCTCCACCCCATTGACGTCAATGGGAGT | 1 |
| | | TTGTTTTGGCACCAAAATCAACGGGACTTTCCAAAATGTCGTAATAACCCCGCCCCGTTGACGCAAATG | |
| | | GGCGGTAGGCGTGTACGGTGGGAGGTCTATATAAGCAGAGCTCGTTTAGTGAACCGTCAGAATTTTG | |
| | | TAATACGACTCACTATAGGGCGGCCGGGAATTCGCCACCATGGTGAGCAAGGGCGAGGAGCTGTTCA | |
| | | CCGGGGTGGTGCCCATCCTGGTCGAGCTGGACGGCGACGTAAACGGCCACAAGTTCAGCGTGTCCGG | |
| | | CGAGGGCGAGGGCGATGCCACCTACGGCAAGCTGACCCTGAAGTTCATCTGCACCACCGGCAAGCTG | |
| | | CCCGTGCCCTGGCCCACCCTCGTGAC (SEQ ID NO: 19245) | |
| | (5-500 nt) | CCTACTTGGCAGTACATCTACGTATTAGTCATCGCTATTACCATGGTGATGCGGTTTTGGCAGTACACC | 15 nt Homology |
| | | AATGGGCGTGGATAGCGGTTTGACTCACGGGGATTTCCAAGTCTCCACCCCATTGACGTCAATGGGAG | 1 |
| | | TTTGTTTTGGCACCAAAATCAACGGGACTTTCCAAAATGTCGTAATAACCCCGCCCCGTTGACGCAAAT | |
| | | GGGCGGTAGGCGTGTACGGTGGGAGGTCTATATAAGCAGAGCTCGTTTAGTGAACCGTCAGAATTTT | |
| | | GTAATACGACTCACTATAGGGCGGCCGGGAATTCGCCACCATGGTGAGCAAGGGCGAGGAGCTGTTC | |
| | | ACCGGGGTGGTGCCCATCCTGGTCGAGCTGGACGGCGACGTAAACGGCCACAAGTTCAGCGTGTCCG | |
| | | GCGAGGGCGAGGGCGATGCCACCTACGGCAAGCTGACCCTGAAGTTCATCTGCACCACCGGCAAGCT | |
| | | GCCCGTGCCCTGGCCCACCCTCGTGA (SEQ ID NO: 19246) | |
| | (5-500 nt) | TCCTACTTGGCAGTACATCTACGTATTAGTCATCGCTATTACCATGGTGATGCGGTTTTGGCAGTACAC | 16 nt Homology |
| | | CAATGGGCGTGGATAGCGGTTTGACTCACGGGGATTTCCAAGTCTCCACCCCATTGACGTCAATGGGA | 1 |
| | | GTTTGTTTTGGCACCAAAATCAACGGGACTTTCCAAAATGTCGTAATAACCCCGCCCCGTTGACGCAAA | |
| | | TGGGCGGTAGGCGTGTACGGTGGGAGGTCTATATAAGCAGAGCTCGTTTAGTGAACCGTCAGAATTT | |
| | | TGTAATACGACTCACTATAGGGCGGCCGGGAATTCGCCACCATGGTGAGCAAGGGCGAGGAGCTGTT | |
| | | CACCGGGGTGGTGCCCATCCTGGTCGAGCTGGACGGCGACGTAAACGGCCACAAGTTCAGCGTGTCC | |
| | | GGCGAGGGCGAGGGCGATGCCACCTACGGCAAGCTGACCCTGAAGTTCATCTGCACCACCGGCAAGC | |
| | | TGCCCGTGCCCTGGCCCACCCTCGTG (SEQ ID NO: 19247) | |
| | (5-500 nt) | TTCCTACTTGGCAGTACATCTACGTATTAGTCATCGCTATTACCATGGTGATGCGGTTTTGGCAGTACA | 17 nt Homology |
| | | CCAATGGGCGTGGATAGCGGTTTGACTCACGGGGATTTCCAAGTCTCCACCCCATTGACGTCAATGGG | 1 |
| | | AGTTTGTTTTGGCACCAAAATCAACGGGACTTTCCAAAATGTCGTAATAACCCCGCCCCGTTGACGCAA | |
| | | ATGGGCGGTAGGCGTGTACGGTGGGAGGTCTATATAAGCAGAGCTCGTTTAGTGAACCGTCAGAATT | |
| | | TTGTAATACGACTCACTATAGGGCGGCCGGGAATTCGCCACCATGGTGAGCAAGGGCGAGGAGCTGT | |
| | | TCACCGGGGTGGTGCCCATCCTGGTCGAGCTGGACGGCGACGTAAACGGCCACAAGTTCAGCGTGTC | |
| | | CGGCGAGGGCGAGGGCGATGCCACCTACGGCAAGCTGACCCTGAAGTTCATCTGCACCACCGGCAAG | |
| | | CTGCCCGTGCCCTGGCCCACCCTCGT (SEQ ID NO: 19248) | |
| | (5-500 nt) | TTTCCTACTTGGCAGTACATCTACGTATTAGTCATCGCTATTACCATGGTGATGCGGTTTTGGCAGTAC | 18 nt Homology |
| | | ACCAATGGGCGTGGATAGCGGTTTGACTCACGGGGATTTCCAAGTCTCCACCCCATTGACGTCAATGG | 1 |
| | | GAGTTTGTTTTGGCACCAAAATCAACGGGACTTTCCAAAATGTCGTAATAACCCCGCCCCGTTGACGCA | |
| | | AATGGGCGGTAGGCGTGTACGGTGGGAGGTCTATATAAGCAGAGCTCGTTTAGTGAACCGTCAGAAT | |
| | | TTTGTAATACGACTCACTATAGGGCGGCCGGGAATTCGCCACCATGGTGAGCAAGGGCGAGGAGCTG | |
| | | TTCACCGGGGTGGTGCCCATCCTGGTCGAGCTGGACGGCGACGTAAACGGCCACAAGTTCAGCGTGT | |
| | | CCGGCGAGGGCGAGGGCGATGCCACCTACGGCAAGCTGACCCTGAAGTTCATCTGCACCACCGGCAA | |
| | | GCTGCCCGTGCCCTGGCCCACCCTCG (SEQ ID NO: 19249) | |
| | (5-500 nt) | CTTTCCTACTTGGCAGTACATCTACGTATTAGTCATCGCTATTACCATGGTGATGCGGTTTTGGCAGTAC | 19 nt Homology |
| | | ACCAATGGGCGTGGATAGCGGTTTGACTCACGGGGATTTCCAAGTCTCCACCCCATTGACGTCAATGG | 1 |
| | | GAGTTTGTTTTGGCACCAAAATCAACGGGACTTTCCAAAATGTCGTAATAACCCCGCCCCGTTGACGCA | |
| | | AATGGGCGGTAGGCGTGTACGGTGGGAGGTCTATATAAGCAGAGCTCGTTTAGTGAACCGTCAGAAT | |
| | | TTTGTAATACGACTCACTATAGGGCGGCCGGGAATTCGCCACCATGGTGAGCAAGGGCGAGGAGCTG | |
| | | TTCACCGGGGTGGTGCCCATCCTGGTCGAGCTGGACGGCGACGTAAACGGCCACAAGTTCAGCGTGT | |
| | | CCGGCGAGGGCGAGGGCGATGCCACCTACGGCAAGCTGACCCTGAAGTTCATCTGCACCACCGGCAA | |
| | | GCTGCCCGTGCCCTGGCCCACCCTC (SEQ ID NO: 19250) | |
| | (5-500 nt) | ACTTTCCTACTTGGCAGTACATCTACGTATTAGTCATCGCTATTACCATGGTGATGCGGTTTTGGCAGT | 20 nt Homology |
| | | ACACCAATGGGCGTGGATAGCGGTTTGACTCACGGGGATTTCCAAGTCTCCACCCCATTGACGTCAAT | 1 |
| | | GGGAGTTTGTTTTGGCACCAAAATCAACGGGACTTTCCAAAATGTCGTAATAACCCCGCCCCGTTGAC | |
| | | GCAAATGGGCGGTAGGCGTGTACGGTGGGAGGTCTATATAAGCAGAGCTCGTTTAGTGAACCGTCAG | |
| | | AATTTTGTAATACGACTCACTATAGGGCGGCCGGGAATTCGCCACCATGGTGAGCAAGGGCGAGGAG | |
| | | CTGTTCACCGGGGTGGTGCCCATCCTGGTCGAGCTGGACGGCGACGTAAACGGCCACAAGTTCAGCG | |
| | | TGTCCGGCGAGGGCGAGGGCGATGCCACCTACGGCAAGCTGACCCTGAAGTTCATCTGCACCACCGG | |
| | | CAAGCTGCCCGTGCCCTGGCCCACCCT (SEQ ID NO: 19251) | |

### PBS Sequence

[0913] In some embodiments, a template nucleic acid (e.g., template RNA) comprises a PBS sequence. In some embodiments, a PBS sequence is disposed 3′ of the heterologous object sequence and is complementary to a sequence adjacent to a site to be modified by a system described herein, or comprises no more than 1, 2, 3, 4, or 5 mismatches to a sequence complementary to the sequence adjacent to a site to be modified by the system/gene modifying polypeptide. In some embodiments, the PBS sequence binds within 1, 2, 3, 4, 5, 6, 7, 8, 9, or 10 nucleotides of a nick site in the target nucleic acid molecule. In some embodiments, binding of the PBS sequence to the target nucleic acid molecule permits initiation of target-primed reverse transcription (TPRT), e.g., with the 3′ homology domain acting as a primer for TPRT. In some embodiments, the PBS sequence is 3-5, 5-10, 10-30, 10-25, 10-20, 10-19, 10-18, 10-17, 10-16, 10-15, 10-14, 10-13, 10-12, 10-11, 11-30, 11-25, 11-20, 11-19, 11-18, 11-17, 11-16, 11-15, 11-14, 11-13, 11-12, 12-30, 12-25, 12-20, 12-19, 12-18, 12-17, 12-16, 12-15, 12-14, 12-13, 13-30, 13-25, 13-20, 13-19, 13-18, 13-17, 13-16, 13-15, 13-14, 14-30, 14-25, 14-20, 14-19, 14-18, 14-17, 14-16, 14-15, 15-30, 15-25, 15-20, 15-19, 15-18, 15-17, 15-16, 16-30, 16-25, 16-20, 16-19, 16-18, 16-17, 17-30, 17-25, 17-20, 17-19, 17-18, 18-30, 18-25, 18-20, 18-19, 19-30, 19-25, 19-20, 20-30, 20-25, or 25-30 nucleotides in length, e.g., 10-17, 12-16, or 12-14 nucleotides in length. In some embodiments, the PBS sequence is 5-20, 8-16, 8-14, 8-13, 9-13, 9-12, or 10-12 nucleotides in length, e.g., 9-12 nucleotides in length.

[0914] The template nucleic acid (e.g., template RNA) may have some homology to the target DNA. In some embodiments, the template nucleic acid (e.g., template RNA) PBS sequence domain may serve as an annealing region to the target DNA, such that the target DNA is positioned to prime the reverse transcription of the template nucleic acid (e.g., template RNA). In some embodiments the template nucleic acid (e.g., template RNA) has at least 2, 3, 4, 5, 6, 7, 8, 9, 10, 11, 12, 13, 14, 15, 20, 25, 30, 35, 40, 45, 50, 60, 70, 80, 90, 100, 110, 120, 130, 140, 150, 175, 200 or more bases of exact homology to the target DNA at the 3′ end of the RNA. In some embodiments the template nucleic acid (e.g., template RNA) has at least 2, 3, 4, 5, 6, 7, 8, 9, 10, 11, 12, 13, 14, 15, 20, 25, 30, 35, 40, 45, 50, 60, 70, 80, 90, 100, 110, 120, 130, 140, 150, 175, 200 or more bases of at least 50%, 60%, 70%, 80%, 85%, 90%, 95%, 97%, 98%, 99% or 100% homology to the target DNA, e.g., at the 5′ end of the template nucleic acid (e.g., template RNA).

[0915] In some embodiments, a PBS sequence comprises a nucleic acid sequence as listed in Table 37, or a nucleic acid sequence having at least 70%, 75%, 80%, 85%, 90%, 95%, 97%, 98%, or 99% identity thereto. In some embodiments, a PBS sequence comprises a nucleic acid sequence as listed in Table 37, or a nucleic acid sequence having no more than 1, 2, 3, 4, or 5 nucleotide differences thereto. Herein, when an RNA sequence (e.g., in a PBS sequence) is said to comprise a particular sequence (e.g., a sequence of Table 37 or a portion thereof) that comprises thymine (T), it is of course understood that the RNA sequence may (and frequently does) comprise uracil (U) in place of T. For instance, the RNA sequence may comprise U at every position shown as T in the sequence in Table 37. More specifically, the present disclosure provides an RNA sequence according to every PBS sequence of Table 37, wherein the RNA sequence has a U in place of each T in the sequence in Table 37. In certain embodiments, the PBS has a length between 1-3, 3-5, 5-8, 8-10, 10-12, 12-15, 15-17, 17-20, 20-25, 25-30, or 30-40 nucleotides. In certain embodiments, the PBS has a length of about 1, 2, 3, 4, 5, 6, 7, 8, 9, 10, 11, 12, 13, 14, 15, 16, 17, 18, 19, 20, 21, 22, 23, 24, or 25 nucleotides.

TABLE 37
Exemplary PBS sequences.
The below sequences are
listed 5′ to 3′ direction.

| PBS length | Sequence (5′ to 3′) |
|---|---|
| 1 nt | G |
| 2 nt | GC |
| 3 nt | GCG |
| 4 nt | GCGT |
| 5 nt | GCGTG |
| 6 nt | GCGTGC |
| 7 nt | GCGTGCA |
| 8 nt | GCGTGCAG |
| 9 nt | GCGTGCAGT |
| 10 nt | GCGTGCAGTG (SEQ ID |
| | NO: 19252) |
| 11 nt | GCGTGCAGTGC (SEQ ID |
| | NO: 19253) |
| 12 nt | GCGTGCAGTGCT (SEQ |
| | ID NO: 19254) |
| 13 nt | GCGTGCAGTGCTT (SEQ |
| | ID NO: 19255) |
| 14 nt | GCGTGCAGTGCTTC |
| | (SEQ ID NO: 19256) |
| 15 nt | GCGTGCAGTGCTTCG |
| | (SEQ ID NO: 19257) |
| 16 nt | GCGTGCAGTGCTTCGG |
| | (SEQ ID NO: 19258) |
| 17 nt | GCGTGCAGTGCTTCGGC |
| | (SEQ ID NO: 19259) |

gRNAs with Inducible Activity

[0916] In some embodiments, a gRNA described herein (e.g., a gRNA that is part of a template RNA or a gRNA used for second strand nicking) has inducible activity. Inducible activity may be achieved by the template nucleic acid, e.g., template RNA, further comprising (in addition to the gRNA) a blocking domain, wherein the sequence of a portion of or all of the blocking domain is at least partially complementary to a portion or all of the gRNA. The blocking domain is thus capable of hybridizing or substantially hybridizing to a portion of or all of the gRNA. In some embodiments, the blocking domain and inducibly active gRNA are disposed on the template nucleic acid, e.g., template RNA, such that the gRNA can adopt a first conformation where the blocking domain is hybridized or substantially hybridized to the gRNA, and a second conformation where the blocking domain is not hybridized or not substantially hybridized to the gRNA. In some embodiments, in the first conformation the gRNA is unable to bind to the gene modifying polypeptide (e.g., the template nucleic acid binding domain, DNA binding domain, or endonuclease domain (e.g., a CRISPR/Cas protein)) or binds with substantially decreased affinity compared to an otherwise similar template RNA lacking the blocking domain. In some embodiments, in the second conformation the gRNA is able to bind to the gene modifying polypeptide (e.g., the template nucleic acid binding domain, DNA binding domain, or endonuclease domain (e.g., a CRISPR/Cas protein)). In some embodiments, whether the gRNA is in the first or second conformation can influence whether the DNA binding or endonuclease activities of the gene modifying polypeptide (e.g., of the CRISPR/Cas protein the gene modifying polypeptide comprises) are active.

[0917] In some embodiments, the gRNA that coordinates the second nick has inducible activity. In some embodiments, the gRNA that coordinates the second nick is induced after the template is reverse transcribed. In some embodiments, hybridization of the gRNA to the blocking domain can be disrupted using an opener molecule. In some embodiments, an opener molecule comprises an agent that binds to a portion or all of the gRNA or blocking domain and inhibits hybridization of the gRNA to the blocking domain. In some embodiments, the opener molecule comprises a nucleic acid, e.g., comprising a sequence that is partially or wholly complementary to the gRNA, blocking domain, or both. By choosing or designing an appropriate opener molecule, providing the opener molecule can promote a change in the conformation of the gRNA such that it can associate with a CRISPR/Cas protein and provide the associated functions of the CRISPR/Cas protein (e.g., DNA binding and/or endonuclease activity). Without wishing to be bound by theory, providing the opener molecule at a selected time and/or location may allow for spatial and temporal control of the activity of the gRNA, CRISPR/Cas protein, or gene modifying system comprising the same. In some embodiments, the opener molecule is exogenous to the cell comprising the gene modifying polypeptide and or template nucleic acid. In some embodiments, the opener molecule comprises an endogenous agent (e.g., endogenous to the cell comprising the gene modifying polypeptide and or template nucleic acid comprising the gRNA and blocking domain). For example, an inducible gRNA, blocking domain, and opener molecule may be chosen such that the opener molecule is an endogenous agent expressed in a target cell or tissue, e.g., thereby ensuring activity of a gene modifying system in the target cell or tissue. As a further example, an inducible gRNA, blocking domain, and opener molecule may be chosen such that the opener molecule is absent or not substantially expressed in one or more non-target cells or tissues, e.g., thereby ensuring that activity of a gene modifying system does not occur or substantially occur in the one or more non-target cells or tissues, or occurs at a reduced level compared to a target cell or tissue. Exemplary blocking domains, opener molecules, and uses thereof are described in PCT App. Publication WO2020044039A1, which is incorporated herein by reference in its entirety. In some embodiments, the template nucleic acid, e.g., template RNA, may comprise one or more sequences or structures for binding by one or more components of a gene modifying polypeptide, e.g., by a reverse transcriptase or RNA binding domain, and a gRNA. In some embodiments, the gRNA facilitates interaction with the template nucleic acid binding domain (e.g., RNA binding domain) of the gene modifying polypeptide. In some embodiments, the gRNA directs the gene modifying polypeptide to the matching target sequence, e.g., in a target cell genome.

### Additional Guide RNAs

[0918] In some embodiments, a gene modifying system as described herein comprises an additional guide RNA (gRNA), e.g., for unwinding or nicking of the target nucleic acid (e.g., nicking of the opposite strand of that recognized by a PBS sequence of the template RNA). In embodiments, a gene modifying system as described herein comprises 1, 2, 3, 4, or 5 additional distinct gRNAs. In certain embodiments, the additional guide RNA is a separate molecule from the template RNA. In other embodiments, the additional guide RNA is attached to or incorporated into the template RNA (e.g., at the 3′ end of the template RNA). In embodiments, the additional guide RNA is attached to the remainder of the template RNA by a linker region. In some embodiments, the additional guide RNA comprises a stem-loop sequence, e.g., as noted in Table 44.

[0919] In some embodiments, the additional gRNA comprises a gRNA spacer, e.g., attached to an end block sequence of the template RNA (e.g., as described herein). In some embodiments, the gRNA spacer is 18 nucleotides or longer (e.g., at least about 18, 19, 20, 21, 22, 23, 24, 25, 30, 35, or 40 nucleotides). In embodiments, the gRNA spacer directs nicking of the target nucleic acid by a Cas domain (e.g., a Cas9 domain, e.g., an nCas9 domain). In embodiments, the gRNA spacer directs unwinding of the target nucleic acid (e.g., by a Cas domain, e.g., a Cas9 domain, e.g., a dCas9 domain).

[0920] In some embodiments, the additional gRNA comprises a scaffold sequence as listed in Table 44, or a nucleic acid sequence having at least 75%, 80%, 85%, 90%, 95%, 96%, 97%, 98%, or 99% identity thereto. In some embodiments, the additional gRNA comprises a scaffold sequence as listed in Table 44, or a nucleic acid sequence having no more than 1, 2, 3, 4, 5, 6, 7, 8, 9, 10, 15, 20, 25, 30, 40, or 50 nucleotide differences therefrom.

[0921] Herein, when an RNA sequence (e.g., a gRNA sequence) is said to comprise a particular sequence (e.g., a sequence of Table 44 or a portion thereof) that comprises thymine (T), it is of course understood that the RNA sequence may (and frequently does) comprise uracil (U) in place of T. For instance, the RNA sequence may comprise U at every position shown as T in the sequence in Table 44. More specifically, the present disclosure provides an RNA sequence according to every gRNA sequence of Table 44, wherein the RNA sequence has a U in place of each T in the sequence in Table 44.

TABLE 44
Exemplary additional guide RNA (gRNA) sequences

| Cas9 | Exemplary spacer | |
|---|---|---|
| variant | sequence (5′ to 3′) | Scaffold Sequence (5′ to 3′) |
| Nme2Cas9 | | GTTGTAGCTCCCTTTCTCATTTCGGAAACGAAATGAGAACC |
| scaffold | | GTTGCTACAATAAGGCCGTCTGAAAAGATGTGCCGCAACG |
| | | CTCTGCCCCTTAAAGCTTCTGCTTTAAGGGGCATCGTTTA |
| | | (SEQ ID NO: 18667) |
| Nme2Cas9 | CAGTACATGACCTT | GTTGTAGCTCCCTTTCTCATTTCGGAAACGAAATGAGAACC |
| spacer + | ACGGGA (SEQ ID | GTTGCTACAATAAGGCCGTCTGAAAAGATGTGCCGCAACG |
| scaffold | NO: 19260) | CTCTGCCCCTTAAAGCTTCTGCTTTAAGGGGCATCGTTTA |
| | | (SEQ ID NO: 18667) |
| Nme2Cas9 | ACATGACCTTACGG | GTTGTAGCTCCCTTTCTCATTTCGGAAACGAAATGAGAACC |
| 16 nt | GA (SEQ ID NO: | GTTGCTACAATAAGGCCGTCTGAAAAGATGTGCCGCAACG |
| spacer + | 19261) | CTCTGCCCCTTAAAGCTTCTGCTTTAAGGGGCATCGTTTA |
| scaffold | | (SEQ ID NO: 18667) |
| BlatCas9 | | GCTATAGTTCCTTACTGAAAGGTAAGTTGCTATAGTAAGGG |
| scaffold | | CAACAGACCCGAGGCGTTGGGGATCGCCTAGCCCGTGTTT |
| | | ACGGGCTCTCCCCATATTCAAAATAATGACAGACGAGCACC |
| | | TTGGAGCATTTATCTCCGAGGTGCT (SEQ ID NO: 18670) |
| GeoCas9 | | GTCATAGTTCCCCTGAGAAATCAGGGTTACTATGATAAGGG |
| | | CTTTCTGCCTAAGGCAGACTGACCCGCGGCGTTGGGGATC |
| | | GCCTGTCGCCCGCTTTTGGCGGGCATTCCCCATCCTT (SEQ |
| | | ID NO: 18671) |
| PpnCas9 | | GTTGTAGCTCCCTTTTTCATTTCGCGAAAGCGAAATGAAAA |
| scaffold | | ACGTTGTTACAATAAGAGATGAATTTCTCGCAAAGCTCTGC |
| | | CTCTTGAAATTTCGGTTTCAAGAGGCATC (SEQ ID NO: |
| | | 18672) |
| CdiCas9 | | ACTGGGGTTCAGGAAACTGAACCTCAGTAAGCATTGGCTC |
| scaffold | | GTTTCCAATGTTGATTGCTCCGCCGGTGCTCCTTATTTTTAA |
| | | GGGCGCCGGC (SEQ ID NO: 18673) |
| SpyCas9+ | | GTTTTAGAGCTAGAAATAGCAAGTTAAAATAAGGCTAGTCC |
| hairpin | | GTTATCAACTTGAAAAAGTGGCACCGGGACTTCGGTC |
| scaffold | | CCGGTGC (SEQ ID NO: 18674) |
| St1Cas9 | | GTCTTTGTACTCTGGTACCAGAAGCTACAAAGATAAGGCTT |
| scaffold | | CATGCCGAAATCAACACCCTGTCATTTTATGGCAGGGTGTT |
| | | TT (SEQ ID NO: 18675) |
| cCas9-v16 | | GTCTTAGTACTCTGGAAACAGAATCTACTAAGACAAGGCAA |
| scaffold | | AATGCCGTGTTTATCTCGTCAACTTGTTGGCGAGA (SEQ ID |
| | | NO: 18676) |
| SpyCas9- | | GTTTAAGAGCTATGCTGGAAACAGCATAGCAAGTTTAAATA |
| 3var-NRRH | | AGGCTAGTCCGTTATCAACTTGAAAAAGTGGCACCGAGTC |
| scaffold | | GGTGC (SEQ ID NO: 18677) |
| SauCas9 | | GTTTTAGTACTCTGGAAACAGAATCTACTAAAACAAGGCAA |
| scaffold | | AATGCCGTGTTTATCTCGTCAACTTGTTGGCGAGA (SEQ ID |
| | | NO: 18678) |
| CjeCas9 | | GTTTTAGTCCCTGAAAAGGGACTAAAATAAAGAGTTTGCG |
| scaffold | | GGACTCTGCGGGGTTACAATCCCCTAAAACCGC (SEQ ID |
| | | NO: 18679) |
| SpyCas9 | | GTTTTAGAGCTAGAAATAGCAAGTTAAAATAAGGCTAGTCC |
| scaffold | | GTTATCAACTTGAAAAAGTGGCACCGAGTCGGTGC (SEQ ID |
| | | NO: 18630) |

### Circular RNAs and Ribozymes in Gene Modifying Systems

[0922] It is contemplated that it may be useful to employ circular and/or linear RNA states during the formulation, delivery, or gene modifying reaction within the target cell. Thus, in some embodiments of any of the aspects described herein, a gene modifying system comprises one or more circular RNAs (circRNAs). In some embodiments of any of the aspects described herein, a gene modifying system comprises one or more linear RNAs. In some embodiments, a nucleic acid as described herein (e.g., a template nucleic acid, a nucleic acid molecule encoding a gene modifying polypeptide, or both) is a circRNA. In some embodiments, a circular RNA molecule encodes the gene modifying polypeptide. In some embodiments, the circRNA molecule encoding the gene modifying polypeptide is delivered to a host cell. In some embodiments, a circular RNA molecule encodes a recombinase, e.g., as described herein. In some embodiments, the circRNA molecule encoding the recombinase is delivered to a host cell. In some embodiments, the circRNA molecule encoding the gene modifying polypeptide is linearized (e.g., in the host cell, e.g., in the nucleus of the host cell) prior to translation.

[0923] Circular RNAs (circRNAs) have been found to occur naturally in cells and have been found to have diverse functions, including both non-coding and protein coding roles in human cells. It has been shown that a circRNA can be engineered by incorporating a self-splicing intron into an RNA molecule (or DNA encoding the RNA molecule) that results in circularization of the RNA, and that an engineered circRNA can have enhanced protein production and stability (Wesselhoeft et al. Nature Communications 2018). In some embodiments, the gene modifying polypeptide is encoded as circRNA. In certain embodiments, the template nucleic acid is a DNA, such as a dsDNA or ssDNA. In certain embodiments, the circDNA comprises a template RNA.

[0924] In some embodiments, the circRNA comprises one or more ribozyme sequences. In some embodiments, the ribozyme sequence is activated for autocleavage, e.g., in a host cell, e.g., thereby resulting in linearization of the circRNA. In some embodiments, the ribozyme is activated when the concentration of magnesium reaches a sufficient level for cleavage, e.g., in a host cell. In some embodiments the circRNA is maintained in a low magnesium environment prior to delivery to the host cell. In some embodiments, the ribozyme is a protein-responsive ribozyme. In some embodiments, the ribozyme is a nucleic acid-responsive ribozyme. In some embodiments, the circRNA comprises a cleavage site. In some embodiments, the circRNA comprises a second cleavage site.

[0925] In some embodiments, the circRNA is linearized in the nucleus of a target cell. In some embodiments, linearization of a circRNA in the nucleus of a cell involves components present in the nucleus of the cell, e.g., to activate a cleavage event. In some embodiments, a ribozyme, e.g., a ribozyme from a B2 or ALU element, that is responsive to a nuclear element, e.g., a nuclear protein, e.g., a genome-interacting protein, e.g., an epigenetic modifier, e.g., EZH2, is incorporated into a circRNA, e.g., of a gene modifying system. In some embodiments, nuclear localization of the circRNA results in an increase in autocatalytic activity of the ribozyme and linearization of the circRNA.

[0926] In some embodiments, the ribozyme is heterologous to one or more of the other components of the gene modifying system. In some embodiments, an inducible ribozyme (e.g., in a circRNA as described herein) is created synthetically, for example, by utilizing a protein ligand-responsive aptamer design. A system for utilizing the satellite RNA of tobacco ringspot virus hammerhead ribozyme with an MS2 coat protein aptamer has been described (Kennedy et al. Nucleic Acids Res 42(19):12306-12321 (2014), incorporated herein by reference in its entirety) that results in activation of the ribozyme activity in the presence of the MS2 coat protein. In embodiments, such a system responds to protein ligand localized to the cytoplasm or the nucleus. In some embodiments the protein ligand is not MS2. Methods for generating RNA aptamers to target ligands have been described, for example, based on the systematic evolution of ligands by exponential enrichment (SELEX) (Tuerk and Gold, Science 249(4968):505-510 (1990); Ellington and Szostak, Nature 346(6287):818-822 (1990); the methods of each of which are incorporated herein by reference) and have, in some instances, been aided by in silico design (Bell et al. PNAS 117(15):8486-8493, the methods of which are incorporated herein by reference). Thus, in some embodiments, an aptamer for a target ligand is generated and incorporated into a synthetic ribozyme system, e.g., to trigger ribozyme-mediated cleavage and circRNA linearization, e.g., in the presence of the protein ligand. In some embodiments, circRNA linearization is triggered in the cytoplasm, e.g., using an aptamer that associates with a ligand in the cytoplasm. In some embodiments, circRNA linearization is triggered in the nucleus, e.g., using an aptamer that associates with a ligand in the nucleus. In embodiments, the ligand in the nucleus comprises an epigenetic modifier or a transcription factor. In some embodiments the ligand that triggers linearization is present at higher levels in on-target cells than off-target cells.

[0927] It is further contemplated that a nucleic acid-responsive ribozyme system can be employed for circRNA linearization. For example, biosensors that sense defined target nucleic acid molecules to trigger ribozyme activation are described, e.g., in Penchovsky (Biotechnology Advances 32(5):1015-1027 (2014), incorporated herein by reference). By these methods, a ribozyme naturally folds into an inactive state and is only activated in the presence of a defined target nucleic acid molecule (e.g., an RNA molecule). In some embodiments, a circRNA of a gene modifying system comprises a nucleic acid-responsive ribozyme that is activated in the presence of a defined target nucleic acid, e.g., an RNA, e.g., an mRNA, miRNA, guide RNA, gRNA, sgRNA, ncRNA, lncRNA, tRNA, snRNA, or mtRNA. In some embodiments the nucleic acid that triggers linearization is present at higher levels in on-target cells than off-target cells.

[0928] In some embodiments of any of the aspects herein, a gene modifying system incorporates one or more ribozymes with inducible specificity to a target tissue or target cell of interest, e.g., a ribozyme that is activated by a ligand or nucleic acid present at higher levels in a target tissue or target cell of interest. In some embodiments, the gene modifying system incorporates a ribozyme with inducible specificity to a subcellular compartment, e.g., the nucleus, nucleolus, cytoplasm, or mitochondria. In some embodiments, the ribozyme that is activated by a ligand or nucleic acid present at higher levels in the target subcellular compartment. In some embodiments, an RNA component of a gene modifying system is provided as circRNA, e.g., that is activated by linearization. In some embodiments, linearization of a circRNA encoding a gene modifying polypeptide activates the molecule for translation. In some embodiments, a signal that activates a circRNA component of a gene modifying system is present at higher levels in on-target cells or tissues, e.g., such that the system is specifically activated in these cells.

[0929] In some embodiments, an RNA component of a gene modifying system is provided as a circRNA that is inactivated by linearization. In some embodiments, a circRNA encoding the gene modifying polypeptide is inactivated by cleavage and degradation. In some embodiments, a circRNA encoding the gene modifying polypeptide is inactivated by cleavage that separates a translation signal from the coding sequence of the polypeptide. In some embodiments, a signal that inactivates a circRNA component of a gene modifying system is present at higher levels in off-target cells or tissues, such that the system is specifically inactivated in these cells.

### Target Nucleic Acid Site

[0930] In some embodiments, after gene modification, the target site surrounding the edited sequence contains a limited number of insertions or deletions, for example, in less than about 50% or 10% of editing events, e.g., as determined by long-read amplicon sequencing of the target site, e.g., as described in Karst et al. (2020) bioRxiv doi.org/10.1101/645903 (incorporated by reference herein in its entirety). In some embodiments, the target site does not show multiple consecutive editing events, e.g., head-to-tail or head-to-head duplications, e.g., as determined by long-read amplicon sequencing of the target site, e.g., as described in Karst et al. bioRxiv doi.org/10.1101/645903 (2020) (incorporated herein by reference in its entirety). In some embodiments, the target site contains an integrated sequence corresponding to the template RNA. In some embodiments, the target site does not contain insertions resulting from endogenous RNA in more than about 1% or 10% of events, e.g., as determined by long-read amplicon sequencing of the target site, e.g., as described in Karst et al. bioRxiv doi.org/10.1101/645903 (2020) (incorporated herein by reference in its entirety). In some embodiments, the target site contains the integrated sequence corresponding to the template RNA.

[0931] In certain aspects of the present invention, the host DNA-binding site integrated into by the gene modifying system can be in a gene, in an intron, in an exon, an ORF, outside of a coding region of any gene, in a regulatory region of a gene, or outside of a regulatory region of a gene. In other aspects, the polypeptide may bind to one or more than one host DNA sequence.

[0932] In some embodiments, a gene modifying system is used to edit a target locus in multiple alleles. In some embodiments, a gene modifying system is designed to edit a specific allele. For example, a gene modifying polypeptide may be directed to a specific sequence that is only present on one allele, e.g., comprises a template RNA with homology to a target allele, e.g., a gRNA or annealing domain, but not to a second cognate allele. In some embodiments, a gene modifying system can alter a haplotype-specific allele. In some embodiments, a gene modifying system that targets a specific allele preferentially targets that allele, e.g., has at least a 2, 4, 6, 8, or 10-fold preference for a target allele.

### Second Strand Nicking

[0933] In some embodiments, a gene modifying system described herein comprises a nickase activity (e.g., in the gene modifying polypeptide) that nicks the first strand, and a nickase activity (e.g., in a polypeptide separate from the gene modifying polypeptide) that nicks the second strand of target DNA. As discussed herein, without wishing to be bound by theory, nicking of the first strand of the target site DNA is thought to provide a 3′ OH that can be used by an RT domain to reverse transcribe a sequence of a template RNA, e.g., a heterologous object sequence. Without wishing to be bound by theory, it is thought that introducing an additional nick to the second strand may bias the cellular DNA repair machinery to adopt the heterologous object sequence-based sequence more frequently than the original genomic sequence. In some embodiments, the additional nick to the second strand is made by the same endonuclease domain (e.g., nickase domain) as the nick to the first strand. In some embodiments, the same gene modifying polypeptide performs both the nick to the first strand and the nick to the second strand. In some embodiments, the gene modifying polypeptide comprises a CRISPR/Cas domain and the additional nick to the second strand is directed by an additional nucleic acid, e.g., comprising a second gRNA directing the CRISPR/Cas domain to nick the second strand. In other embodiments, the additional second strand nick is made by a different endonuclease domain (e.g., nickase domain) than the nick to the first strand. In some embodiments, that different endonuclease domain is situated in an additional polypeptide (e.g., a system of the invention further comprises the additional polypeptide), separate from the gene modifying polypeptide. In some embodiments, the additional polypeptide comprises an endonuclease domain (e.g., nickase domain) described herein. In some embodiments, the additional polypeptide comprises a DNA binding domain, e.g., described herein.

[0934] It is contemplated herein that the position at which the second strand nick occurs relative to the first strand nick may influence the extent to which one or more of: desired gene modifying DNA modifications are obtained, undesired double-strand breaks (DSBs) occur, undesired insertions occur, or undesired deletions occur. Without wishing to be bound by theory, second strand nicking may occur in two general orientations: inward nicks and outward nicks.

[0935] In some embodiments, in the inward nick orientation, the RT domain polymerizes (e.g., using the template RNA (e.g., the heterologous object sequence)) away from the second strand nick. In some embodiments, in the inward nick orientation, the location of the nick to the first strand and the location of the nick to the second strand are positioned between the first PAM site and second PAM site (e.g., in a scenario wherein both nicks are made by a polypeptide (e.g., a gene modifying polypeptide) comprising a CRISPR/Cas domain). When there are two PAMs on the outside and two nicks on the inside, this inward nick orientation can also be referred to as “PAM-out”. In some embodiments, in the inward nick orientation, the location of the nick to the first strand and the location of the nick to the second strand are between the sites where the polypeptide and the additional polypeptide bind to the target DNA. In some embodiments, in the inward nick orientation, the location of the nick to the second strand is positioned between the binding sites of the polypeptide and additional polypeptide, and the nick to the first strand is also located between the binding sites of the polypeptide and additional polypeptide. In some embodiments, in the inward nick orientation, the location of the nick to the first strand and the location of the nick to the second strand are positioned between the PAM site and the binding site of the second polypeptide which is at a distance from the target site.

[0936] An example of a gene modifying system that provides an inward nick orientation comprises a gene modifying polypeptide comprising a CRISPR/Cas domain, a template RNA comprising a gRNA that directs nicking of the target site DNA on the first strand, and an additional nucleic acid comprising an additional gRNA that directs nicking at a site a distance from the location of the first nick, wherein the location of the first nick and the location of the second nick are between the PAM sites of the sites to which the two gRNAs direct the gene modifying polypeptide. As a further example, another gene modifying system that provides an inward nick orientation comprises a gene modifying polypeptide comprising a zinc finger molecule and a first nickase domain wherein the zinc finger molecule binds to the target DNA in a manner that directs the first nickase domain to nick the first strand of the target site; an additional polypeptide comprising a CRISPR/Cas domain, and an additional nucleic acid comprising a gRNA that directs the additional polypeptide to nick a site a distance from the target site DNA on the second strand, wherein the location of the first nick and the location of the second nick are between the PAM site and the site to which the zinc finger molecule binds. As a further example, another gene modifying system that provides an inward nick orientation comprises a gene modifying polypeptide comprising a zinc finger molecule and a first nickase domain wherein the zinc finger molecule binds to the target DNA in a manner that directs the first nickase domain to nick the first strand of the target site; an additional polypeptide comprising a TAL effector molecule and a second nickase domain wherein the TAL effector molecule binds to a site a distance from the target site in a manner that directs the additional polypeptide to nick the second strand, wherein the location of the first nick and the location of the second nick are between the site to which the TAL effector molecule binds and the site to which the zinc finger molecule binds.

[0937] In some embodiments, in the outward nick orientation, the RT domain polymerizes (e.g., using the template RNA (e.g., the heterologous object sequence)) toward the second strand nick. In some embodiments, in the outward nick orientation when both the first and second nicks are made by a polypeptide comprising a CRISPR/Cas domain (e.g., a gene modifying polypeptide), the first PAM site and second PAM site are positioned between the location of the nick to the first strand and the location of the nick to the second strand. When there are two PAMs on the inside and two nicks on the outside, this outward nick orientation also can be referred to as “PAM-in”. In some embodiments, in the outward nick orientation, the polypeptide (e.g., the gene modifying polypeptide) and the additional polypeptide bind to sites on the target DNA between the location of the nick to the first strand and the location of the nick to the second. In some embodiments, in the outward nick orientation, the location of the nick to the second strand is positioned on the opposite side of the binding sites of the polypeptide and additional polypeptide relative to the location of the nick to the first strand. In some embodiments, in the outward orientation, the PAM site and the binding site of the second polypeptide which is at a distance from the target site are positioned between the location of the nick to the first strand and the location of the nick to the second strand.

[0938] An example of a gene modifying system that provides an outward nick orientation comprises a gene modifying polypeptide comprising a CRISPR/Cas domain, a template RNA comprising a gRNA that directs nicking of the target site DNA on the first strand, and an additional nucleic acid comprising an additional gRNA that directs nicking at a site a distance from the location of the first nick, wherein the location of the first nick and the location of the second nick are outside of the PAM sites of the sites to which the two gRNAs direct the gene modifying polypeptide (i.e., the PAM sites are between the location of the first nick and the location of the second nick). As a further example, another gene modifying system that provides an outward nick orientation comprises a gene modifying polypeptide comprising a zinc finger molecule and a first nickase domain wherein the zinc finger molecule binds to the target DNA in a manner that directs the first nickase domain to nick the first strand of the target site; an additional polypeptide comprising a CRISPR/Cas domain, and an additional nucleic acid comprising a gRNA that directs the additional polypeptide to nick a site a distance from the target site DNA on the second strand, wherein the location of the first nick and the location of the second nick are outside the PAM site and the site to which the zinc finger molecule binds (i.e., the PAM site and the site to which the zinc finger molecule binds are between the location of the first nick and the location of the second nick). As a further example, another gene modifying system that provides an outward nick orientation comprises a gene modifying polypeptide comprising a zinc finger molecule and a first nickase domain wherein the zinc finger molecule binds to the target DNA in a manner that directs the first nickase domain to nick the first strand of the target site; an additional polypeptide comprising a TAL effector molecule and a second nickase domain wherein the TAL effector molecule binds to a site a distance from the target site in a manner that directs the additional polypeptide to nick the second strand, wherein the location of the first nick and the location of the second nick are outside the site to which the TAL effector molecule binds and the site to which the zinc finger molecule binds (i.e., the site to which the TAL effector molecule binds and the site to which the zinc finger molecule binds are between the location of the first nick and the location of the second nick).

[0939] Without wishing to be bound by theory, it is thought that, for gene modifying systems where a second strand nick is provided, an outward nick orientation is preferred in some embodiments. As is described herein, an inward nick may produce a higher number of double-strand breaks (DSBs) than an outward nick orientation. DSBs may be recognized by the DSB repair pathways in the nucleus of a cell, which can result in undesired insertions and deletions. An outward nick orientation may provide a decreased risk of DSB formation, and a corresponding lower amount of undesired insertions and deletions. In some embodiments, undesired insertions and deletions are insertions and deletions not encoded by the heterologous object sequence, e.g., an insertion or deletion produced by the double-strand break repair pathway unrelated to the modification encoded by the heterologous object sequence. In some embodiments, a desired gene modification comprises a change to the target DNA (e.g., a substitution, insertion, or deletion) encoded by the heterologous object sequence (e.g., and achieved by the gene modifying writing the heterologous object sequence into the target site). In some embodiments, the first strand nick and the second strand nick are in an outward orientation.

[0940] In addition, the distance between the first strand nick and second strand nick may influence the extent to which one or more of: desired gene modifying system DNA modifications are obtained, undesired double-strand breaks (DSBs) occur, undesired insertions occur, or undesired deletions occur. Without wishing to be bound by theory, it is thought the second strand nick benefit, the biasing of DNA repair toward incorporation of the heterologous object sequence into the target DNA, increases as the distance between the first strand nick and second strand nick decreases. However, it is thought that the risk of DSB formation also increases as the distance between the first strand nick and second strand nick decreases. Correspondingly, it is thought that the number of undesired insertions and/or deletions may increase as the distance between the first strand nick and second strand nick decreases. In some embodiments, the distance between the first strand nick and second strand nick is chosen to balance the benefit of biasing DNA repair toward incorporation of the heterologous object sequence into the target DNA and the risk of DSB formation and of undesired deletions and/or insertions. In some embodiments, a system where the first strand nick and the second strand nick are at least a threshold distance apart has an increased level of desired gene modifying system modification outcomes, a decreased level of undesired deletions, and/or a decreased level of undesired insertions relative to an otherwise similar inward nick orientation system where the first nick and the second nick are less than the a threshold distance apart. In some embodiments the threshold distance(s) is given below.

[0941] In some embodiments, the first nick and the second nick are at least 20, 25, 30, 35, 40, 45, 50, 55, 60, 65, 70, 75, 80, 85, 90, 95, 100, 110, 120, 130, 140, 150, 160, 170, 180, 190, or 200 nucleotides apart. In some embodiments, the first nick and the second nick are no more than 25, 30, 35, 40, 45, 50, 55, 60, 65, 70, 75, 80, 85, 90, 95, 100, 110, 120, 130, 140, 150, 160, 170, 180, 190, 200, or 250 nucleotides apart. In some embodiments, the first nick and the second nick are 20-200, 30-200, 40-200, 50-200, 60-200, 70-200, 80-200, 90-200, 100-200, 110-200, 120-200, 130-200, 140-200, 150-200, 160-200, 170-200, 180-200, 190-200, 20-190, 30-190, 40-190, 50-190, 60-190, 70-190, 80-190, 90-190, 100-190, 110-190, 120-190, 130-190, 140-190, 150-190, 160-190, 170-190, 180-190, 20-180, 30-180, 40-180, 50-180, 60-180, 70-180, 80-180, 90-180, 100-180, 110-180, 120-180, 130-180, 140-180, 150-180, 160-180, 170-180, 20-170, 30-170, 40-170, 50-170, 60-170, 70-170, 80-170, 90-170, 100-170, 110-170, 120-170, 130-170, 140-170, 150-170, 160-170, 20-160, 30-160, 40-160, 50-160, 60-160, 70-160, 80-160, 90-160, 100-160, 110-160, 120-160, 130-160, 140-160, 150-160, 20-150, 30-150, 40-150, 50-150, 60-150, 70-150, 80-150, 90-150, 100-150, 110-150, 120-150, 130-150, 140-150, 20-140, 30-140, 40-140, 50-140, 60-140, 70-140, 80-140, 90-140, 100-140, 110-140, 120-140, 130-140, 20-130, 30-130, 40-130, 50-130, 60-130, 70-130, 80-130, 90-130, 100-130, 110-130, 120-130, 20-120, 30-120, 40-120, 50-120, 60-120, 70-120, 80-120, 90-120, 100-120, 110-120, 20-110, 30-110, 40-110, 50-110, 60-110, 70-110, 80-110, 90-110, 100-110, 20-100, 30-100, 40-100, 50-100, 60-100, 70-100, 80-100, 90-100, 20-90, 30-90, 40-90, 50-90, 60-90, 70-90, 80-90, 20-80, 30-80, 40-80, 50-80, 60-80, 70-80, 20-70, 30-70, 40-70, 50-70, 60-70, 20-60, 30-60, 40-60, 50-60, 20-50, 30-50, 40-50, 20-40, 30-40, or 20-30 nucleotides apart. In some embodiments, the first nick and the second nick are 40-100 nucleotides apart.

[0942] Without wishing to be bound by theory, it is thought that, for gene modifying systems where a second strand nick is provided and an inward nick orientation is selected, increasing the distance between the first strand nick and second strand nick may be preferred. As is described herein, an inward nick orientation may produce a higher number of DSBs than an outward nick orientation, and may result in a higher amount of undesired insertions and deletions than an outward nick orientation, but increasing the distance between the nicks may mitigate that increase in DSBs, undesired deletions, and/or undesired insertions. In some embodiments, an inward nick orientation wherein the first nick and the second nick are at least a threshold distance apart has an increased level of desired gene modifying system modification outcomes, a decreased level of undesired deletions, and/or a decreased level of undesired insertions relative to an otherwise similar inward nick orientation system where the first nick and the second nick are less than the a threshold distance apart. In some embodiments the threshold distance is given below.

[0943] In some embodiments, the first strand nick and the second strand nick are in an inward orientation. In some embodiments, the first strand nick and the second strand nick are in an inward orientation and the first strand nick and second strand nick are at least 100, 110, 120, 130, 140, 150, 160, 170, 180, 190, 200, 220, 240, 260, 280, 300, 350, 400, 450, or 500 nucleotides apart, e.g., at least 100 nucleotides apart, (and optionally no more than 500, 400, 300, 200, 190, 180, 170, 160, 150, 140, 130, or 120 nucleotides apart). In some embodiments, the first strand nick and the second strand nick are in an inward orientation and the first strand nick and second strand nick are 100-200, 110-200, 120-200, 130-200, 140-200, 150-200, 160-200, 170-200, 180-200, 190-200, 100-190, 110-190, 120-190, 130-190, 140-190, 150-190, 160-190, 170-190, 180-190, 100-180, 110-180, 120-180, 130-180, 140-180, 150-180, 160-180, 170-180, 100-170, 110-170, 120-170, 130-170, 140-170, 150-170, 160-170, 100-160, 110-160, 120-160, 130-160, 140-160, 150-160, 100-150, 110-150, 120-150, 130-150, 140-150, 100-140, 110-140, 120-140, 130-140, 100-130, 110-130, 120-130, 100-120, 110-120, or 100-110 nucleotides apart.

### Chemically Modified Nucleic Acids and Nucleic Acid End Features

[0944] A nucleic acid described herein (e.g., a template nucleic acid, e.g., a template RNA; or a nucleic acid (e.g., mRNA) encoding a gene modifying polypeptide; or a gRNA) can comprise unmodified or modified nucleobases. Naturally occurring RNAs are synthesized from four basic ribonucleotides: ATP, CTP, UTP and GTP, but may contain post-transcriptionally modified nucleotides. Further, approximately one hundred different nucleoside modifications have been identified in RNA (Rozenski, J, Crain, P, and McCloskey, J. (1999). The RNA Modification Database: 1999 update. Nucl Acids Res 27: 196-197). An RNA can also comprise wholly synthetic nucleotides that do not occur in nature.

[0945] In some embodiments, the chemical modification is one provided in WO/2016/183482, US Pat. Pub. No. 20090286852, of International Application No. WO/2012/019168, WO/2012/045075, WO/2012/135805, WO/2012/158736, WO/2013/039857, WO/2013/039861, WO/2013/052523, WO/2013/090648, WO/2013/096709, WO/2013/101690, WO/2013/106496, WO/2013/130161, WO/2013/151669, WO/2013/151736, WO/2013/151672, WO/2013/151664, WO/2013/151665, WO/2013/151668, WO/2013/151671, WO/2013/151667, WO/2013/151670, WO/2013/151666, WO/2013/151663, WO/2014/028429, WO/2014/081507, WO/2014/093924, WO/2014/093574, WO/2014/113089, WO/2014/144711, WO/2014/144767, WO/2014/144039, WO/2014/152540, WO/2014/152030, WO/2014/152031, WO/2014/152027, WO/2014/152211, WO/2014/158795, WO/2014/159813, WO/2014/164253, WO/2015/006747, WO/2015/034928, WO/2015/034925, WO/2015/038892, WO/2015/048744, WO/2015/051214, WO/2015/051173, WO/2015/051169, WO/2015/058069, WO/2015/085318, WO/2015/089511, WO/2015/105926, WO/2015/164674, WO/2015/196130, WO/2015/196128, WO/2015/196118, WO/2016/011226, WO/2016/011222, WO/2016/011306, WO/2016/014846, WO/2016/022914, WO/2016/036902, WO/2016/077125, or WO/2016/077123, each of which is herein incorporated by reference in its entirety. It is understood that incorporation of a chemically modified nucleotide into a polynucleotide can result in the modification being incorporated into a nucleobase, the backbone, or both, depending on the location of the modification in the nucleotide. In some embodiments, the backbone modification is one provided in EP 2813570, which is herein incorporated by reference in its entirety. In some embodiments, the modified cap is one provided in US Pat. Pub. No. 20050287539, which is herein incorporated by reference in its entirety.

[0946] In some embodiments, the chemically modified nucleic acid (e.g., RNA, e.g., mRNA) comprises one or more of ARCA: anti-reverse cap analog (m27.3′-OGP3G), GP3G (Unmethylated Cap Analog), m7GP3G (Monomethylated Cap Analog), m32.2.7GP3G (Trimethylated Cap Analog), m5CTP (5′-methyl-cytidine triphosphate), m6ATP (N6-methyl-adenosine-5′-triphosphate), s2UTP (2-thio-uridine triphosphate), and Ψ (pseudouridine triphosphate).

[0947] In some embodiments, the chemically modified nucleic acid comprises a 5′ cap, e.g.: a 7-methylguanosine cap (e.g., a O-Me-m7G cap); a hypermethylated cap analog; an NAD+-derived cap analog (e.g., as described in Kiledjian, Trends in Cell Biology 28, 454-464 (2018)); or a modified, e.g., biotinylated, cap analog (e.g., as described in Bednarek et al., Phil Trans R Soc B 373, 20180167 (2018)).

[0948] In some embodiments, the chemically modified nucleic acid comprises a 3′ feature selected from one or more of: a polyA tail; a 16-nucleotide long stem-loop structure flanked by unpaired 5 nucleotides (e.g., as described by Mannironi et al., Nucleic Acid Research 17, 9113-9126 (1989)); a triple-helical structure (e.g., as described by Brown et al., PNAS 109, 19202-19207 (2012)); a tRNA, Y RNA, or vault RNA structure (e.g., as described by Labno et al., Biochemica et Biophysica Acta 1863, 3125-3147 (2016)); incorporation of one or more deoxyribonucleotide triphosphates (dNTPs), 2′O-Methylated NTPs, or phosphorothioate-NTPs; a single nucleotide chemical modification (e.g., oxidation of the 3′ terminal ribose to a reactive aldehyde followed by conjugation of the aldehyde-reactive modified nucleotide); or chemical ligation to another nucleic acid molecule.

[0949] In some embodiments, the nucleic acid (e.g., template nucleic acid) comprises one or more modified nucleotides, e.g., selected from dihydrouridine, inosine, 7-methylguanosine, 5-methylcytidine (5 mC), 5′ Phosphate ribothymidine, 2′-O-methyl ribothymidine, 2′-O-ethyl ribothymidine, 2′-fluoro ribothymidine, C-5 propynyl-deoxycytidine (pdC), C-5 propynyl-deoxyuridine (pdU), C-5 propynyl-cytidine (pC), C-5 propynyl-uridine (pU), 5-methyl cytidine, 5-methyl uridine, 5-methyl deoxycytidine, 5-methyl deoxyuridine methoxy, 2,6-diaminopurine, 5′-Dimethoxytrityl-N4-ethyl-2′-deoxycytidine, C-5 propynyl-f-cytidine (pfC), C-5 propynyl-f-uridine (pfU), 5-methyl f-cytidine, 5-methyl f-uridine, C-5 propynyl-m-cytidine (pmC), C-5 propynyl-f-uridine (pmU), 5-methyl m-cytidine, 5-methyl m-uridine, LNA (locked nucleic acid), MGB (minor groove binder) pseudouridine (Ψ), 1-N-methylpseudouridine (1-Me-Ψ), or 5-methoxyuridine (5-MO-U).

[0950] In some embodiments, the nucleic acid comprises a backbone modification, e.g., a modification to a sugar or phosphate group in the backbone. In some embodiments, the nucleic acid comprises a nucleobase modification.

[0951] In some embodiments, the nucleic acid comprises one or more chemically modified nucleotides of Table 13, one or more chemical backbone modifications of Table 14, one or more chemically modified caps of Table 15. For instance, in some embodiments, the nucleic acid comprises two or more (e.g., 3, 4, 5, 6, 7, 8, 9, or 10 or more) different types of chemical modifications. As an example, the nucleic acid may comprise two or more (e.g., 3, 4, 5, 6, 7, 8, 9, or 10 or more) different types of modified nucleobases, e.g., as described herein, e.g., in Table 13. Alternatively or in combination, the nucleic acid may comprise two or more (e.g., 3, 4, 5, 6, 7, 8, 9, or 10 or more) different types of backbone modifications, e.g., as described herein, e.g., in Table 14. Alternatively or in combination, the nucleic acid may comprise one or more modified cap, e.g., as described herein, e.g., in Table 15. For instance, in some embodiments, the nucleic acid comprises one or more type of modified nucleobase and one or more type of backbone modification; one or more type of modified nucleobase and one or more modified cap; one or more type of modified cap and one or more type of backbone modification; or one or more type of modified nucleobase, one or more type of backbone modification, and one or more type of modified cap.

[0952] In some embodiments, the nucleic acid comprises one or more (e.g., 2, 3, 4, 5, 6, 7, 8, 9, 10, 20, 30, 40, 50, 60, 70, 80, 90, 100, 150, 200, 250, 300, 350, 400, 450, 500, 600, 700, 800, 900, 1000, or more) modified nucleobases. In some embodiments, all nucleobases of the nucleic acid are modified. In some embodiments, the nucleic acid is modified at one or more (e.g., 2, 3, 4, 5, 6, 7, 8, 9, 10, 20, 30, 40, 50, 60, 70, 80, 90, 100, 150, 200, 250, 300, 350, 400, 450, 500, 600, 700, 800, 900, 1000, or more) positions in the backbone. In some embodiments, all backbone positions of the nucleic acid are modified.

TABLE 13
Modified nucleotides

| | |
|---|---|
| 5-aza-uridine | N2-methyl-6-thio-guanosine |
| 2-thio-5-aza-midine | N2,N2-dimethyl-6-thio-guanosine |
| 2-thiouridine | pyridin-4-one ribonucleoside |
| 4-thio-pseudouridine | 2-thio-5-aza-uridine |
| 2-thio-pseudouridine | 2-thiomidine |
| 5-hydroxyuridine | 4-thio-pseudomidine |
| 3-methyluridine | 2-thio-pseudowidine |
| 5-carboxymethyl-uridine | 3-methylmidine |
| 1-carboxymethyl-pseudouridine | 1-propynyl-pseudomidine |
| 5-propynyl-uridine | 1-methyl-1-deaza-pseudomidine |
| 1-propynyl-pseudouridine | 2-thio-1-methyl-1-deaza-pseudouridine |
| 5-taurinomethyluridine | 4-methoxy-pseudomidine |
| 1-taurinomethyl-pseudouridine | 5′-O-(1-Thiophosphate)-Adenosine |
| 5-taurinomethyl-2-thio-uridine | 5′-O-(1-Thiophosphate)-Cytidine |
| 1-taurinomethyl-4-thio-uridine | 5′-O-(1-thiophosphate)-Guanosine |
| 5-methyl-uridine | 5′-O-(1-Thiophophate)-Uridine |
| 1-methyl-pseudouridine | 5′-O-(1-Thiophosphate)-Pseudouridine |
| 4-thio-1-methyl-pseudouridine | 2′-O-methyl-Adenosine |
| 2-thio-1-methyl-pseudouridine | 2′-O-methyl-Cytidine |
| 1-methyl-1-deaza-pseudouridine | 2′-O-methyl-Guanosine |
| 2-thio-1-methyl-1-deaza-pseudomidine | 2′-O-methyl-Uridine |
| dihydrouridine | 2′-O-methyl-Pseudouridine |
| dihydropseudouridine | 2′-O-methyl-Inosine |
| 2-thio-dihydromidine | 2-methyladenosine |
| 2-thio-dihydropseudouridine | 2-methylthio-N6-methyladenosine |
| 2-methoxyuridine | 2-methylthio-N6 isopentenyladenosine |
| 2-methoxy-4-thio-uridine | 2-methylthio-N6-(cis- |
| 4-methoxy-pseudouridine | hydroxyisopentenyl)adenosine |
| 4-methoxy-2-thio-pseudouridine | N6-methyl-N6-threonylcarbamoyladenosine |
| 5-aza-cytidine | N6-hydroxynorvalylcarbamoyladenosine |
| pseudoisocytidine | 2-methylthio-N6-hydroxynorvalyl |
| 3-methyl-cytidine | carbamoyladenosine |
| N4-acetylcytidine | 2′-O-ribosyladenosine (phosphate) |
| 5-formylcytidine | 1,2′-O-dimethylinosine |
| N4-methylcytidine | 5,2′-O-dimethylcytidine |
| 5-hydroxymethylcytidine | N4-acetyl-2′-O-methylcytidine |
| 1-methyl-pseudoisocytidine | Lysidine |
| pyrrolo-cytidine | 7-methylguanosine |
| pyrrolo-pseudoisocytidine | N2,2′-O-dimethylguanosine |
| 2-thio-cytidine | N2,N2,2′-O-trimethylguanosine |
| 2-thio-5-methyl-cytidine | 2′-O-ribosylguanosine (phosphate) |
| 4-thio-pseudoisocytidine | Wybutosine |
| 4-thio-1-methyl-pseudoisocytidine | Peroxywybutosine |
| 4-thio-1-methyl-1-deaza-pseudoisocytidine | Hydroxywybutosine |
| 1-methyl-1-deaza-pseudoisocytidine | undermodified hydroxywybutosine |
| zebularine | methylwyosine |
| 5-aza-zebularine | queuosine |
| 5-methyl-zebularine | epoxyqueuosine |
| 5-aza-2-thio-zebularine | galactosyl-queuosine |
| 2-thio-zebularine | mannosyl-queuosine |
| 2-methoxy-cytidine | 7-cyano-7-deazaguanosine |
| 2-methoxy-5-methyl-cytidine | 7-aminomethyl-7-deazaguanosine |
| 4-methoxy-pseudoisocytidine | archaeosine |
| 4-methoxy-1-methyl-pseudoisocytidine | 5,2′-O-dimethyluridine |
| 2-aminopurine | 4-thiouridine |
| 2,6-diaminopurine | 5-methyl-2-thiouridine |
| 7-deaza-adenine | 2-thio-2′-O-methyluridine |
| 7-deaza-8-aza-adenine | 3-(3-amino-3-carboxypropyl)uridine |
| 7-deaza-2-aminopurine | 5-methoxyuridine |
| 7-deaza-8-aza-2-aminopurine | uridine 5-oxyacetic acid |
| 7-deaza-2,6-diaminopurine | uridine 5-oxyacetic acid methyl ester |
| 7-deaza-8-aza-2,6-diarninopurine | 5-(carboxyhydroxymethyl)uridine) |
| 1-methyladenosine | 5-(carboxyhydroxymethyl)uridine methyl ester |
| N6-isopentenyladenosine | 5-methoxycarbonylmethyluridine |
| N6-(cis-hydroxyisopentenyl)adenosine | 5-methoxycarbonylmethyl-2′-O-methyluridine |
| 2-methylthio-N6-(cis-hydroxyisopentenyl) | 5-methoxycarbonylmethyl-2-thiouridine |
| adenosine | 5-aminomethyl-2-thiouridine |
| N6-glycinylcarbamoyladenosine | 5-methylaminomethyluridine |
| N6-threonylcarbamoyladenosine | 5-methylaminomethyl-2-thiouridine |
| 2-methylthio-N6-threonyl carbamoyladenosine | 5-methylaminomethyl-2-selenouridine |
| N6,N6-dimethyladenosine | 5-carbamoylmethyluridine |
| 7-methyladenine | 5-carbamoylmethyl-2′-O-methyluridine |
| 2-methylthio-adenine | 5-carboxymethylaminomethyluridine |
| 2-methoxy-adenine | 5-carboxymethylaminomethyl-2′-O-methyluridine |
| inosine | 5-carboxymethylaminomethyl-2-thiouridine |
| 1-methyl-inosine | N4,2′-O-dimethylcytidine |
| wyosine | 5-carboxymethyluridine |
| wybutosine | N6,2′-O-dimethyladenosine |
| 7-deaza-guanosine | N,N6,O-2′-trimethyladenosine |
| 7-deaza-8-aza-guanosine | N2,7-dimethylguanosine |
| 6-thio-guanosine | N2,N2,7-trimethylguanosine |
| 6-thio-7-deaza-guanosine | 3,2′-O-dimethyluridine |
| 6-thio-7-deaza-8-aza-guanosine | 5-methyldihydrouridine |
| 7-methyl-guanosine | 5-formyl-2′-O-methylcytidine |
| 6-thio-7-methyl-guanosine | 1,2′-O-dimethylguanosine |
| 7-methylinosine | 4-demethylwyosine |
| 6-methoxy-guanosine | Isowyosine |
| 1-methylguanosine | N6-acetyladenosine |
| N2-methylguanosine | |
| N2,N2-dimethylguanosine | |
| 8-oxo-guanosine | |
| 7-methyl-8-oxo-guanosine | |
| 1-methyl-6-thio-guanosine | |

TABLE 14
Backbone modifications

2′-O-Methyl backbone
Peptide Nucleic Acid (PNA) backbone
phosphorothioate backbone
morpholino backbone
carbamate backbone
siloxane backbone
sulfide backbone
sulfoxide backbone
sulfone backbone
formacetyl backbone
thioformacetyl backbone
methyleneformacetyl backbone
riboacetyl backbone
alkene containing backbone
sulfamate backbone
sulfonate backbone
sulfonamide backbone
methyleneimino backbone
methylenehydrazino backbone
amide backbone

TABLE 15
Modified caps

m7GpppA
m7GpppC
m2,7GpppG
m2,2,7GpppG
m7Gpppm7G
m7,2′OmeGpppG
m72′dGpppG
m7,3′OmeGpppG
m7,3′dGpppG
GppppG
m7GppppG
m7GppppA
m7GppppC
m2,7GppppG
m2,2,7GppppG
m7Gppppm7G
m7,2′OmeGppppG
m72′dGppppG
m7,3′OmeGppppG
m7,3′dGppppG

[0953] The nucleotides comprising the template of the gene modifying system can be natural or modified bases, or a combination thereof. For example, the template may contain pseudouridine, dihydrouridine, inosine, 7-methylguanosine, or other modified bases. In some embodiments, the template may contain locked nucleic acid nucleotides. In some embodiments, the modified bases used in the template do not inhibit the reverse transcription of the template. In some embodiments, the modified bases used in the template may improve reverse transcription, e.g., specificity or fidelity.

[0954] In some embodiments, an RNA component of the system (e.g., a template RNA or a gRNA) comprises one or more nucleotide modifications. In some embodiments, the modification pattern of a gRNA can significantly affect in vivo activity compared to unmodified or end-modified guides (e.g., as shown in FIG. 1D from Finn et al. Cell Rep 22(9):2227-2235 (2018); incorporated herein by reference in its entirety). Without wishing to be bound by theory, this process may be due, at least in part, to a stabilization of the RNA conferred by the modifications. Non-limiting examples of such modifications may include 2′-O-methyl (2-O-Me), 2′-O-(2-methoxyethyl) (2′-O-MOE), 2′-fluoro (2′-F), phosphorothioate (PS) bond between nucleotides, G-C substitutions, and inverted abasic linkages between nucleotides and equivalents thereof.

[0955] In some embodiments, the template RNA (e.g., at the portion thereof that binds a target site) or the guide RNA comprises a 5′ terminus region. In some embodiments, the template RNA or the guide RNA does not comprise a 5′ terminus region. In some embodiments, the 5′ terminus region comprises a gRNA spacer region, e.g., as described with respect to sgRNA in Briner A E et al, Molecular Cell 56: 333-339 (2014) (incorporated herein by reference in its entirety; applicable herein, e.g., to all guide RNAs). In some embodiments, the 5′ terminus region comprises a 5′ end modification. In some embodiments, a 5′ terminus region with or without a spacer region may be associated with a crRNA, trRNA, sgRNA and/or dgRNA. The gRNA spacer region can, in some instances, comprise a guide region, guide domain, or targeting domain.

[0956] In some embodiments, the template RNAs (e.g., at the portion thereof that binds a target site) or guide RNAs described herein comprises any of the sequences shown in Table 4 of WO2018107028A1, incorporated herein by reference in its entirety. In some embodiments, where a sequence shows a guide and/or spacer region, the composition may comprise this region or not. In some embodiments, a guide RNA comprises one or more of the modifications of any of the sequences shown in Table 4 of WO2018107028A1, e.g., as identified therein by a SEQ ID NO. In embodiments, the nucleotides may be the same or different, and/or the modification pattern shown may be the same or similar to a modification pattern of a guide sequence as shown in Table 4 of WO2018107028A1. In some embodiments, a modification pattern includes the relative position and identity of modifications of the gRNA or a region of the gRNA (e.g. 5′ terminus region, lower stem region, bulge region, upper stem region, nexus region, hairpin 1 region, hairpin 2 region, 3′ terminus region). In some embodiments, the modification pattern contains at least 50%, 55%, 60%, 70%, 75%, 80%, 85%, 90%, 95%, 96%, 97%, 98%, 99%, or 100% of the modifications of any one of the sequences shown in the sequence column of Table 4 of WO2018107028A1, and/or over one or more regions of the sequence. In some embodiments, the modification pattern is at least 50%, 55%, 60%, 70%, 75%, 80%, 85%, 90%, 95%, 96%, 97%, 98%, 99%, or 100% identical to the modification pattern of any one of the sequences shown in the sequence column of Table 4 of WO2018107028A1. In some embodiments, the modification pattern is at least 50%, 55%, 60%, 70%, 75%, 80%, 85%, 90%, 95%, 96%, 97%, 98%, 99%, or 100% identical over one or more regions of the sequence shown in Table 4 of WO2018107028A1, e.g., in a 5′ terminus region, lower stem region, bulge region, upper stem region, nexus region, hairpin 1 region, hairpin 2 region, and/or 3′ terminus region. In some embodiments, the modification pattern is least 50%, 55%, 60%, 70%, 75%, 80%, 85%, 90%, 95%, 96%, 97%, 98%, 99%, or 100% identical to the modification pattern of a sequence over the 5′ terminus region. In some embodiments, the modification pattern is least 50%, 55%, 60%, 70%, 75%, 80%, 85%, 90%, 95%, 96%, 97%, 98%, 99%, or 100% identical over the lower stem. In some embodiments, the modification pattern is least 50%, 55%, 60%, 70%, 75%, 80%, 85%, 90%, 95%, 96%, 97%, 98%, 99%, or 100% identical over the bulge. In some embodiments, the modification pattern is least 50%, 55%, 60%, 70%, 75%, 80%, 85%, 90%, 95%, 96%, 97%, 98%, 99%, or 100% identical over the upper stem. In some embodiments, the modification pattern is least 50%, 55%, 60%, 70%, 75%, 80%, 85%, 90%, 95%, 96%, 97%, 98%, 99%, or 100% identical over the nexus. In some embodiments, the modification pattern is least 50%, 55%, 60%, 70%, 75%, 80%, 85%, 90%, 95%, 96%, 97%, 98%, 99%, or 100% identical over the hairpin 1. In some embodiments, the modification pattern is least 50%, 55%, 60%, 70%, 75%, 80%, 85%, 90%, 95%, 96%, 97%, 98%, 99%, or 100% identical over the hairpin 2. In some embodiments, the modification pattern is least 50%, 55%, 60%, 70%, 75%, 80%, 85%, 90%, 95%, 96%, 97%, 98%, 99%, or 100% identical over the 3′ terminus. In some embodiments, the modification pattern differs from the modification pattern of a sequence of Table 4 of WO2018107028A1, or a region (e.g. 5′ terminus, lower stem, bulge, upper stem, nexus, hairpin 1, hairpin 2, 3′ terminus) of such a sequence, e.g., at 0, 1, 2, 3, 4, 5, 6, or more nucleotides. In some embodiments, the gRNA comprises modifications that differ from the modifications of a sequence of Table 4 of WO2018107028A1, e.g., at 0, 1, 2, 3, 4, 5, 6, or more nucleotides. In some embodiments, the gRNA comprises modifications that differ from modifications of a region (e.g. 5′ terminus, lower stem, bulge, upper stem, nexus, hairpin 1, hairpin 2, 3′ terminus) of a sequence of Table 4 of WO2018107028A1, e.g., at 0, 1, 2, 3, 4, 5, 6, or more nucleotides.

[0957] In some embodiments, the template RNAs (e.g., at the portion thereof that binds a target site) or the gRNA comprises a 2′-O-methyl (2′-O-Me) modified nucleotide. In some embodiments, the gRNA comprises a 2′-O-(2-methoxy ethyl) (2′-O-moe) modified nucleotide. In some embodiments, the gRNA comprises a 2′-fluoro (2′-F) modified nucleotide. In some embodiments, the gRNA comprises a phosphorothioate (PS) bond between nucleotides. In some embodiments, the gRNA comprises a 5′ end modification, a 3′ end modification, or 5′ and 3′ end modifications. In some embodiments, the 5′ end modification comprises a phosphorothioate (PS) bond between nucleotides. In some embodiments, the 5′ end modification comprises a 2′-O-methyl (2′-O-Me), 2′-O-(2-methoxy ethyl) (2′-O-MOE), and/or 2′-fluoro (2′-F) modified nucleotide. In some embodiments, the 5′ end modification comprises at least one phosphorothioate (PS) bond and one or more of a 2′-O-methyl (2′-O-Me), 2′-O-(2-methoxyethyl) (2′-O-MOE), and/or 2′-fluoro (2′-F) modified nucleotide. The end modification may comprise a phosphorothioate (PS), 2′-O-methyl (2′-O-Me), 2′-O-(2-methoxyethyl) (2′-O-MOE), and/or 2′-fluoro (2′-F) modification. Equivalent end modifications are also encompassed by embodiments described herein. In some embodiments, the template RNA or gRNA comprises an end modification in combination with a modification of one or more regions of the template RNA or gRNA. Additional exemplary modifications and methods for protecting RNA, e.g., gRNA, and formulae thereof, are described in WO2018126176A1, which is incorporated herein by reference in its entirety.

[0958] In some embodiments, structure-guided and systematic approaches are used to introduce modifications (e.g., 2′-OMe-RNA, 2′-F-RNA, and PS modifications) to a template RNA or guide RNA, for example, as described in Mir et al. Nat Commun 9:2641 (2018) (incorporated by reference herein in its entirety). In some embodiments, the incorporation of 2′-F-RNAs increases thermal and nuclease stability of RNA:RNA or RNA:DNA duplexes, e.g., while minimally interfering with C3′-endo sugar puckering. In some embodiments, 2′-F may be better tolerated than 2′-OMe at positions where the 2′-OH is important for RNA:DNA duplex stability. In some embodiments, a crRNA comprises one or more modifications that do not reduce Cas9 activity, e.g., C10, C20, or C21 (fully modified), e.g., as described in Supplementary Table 1 of Mir et al. Nat Commun 9:2641 (2018), incorporated herein by reference in its entirety. In some embodiments, a tracrRNA comprises one or more modifications that do not reduce Cas9 activity, e.g., T2, T6, T7, or T8 (fully modified) of Supplementary Table 1 of Mir et al. Nat Commun 9:2641 (2018). In some embodiments, a crRNA comprises one or more modifications (e.g., as described herein) may be paired with a tracrRNA comprising one or more modifications, e.g., C20 and T2. In some embodiments, a gRNA comprises a chimera, e.g., of a crRNA and a tracrRNA (e.g., Jinek et al. Science 337(6096):816-821 (2012)). In embodiments, modifications from the crRNA and tracrRNA are mapped onto the single-guide chimera, e.g., to produce a modified gRNA with enhanced stability.

[0959] In some embodiments, gRNA molecules may be modified by the addition or subtraction of the naturally occurring structural components, e.g., hairpins. In some embodiments, a gRNA may comprise a gRNA with one or more 3′ hairpin elements deleted, e.g., as described in WO2018106727, incorporated herein by reference in its entirety. In some embodiments, a gRNA may contain an added hairpin structure, e.g., an added hairpin structure in the spacer region, which was shown to increase specificity of a CRISPR-Cas system in the teachings of Kocak et al. Nat Biotechnol 37(6):657-666 (2019). Additional modifications, including examples of shortened gRNA and specific modifications improving in vivo activity, can be found in US20190316121, incorporated herein by reference in its entirety.

[0960] In some embodiments, structure-guided and systematic approaches (e.g., as described in Mir et al. Nat Commun 9:2641 (2018); incorporated herein by reference in its entirety) are employed to find modifications for the template RNA. In embodiments, the modifications are identified with the inclusion or exclusion of a guide region of the template RNA. In some embodiments, a structure of polypeptide bound to template RNA is used to determine non-protein-contacted nucleotides of the RNA that may then be selected for modifications, e.g., with lower risk of disrupting the association of the RNA with the polypeptide. Secondary structures in a template RNA can also be predicted in silico by software tools, e.g., the RNAstructure tool available at ma.urmc.rochester.edu/RNAstructureWeb (Bellaousov et al. Nucleic Acids Res 41:W471-W474 (2013); incorporated by reference herein in its entirety), e.g., to determine secondary structures for selecting modifications, e.g., hairpins, stems, and/or bulges.

### Production of Compositions and Systems

[0961] As will be appreciated by one of skill, methods of designing and constructing nucleic acid constructs and proteins or polypeptides (such as the systems, constructs and polypeptides described herein) are routine in the art. Generally, recombinant methods may be used. See, in general, Smales & James (Eds.), Therapeutic Proteins: Methods and Protocols (Methods in Molecular Biology), Humana Press (2005); and Crommelin, Sindelar & Meibohm (Eds.), Pharmaceutical Biotechnology: Fundamentals and Applications, Springer (2013). Methods of designing, preparing, evaluating, purifying and manipulating nucleic acid compositions are described in Green and Sambrook (Eds.), Molecular Cloning: A Laboratory Manual (Fourth Edition), Cold Spring Harbor Laboratory Press (2012).

[0962] The disclosure provides, in part, a nucleic acid, e.g., vector, encoding a gene modifying polypeptide described herein, a template nucleic acid described herein, or both. In some embodiments, a vector comprises a selective marker, e.g., an antibiotic resistance marker. In some embodiments, the antibiotic resistance marker is a kanamycin resistance marker. In some embodiments, the antibiotic resistance marker does not confer resistance to beta-lactam antibiotics. In some embodiments, the vector does not comprise an ampicillin resistance marker. In some embodiments, the vector comprises a kanamycin resistance marker and does not comprise an ampicillin resistance marker. In some embodiments, a vector encoding a gene modifying polypeptide is integrated into a target cell genome (e.g., upon administration to a target cell, tissue, organ, or subject). In some embodiments, a vector encoding a gene modifying polypeptide is not integrated into a target cell genome (e.g., upon administration to a target cell, tissue, organ, or subject). In some embodiments, a vector encoding a template nucleic acid (e.g., template RNA) is not integrated into a target cell genome (e.g., upon administration to a target cell, tissue, organ, or subject). In some embodiments, if a vector is integrated into a target site in a target cell genome, the selective marker is not integrated into the genome. In some embodiments, if a vector is integrated into a target site in a target cell genome, genes or sequences involved in vector maintenance (e.g., plasmid maintenance genes) are not integrated into the genome. In some embodiments, if a vector is integrated into a target site in a target cell genome, transfer regulating sequences (e.g., inverted terminal repeats, e.g., from an AAV) are not integrated into the genome. In some embodiments, administration of a vector (e.g., encoding a gene modifying polypeptide described herein, a template nucleic acid described herein, or both) to a target cell, tissue, organ, or subject results in integration of a portion of the vector into one or more target sites in the genome(s) of said target cell, tissue, organ, or subject. In some embodiments, less than 99, 95, 90, 80, 70, 60, 50, 40, 30, 20, 10, 5, 4, 3, 2, or 1% of target sites (e.g., no target sites) comprising integrated material comprise a selective marker (e.g., an antibiotic resistance gene), a transfer regulating sequence (e.g., an inverted terminal repeat, e.g., from an AAV), or both from the vector.

[0963] Exemplary methods for producing a therapeutic pharmaceutical protein or polypeptide described herein involve expression in mammalian cells, although recombinant proteins can also be produced using insect cells, yeast, bacteria, or other cells under control of appropriate promoters. Mammalian expression vectors may comprise non-transcribed elements such as an origin of replication, a suitable promoter, and other 5′ or 3′ flanking non-transcribed sequences, and 5′ or 3′ non-translated sequences such as necessary ribosome binding sites, a polyadenylation site, splice donor and acceptor sites, and termination sequences. DNA sequences derived from the SV40 viral genome, for example, SV40 origin, early promoter, splice, and polyadenylation sites may be used to provide other genetic elements required for expression of a heterologous DNA sequence. Appropriate cloning and expression vectors for use with bacterial, fungal, yeast, and mammalian cellular hosts are described in Green & Sambrook, Molecular Cloning: A Laboratory Manual (Fourth Edition), Cold Spring Harbor Laboratory Press (2012).

[0964] Various mammalian cell culture systems can be employed to express and manufacture recombinant protein. Examples of mammalian expression systems include CHO, COS, HEK293, HeLA, and BHK cell lines. Processes of host cell culture for production of protein therapeutics are described in Zhou and Kantardjieff (Eds.), Mammalian Cell Cultures for Biologics Manufacturing (Advances in Biochemical Engineering Biotechnology), Springer (2014). Compositions described herein may include a vector, such as a viral vector, e.g., a lentiviral vector, encoding a recombinant protein. In some embodiments, a vector, e.g., a viral vector, may comprise a nucleic acid encoding a recombinant protein.

[0965] Purification of protein therapeutics is described in Franks, Protein Biotechnology: Isolation, Characterization, and Stabilization, Humana Press (2013); and in Cutler, Protein Purification Protocols (Methods in Molecular Biology), Humana Press (2010).

[0966] The disclosure also provides compositions and methods for the production of template nucleic acid molecules (e.g., template RNAs) with specificity for a gene modifying polypeptide and/or a genomic target site. In an aspect, the method comprises production of RNA segments including an upstream homology segment, a heterologous object sequence segment, a gene modifying polypeptide binding motif, and a gRNA segment.

### Therapeutic Applications

[0967] In some embodiments, a gene modifying system as described herein can be used to modify a cell (e.g., an animal cell, plant cell, or fungal cell). In some embodiments, a gene modifying system as described herein can be used to modify a mammalian cell (e.g., a human cell). In some embodiments, a gene modifying system as described herein can be used to modify a cell from a livestock animal (e.g., a cow, horse, sheep, goat, pig, llama, alpaca, camel, yak, chicken, duck, goose, or ostrich). In some embodiments, a gene modifying system as described herein can be used as a laboratory tool or a research tool, or used in a laboratory method or research method, e.g., to modify an animal cell, e.g., a mammalian cell (e.g., a human cell), a plant cell, or a fungal cell.

[0968] By integrating coding genes into a RNA sequence template, the gene modifying system can address therapeutic needs, for example, by providing expression of a therapeutic transgene in individuals with loss-of-function mutations, by replacing gain-of-function mutations with normal transgenes, by providing regulatory sequences to eliminate gain-of-function mutation expression, and/or by controlling the expression of operably linked genes, transgenes and systems thereof. In certain embodiments, the RNA sequence template encodes a promotor region specific to the therapeutic needs of the host cell, for example a tissue specific promotor or enhancer. In still other embodiments, a promotor can be operably linked to a coding sequence.

[0969] In some embodiments, an insertion, deletion, substitution, or combination thereof, increases or decreases expression (e.g. transcription or translation) of a target gene. In some embodiments, an insertion, deletion, substitution, or combination thereof, increases or decreases expression (e.g. transcription or translation) of a target gene by altering, adding, or deleting sequences in a promoter or enhancer, e.g. sequences that bind transcription factors. In some embodiments, an insertion, deletion, substitution, or combination thereof alters translation of a target gene (e.g. alters an amino acid sequence), inserts or deletes a start or stop codon, alters or fixes the translation frame of a gene. In some embodiments, an insertion, deletion, substitution, or combination thereof alters splicing of a target gene, e.g. by inserting, deleting, or altering a splice acceptor or donor site. In some embodiments, an insertion, deletion, substitution, or combination thereof alters transcript or protein half-life. In some embodiments, an insertion, deletion, substitution, or combination thereof, alters, increases, decreases the activity of a target gene, e.g. a protein encoded by the target gene.

### Compensatory Edits

[0970] In some embodiments, the systems or methods provided herein can be used to introduce a compensatory edit. In some embodiments, the compensatory edit is at a position of a gene associated with a disease or disorder, which is different from the position of a disease-causing mutation. In some embodiments, the compensatory mutation is not in the gene containing the causative mutation. In some embodiments, the compensatory edit can negate or compensate for a disease-causing mutation. In some embodiments, the compensatory edit can be introduced by the systems or methods provided herein to suppress or reverse the mutant effect of a disease-causing mutation.

### Regulatory Edits

[0971] In some embodiments, the systems or methods provided herein can be used to introduce a regulatory edit. In some embodiments, the regulatory edit is introduced to a regulatory sequence of a gene, for example, a gene promoter, gene enhancer, gene repressor, or a sequence that regulates gene splicing. In some embodiments, the regulatory edit increases or decreases the expression level of a target gene. In some embodiments, the target gene is the same as the gene containing a disease-causing mutation. In some embodiments, the target gene is different from the gene containing a disease-causing mutation.

### Repeat Expansion Diseases

[0972] In some embodiments, the systems or methods provided herein can be used to treat a repeat expansion disease. In some embodiments, the systems or methods provided herein, for example, those comprising gene modifying polypeptides, can be used to treat repeat expansion diseases by resetting the number of repeats at the locus according to a customized RNA template.

### Administration and Delivery

[0973] The compositions and systems described herein may be used in vitro or in vivo. In some embodiments the system or components of the system are delivered to cells (e.g., mammalian cells, e.g., human cells), e.g., in vitro or in vivo. In some embodiments, the cells are eukaryotic cells, e.g., cells of a multicellular organism, e.g., an animal, e.g., a mammal (e.g., human, swine, bovine), a bird (e.g., poultry, such as chicken, turkey, or duck), or a fish. In some embodiments, the cells are non-human animal cells (e.g., a laboratory animal, a livestock animal, or a companion animal). In some embodiments, the cell is a stem cell (e.g., a hematopoietic stem cell), a fibroblast, or a T cell. In some embodiments, the cell is an immune cell, e.g., a T cell (e.g., a Treg, CD4, CD8, γδ, or memory T cell), B cell (e.g., memory B cell or plasma cell), or NK cell. In some embodiments, the cell is a non-dividing cell, e.g., a non-dividing fibroblast or non-dividing T cell. In some embodiments, the cell is an HSC and p53 is not upregulated or is upregulated by less than 10%, 5%, 2%, or 1%, e.g., as determined according to the method described in Example 30 of PCT/US2019/048607. The skilled artisan will understand that the components of the gene modifying system may be delivered in the form of polypeptide, nucleic acid (e.g., DNA, RNA), and combinations thereof.

[0974] In one embodiment the system and/or components of the system are delivered as nucleic acid. For example, the gene modifying polypeptide may be delivered in the form of a DNA or RNA encoding the polypeptide, and the template RNA may be delivered in the form of RNA or its complementary DNA to be transcribed into RNA. In some embodiments the system or components of the system are delivered on 1, 2, 3, 4, or more distinct nucleic acid molecules. In some embodiments the system or components of the system are delivered as a combination of DNA and RNA. In some embodiments the system or components of the system are delivered as a combination of DNA and protein. In some embodiments the system or components of the system are delivered as a combination of RNA and protein. In some embodiments the gene modifying polypeptide is delivered as a protein.

[0975] In some embodiments the system or components of the system are delivered to cells, e.g. mammalian cells or human cells, using a vector. The vector may be, e.g., a plasmid or a virus. In some embodiments, delivery is in vivo, in vitro, ex vivo, or in situ. In some embodiments the virus is an adeno associated virus (AAV), a lentivirus, or an adenovirus. In some embodiments the system or components of the system are delivered to cells with a viral-like particle or a virosome. In some embodiments the delivery uses more than one virus, viral-like particle or virosome.

[0976] In one embodiment, the compositions and systems described herein can be formulated in liposomes or other similar vesicles. Liposomes are spherical vesicle structures composed of a uni- or multilamellar lipid bilayer surrounding internal aqueous compartments and a relatively impermeable outer lipophilic phospholipid bilayer. Liposomes may be anionic, neutral or cationic. Liposomes are biocompatible, nontoxic, can deliver both hydrophilic and lipophilic drug molecules, protect their cargo from degradation by plasma enzymes, and transport their load across biological membranes and the blood brain barrier (BBB) (see, e.g., Spuch and Navarro, Journal of Drug Delivery, vol. 2011, Article ID 469679, 12 pages, 2011. doi:10.1155/2011/469679 for review).

[0977] Vesicles can be made from several different types of lipids; however, phospholipids are most commonly used to generate liposomes as drug carriers. Methods for preparation of multilamellar vesicle lipids are known in the art (see for example U.S. Pat. No. 6,693,086, the teachings of which relating to multilamellar vesicle lipid preparation are incorporated herein by reference). Although vesicle formation can be spontaneous when a lipid film is mixed with an aqueous solution, it can also be expedited by applying force in the form of shaking by using a homogenizer, sonicator, or an extrusion apparatus (see, e.g., Spuch and Navarro, Journal of Drug Delivery, vol. 2011, Article ID 469679, 12 pages, 2011. doi:10.1155/2011/469679 for review). Extruded lipids can be prepared by extruding through filters of decreasing size, as described in Templeton et al., Nature Biotech, 15:647-652, 1997, the teachings of which relating to extruded lipid preparation are incorporated herein by reference.

[0978] A variety of nanoparticles can be used for delivery, such as a liposome, a lipid nanoparticle, a cationic lipid nanoparticle, an ionizable lipid nanoparticle, a polymeric nanoparticle, a gold nanoparticle, a dendrimer, a cyclodextrin nanoparticle, a micelle, or a combination of the foregoing.

[0979] Lipid nanoparticles are an example of a carrier that provides a biocompatible and biodegradable delivery system for the pharmaceutical compositions described herein. Nanostructured lipid carriers (NLCs) are modified solid lipid nanoparticles (SLNs) that retain the characteristics of the SLN, improve drug stability and loading capacity, and prevent drug leakage. Polymer nanoparticles (PNPs) are an important component of drug delivery. These nanoparticles can effectively direct drug delivery to specific targets and improve drug stability and controlled drug release. Lipid-polymer nanoparticles (PLNs), a type of carrier that combines liposomes and polymers, may also be employed. These nanoparticles possess the complementary advantages of PNPs and liposomes. A PLN is composed of a core-shell structure; the polymer core provides a stable structure, and the phospholipid shell offers good biocompatibility. As such, the two components increase the drug encapsulation efficiency rate, facilitate surface modification, and prevent leakage of water-soluble drugs. For a review, see, e.g., Li et al. 2017, Nanomaterials 7, 122; doi:10.3390/nano7060122.

[0980] Exosomes can also be used as drug delivery vehicles for the compositions and systems described herein. For a review, see Ha et al. July 2016. Acta Pharmaceutica Sinica B. Volume 6, Issue 4, Pages 287-296; doi.org/10.1016/j.apsb.2016.02.001.

[0981] Fusosomes interact and fuse with target cells, and thus can be used as delivery vehicles for a variety of molecules. They generally consist of a bilayer of amphipathic lipids enclosing a lumen or cavity and a fusogen that interacts with the amphipathic lipid bilayer. The fusogen component has been shown to be engineerable in order to confer target cell specificity for the fusion and payload delivery, allowing the creation of delivery vehicles with programmable cell specificity (see for example Patent Application WO2020014209, the teachings of which relating to fusosome design, preparation, and usage are incorporated herein by reference).

[0982] In some embodiments, the protein component(s) of the gene modifying system may be pre-associated with the template nucleic acid (e.g., template RNA). For example, in some embodiments, the gene modifying polypeptide may be first combined with the template nucleic acid (e.g., template RNA) to form a ribonucleoprotein (RNP) complex. In some embodiments, the RNP may be delivered to cells via, e.g., transfection, nucleofection, virus, vesicle, LNP, exosome, fusosome.

[0983] A gene modifying system can be introduced into cells, tissues and multicellular organisms. In some embodiments the system or components of the system are delivered to the cells via mechanical means or physical means.

[0984] Formulation of protein therapeutics is described in Meyer (Ed.), Therapeutic Protein Drug Products: Practical Approaches to formulation in the Laboratory, Manufacturing, and the Clinic, Woodhead Publishing Series (2012).

### Tissue Specific Activity/Administration

[0985] In some embodiments, a system described herein can make use of one or more feature (e.g., a promoter or microRNA binding site) to limit activity in off-target cells or tissues.

[0986] In some embodiments, a nucleic acid described herein (e.g., a template RNA or a DNA encoding a template RNA) comprises a promoter sequence, e.g., a tissue specific promoter sequence. In some embodiments, the tissue-specific promoter is used to increase the target-cell specificity of a gene modifying system. For instance, the promoter can be chosen on the basis that it is active in a target cell type but not active in (or active at a lower level in) a non-target cell type. Thus, even if the promoter integrated into the genome of a non-target cell, it would not drive expression (or only drive low level expression) of an integrated gene. A system having a tissue-specific promoter sequence in the template RNA may also be used in combination with a microRNA binding site, e.g., in the template RNA or a nucleic acid encoding a gene modifying protein, e.g., as described herein. A system having a tissue-specific promoter sequence in the template RNA may also be used in combination with a DNA encoding a gene modifying polypeptide, driven by a tissue-specific promoter, e.g., to achieve higher levels of gene modifying protein in target cells than in non-target cells. In some embodiments, e.g., for liver indications, a tissue-specific promoter is selected from Table 3 of WO2020014209, incorporated herein by reference.

[0987] In some embodiments, a nucleic acid described herein (e.g., a template RNA or a DNA encoding a template RNA) comprises a microRNA binding site. In some embodiments, the microRNA binding site is used to increase the target-cell specificity of a gene modifying system. For instance, the microRNA binding site can be chosen on the basis that is recognized by a miRNA that is present in a non-target cell type, but that is not present (or is present at a reduced level relative to the non-target cell) in a target cell type. Thus, when the template RNA is present in a non-target cell, it would be bound by the miRNA, and when the template RNA is present in a target cell, it would not be bound by the miRNA (or bound but at reduced levels relative to the non-target cell). While not wishing to be bound by theory, binding of the miRNA to the template RNA may interfere with its activity, e.g., may interfere with insertion of the heterologous object sequence into the genome. Accordingly, the system would edit the genome of target cells more efficiently than it edits the genome of non-target cells, e.g., the heterologous object sequence would be inserted into the genome of target cells more efficiently than into the genome of non-target cells, or an insertion or deletion is produced more efficiently in target cells than in non-target cells. A system having a microRNA binding site in the template RNA (or DNA encoding it) may also be used in combination with a nucleic acid encoding a gene modifying polypeptide, wherein expression of the gene modifying polypeptide is regulated by a second microRNA binding site, e.g., as described herein. In some embodiments, e.g., for liver indications, a miRNA is selected from Table 4 of WO2020014209, incorporated herein by reference.

[0988] In some embodiments, the template RNA comprises a microRNA sequence, an siRNA sequence, a guide RNA sequence, or a piwi RNA sequence.

### Promoters

[0989] In some embodiments, one or more promoter or enhancer elements are operably linked to a nucleic acid encoding a gene modifying protein or a template nucleic acid, e.g., that controls expression of the heterologous object sequence. In certain embodiments, the one or more promoter or enhancer elements comprise cell-type or tissue specific elements. In some embodiments, the promoter or enhancer is the same or derived from the promoter or enhancer that naturally controls expression of the heterologous object sequence. For example, the ornithine transcarbomylase promoter and enhancer may be used to control expression of the ornithine transcarbomylase gene in a system or method provided by the invention for correcting ornithine transcarbomylase deficiencies. In some embodiments, the promoter is a promoter of Table 16 or 17 or a functional fragment or variant thereof.

[0990] Exemplary tissue specific promoters that are commercially available can be found, for example, at a uniform resource locator (e.g., invivogen.com/tissue-specific-promoters). In some embodiments, a promoter is a native promoter or a minimal promoter, e.g., which consists of a single fragment from the 5′ region of a given gene. In some embodiments, a native promoter comprises a core promoter and its natural 5′ UTR. In some embodiments, the 5′ UTR comprises an intron. In other embodiments, these include composite promoters, which combine promoter elements of different origins or were generated by assembling a distal enhancer with a minimal promoter of the same origin.

[0991] Exemplary cell or tissue specific promoters are provided in the tables, below, and exemplary nucleic acid sequences encoding them are known in the art and can be readily accessed using a variety of resources, such as the NCBI database, including RefSeq, as well as the Eukaryotic Promoter Database (//epd.epfl.ch//index.php).

TABLE 16
Exemplary cell or tissue-specific promoters

| Promoter | Target cells |
|---|---|
| B29 Promoter | B cells |
| CD14 Promoter | Monocytic Cells |
| CD43 Promoter | Leukocytes and platelets |
| CD45 Promoter | Hematopoeitic cells |
| CD68 promoter | macrophages |
| Desmin promoter | muscle cells |
| Elastase-1 promoter | pancreatic acinar cells |
| Endoglin promoter | endothelial cells |
| fibronectin promoter | differentiating cells, healing tissue |
| Flt-1 promoter | endothelial cells |
| GFAP promoter | Astrocytes |
| GPIIB promoter | megakaryocytes |
| ICAM-2 Promoter | Endothelial cells |
| INF-Beta promoter | Hematopoeitic cells |
| Mb promoter | muscle cells |
| Nphs1 promoter | podocytes |
| OG-2 promoter | Osteoblasts, Odonblasts |
| SP-B promoter | Lung |
| Syn1 promoter | Neurons |
| WASP promoter | Hematopoeitic cells |
| SV40/bAlb promoter | Liver |
| SV40/bAlb promoter | Liver |
| SV40/Cd3 promoter | Leukocytes and platelets |
| SV40/CD45 | hematopoeitic cells |
| promoter | |
| NSE/RU5′ promoter | Mature Neurons |

TABLE 17
Additional exemplary cell or tissue-specific promoters

| Promoter | Gene Description | Gene Specificity |
|---|---|---|
| APOA2 | Apolipoprotein A-II | Hepatocytes (from |
| | | hepatocyte progenitors) |
| SERPINA1 | Serpin peptidase inhibitor, | Hepatocytes |
| (hAAT) | clade A (alpha-1 antiproteinase, | (from definitive endoderm |
| | antitrypsin), member 1 (also | stage) |
| | named alpha 1 anti-tryps in) | |
| CYP3A | Cytochrome P450, family 3, | Mature Hepatocytes |
| | subfamily A, polypeptide | |
| MIR122 | MicroRNA 122 | Hepatocytes |
| | | (from early stage |
| | | embryonic liver |
| | | cells) and endoderm |

Pancreatic specific promoters

| | | |
|---|---|---|
| INS | Insulin | Pancreatic beta cells |
| | | (from definitive endoderm |
| | | stage) |
| IRS2 | Insulin receptor substrate 2 | Pancreatic beta cells |
| Pdx1 | Pancreatic and duodenal | Pancreas |
| | homeobox 1 | (from definitive endoderm |
| | | stage) |
| Alx3 | Aristaless-like homeobox 3 | Pancreatic beta cells |
| | | (from definitive endoderm |
| | | stage) |
| Ppy | Pancreatic polypeptide | PP pancreatic cells |
| | | (gamma cells) |

Cardiac specific promoters

| | | |
|---|---|---|
| Myh6 | Myosin, heavy chain 6, cardiac | Late differentiation marker |
| (aMHC) | muscle, alpha | of cardiac muscle cells |
| | | (atrial specificity) |
| MYL2 | Myosin, light chain 2, regulatory, | Late differentiation marker |
| (MLC-2v) | cardiac, slow | of cardiac muscle cells |
| | | (ventricular specificity) |
| ITNNl3 | Troponin I type 3 (cardiac) | Cardiomyocytes |
| (cTnl) | | (from immature state) |
| ITNNl3 | Troponin I type 3 (cardiac) | Cardiomyocytes |
| (cTnl) | | (from immature state) |
| NPPA | Natriuretic peptide precursor | Atrial specificity in adult |
| (ANF) | A (also named Atrial | cells |
| | Natriuretic Factor) | |
| Slc8a1 | Solute carrier family 8 (sodium/ | Cardiomyocytes from early |
| (Ncx1) | calcium exchanger), member 1 | developmental stages |

CNS specific promoters

| | | |
|---|---|---|
| SYN1 | Synapsin I | Neurons |
| (hSyn) | | |
| GFAP | Glial fibrillary acidic protein | Astrocytes |
| INA | Internexin neuronal intermediate | Neuroprogenitors |
| | filament protein, alpha | |
| | (a-internexin) | |
| NES | Nestin | Neuroprogenitors and ectoderm |
| MOBP | Myelin-associated oligodendrocyte | Oligodendrocytes |
| | basic protein | |
| MBP | Myelin basic protein | Oligodendrocytes |
| TH | Tyrosine hydroxylase | Dopaminergic neurons |
| FOXA2 | Forkhead box A2 | Dopaminergic neurons (also |
| (HNF3 beta) | | used as a marker of endoderm) |

Skin specific promoters

| | | |
|---|---|---|
| FLG | Filaggrin | Keratinocytes from granular |
| | | layer |
| K14 | Keratin 14 | Keratinocytes from granular |
| | | and basal layers |
| TGM3 | Transglutaminase 3 | Keratinocytes from granular |
| | | layer |

Immune cell specific promoters

| | | |
|---|---|---|
| ITGAM | lntegrin, alpha M (complement | Monocytes, macrophages, |
| (CD11B) | component 3 receptor 3 subunit) | granulocytes, natural killer |
| | | cells |

Urogential cell specific promoters

| | | |
|---|---|---|
| Pbsn | Probasin | Prostatic epithelium |
| Upk2 | Uroplakin 2 | Bladder |
| Sbp | Spermine binding protein | Prostate |
| Fer1l4 | Fer-1-like 4 | Bladder |

Endothelial cell specific promoters

| | | |
|---|---|---|
| ENG | Endoglin | Endothelial cells |

Pluripotent and embryonic cell specific promoters

| | | |
|---|---|---|
| Oct4 | POU class 5 homeobox 1 | Pluripotent cells |
| (POU5F1) | | (germ cells, ES cells, |
| | | iPS cells) |
| NANOG | Nanog homeobox | Pluripotent cells |
| | | (ES cells, iPS cells) |
| Synthetic | Synthetic promoter based on a Oct-4 | Pluripotent cells (ES cells, |
| Oct4 | core enhancer element | iPS cells) |
| T brachyury | Brachyury | Mesoderm |
| NES | Nestin | Neuroprogenitors and Ectoderm |
| SOX17 | SRY (sex determining region Y)-box 17 | Endoderm |
| FOXA2 | Forkhead box A2 | Endoderm (also used as a marker |
| (HNFJ | | of dopaminergic neurons) |
| beta) | | |
| MIR122 | MicroRNA 122 | Endoderm and hepatocytes |
| | | (from early stage embryonic |
| | | liver cells~ |

[0992] Depending on the host/vector system utilized, any of a number of suitable transcription and translation control elements, including constitutive and inducible promoters, transcription enhancer elements, transcription terminators, etc. may be used in the expression vector (see e.g., Bitler et al. (1987) Methods in Enzymology, 153:516-544; incorporated herein by reference in its entirety).

[0993] In some embodiments, a nucleic acid encoding a gene modifying protein or template nucleic acid is operably linked to a control element, e.g., a transcriptional control element, such as a promoter. The transcriptional control element may, in some embodiment, be functional in either a eukaryotic cell, e.g., a mammalian cell; or a prokaryotic cell (e.g., bacterial or archaeal cell). In some embodiments, a nucleotide sequence encoding a polypeptide is operably linked to multiple control elements, e.g., that allow expression of the nucleotide sequence encoding the polypeptide in both prokaryotic and eukaryotic cells.

[0994] For illustration purposes, examples of spatially restricted promoters include, but are not limited to, neuron-specific promoters, adipocyte-specific promoters, cardiomyocyte-specific promoters, smooth muscle-specific promoters, photoreceptor-specific promoters, etc. Neuron-specific spatially restricted promoters include, but are not limited to, a neuron-specific enolase (NSE) promoter (see, e.g., EMBL HSENO2, X51956); an aromatic amino acid decarboxylase (AADC) promoter, a neurofilament promoter (see, e.g., GenBank HUMNFL, L04147); a synapsin promoter (see, e.g., GenBank HUMSYNIB, M55301); a thy-1 promoter (see, e.g., Chen et al. (1987) Cell 51:7-19; and Llewellyn, et al. (2010) Nat. Med. 16(10):1161-1166); a serotonin receptor promoter (see, e.g., GenBank S62283); a tyrosine hydroxylase promoter (TH) (see, e.g., Oh et al. (2009) Gene Ther 16:437; Sasaoka et al. (1992) Mol. Brain Res. 16:274; Boundy et al. (1998) J. Neurosci. 18:9989; and Kaneda et al. (1991) Neuron 6:583-594); a GnRH promoter (see, e.g., Radovick et al. (1991) Proc. Natl. Acad. Sci. USA 88:3402-3406); an L7 promoter (see, e.g., Oberdick et al. (1990) Science 248:223-226); a DNMT promoter (see, e.g., Bartge et al. (1988) Proc. Natl. Acad. Sci. USA 85:3648-3652); an enkephalin promoter (see, e.g., Comb et al. (1988) EMBO J. 17:3793-3805); a myelin basic protein (MBP) promoter; a Ca2+-calmodulin-dependent protein kinase II-alpha (CamKIIα) promoter (see, e.g., Mayford et al. (1996) Proc. Natl. Acad. Sci. USA 93:13250; and Casanova et al. (2001) Genesis 31:37); a CMV enhancer/platelet-derived growth factor-O promoter (see, e.g., Liu et al. (2004) Gene Therapy 11:52-60); and the like.

[0995] Adipocyte-specific spatially restricted promoters include, but are not limited to, the aP2 gene promoter/enhancer, e.g., a region from −5.4 kb to +21 bp of a human aP2 gene (see, e.g., Tozzo et al. (1997) Endocrinol. 138:1604; Ross et al. (1990) Proc. Natl. Acad. Sci. USA 87:9590; and Pavjani et al. (2005) Nat. Med. 11:797); a glucose transporter-4 (GLUT4) promoter (see, e.g., Knight et al. (2003) Proc. Natl. Acad. Sci. USA 100:14725); a fatty acid translocase (FAT/CD36) promoter (see, e.g., Kuriki et al. (2002) Biol. Pharm. Bull. 25:1476; and Sato et al. (2002) J. Biol. Chem. 277:15703); a stearoyl-CoA desaturase-1 (SCD1) promoter (Tabor et al. (1999) J. Biol. Chem. 274:20603); a leptin promoter (see, e.g., Mason et al. (1998) Endocrinol. 139:1013; and Chen et al. (1999) Biochem. Biophys. Res. Comm. 262:187); an adiponectin promoter (see, e.g., Kita et al. (2005) Biochem. Biophys. Res. Comm. 331:484; and Chakrabarti (2010) Endocrinol. 151:2408); an adipsin promoter (see, e.g., Platt et al. (1989) Proc. Natl. Acad. Sci. USA 86:7490); a resistin promoter (see, e.g., Seo et al. (2003) Molec. Endocrinol. 17:1522); and the like.

[0996] Cardiomyocyte-specific spatially restricted promoters include, but are not limited to, control sequences derived from the following genes: myosin light chain-2, α-myosin heavy chain, AE3, cardiac troponin C, cardiac actin, and the like. Franz et al. (1997) Cardiovasc. Res. 35:560-566; Robbins et al. (1995) Ann. N.Y. Acad. Sci. 752:492-505; Linn et al. (1995) Circ. Res. 76:584-591; Parmacek et al. (1994) Mol. Cell. Biol. 14:1870-1885; Hunter et al. (1993) Hypertension 22:608-617; and Sartorelli et al. (1992) Proc. Natl. Acad. Sci. USA 89:4047-4051.

[0997] Smooth muscle-specific spatially restricted promoters include, but are not limited to, an SM22a promoter (see, e.g., Akyurek et al. (2000) Mol. Med. 6:983; and U.S. Pat. No. 7,169,874); a smoothelin promoter (see, e.g., WO 2001/018048); an α-smooth muscle actin promoter; and the like. For example, a 0.4 kb region of the SM22α promoter, within which lie two CArG elements, has been shown to mediate vascular smooth muscle cell-specific expression (see, e.g., Kim, et al. (1997) Mol. Cell. Biol. 17, 2266-2278; Li, et al., (1996) J. Cell Biol. 132, 849-859; and Moessler, et al. (1996) Development 122, 2415-2425).

[0998] Photoreceptor-specific spatially restricted promoters include, but are not limited to, a rhodopsin promoter; a rhodopsin kinase promoter (Young et al. (2003) Ophthalmol. Vis. Sci. 44:4076); a beta phosphodiesterase gene promoter (Nicoud et al. (2007) J. Gene Med. 9:1015); a retinitis pigmentosa gene promoter (Nicoud et al. (2007) supra); an interphotoreceptor retinoid-binding protein (IRBP) gene enhancer (Nicoud et al. (2007) supra); an IRBP gene promoter (Yokoyama et al. (1992) Exp Eye Res. 55:225); and the like.

[0999] In some embodiments, a gene modifying system, e.g., DNA encoding a gene modifying polypeptide, DNA encoding a template RNA, or DNA or RNA encoding a heterologous object sequence, is designed such that one or more elements is operably linked to a tissue-specific promoter, e.g., a promoter that is active in T-cells. In further embodiments, the T-cell active promoter is inactive in other cell types, e.g., B-cells, NK cells. In some embodiments, the T-cell active promoter is derived from a promoter for a gene encoding a component of the T-cell receptor, e.g., TRAC, TRBC, TRGC, TRDC. In some embodiments, the T-cell active promoter is derived from a promoter for a gene encoding a component of a T-cell-specific cluster of differentiation protein, e.g., CD3, e.g., CD3D, CD3E, CD3G, CD3Z. In some embodiments, T-cell-specific promoters in gene modifying systems are discovered by comparing publicly available gene expression data across cell types and selecting promoters from the genes with enhanced expression in T-cells. In some embodiments, promoters may be selecting depending on the desired expression breadth, e.g., promoters that are active in T-cells only, promoters that are active in NK cells only, promoters that are active in both T-cells and NK cells.

[1000] Cell-specific promoters known in the art may be used to direct expression of a gene modifying protein, e.g., as described herein. Nonlimiting exemplary mammalian cell-specific promoters have been characterized and used in mice expressing Cre recombinase in a cell-specific manner. Certain nonlimiting exemplary mammalian cell-specific promoters are listed in Table 1 of U.S. Pat. No. 9,845,481, incorporated herein by reference.

[1001] In some embodiments, a vector as described herein comprises an expression cassette. Typically, an expression cassette comprises the nucleic acid molecule of the instant invention operatively linked to a promoter sequence. For example, a promoter is operatively linked with a coding sequence when it is capable of affecting the expression of that coding sequence (e.g., the coding sequence is under the transcriptional control of the promoter). Encoding sequences can be operatively linked to regulatory sequences in sense or antisense orientation. In certain embodiments, the promoter is a heterologous promoter. In certain embodiments, an expression cassette may comprise additional elements, for example, an intron, an enhancer, a polyadenylation site, a woodchuck response element (WRE), and/or other elements known to affect expression levels of the encoding sequence. A promoter typically controls the expression of a coding sequence or functional RNA. In certain embodiments, a promoter sequence comprises proximal and more distal upstream elements and can further comprise an enhancer element. An enhancer can typically stimulate promoter activity and may be an innate element of the promoter or a heterologous element inserted to enhance the level or tissue-specificity of a promoter. In certain embodiments, the promoter is derived in its entirety from a native gene. In certain embodiments, the promoter is composed of different elements derived from different naturally occurring promoters. In certain embodiments, the promoter comprises a synthetic nucleotide sequence. It will be understood by those skilled in the art that different promoters will direct the expression of a gene in different tissues or cell types, or at different stages of development, or in response to different environmental conditions or to the presence or the absence of a drug or transcriptional co-factor. Ubiquitous, cell-type-specific, tissue-specific, developmental stage-specific, and conditional promoters, for example, drug-responsive promoters (e.g., tetracycline-responsive promoters) are well known to those of skill in the art. Exemplary promoters include, but are not limited to, the phosphoglycerate kinase (PKG) promoter, CAG (composite of the CMV enhancer the chicken beta actin promoter (CBA) and the rabbit beta globin intron), NSE (neuronal specific enolase), synapsin or NeuN promoters, the SV40 early promoter, mouse mammary tumor virus LTR promoter; adenovirus major late promoter (Ad MLP), a herpes simplex virus (HSV) promoter, a cytomegalovirus (CMV) promoter such as the CMV immediate early promoter region (CMVIE), SFFV promoter, rous sarcoma virus (RSV) promoter, synthetic promoters, hybrid promoters, and the like. Other promoters can be of human origin or from other species, including from mice. Common promoters include, e.g., the human cytomegalovirus (CMV) immediate early gene promoter, the SV40 early promoter, the Rous sarcoma virus long terminal repeat, [beta]-actin, rat insulin promoter, the phosphoglycerate kinase promoter, the human alpha-1 antitrypsin (hAAT) promoter, the transthyretin promoter, the TBG promoter and other liver-specific promoters, the desmin promoter and similar muscle-specific promoters, the EF 1-alpha promoter, hybrid promoters with multi-tissue specificity, promoters specific for neurons like synapsin and glyceraldehyde-3-phosphate dehydrogenase promoter, all of which are promoters well known and readily available to those of skill in the art, can be used to obtain high-level expression of the coding sequence of interest. In addition, sequences derived from non-viral genes, such as the murine metallothionein gene, will also find use herein. Such promoter sequences are commercially available from, e.g., Stratagene (San Diego, CA). Additional exemplary promoter sequences are described, for example, in WO2018213786A1 (incorporated by reference herein in its entirety).

[1002] In some embodiments, the apolipoprotein E enhancer (ApoE) or a functional fragment thereof is used, e.g., to drive expression in the liver. In some embodiments, two copies of the ApoE enhancer or a functional fragment thereof are used. In some embodiments, the ApoE enhancer or functional fragment thereof is used in combination with a promoter, e.g., the human alpha-1 antitrypsin (hAAT) promoter.

[1003] In some embodiments, the regulatory sequences impart tissue-specific gene expression capabilities. In some cases, the tissue-specific regulatory sequences bind tissue-specific transcription factors that induce transcription in a tissue specific manner. Various tissue-specific regulatory sequences (e.g., promoters, enhancers, etc.) are known in the art. Exemplary tissue-specific regulatory sequences include, but are not limited to, the following tissue-specific promoters: a liver-specific thyroxin binding globulin (TBG) promoter, a insulin promoter, a glucagon promoter, a somatostatin promoter, a pancreatic polypeptide (PPY) promoter, a synapsin-1 (Syn) promoter, a creatine kinase (MCK) promoter, a mammalian desmin (DES) promoter, a α-myosin heavy chain (α-MHC) promoter, or a cardiac Troponin T (cTnT) promoter. Other exemplary promoters include Beta-actin promoter, hepatitis B virus core promoter, Sandig et al., Gene Ther., 3:1002-9 (1996); alpha-fetoprotein (AFP) promoter, Arbuthnot et al., Hum. Gene Ther., 7:1503-14 (1996)), bone osteocalcin promoter (Stein et al., Mol. Biol. Rep., 24:185-96 (1997)); bone sialoprotein promoter (Chen et al., J. Bone Miner. Res., 11:654-64 (1996)), CD2 promoter (Hansal et al., J. Immunol., 161:1063-8 (1998); immunoglobulin heavy chain promoter; T cell receptor α-chain promoter, neuronal such as neuron-specific enolase (NSE) promoter (Andersen et al., Cell. Mol. Neurobiol., 13:503-15 (1993)), neurofilament light-chain gene promoter (Piccioli et al., Proc. Natl. Acad. Sci. USA, 88:5611-5 (1991)), and the neuron-specific vgf gene promoter (Piccioli et al., Neuron, 15:373-84 (1995)), and others. Additional exemplary promoter sequences are described, for example, in U.S. patent Ser. No. 10/300,146 (incorporated herein by reference in its entirety). In some embodiments, a tissue-specific regulatory element, e.g., a tissue-specific promoter, is selected from one known to be operably linked to a gene that is highly expressed in a given tissue, e.g., as measured by RNA-seq or protein expression data, or a combination thereof. Methods for analyzing tissue specificity by expression are taught in Fagerberg et al. Mol Cell Proteomics 13(2):397-406 (2014), which is incorporated herein by reference in its entirety.

[1004] In some embodiments, a vector described herein is a multicistronic expression construct. Multicistronic expression constructs include, for example, constructs harboring a first expression cassette, e.g. comprising a first promoter and a first encoding nucleic acid sequence, and a second expression cassette, e.g. comprising a second promoter and a second encoding nucleic acid sequence. Such multicistronic expression constructs may, in some instances, be particularly useful in the delivery of non-translated gene products, such as hairpin RNAs, together with a polypeptide, for example, a gene modifying polypeptide and gene modifying template. In some embodiments, multicistronic expression constructs may exhibit reduced expression levels of one or more of the included transgenes, for example, because of promoter interference or the presence of incompatible nucleic acid elements in close proximity. If a multicistronic expression construct is part of a viral vector, the presence of a self-complementary nucleic acid sequence may, in some instances, interfere with the formation of structures necessary for viral reproduction or packaging.

[1005] In some embodiments, the sequence encodes an RNA with a hairpin. In some embodiments, the hairpin RNA is a guide RNA, a template RNA, a shRNA, or a microRNA. In some embodiments, the first promoter is an RNA polymerase I promoter. In some embodiments, the first promoter is an RNA polymerase II promoter. In some embodiments, the second promoter is an RNA polymerase III promoter. In some embodiments, the second promoter is a U6 or H1 promoter.

[1006] Without wishing to be bound by theory, multicistronic expression constructs may not achieve optimal expression levels as compared to expression systems containing only one cistron. One of the suggested causes of lower expression levels achieved with multicistronic expression constructs comprising two or more promoter elements is the phenomenon of promoter interference (see, e.g., Curtin J A, Dane A P, Swanson A, Alexander I E, Ginn S L. Bidirectional promoter interference between two widely used internal heterologous promoters in a late-generation lentiviral construct. Gene Ther. 2008 March; 15(5):384-90; and Martin-Duque P, Jezzard S, Kaftansis L, Vassaux G. Direct comparison of the insulating properties of two genetic elements in an adenoviral vector containing two different expression cassettes. Hum Gene Ther. 2004 October; 15(10):995-1002; both references incorporated herein by reference for disclosure of promoter interference phenomenon). In some embodiments, the problem of promoter interference may be overcome, e.g., by producing multicistronic expression constructs comprising only one promoter driving transcription of multiple encoding nucleic acid sequences separated by internal ribosomal entry sites, or by separating cistrons comprising their own promoter with transcriptional insulator elements. In some embodiments, single-promoter driven expression of multiple cistrons may result in uneven expression levels of the cistrons. In some embodiments, a promoter cannot efficiently be isolated and isolation elements may not be compatible with some gene transfer vectors, for example, some retroviral vectors.

### MicroRNAs

[1007] MicroRNAs (miRNAs) and other small interfering nucleic acids generally regulate gene expression via target RNA transcript cleavage/degradation or translational repression of the target messenger RNA (mRNA). miRNAs may, in some instances, be natively expressed, typically as final 19-25 non-translated RNA products. miRNAs generally exhibit their activity through sequence-specific interactions with the 3′ untranslated regions (UTR) of target mRNAs. These endogenously expressed miRNAs may form hairpin precursors that are subsequently processed into an miRNA duplex, and further into a mature single stranded miRNA molecule This mature miRNA generally guides a multiprotein complex, miRISC, which identifies target 3′ UTR regions of target mRNAs based upon their complementarity to the mature miRNA. Useful transgene products may include, for example, miRNAs or miRNA binding sites that regulate the expression of a linked polypeptide. A non-limiting list of miRNA genes; the products of these genes and their homologues are useful as transgenes or as targets for small interfering nucleic acids (e.g., miRNA sponges, antisense oligonucleotides), e.g., in methods such as those listed in U.S. Ser. No. 10/300,146, 22:25-25:48, are herein incorporated by reference. In some embodiments, one or more binding sites for one or more of the foregoing miRNAs are incorporated in a transgene, e.g., a transgene delivered by a rAAV vector, e.g., to inhibit the expression of the transgene in one or more tissues of an animal harboring the transgene. In some embodiments, a binding site may be selected to control the expression of a transgene in a tissue specific manner. For example, binding sites for the liver-specific miR-122 may be incorporated into a transgene to inhibit expression of that transgene in the liver. Additional exemplary miRNA sequences are described, for example, in U.S. Pat. No. 10,300,146 (incorporated herein by reference in its entirety).

[1008] An miR inhibitor or miRNA inhibitor is generally an agent that blocks miRNA expression and/or processing. Examples of such agents include, but are not limited to, microRNA antagonists, microRNA specific antisense, microRNA sponges, and microRNA oligonucleotides (double-stranded, hairpin, short oligonucleotides) that inhibit miRNA interaction with a Drosha complex. MicroRNA inhibitors, e.g., miRNA sponges, can be expressed in cells from transgenes (e.g., as described in Ebert, M. S. Nature Methods, Epub Aug. 12, 2007; incorporated by reference herein in its entirety). In some embodiments, microRNA sponges, or other miR inhibitors, are used with the AAVs. microRNA sponges generally specifically inhibit miRNAs through a complementary heptameric seed sequence. In some embodiments, an entire family of miRNAs can be silenced using a single sponge sequence. Other methods for silencing miRNA function (derepression of miRNA targets) in cells will be apparent to one of ordinary skill in the art.

[1009] In some embodiments, a gene modifying system, template RNA, or polypeptide described herein is administered to or is active in (e.g., is more active in) a target tissue, e.g., a first tissue. In some embodiments, the gene modifying system, template RNA, or polypeptide is not administered to or is less active in (e.g., not active in) a non-target tissue. In some embodiments, a gene modifying system, template RNA, or polypeptide described herein is useful for modifying DNA in a target tissue, e.g., a first tissue, (e.g., and not modifying DNA in a non-target tissue).

[1010] In some embodiments, a gene modifying system comprises (a) a polypeptide described herein or a nucleic acid encoding the same, (b) a template nucleic acid (e.g., template RNA) described herein, and (c) one or more first tissue-specific expression-control sequences specific to the target tissue, wherein the one or more first tissue-specific expression-control sequences specific to the target tissue are in operative association with (a), (b), or (a) and (b), wherein, when associated with (a), (a) comprises a nucleic acid encoding the polypeptide.

[1011] In some embodiments, the nucleic acid in (b) comprises RNA.

[1012] In some embodiments, the nucleic acid in (b) comprises DNA.

[1013] In some embodiments, the nucleic acid in (b): (i) is single-stranded or comprises a single-stranded segment, e.g., is single-stranded DNA or comprises a single-stranded segment and one or more double stranded segments; (ii) has inverted terminal repeats; or (iii) both (i) and (ii).

[1014] In some embodiments, the nucleic acid in (b) is double-stranded or comprises a double-stranded segment.

[1015] In some embodiments, (a) comprises a nucleic acid encoding the polypeptide.

[1016] In some embodiments, the nucleic acid in (a) comprises RNA.

[1017] In some embodiments, the nucleic acid in (a) comprises DNA.

[1018] In some embodiments, the nucleic acid in (a): (i) is single-stranded or comprises a single-stranded segment, e.g., is single-stranded DNA or comprises a single-stranded segment and one or more double stranded segments; (ii) has inverted terminal repeats; or (iii) both (i) and (ii).

[1019] In some embodiments, the nucleic acid in (a) is double-stranded or comprises a double-stranded segment.

[1020] In some embodiments, the nucleic acid in (a), (b), or (a) and (b) is linear.

[1021] In some embodiments, the nucleic acid in (a), (b), or (a) and (b) is circular, e.g., a plasmid or minicircle.

[1022] In some embodiments, the heterologous object sequence is in operative association with a first promoter.

[1023] In some embodiments, the one or more first tissue-specific expression-control sequences comprises a tissue specific promoter.

[1024] In some embodiments, the tissue-specific promoter comprises a first promoter in operative association with: (i) the heterologous object sequence, (ii) a nucleic acid encoding the retroviral RT, or (iii) (i) and (ii).

[1025] In some embodiments, the one or more first tissue-specific expression-control sequences comprises a tissue-specific microRNA recognition sequence in operative association with: (i) the heterologous object sequence, (ii) a nucleic acid encoding the retroviral RT domain, or (iii) (i) and (ii).

[1026] In some embodiments, a system comprises a tissue-specific promoter, and the system further comprises one or more tissue-specific microRNA recognition sequences, wherein: (i) the tissue specific promoter is in operative association with: (I) the heterologous object sequence, (II) a nucleic acid encoding the retroviral RT domain, or (III) (I) and (II); and/or (ii) the one or more tissue-specific microRNA recognition sequences are in operative association with: (I) the heterologous object sequence, (II) a nucleic acid encoding the retroviral RT, or (III) (I) and (II).

[1027] In some embodiments, wherein (a) comprises a nucleic acid encoding the polypeptide, the nucleic acid comprises a promoter in operative association with the nucleic acid encoding the polypeptide.

[1028] In some embodiments, the nucleic acid encoding the polypeptide comprises one or more second tissue-specific expression-control sequences specific to the target tissue in operative association with the polypeptide coding sequence.

[1029] In some embodiments, the one or more second tissue-specific expression-control sequences comprises a tissue specific promoter.

[1030] In some embodiments, the tissue-specific promoter is the promoter in operative association with the nucleic acid encoding the polypeptide.

[1031] In some embodiments, the one or more second tissue-specific expression-control sequences comprises a tissue-specific microRNA recognition sequence.

[1032] In some embodiments, the promoter in operative association with the nucleic acid encoding the polypeptide is a tissue-specific promoter, the system further comprising one or more tissue-specific microRNA recognition sequences.

[1033] In some embodiments, a nucleic acid component of a system provided by the invention is a sequence (e.g., encoding the polypeptide or comprising a heterologous object sequence) flanked by untranslated regions (UTRs) that modify protein expression levels. Various 5′ and 3′ UTRs can affect protein expression. For example, in some embodiments, the coding sequence may be preceded by a 5′ UTR that modifies RNA stability or protein translation. In some embodiments, the sequence may be followed by a 3′ UTR that modifies RNA stability or translation. In some embodiments, the sequence may be preceded by a 5′ UTR and followed by a 3′ UTR that modify RNA stability or translation. In some embodiments, the 5′ and/or 3′ UTR may be selected from the 5′ and 3′ UTRs of complement factor 3 (C3) (CACTCCTCCCCATCCTCTCCCTCTGTCCCTCTGTCCCTCTGACCCTGCACTGTCCCAGCACC (SEQ ID NO: 19262)) or orosomucoid 1 (ORM1) (CAGGACACAGCCTTGGATCAGGACAGAGACTTGGGGGCCATCCTGCCCCTCCAACCCGACA TGTGTACCTCAGCTTTTTCCCTCACTTGCATCAATAAAGCTTCTGTGTTTGGAACAGCTAA (SEQ ID NO: 19263)) (Asrani et al. RNA Biology 2018). In certain embodiments, the 5′ UTR is the 5′ UTR from C3 and the 3′ UTR is the 3′ UTR from ORM1. In certain embodiments, a 5′ UTR and 3′ UTR for protein expression, e.g., mRNA (or DNA encoding the RNA) for a gene modifying polypeptide or heterologous object sequence, comprise optimized expression sequences. In some embodiments, the 5′ UTR comprises GGGAAAUAAGAGAGAAAAGAAGAGUAAGAAGAAAUAUAAGAGCCACC (SEQ ID NO: 19264) and/or the 3′ UTR comprising UGAUAAUAGGCUGGAGCCUCGGUGGCCAUGCUUCUUGCCCCUUGGGCCUCCCCCCAGCCC CUCCUCCCCUUCCUGCACCCGUACCCCCGUGGUCUUUGAAUAAAGUCUGA (SEQ ID NO: 19265), e.g., as described in Richner et al. Cell 168(6): P1114-1125 (2017), the sequences of which are incorporated herein by reference.

[1034] In some embodiments, a 5′ and/or 3′ UTR may be selected to enhance protein expression. In some embodiments, a 5′ and/or 3′ UTR may be selected to modify protein expression such that overproduction inhibition is minimized. In some embodiments, UTRs are around a coding sequence, e.g., outside the coding sequence and in other embodiments proximal to the coding sequence, In some embodiments, additional regulatory elements (e.g., miRNA binding sites, cis-regulatory sites) are included in the UTRs.

[1035] In some embodiments, an open reading frame of a gene modifying system, e.g., an ORF of an mRNA (or DNA encoding an mRNA) encoding a gene modifying polypeptide or one or more ORFs of an mRNA (or DNA encoding an mRNA) of a heterologous object sequence, is flanked by a 5′ and/or 3′ untranslated region (UTR) that enhances the expression thereof. In some embodiments, the 5′ UTR of an mRNA component (or transcript produced from a DNA component) of the system comprises the sequence 5′-GGGAAAUAAGAGAGAAAAGAAGAGUAAGAAGAAAUAUAAGAGCCACC-3′ (SEQ ID NO: 19264). In some embodiments, the 3′ UTR of an mRNA component (or transcript produced from a DNA component) of the system comprises the sequence 5′-UGAUAAUAGGCUGGAGCCUCGGUGGCCAUGCUUCUUGCCCCUUGGGCCUCCCCCCAGCCC CUCCUCCCCUUCCUGCACCCGUACCCCCGUGGUCUUUGAAUAAAGUCUGA-3′ (SEQ ID NO: 19265). This combination of 5′ UTR and 3′ UTR has been shown to result in desirable expression of an operably linked ORF by Richner et al. Cell 168(6): P1114-1125 (2017), the teachings and sequences of which are incorporated herein by reference. In some embodiments, a system described herein comprises a DNA encoding a transcript, wherein the DNA comprises the corresponding 5′ UTR and 3′ UTR sequences, with T substituting for U in the above-listed sequence). In some embodiments, a DNA vector used to produce an RNA component of the system further comprises a promoter upstream of the 5′ UTR for initiating in vitro transcription, e.g, a T7, T3, or SP6 promoter. The 5′ UTR above begins with GGG, which is a suitable start for optimizing transcription using T7 RNA polymerase. For tuning transcription levels and altering the transcription start site nucleotides to fit alternative 5′ UTRs, the teachings of Davidson et al. Pac Symp Biocomput 433-443 (2010) describe T7 promoter variants, and the methods of discovery thereof, that fulfill both of these traits.

### Viral Vectors and Components Thereof

[1036] Viruses are a useful source of delivery vehicles for the systems described herein, in addition to a source of relevant enzymes or domains as described herein, e.g., as sources of polymerases and polymerase functions used herein, e.g., DNA-dependent DNA polymerase, RNA-dependent RNA polymerase, RNA-dependent DNA polymerase, DNA-dependent RNA polymerase, reverse transcriptase. Some enzymes, e.g., reverse transcriptases, may have multiple activities, e.g., be capable of both RNA-dependent DNA polymerization and DNA-dependent DNA polymerization, e.g., first and second strand synthesis. In some embodiments, the virus used as a gene modifying delivery system or a source of components thereof may be selected from a group as described by Baltimore Bacteriol Rev 35(3):235-241 (1971).

[1037] In some embodiments, the virus is selected from a Group I virus, e.g., is a DNA virus and packages dsDNA into virions. In some embodiments, the Group I virus is selected from, e.g., Adenoviruses, Herpesviruses, Poxviruses.

[1038] In some embodiments, the virus is selected from a Group II virus, e.g., is a DNA virus and packages ssDNA into virions. In some embodiments, the Group II virus is selected from, e.g., Parvoviruses. In some embodiments, the parvovirus is a dependoparvovirus, e.g., an adeno-associated virus (AAV).

[1039] In some embodiments, the virus is selected from a Group III virus, e.g., is an RNA virus and packages dsRNA into virions. In some embodiments, the Group III virus is selected from, e.g., Reoviruses. In some embodiments, one or both strands of the dsRNA contained in such virions is a coding molecule able to serve directly as mRNA upon transduction into a host cell, e.g., can be directly translated into protein upon transduction into a host cell without requiring any intervening nucleic acid replication or polymerization steps.

[1040] In some embodiments, the virus is selected from a Group IV virus, e.g., is an RNA virus and packages ssRNA(+) into virions. In some embodiments, the Group IV virus is selected from, e.g., Coronaviruses, Picornaviruses, Togaviruses. In some embodiments, the ssRNA(+) contained in such virions is a coding molecule able to serve directly as mRNA upon transduction into a host cell, e.g., can be directly translated into protein upon transduction into a host cell without requiring any intervening nucleic acid replication or polymerization steps.

[1041] In some embodiments, the virus is selected from a Group V virus, e.g., is an RNA virus and packages ssRNA(−) into virions. In some embodiments, the Group V virus is selected from, e.g., Orthomyxoviruses, Rhabdoviruses. In some embodiments, an RNA virus with an ssRNA(−) genome also carries an enzyme inside the virion that is transduced to host cells with the viral genome, e.g., an RNA-dependent RNA polymerase, capable of copying the ssRNA(−) into ssRNA(+) that can be translated directly by the host.

[1042] In some embodiments, the virus is selected from a Group VI virus, e.g., is a retrovirus and packages ssRNA(+) into virions. In some embodiments, the Group VI virus is selected from, e.g., retroviruses. In some embodiments, the retrovirus is a lentivirus, e.g., HIV-1, HIV-2, SIV, BIV. In some embodiments, the retrovirus is a spumavirus, e.g., a foamy virus, e.g., HFV, SFV, BFV. In some embodiments, the ssRNA(+) contained in such virions is a coding molecule able to serve directly as mRNA upon transduction into a host cell, e.g., can be directly translated into protein upon transduction into a host cell without requiring any intervening nucleic acid replication or polymerization steps. In some embodiments, the ssRNA(+) is first reverse transcribed and copied to generate a dsDNA genome intermediate from which mRNA can be transcribed in the host cell. In some embodiments, an RNA virus with an ssRNA(+) genome also carries an enzyme inside the virion that is transduced to host cells with the viral genome, e.g., an RNA-dependent DNA polymerase, capable of copying the ssRNA(+) into dsDNA that can be transcribed into mRNA and translated by the host. In some embodiments, the reverse transcriptase from a Group VI retrovirus is incorporated as the reverse transcriptase domain of a gene modifying polypeptide.

[1043] In some embodiments, the virus is selected from a Group VII virus, e.g., is a retrovirus and packages dsRNA into virions. In some embodiments, the Group VII virus is selected from, e.g., Hepadnaviruses. In some embodiments, one or both strands of the dsRNA contained in such virions is a coding molecule able to serve directly as mRNA upon transduction into a host cell, e.g., can be directly translated into protein upon transduction into a host cell without requiring any intervening nucleic acid replication or polymerization steps. In some embodiments, one or both strands of the dsRNA contained in such virions is first reverse transcribed and copied to generate a dsDNA genome intermediate from which mRNA can be transcribed in the host cell. In some embodiments, an RNA virus with a dsRNA genome also carries an enzyme inside the virion that is transduced to host cells with the viral genome, e.g., an RNA-dependent DNA polymerase, capable of copying the dsRNA into dsDNA that can be transcribed into mRNA and translated by the host. In some embodiments, the reverse transcriptase from a Group VII retrovirus is incorporated as the reverse transcriptase domain of a gene modifying polypeptide.

[1044] In some embodiments, virions used to deliver nucleic acid in this invention may also carry enzymes involved in the process of gene modification. For example, a retroviral virion may contain a reverse transcriptase domain that is delivered into a host cell along with the nucleic acid. In some embodiments, an RNA template may be associated with a gene modifying polypeptide within a virion, such that both are co-delivered to a target cell upon transduction of the nucleic acid from the viral particle. In some embodiments, the nucleic acid in a virion may comprise DNA, e.g., linear ssDNA, linear dsDNA, circular ssDNA, circular dsDNA, minicircle DNA, dbDNA, ceDNA. In some embodiments, the nucleic acid in a virion may comprise RNA, e.g., linear ssRNA, linear dsRNA, circular ssRNA, circular dsRNA. In some embodiments, a viral genome may circularize upon transduction into a host cell, e.g., a linear ssRNA molecule may undergo a covalent linkage to form a circular ssRNA, a linear dsRNA molecule may undergo a covalent linkage to form a circular dsRNA or one or more circular ssRNA. In some embodiments, a viral genome may replicate by rolling circle replication in a host cell. In some embodiments, a viral genome may comprise a single nucleic acid molecule, e.g., comprise a non-segmented genome. In some embodiments, a viral genome may comprise two or more nucleic acid molecules, e.g., comprise a segmented genome. In some embodiments, a nucleic acid in a virion may be associated with one or proteins. In some embodiments, one or more proteins in a virion may be delivered to a host cell upon transduction. In some embodiments, a natural virus may be adapted for nucleic acid delivery by the addition of virion packaging signals to the target nucleic acid, wherein a host cell is used to package the target nucleic acid containing the packaging signals.

[1045] In some embodiments, a virion used as a delivery vehicle may comprise a commensal human virus. In some embodiments, a virion used as a delivery vehicle may comprise an anellovirus, the use of which is described in WO2018232017A1, which is incorporated herein by reference in its entirety.

### AAV Administration

[1046] In some embodiments, an adeno-associated virus (AAV) is used in conjunction with the system, template nucleic acid, and/or polypeptide described herein. In some embodiments, an AAV is used to deliver, administer, or package the system, template nucleic acid, and/or polypeptide described herein. In some embodiments, the AAV is a recombinant AAV (rAAV).

[1047] In some embodiments, a system comprises (a) a polypeptide described herein or a nucleic acid encoding the same, (b) a template nucleic acid (e.g., template RNA) described herein, and (c) one or more first tissue-specific expression-control sequences specific to the target tissue, wherein the one or more first tissue-specific expression-control sequences specific to the target tissue are in operative association with (a), (b), or (a) and (b), wherein, when associated with (a), (a) comprises a nucleic acid encoding the polypeptide.

[1048] In some embodiments, a system described herein further comprises a first recombinant adeno-associated virus (rAAV) capsid protein; wherein the at least one of (a) or (b) is associated with the first rAAV capsid protein, wherein at least one of (a) or (b) is flanked by AAV inverted terminal repeats (ITRs).

[1049] In some embodiments, (a) and (b) are associated with the first rAAV capsid protein.

[1050] In some embodiments, (a) and (b) are on a single nucleic acid.

[1051] In some embodiments, the system further comprises a second rAAV capsid protein, wherein at least one of (a) or (b) is associated with the second rAAV capsid protein, and wherein the at least one of (a) or (b) associated with the second rAAV capsid protein is different from the at least one of (a) or (b) is associated with the first rAAV capsid protein.

[1052] In some embodiments, the at least one of (a) or (b) is associated with the first or second rAAV capsid protein is dispersed in the interior of the first or second rAAV capsid protein, which first or second rAAV capsid protein is in the form of an AAV capsid particle.

[1053] In some embodiments, the system further comprises a nanoparticle, wherein the nanoparticle is associated with at least one of (a) or (b).

[1054] In some embodiments, (a) and (b), respectively are associated with: a) a first rAAV capsid protein and a second rAAV capsid protein; b) a nanoparticle and a first rAAV capsid protein; c) a first rAAV capsid protein; d) a first adenovirus capsid protein; e) a first nanoparticle and a second nanoparticle; or f) a first nanoparticle.

[1055] Viral vectors are useful for delivering all or part of a system provided by the invention, e.g., for use in methods provided by the invention. Systems derived from different viruses have been employed for the delivery of polypeptides or nucleic acids; for example: integrase-deficient lentivirus, adenovirus, adeno-associated virus (AAV), herpes simplex virus, and baculovirus (reviewed in Hodge et al. Hum Gene Ther 2017; Narayanavari et al. Crit Rev Biochem Mol Biol 2017; Boehme et al. Curr Gene Ther 2015).

[1056] Adenoviruses are common viruses that have been used as gene delivery vehicles given well-defined biology, genetic stability, high transduction efficiency, and ease of large-scale production (see, for example, review by Lee et al. Genes & Diseases 2017). They possess linear dsDNA genomes and come in a variety of serotypes that differ in tissue and cell tropisms. In order to prevent replication of infectious virus in recipient cells, adenovirus genomes used for packaging are deleted of some or all endogenous viral proteins, which are provided in trans in viral production cells. This renders the genomes helper-dependent, meaning they can only be replicated and packaged into viral particles in the presence of the missing components provided by so-called helper functions. A helper-dependent adenovirus system with all viral ORFs removed may be compatible with packaging foreign DNA of up to ˜37 kb (Parks et al. J Virol 1997). In some embodiments, an adenoviral vector is used to deliver DNA corresponding to the polypeptide or template component of the gene modifying system, or both are contained on separate or the same adenoviral vector. In some embodiments, the adenovirus is a helper-dependent adenovirus (HD-AdV) that is incapable of self-packaging. In some embodiments, the adenovirus is a high-capacity adenovirus (HC-AdV) that has had all or a substantial portion of endogenous viral ORFs deleted, while retaining the necessary sequence components for packaging into adenoviral particles. For this type of vector, the only adenoviral sequences required for genome packaging are noncoding sequences: the inverted terminal repeats (ITRs) at both ends and the packaging signal at the 5′-end (Jager et al. Nat Protoc 2009). In some embodiments, the adenoviral genome also comprises stuffer DNA to meet a minimal genome size for optimal production and stability (see, for example, Hausl et al. Mol Ther 2010). In some embodiments, an adenovirus is used to deliver a gene modifying system to the liver.

[1057] In some embodiments, an adenovirus is used to deliver a gene modifying system to HSCs, e.g., HDAd5/35++. HDAd5/35++ is an adenovirus with modified serotype 35 fibers that de-target the vector from the liver (Wang et al. Blood Adv 2019). In some embodiments, the adenovirus that delivers a gene modifying system to HSCs utilizes a receptor that is expressed specifically on primitive HSCs, e.g., CD46.

[1058] Adeno-associated viruses (AAV) belong to the parvoviridae family and more specifically constitute the dependoparvovirus genus. The AAV genome is composed of a linear single-stranded DNA molecule which contains approximately 4.7 kilobases (kb) and consists of two major open reading frames (ORFs) encoding the non-structural Rep (replication) and structural Cap (capsid) proteins. A second ORF within the cap gene was identified that encodes the assembly-activating protein (AAP). The DNAs flanking the AAV coding regions are two cis-acting inverted terminal repeat (ITR) sequences, approximately 145 nucleotides in length, with interrupted palindromic sequences that can be folded into energetically stable hairpin structures that function as primers of DNA replication. In addition to their role in DNA replication, the ITR sequences have been shown to be involved in viral DNA integration into the cellular genome, rescue from the host genome or plasmid, and encapsidation of viral nucleic acid into mature virions (Muzyczka, (1992) Curr. Top. Micro. Immunol. 158:97-129). In some embodiments, one or more gene modifying nucleic acid components is flanked by ITRs derived from AAV for viral packaging. See, e.g., WO2019113310.

[1059] In some embodiments, one or more components of the gene modifying system are carried via at least one AAV vector. In some embodiments, the at least one AAV vector is selected for tropism to a particular cell, tissue, organism. In some embodiments, the AAV vector is pseudotyped, e.g., AAV2/8, wherein AAV2 describes the design of the construct but the capsid protein is replaced by that from AAV8. It is understood that any of the described vectors could be pseudotype derivatives, wherein the capsid protein used to package the AAV genome is derived from that of a different AAV serotype. Without wishing to be limited in vector choice, a list of exemplary AAV serotypes can be found in Table 18. In some embodiments, an AAV to be employed for gene modifying may be evolved for novel cell or tissue tropism as has been demonstrated in the literature (e.g., Davidsson et al. Proc Natl Acad Sci USA 2019).

[1060] In some embodiments, the AAV delivery vector is a vector which has two AAV inverted terminal repeats (ITRs) and a nucleotide sequence of interest (for example, a sequence coding for a gene modifying polypeptideor a DNA template, or both), each of said ITRs having an interrupted (or noncontiguous) palindromic sequence, i.e., a sequence composed of three segments: a first segment and a last segment that are identical when read 5′->3′ but hybridize when placed against each other, and a segment that is different that separates the identical segments. See, for example, WO2012123430.

[1061] Conventionally, AAV virions with capsids are produced by introducing a plasmid or plasmids encoding the rAAV or scAAV genome, Rep proteins, and Cap proteins (Grimm et al, 1998). Upon introduction of these helper plasmids in trans, the AAV genome is “rescued” (i.e., released and subsequently recovered) from the host genome, and is further encapsidated to produce infectious AAV. In some embodiments, one or more gene modifying nucleic acids are packaged into AAV particles by introducing the ITR-flanked nucleic acids into a packaging cell in conjunction with the helper functions.

[1062] In some embodiments, the AAV genome is a so called self-complementary genome (referred to as scAAV), such that the sequence located between the ITRs contains both the desired nucleic acid sequence (e.g., DNA encoding the gene modifying polypeptide or template, or both) in addition to the reverse complement of the desired nucleic acid sequence, such that these two components can fold over and self-hybridize. In some embodiments, the self-complementary modules are separated by an intervening sequence that permits the DNA to fold back on itself, e.g., forms a stem-loop. An scAAV has the advantage of being poised for transcription upon entering the nucleus, rather than being first dependent on ITR priming and second-strand synthesis to form dsDNA. In some embodiments, one or more gene modifying components is designed as an scAAV, wherein the sequence between the AAV ITRs contains two reverse complementing modules that can self-hybridize to create dsDNA.

[1063] In some embodiments, nucleic acid (e.g., encoding a polypeptide, or a template, or both) delivered to cells is closed-ended, linear duplex DNA (CELiD DNA or ceDNA). In some embodiments, ceDNA is derived from the replicative form of the AAV genome (Li et al. PLoS One 2013). In some embodiments, the nucleic acid (e.g., encoding a polypeptide, or a template DNA, or both) is flanked by ITRs, e.g., AAV ITRs, wherein at least one of the ITRs comprises a terminal resolution site and a replication protein binding site (sometimes referred to as a replicative protein binding site). In some embodiments, the ITRs are derived from an adeno-associated virus, e.g., AAV1, AAV2, AAV3, AAV4, AAV5, AAV6, AAV7, AAV8, AAV9, AAV10, AAV11, AAV12, or a combination thereof. In some embodiments, the ITRs are symmetric. In some embodiments, the ITRs are asymmetric. In some embodiments, at least one Rep protein is provided to enable replication of the construct. In some embodiments, the at least one Rep protein is derived from an adeno-associated virus, e.g., AAV1, AAV2, AAV3, AAV4, AAV5, AAV6, AAV7, AAV8, AAV9, AAV10, AAV11, AAV12, or a combination thereof. In some embodiments, ceDNA is generated by providing a production cell with (i) DNA flanked by ITRs, e.g., AAV ITRs, and (ii) components required for ITR-dependent replication, e.g., AAV proteins Rep78 and Rep52 (or nucleic acid encoding the proteins). In some embodiments, ceDNA is free of any capsid protein, e.g., is not packaged into an infectious AAV particle. In some embodiments, ceDNA is formulated into LNPs (see, for example, WO2019051289A1).

[1064] In some embodiments, the ceDNA vector consists of two self-complementary sequences, e.g., asymmetrical or symmetrical or substantially symmetrical ITRs as defined herein, flanking said expression cassette, wherein the ceDNA vector is not associated with a capsid protein. In some embodiments, the ceDNA vector comprises two self-complementary sequences found in an AAV genome, where at least one ITR comprises an operative Rep-binding element (RBE) (also sometimes referred to herein as “RBS”) and a terminal resolution site (trs) of AAV or a functional variant of the RBE. See, for example, WO2019113310.

[1065] In some embodiments, the AAV genome comprises two genes that encode four replication proteins and three capsid proteins, respectively. In some embodiments, the genes are flanked on either side by 145-bp inverted terminal repeats (ITRs). In some embodiments, the virion comprises up to three capsid proteins (Vp1, Vp2, and/or Vp3), e.g., produced in a 1:1:10 ratio. In some embodiments, the capsid proteins are produced from the same open reading frame and/or from differential splicing (Vp1) and alternative translational start sites (Vp2 and Vp3, respectively). Generally, Vp3 is the most abundant subunit in the virion and participates in receptor recognition at the cell surface defining the tropism of the virus. In some embodiments, Vp1 comprises a phospholipase domain, e.g., which functions in viral infectivity, in the N-terminus of Vp 1.

[1066] In some embodiments, packaging capacity of the viral vectors limits the size of the gene modifying system that can be packaged into the vector. For example, the packaging capacity of the AAVs can be about 4.5 kb (e.g., about 3.0, 3.5, 4.0, 4.5, 5.0, 5.5, or 6.0 kb), e.g., including one or two inverted terminal repeats (ITRs), e.g., 145 base ITRs.

[1067] In some embodiments, recombinant AAV (rAAV) comprises cis-acting 145-bp ITRs flanking vector transgene cassettes, e.g., providing up to 4.5 kb for packaging of foreign DNA. Subsequent to infection, rAAV can, in some instances, express a fusion protein of the invention and persist without integration into the host genome by existing episomally in circular head-to-tail concatemers. rAAV can be used, for example, in vitro and in vivo. In some embodiments, AAV-mediated gene delivery requires that the length of the coding sequence of the gene is equal or greater in size than the wild-type AAV genome.

[1068] AAV delivery of genes that exceed this size and/or the use of large physiological regulatory elements can be accomplished, for example, by dividing the protein(s) to be delivered into two or more fragments. In some embodiments, the N-terminal fragment is fused to an intein-N sequence. In some embodiments, the C-terminal fragment is fused to an intein-C sequence. In embodiments, the fragments are packaged into two or more AAV vectors.

[1069] In some embodiments, dual AAV vectors are generated by splitting a large transgene expression cassette in two separate halves (5′ and 3′ ends, or head and tail), e.g., wherein each half of the cassette is packaged in a single AAV vector (of <5 kb). The re-assembly of the full-length transgene expression cassette can, in some embodiments, then be achieved upon co-infection of the same cell by both dual AAV vectors. In some embodiments, co-infection is followed by one or more of: (1) homologous recombination (HR) between 5′ and 3′ genomes (dual AAV overlapping vectors); (2) ITR-mediated tail-to-head concatemerization of 5′ and 3′ genomes (dual AAV trans-splicing vectors); and/or (3) a combination of these two mechanisms (dual AAV hybrid vectors). In some embodiments, the use of dual AAV vectors in vivo results in the expression of full-length proteins. In some embodiments, the use of the dual AAV vector platform represents an efficient and viable gene transfer strategy for transgenes of greater than about 4.0, 4.1, 4.2, 4.3, 4.4, 4.5, 4.6, 4.7, 4.8, 4.9, or 5.0 kb in size. In some embodiments, AAV vectors can also be used to transduce cells with target nucleic acids, e.g., in the in vitro production of nucleic acids and peptides. In some embodiments, AAV vectors can be used for in vivo and ex vivo gene therapy procedures (see, e.g., West et al., Virology 160:38-47 (1987); U.S. Pat. No. 4,797,368; WO 93/24641; Kotin, Human Gene Therapy 5:793-801 (1994); Muzyczka, J. Clin. Invest. 94:1351 (1994); each of which is incorporated herein by reference in their entirety). The construction of recombinant AAV vectors is described in a number of publications, including U.S. Pat. No. 5,173,414; Tratschin et al., Mol. Cell. Biol. 5:3251-3260 (1985); Tratschin, et al., Mol. Cell. Biol. 4:2072-2081 (1984); Hermonat & Muzyczka, PNAS 81:6466-6470 (1984); and Samulski et al., J. Virol. 63:03822-3828 (1989) (incorporated by reference herein in their entirety).

[1070] In some embodiments, a gene modifying polypeptide described herein (e.g., with or without one or more guide nucleic acids) can be delivered using AAV, lentivirus, adenovirus or other plasmid or viral vector types, in particular, using formulations and doses from, for example, U.S. Pat. No. 8,454,972 (formulations, doses for adenovirus), U.S. Pat. No. 8,404,658 (formulations, doses for AAV) and U.S. Pat. No. 5,846,946 (formulations, doses for DNA plasmids) and from clinical trials and publications regarding the clinical trials involving lentivirus, AAV and adenovirus. For example, for AAV, the route of administration, formulation and dose can be as described in U.S. Pat. No. 8,454,972 and as in clinical trials involving AAV. For adenovirus, the route of administration, formulation and dose can be as described in U.S. Pat. No. 8,404,658 and as in clinical trials involving adenovirus. For plasmid delivery, the route of administration, formulation and dose can be as described in U.S. Pat. No. 5,846,946 and as in clinical studies involving plasmids. Doses can be based on or extrapolated to an average 70 kg individual (e.g. a male adult human), and can be adjusted for patients, subjects, mammals of different weight and species. Frequency of administration is within the ambit of the medical or veterinary practitioner (e.g., physician, veterinarian), depending on usual factors including the age, sex, general health, other conditions of the patient or subject and the particular condition or symptoms being addressed. In some embodiments, the viral vectors can be injected into the tissue of interest. For cell-type specific gene modifying, the expression of the gene modifying polypeptide and optional guide nucleic acid can, in some embodiments, be driven by a cell-type specific promoter.

[1071] In some embodiments, AAV allows for low toxicity, for example, due to the purification method not requiring ultracentrifugation of cell particles that can activate the immune response. In some embodiments, AAV allows low probability of causing insertional mutagenesis, for example, because it does not substantially integrate into the host genome.

[1072] In some embodiments, AAV has a packaging limit of about 4.4, 4.5, 4.6, 4.7, or 4.75 kb. In some embodiments, a gene modifying polypeptide-encoding sequence, promoter, and transcription terminator can fit into a single viral vector. SpCas9 (4.1 kb) may, in some instances, be difficult to package into AAV. Therefore, in some embodiments, a gene modifying polypeptide coding sequence is used that is shorter in length than other gene modifying polypeptide coding sequences or base editors. In some embodiments, the gene modifying polypeptide encoding sequences are less than about 4.5 kb, 4.4 kb, 4.3 kb, 4.2 kb, 4.1 kb, 4 kb, 3.9 kb, 3.8 kb, 3.7 kb, 3.6 kb, 3.5 kb, 3.4 kb, 3.3 kb, 3.2 kb, 3.1 kb, 3 kb, 2.9 kb, 2.8 kb, 2.7 kb, 2.6 kb, 2.5 kb, 2 kb, or 1.5 kb.

[1073] An AAV can be AAV1, AAV2, AAV5 or any combination thereof. In some embodiments, the type of AAV is selected with respect to the cells to be targeted; e.g., AAV serotypes 1, 2, 5 or a hybrid capsid AAV1, AAV2, AAV5 or any combination thereof can be selected for targeting brain or neuronal cells; or AAV4 can be selected for targeting cardiac tissue. In some embodiments, AAV8 is selected for delivery to the liver. Exemplary AAV serotypes as to these cells are described, for example, in Grimm, D. et al, J. Virol. 82: 5887-5911 (2008) (incorporated herein by reference in its entirety). In some embodiments, AAV refers all serotypes, subtypes, and naturally-occurring AAV as well as recombinant AAV. AAV may be used to refer to the virus itself or a derivative thereof. In some embodiments, AAV includes AAV1, AAV2, AAV3, AAV3B, AAV4, AAV5, AAV6, AAV6.2, AAV7, AAVrh.64R1, AAVhu.37, AAVrh.8, AAVrh.32.33, AAV8, AAV9, AAV-DJ, AAV2/8, AAVrh10, AAVLK3, AV10, AAV11, AAV12, rhO, and hybrids thereof, avian AAV, bovine AAV, canine AAV, equine AAV, primate AAV, non-primate AAV, and ovine AAV. The genomic sequences of various serotypes of AAV, as well as the sequences of the native terminal repeats (TRs), Rep proteins, and capsid subunits are known in the art. Such sequences may be found in the literature or in public databases such as GenBank. Additional exemplary AAV serotypes are listed in Table 18.

TABLE 18
Exemplary AAV serotypes.

| Target Tissue | Vehicle | Reference |
|---|---|---|
| Liver | AAV (AAV8¹, AAVrh.8¹, | 1. Wang et al., Mol. Ther. 18, |
| | AAVhu.37¹, AAV2/8, | 118-25 (2010) |
| | AAV2/rh10², AAV9, AAV2, | 2. Ginn et al., JHEP Reports, |
| | NP40³, NP59^{2, 3}, AAV3B⁵, | 100065 (2019) |
| | AAV-DJ⁴, AAV-LK01⁴, | 3. Paulk et al., Mol. Ther. 26, |
| | AAV-LK02⁴, AAV-LK03⁴, | 289-303 (2018). |
| | AAV-LK19⁴, AAV5⁷ | 4. L. Lisowski et al., Nature. |
| | Adenovirus (Ad5, HC-AdV⁶) | 506, 382-6 (2014). |
| | | 5. L. Wang et al., Mol. Ther. 23, |
| | | 1877-87 (2015). |
| | | 6. Hausl Mol Ther (2010) |
| | | 7. Davidoff et al., Mol. Ther. 11, |
| | | 875-88 (2005) |
| Lung | AAV (AAV4, AAV5, AAV6¹, | 1. Duncan et al., Mol Ther |
| | AAV9, H22²) | Methods Clin Dev (2018) |
| | Adenovirus (Ad5, Ad3, | 2. Cooney et al., Am J Respir |
| | Ad21, Ad14)³ | Cell Mol Biol (2019) |
| | | 3. Li et al., Mol Ther Methods |
| | | Clin Dev (2019) |
| Skin | AAV (AAV6¹, AAV-LK19²) | 1. Petek et al., Mol. Ther. (2010) |
| | | 2. L. Lisowski et al., Nature. |
| | | 506, 382-6 (2014). |
| HSCs | Adenovirus (HDAd5/35⁺⁺) | Wang et al. Blood Adv (2019) |

[1074] In some embodiments, a pharmaceutical composition (e.g., comprising an AAV as described herein) has less than 10% empty capsids, less than 8% empty capsids, less than 7% empty capsids, less than 5% empty capsids, less than 3% empty capsids, or less than 1% empty capsids. In some embodiments, the pharmaceutical composition has less than about 5% empty capsids. In some embodiments, the number of empty capsids is below the limit of detection. In some embodiments, it is advantageous for the pharmaceutical composition to have low amounts of empty capsids, e.g., because empty capsids may generate an adverse response (e.g., immune response, inflammatory response, liver response, and/or cardiac response), e.g., with little or no substantial therapeutic benefit.

[1075] In some embodiments, the residual host cell protein (rHCP) in the pharmaceutical composition is less than or equal to 100 ng/ml rHCP per 1×10¹³ vg/ml, e.g., less than or equal to 40 ng/ml rHCP per 1×10¹³ vg/ml or 1-50 ng/ml rHCP per 1×10¹³ vg/ml. In some embodiments, the pharmaceutical composition comprises less than 10 ng rHCP per 1.0×10¹³ vg, or less than 5 ng rHCP per 1.0×10¹³ vg, less than 4 ng rHCP per 1.0×10¹³ vg, or less than 3 ng rHCP per 1.0×10¹³ vg, or any concentration in between. In some embodiments, the residual host cell DNA (hcDNA) in the pharmaceutical composition is less than or equal to 5×10⁶ pg/ml hcDNA per 1×10¹³ vg/ml, less than or equal to 1.2×10⁶ pg/ml hcDNA per 1×10¹³ vg/ml, or 1×10⁵ pg/ml hcDNA per 1×10¹³ vg/ml. In some embodiments, the residual host cell DNA in said pharmaceutical composition is less than 5.0×10⁵ pg per 1×10¹³ vg, less than 2.0×10⁵ pg per 1.0×10¹³ vg, less than 1.1×10⁵ pg per 1.0×10¹³ vg, less than 1.0×10⁵ pg hcDNA per 1.0×10¹³ vg, less than 0.9×10⁵ pg hcDNA per 1.0×10¹³ vg, less than 0.8×10⁵ pg hcDNA per 1.0×10¹³ vg, or any concentration in between.

[1076] In some embodiments, the residual plasmid DNA in the pharmaceutical composition is less than or equal to 1.7×10⁵ pg/ml per 1.0×10¹³ vg/ml, or 1×10⁵ pg/ml per 1×1.0×10¹³ vg/ml, or 1.7×10⁶ pg/ml per 1.0×10¹³ vg/ml. In some embodiments, the residual DNA plasmid in the pharmaceutical composition is less than 10.0×10⁵ pg by 1.0×10¹³ vg, less than 8.0×10 5 pg by 1.0×10¹³ vg or less than 6.8×10⁵ pg by 1.0×10¹³ vg. In embodiments, the pharmaceutical composition comprises less than 0.5 ng per 1.0×10¹³ vg, less than 0.3 ng per 1.0×10¹³ vg, less than 0.22 ng per 1.0×10¹³ vg or less than 0.2 ng per 1.0×10¹³ vg or any intermediate concentration of bovine serum albumin (BSA). In embodiments, the benzonase in the pharmaceutical composition is less than 0.2 ng by 1.0×10¹³ vg, less than 0.1 ng by 1.0×10¹³ vg, less than 0.09 ng by 1.0×10¹³ vg, less than 0.08 ng by 1.0×10¹³ vg or any intermediate concentration. In embodiments, Poloxamer 188 in the pharmaceutical composition is about 10 to 150 ppm, about 15 to 100 ppm or about 20 to 80 ppm. In embodiments, the cesium in the pharmaceutical composition is less than 50 pg/g (ppm), less than 30 pg/g (ppm) or less than 20 pg/g (ppm) or any intermediate concentration.

[1077] In embodiments, the pharmaceutical composition comprises total impurities, e.g., as determined by SDS-PAGE, of less than 10%, less than 8%, less than 7%, less than 6%, less than 5%, less than 4%, less than 3%, less than 2%, or any percentage in between. In embodiments, the total purity, e.g., as determined by SDS-PAGE, is greater than 90%, greater than 92%, greater than 93%, greater than 94%, greater than 95%, greater than 96%, greater than 97%, greater than 98%, or any percentage in between. In embodiments, no single unnamed related impurity, e.g., as measured by SDS-PAGE, is greater than 5%, greater than 4%, greater than 3% or greater than 2%, or any percentage in between. In embodiments, the pharmaceutical composition comprises a percentage of filled capsids relative to total capsids (e.g., peak 1+peak 2 as measured by analytical ultracentrifugation) of greater than 85%, greater than 86%, greater than 87%, greater than 88%, greater than 89%, greater than 90%, greater than 91%, greater than 91.9%, greater than 92%, greater than 93%, or any percentage in between. In embodiments of the pharmaceutical composition, the percentage of filled capsids measured in peak 1 by analytical ultracentrifugation is 20-80%, 25-75%, 30-75%, 35-75%, or 37.4-70.3%. In embodiments of the pharmaceutical composition, the percentage of filled capsids measured in peak 2 by analytical ultracentrifugation is 20-80%, 20-70%, 22-65%, 24-62%, or 24.9-60.1%.

[1078] In one embodiment, the pharmaceutical composition comprises a genomic titer of 1.0 to 5.0×10¹³ vg/mL, 1.2 to 3.0×10¹³ vg/mL or 1.7 to 2.3×10¹³ vg/ml. In one embodiment, the pharmaceutical composition exhibits a biological load of less than 5 CFU/mL, less than 4 CFU/mL, less than 3 CFU/mL, less than 2 CFU/mL or less than 1 CFU/mL or any intermediate contraction. In embodiments, the amount of endotoxin according to USP, for example, USP<85> (incorporated by reference in its entirety) is less than 1.0 EU/mL, less than 0.8 EU/mL or less than 0.75 EU/mL. In embodiments, the osmolarity of a pharmaceutical composition according to USP, for example, USP<785> (incorporated by reference in its entirety) is 350 to 450 mOsm/kg, 370 to 440 mOsm/kg or 390 to 430 mOsm/kg. In embodiments, the pharmaceutical composition contains less than 1200 particles that are greater than 25 m per container, less than 1000 particles that are greater than 25 μm per container, less than 500 particles that are greater than 25 m per container or any intermediate value. In embodiments, the pharmaceutical composition contains less than 10,000 particles that are greater than 10 m per container, less than 8000 particles that are greater than 10 m per container or less than 600 particles that are greater than 10 μm per container.

[1079] In one embodiment, the pharmaceutical composition has a genomic titer of 0.5 to 5.0×10¹³ vg/mL, 1.0 to 4.0×10¹³ vg/mL, 1.5 to 3.0×10¹³ vg/ml or 1.7 to 2.3×10¹³ vg/ml. In one embodiment, the pharmaceutical composition described herein comprises one or more of the following: less than about 0.09 ng benzonase per 1.0×10¹³ vg, less than about 30 pg/g (ppm) of cesium, about 20 to 80 ppm Poloxamer 188, less than about 0.22 ng BSA per 1.0×10¹³ vg, less than about 6.8×10⁵ pg of residual DNA plasmid per 1.0×10¹³ vg, less than about 1.1×10⁵ pg of residual hcDNA per 1.0×10¹³ vg, less than about 4 ng of rHCP per 1.0×10¹³ vg, pH 7.7 to 8.3, about 390 to 430 mOsm/kg, less than about 600 particles that are >25 m in size per container, less than about 6000 particles that are >10 m in size per container, about 1.7×10¹³-2.3×10¹³ vg/mL genomic titer, infectious titer of about 3.9×10⁸ to 8.4×10¹⁰ IU per 1.0×10¹³ vg, total protein of about 100-300 pg per 1.0×10¹³ vg, mean survival of >24 days in A7SMA mice with about 7.5×10¹³ vg/kg dose of viral vector, about 70 to 130% relative potency based on an in vitro cell based assay and/or less than about 5% empty capsid. In various embodiments, the pharmaceutical compositions described herein comprise any of the viral particles discussed here, retain a potency of between ±20%, between ±15%, between ±10% or within ±5% of a reference standard. In some embodiments, potency is measured using a suitable in vitro cell assay or in vivo animal model.

[1080] Additional methods of preparation, characterization, and dosing AAV particles are taught in WO2019094253, which is incorporated herein by reference in its entirety.

[1081] Additional rAAV constructs that can be employed consonant with the invention include those described in Wang et al 2019, available at://doi.org/10.1038/s41573-019-0012-9, including Table 1 thereof, which is incorporated by reference in its entirety.

### Lipid Nanoparticles

[1082] The methods and systems provided herein may employ any suitable carrier or delivery modality, including, in certain embodiments, lipid nanoparticles (LNPs). Lipid nanoparticles, in some embodiments, comprise one or more ionic lipids, such as non-cationic lipids (e.g., neutral or anionic, or zwitterionic lipids); one or more conjugated lipids (such as PEG-conjugated lipids or lipids conjugated to polymers described in Table 5 of WO2019217941; incorporated herein by reference in its entirety); one or more sterols (e.g., cholesterol); and, optionally, one or more targeting molecules (e.g., conjugated receptors, receptor ligands, antibodies); or combinations of the foregoing.

[1083] Lipids that can be used in nanoparticle formations (e.g., lipid nanoparticles) include, for example those described in Table 4 of WO2019217941, which is incorporated by reference—e.g., a lipid-containing nanoparticle can comprise one or more of the lipids in Table 4 of WO2019217941. Lipid nanoparticles can include additional elements, such as polymers, such as the polymers described in Table 5 of WO2019217941, incorporated by reference.

[1084] In some embodiments, conjugated lipids, when present, can include one or more of PEG-diacylglycerol (DAG) (such as 1-(monomethoxy-polyethyleneglycol)-2,3-dimyristoylglycerol (PEG-DMG)), PEG-dialkyloxypropyl (DAA), PEG-phospholipid, PEG-ceramide (Cer), a pegylated phosphatidylethanoloamine (PEG-PE), PEG succinate diacylglycerol (PEGS-DAG) (such as 4-0-(2′,3′-di(tetradecanoyloxy)propyl-1-0-(w-methoxy(polyethoxy)ethyl) butanedioate (PEG-S-DMG)), PEG dialkoxypropylcarbam, N-(carbonyl-methoxypoly ethylene glycol 2000)-1,2-distearoyl-sn-glycero-3-phosphoethanolamine sodium salt, and those described in Table 2 of WO2019051289 (incorporated by reference), and combinations of the foregoing.

[1085] In some embodiments, sterols that can be incorporated into lipid nanoparticles include one or more of cholesterol or cholesterol derivatives, such as those in WO2009/127060 or US2010/0130588, which are incorporated by reference. Additional exemplary sterols include phytosterols, including those described in Eygeris et al (2020), dx.doi.org/10.1021/acs.nanolett.0c01386, incorporated herein by reference.

[1086] In some embodiments, the lipid particle comprises an ionizable lipid, a non-cationic lipid, a conjugated lipid that inhibits aggregation of particles, and a sterol. The amounts of these components can be varied independently and to achieve desired properties. For example, in some embodiments, the lipid nanoparticle comprises an ionizable lipid is in an amount from about 20 mol % to about 90 mol % of the total lipids (in other embodiments it may be 20-70% (mol), 30-60% (mol) or 40-50% (mol); about 50 mol % to about 90 mol % of the total lipid present in the lipid nanoparticle), a non-cationic lipid in an amount from about 5 mol % to about 30 mol % of the total lipids, a conjugated lipid in an amount from about 0.5 mol % to about 20 mol % of the total lipids, and a sterol in an amount from about 20 mol % to about 50 mol % of the total lipids. The ratio of total lipid to nucleic acid (e.g., encoding the gene modifying polypeptide or template nucleic acid) can be varied as desired. For example, the total lipid to nucleic acid (mass or weight) ratio can be from about 10:1 to about 30:1.

[1087] In some embodiments, an ionizable lipid may be a cationic lipid, an ionizable cationic lipid, e.g., a cationic lipid that can exist in a positively charged or neutral form depending on pH, or an amine-containing lipid that can be readily protonated. In some embodiments, the cationic lipid is a lipid capable of being positively charged, e.g., under physiological conditions. Exemplary cationic lipids include one or more amine group(s) which bear the positive charge. In some embodiments, the lipid particle comprises a cationic lipid in formulation with one or more of neutral lipids, ionizable amine-containing lipids, biodegradable alkyn lipids, steroids, phospholipids including polyunsaturated lipids, structural lipids (e.g., sterols), PEG, cholesterol and polymer conjugated lipids. In some embodiments, the cationic lipid may be an ionizable cationic lipid. An exemplary cationic lipid as disclosed herein may have an effective pKa over 6.0. In embodiments, a lipid nanoparticle may comprise a second cationic lipid having a different effective pKa (e.g., greater than the first effective pKa), than the first cationic lipid. A lipid nanoparticle may comprise between 40 and 60 mol percent of a cationic lipid, a neutral lipid, a steroid, a polymer conjugated lipid, and a therapeutic agent, e.g., a nucleic acid (e.g., RNA) described herein (e.g., a template nucleic acid or a nucleic acid encoding a gene modifying polypeptide), encapsulated within or associated with the lipid nanoparticle. In some embodiments, the nucleic acid is co-formulated with the cationic lipid. The nucleic acid may be adsorbed to the surface of an LNP, e.g., an LNP comprising a cationic lipid. In some embodiments, the nucleic acid may be encapsulated in an LNP, e.g., an LNP comprising a cationic lipid. In some embodiments, the lipid nanoparticle may comprise a targeting moiety, e.g., coated with a targeting agent. In embodiments, the LNP formulation is biodegradable. In some embodiments, a lipid nanoparticle comprising one or more lipid described herein, e.g., Formula (i), (ii), (ii), (vii) and/or (ix) encapsulates at least 1%, at least 5%, at least 10%, at least 20%, at least 30%, at least 40%, at least 50%, at least 60%, at least 70%, at least 80%, at least 90%, at least 92%, at least 95%, at least 97%, at least 98% or 100% of an RNA molecule, e.g., template RNA and/or a mRNA encoding the gene modifying polypeptide.

[1088] In some embodiments, the lipid to nucleic acid ratio (mass/mass ratio; w/w ratio) can be in the range of from about 1:1 to about 25:1, from about 10:1 to about 14:1, from about 3:1 to about 15:1, from about 4:1 to about 10:1, from about 5:1 to about 9:1, or about 6:1 to about 9:1. The amounts of lipids and nucleic acid can be adjusted to provide a desired N/P ratio, for example, N/P ratio of 3, 4, 5, 6, 7, 8, 9, 10 or higher. Generally, the lipid nanoparticle formulation's overall lipid content can range from about 5 mg/ml to about 30 mg/mL.

[1089] Exemplary ionizable lipids that can be used in lipid nanoparticle formulations include, without limitation, those listed in Table 1 of WO2019051289, incorporated herein by reference. Additional exemplary lipids include, without limitation, one or more of the following formulae: X of US2016/0311759; I of US20150376115 or in US2016/0376224; I, II or III of US20160151284; I, IA, II, or IIA of US20170210967; I-c of US20150140070; A of US2013/0178541; I of US2013/0303587 or US2013/0123338; I of US2015/0141678; II, III, IV, or V of US2015/0239926; I of US2017/0119904; I or II of WO2017/117528; A of US2012/0149894; A of US2015/0057373; A of WO2013/116126; A of US2013/0090372; A of US2013/0274523; A of US2013/0274504; A of US2013/0053572; A of WO2013/016058; A of WO2012/162210; I of US2008/042973; I, II, III, or IV of US2012/01287670; I or II of US2014/0200257; I, II, or III of US2015/0203446; I or III of US2015/0005363; I, IA, IB, IC, ID, II, IIA, IIB, IIC, IID, or III-XXIV of US2014/0308304; of US2013/0338210; I, II, III, or IV of WO2009/132131; A of US2012/01011478; I or XXXV of US2012/0027796; XIV or XVII of US2012/0058144; of US2013/0323269; I of US2011/0117125; I, II, or III of US2011/0256175; I, II, III, IV, V, VI, VII, VIII, IX, X, XI, XII of US2012/0202871; I, II, III, IV, V, VI, VII, VIII, X, XII, XIII, XIV, XV, or XVI of US2011/0076335; I or II of US2006/008378; I of US2013/0123338; I or X-A-Y-Z of US2015/0064242; XVI, XVII, or XVIII of US2013/0022649; I, II, or III of US2013/0116307; I,II, or III of US2013/0116307; I or II of US2010/0062967; I-X of US2013/0189351; I of US2014/0039032; V of US2018/0028664; I of US2016/0317458; I of US2013/0195920; 5, 6, or 10 of U.S. Pat. No. 10,221,127; III-3 of WO2018/081480; I-5 or I-8 of WO2020/081938; 18 or 25 of U.S. Pat. No. 9,867,888; A of US2019/0136231; II of WO2020/219876; I of US2012/0027803; OF-02 of US2019/0240349; 23 of U.S. Pat. No. 10,086,013; cKK-E12/A6 of Miao et al (2020); C12-200 of WO2010/053572; 7C1 of Dahlman et al (2017); 304-O13 or 503-O13 of Whitehead et al; TS-P4C2 of U.S. Pat. No. 9,708,628; I of WO2020/106946; I of WO2020/106946.

[1090] In some embodiments, the ionizable lipid is MC3 (6Z,9Z,28Z,3 1Z)-heptatriaconta-6,9,28,3 1-tetraen-19-yl-4-(dimethylamino) butanoate (DLin-MC3-DMA or MC3), e.g., as described in Example 9 of WO2019051289A9 (incorporated by reference herein in its entirety). In some embodiments, the ionizable lipid is the lipid ATX-002, e.g., as described in Example 10 of WO2019051289A9 (incorporated by reference herein in its entirety). In some embodiments, the ionizable lipid is (13Z,16Z)-A,A-dimethyl-3-nonyldocosa-13, 16-dien-1-amine (Compound 32), e.g., as described in Example 11 of WO2019051289A9 (incorporated by reference herein in its entirety). In some embodiments, the ionizable lipid is Compound 6 or Compound 22, e.g., as described in Example 12 of WO2019051289A9 (incorporated by reference herein in its entirety). In some embodiments, the ionizable lipid is heptadecan-9-yl 8-((2-hydroxyethyl)(6-oxo-6-(undecyloxy)hexyl)amino)octanoate (SM-102); e.g., as described in Example 1 of U.S. Pat. No. 9,867,888 (incorporated by reference herein in its entirety). In some embodiments, the ionizable lipid is 9Z,12Z)-3-((4,4-bis(octyloxy)butanoyl)oxy)-2-((((3-(diethylamino)propoxy)carbonyl)oxy)methyl)propyl octadeca-9,12-dienoate (LP01) e.g., as synthesized in Example 13 of WO2015/095340 (incorporated by reference herein in its entirety). In some embodiments, the ionizable lipid is Di((Z)-non-2-en-1-yl) 9-((4-dimethylamino)butanoyl)oxy)heptadecanedioate (L319), e.g. as synthesized in Example 7, 8, or 9 of US2012/0027803 (incorporated by reference herein in its entirety). In some embodiments, the ionizable lipid is 1,1′-((2-(4-(2-((2-(Bis(2-hydroxydodecyl)amino)ethyl)(2-hydroxydodecyl)amino)ethyl)piperazin-1-yl)ethyl)azanediyl)bis(dodecan-2-ol) (C12-200), e.g., as synthesized in Examples 14 and 16 of WO2010/053572 (incorporated by reference herein in its entirety). In some embodiments, the ionizable lipid is; Imidazole cholesterol ester (ICE) lipid (3S,10R, 13R, 17R)-10, 13-dimethyl-17-((R)-6-methylheptan-2-yl)-2, 3, 4, 7, 8, 9, 10, 11, 12, 13, 14, 15, 16, 17-tetradecahydro-1H-cyclopenta[a]phenanthren-3-yl 3-(1H-imidazol-4-yl)propanoate, e.g., Structure (I) from WO2020/106946 (incorporated by reference herein in its entirety).

[1091] Some non-limiting examples of lipid compounds that may be used (e.g., in combination with other lipid components) to form lipid nanoparticles for the delivery of compositions described herein, e.g., nucleic acid (e.g., RNA) described herein (e.g., a template nucleic acid or a nucleic acid encoding a gene modifying polypeptide) includes,

[chemical structure]

[1092] In some embodiments an LNP comprising Formula (i) is used to deliver a gene modifying composition described herein to the liver and/or hepatocyte cells.

[chemical structure]

[1093] In some embodiments an LNP comprising Formula (ii) is used to deliver a gene modifying composition described herein to the liver and/or hepatocyte cells.

[chemical structure]

[1094] In some embodiments an LNP comprising Formula (iii) is used to deliver a gene modifying composition described herein to the liver and/or hepatocyte cells.

[chemical structure]

[1095] In some embodiments an LNP comprising Formula (v) is used to deliver a gene modifying composition described herein to the liver and/or hepatocyte cells.

[chemical structure]

[1096] In some embodiments an LNP comprising Formula (vi) is used to deliver a gene modifying composition described herein to the liver and/or hepatocyte cells.

[chemical structure]

[1097] In some embodiments an LNP comprising Formula (viii) is used to deliver a gene modifying composition described herein to the liver and/or hepatocyte cells.

[chemical structure]

[1098] In some embodiments an LNP comprising Formula (ix) is used to deliver a gene modifying composition described herein to the liver and/or hepatocyte cells.

[chemical structure]

[1099] wherein
[1100] X¹ is O, NR¹, or a direct bond, X² is C2-5 alkylene, X³ is C(═O) or a direct bond, R¹ is H or Me, R3 is Ci-3 alkyl, R² is Ci-3 alkyl, or R² taken together with the nitrogen atom to which it is attached and 1-3 carbon atoms of X² form a 4-, 5-, or 6-membered ring, or X¹ is NR¹, R¹ and R² taken together with the nitrogen atoms to which they are attached form a 5- or 6-membered ring, or r² taken together with R³ and the nitrogen atom to which they are attached form a 5-, 6-, or 7-membered ring, Y¹ is C2-12 alkylene, Y² is selected from

[chemical structure]

[1101] n is 0 to 3, R⁴ is Ci-15 alkyl, Z¹ is Ci-6 alkylene or a direct bond,

[chemical structure]

[1102] Z² is
[1103] (in either orientation) or absent, provided that if Z¹ is a direct bond, Z² is absent;
[1104] R⁵ is C5-9 alkyl or C6-10 alkoxy, R⁶ is C5-9 alkyl or C6-10 alkoxy, W is methylene or a direct bond, and
[1105] R⁷ is H or Me, or a salt thereof, provided that if R and R² are C2 alkyls, X¹ is O, X² is linear C3 alkylene,
[1106] X³ is C(═O), Y¹ is linear Ce alkylene, (Y²)ₙ—R⁴ is

[chemical structure]

[1107] R⁴ is linear C5 alkyl, Z¹ is C2 alkylene, Z² is absent, W is methylene, and R is H, then R⁵ and R⁶ are not Cx alkoxy.

[1108] In some embodiments an LNP comprising Formula (xii) is used to deliver a gene modifying composition described herein to the liver and/or hepatocyte cells.

[chemical structure]

[1109] In some embodiments an LNP comprising Formula (xi) is used to deliver a gene modifying composition described herein to the liver and/or hepatocyte cells.

[chemical structure]

[1110] In some embodiments an LNP comprises a compound of Formula (xiii) and a compound of Formula (xiv).

[chemical structure]

[1111] In some embodiments an LNP comprising Formula (xv) is used to deliver a gene modifying composition described herein to the liver and/or hepatocyte cells.

[chemical structure]

[1112] In some embodiments an LNP comprising a formulation of Formula (xvi) is used to deliver a gene modifying composition described herein to the lung endothelial cells.

[chemical structure]

[chemical structure]

[1113] In some embodiments, a lipid compound used to form lipid nanoparticles for the delivery of compositions described herein, e.g., nucleic acid (e.g., RNA) described herein (e.g., a template nucleic acid or a nucleic acid encoding a gene modifying polypeptide) is made by one of the following reactions:

[chemical structure]

[1114] Exemplary non-cationic lipids include, but are not limited to, distearoyl-sn-glycero-phosphoethanolamine, distearoylphosphatidylcholine (DSPC), dioleoylphosphatidylcholine (DOPC), dipalmitoylphosphatidylcholine (DPPC), dioleoylphosphatidylglycerol (DOPG), dipalmitoylphosphatidylglycerol (DPPG), dioleoyl-phosphatidylethanolamine (DOPE), 1,2-dioleoyl-sn-glycero-3-phosphoethanolamine (DOPE), palmitoyloleoylphosphatidylcholine (POPC), palmitoyloleoylphosphatidylethanolamine (POPE), dioleoyl-phosphatidylethanolamine 4-(N-maleimidomethyl)-cyclohexane-1-carboxylate (DOPE-mal), dipalmitoyl phosphatidyl ethanolamine (DPPE), dimyristoylphosphoethanolamine (DMPE), distearoyl-phosphatidyl-ethanolamine (DSPE), monomethyl-phosphatidylethanolamine (such as 16-O-monomethyl PE), dimethyl-phosphatidylethanolamine (such as 16-O-dimethyl PE), 18-1-trans PE, 1-stearoyl-2-oleoyl-phosphatidyethanolamine (SOPE), hydrogenated soy phosphatidylcholine (HSPC), egg phosphatidylcholine (EPC), dioleoylphosphatidylserine (DOPS), sphingomyelin (SM), dimyristoyl phosphatidylcholine (DMPC), dimyristoyl phosphatidylglycerol (DMPG), distearoylphosphatidylglycerol (DSPG), dierucoylphosphatidylcholine (DEPC), palmitoyloleyolphosphatidylglycerol (POPG), dielaidoyl-phosphatidylethanolamine (DEPE), lecithin, phosphatidylethanolamine, lysolecithin, lysophosphatidylethanolamine, phosphatidylserine, phosphatidylinositol, sphingomyelin, egg sphingomyelin (ESM), cephalin, cardiolipin, phosphatidicacid,cerebrosides, dicetylphosphate, lysophosphatidylcholine, dilinoleoylphosphatidylcholine, or mixtures thereof. It is understood that other diacylphosphatidylcholine and diacylphosphatidylethanolamine phospholipids can also be used. The acyl groups in these lipids are preferably acyl groups derived from fatty acids having C10-C24 carbon chains, e.g., lauroyl, myristoyl, paimitoyl, stearoyl, or oleoyl. Additional exemplary lipids, in certain embodiments, include, without limitation, those described in Kim et al. (2020) dx.doi.org/10.1021/acs.nanolett.0c01386, incorporated herein by reference. Such lipids include, in some embodiments, plant lipids found to improve liver transfection with mRNA (e.g., DGTS). In some embodiments, the non-cationic lipid may have the following structure,

[chemical structure]

[1115] Other examples of non-cationic lipids suitable for use in the lipid nanoparticles include, without limitation, nonphosphorous lipids such as, e.g., stearylamine, dodecylamine, hexadecylamine, acetyl palmitate, glycerol ricinoleate, hexadecyl stereate, isopropyl myristate, amphoteric acrylic polymers, triethanolamine-lauryl sulfate, alkyl-aryl sulfate polyethyloxylated fatty acid amides, dioctadecyl dimethyl ammonium bromide, ceramide, sphingomyelin, and the like. Other non-cationic lipids are described in WO2017/099823 or US patent publication US2018/0028664, the contents of which is incorporated herein by reference in their entirety.

[1116] In some embodiments, the non-cationic lipid is oleic acid or a compound of Formula I, II, or IV of US2018/0028664, incorporated herein by reference in its entirety. The non-cationic lipid can comprise, for example, 0-30% (mol) of the total lipid present in the lipid nanoparticle. In some embodiments, the non-cationic lipid content is 5-20% (mol) or 10-15% (mol) of the total lipid present in the lipid nanoparticle. In embodiments, the molar ratio of ionizable lipid to the neutral lipid ranges from about 2:1 to about 8:1 (e.g., about 2:1, 3:1, 4:1, 5:1, 6:1, 7:1, or 8:1).

[1117] In some embodiments, the lipid nanoparticles do not comprise any phospholipids.

[1118] In some aspects, the lipid nanoparticle can further comprise a component, such as a sterol, to provide membrane integrity. One exemplary sterol that can be used in the lipid nanoparticle is cholesterol and derivatives thereof. Non-limiting examples of cholesterol derivatives include polar analogues such as 5α-choiestanol, 53-coprostanol, choiesteryl-(2-hydroxy)-ethyl ether, choiesteryl-(4′-hydroxy)-butyl ether, and 6-ketocholestanol; non-polar analogues such as 5α-cholestane, cholestenone, 5α-cholestanone, 5p-cholestanone, and cholesteryl decanoate; and mixtures thereof. In some embodiments, the cholesterol derivative is a polar analogue, e.g., choiesteryl-(4′-hydroxy)-butyl ether. Exemplary cholesterol derivatives are described in PCT publication WO2009/127060 and US patent publication US2010/0130588, each of which is incorporated herein by reference in its entirety.

[1119] In some embodiments, the component providing membrane integrity, such as a sterol, can comprise 0-50% (mol) (e.g., 0-10%, 10-20%, 20-30%, 30-40%, or 40-50%) of the total lipid present in the lipid nanoparticle. In some embodiments, such a component is 20-50% (mol) 30-40% (mol) of the total lipid content of the lipid nanoparticle.

[1120] In some embodiments, the lipid nanoparticle can comprise a polyethylene glycol (PEG) or a conjugated lipid molecule. Generally, these are used to inhibit aggregation of lipid nanoparticles and/or provide steric stabilization. Exemplary conjugated lipids include, but are not limited to, PEG-lipid conjugates, polyoxazoline (POZ)-lipid conjugates, polyamide-lipid conjugates (such as ATTA-lipid conjugates), cationic-polymer lipid (CPL) conjugates, and mixtures thereof. In some embodiments, the conjugated lipid molecule is a PEG-lipid conjugate, for example, a (methoxy polyethylene glycol)-conjugated lipid.

[1121] Exemplary PEG-lipid conjugates include, but are not limited to, PEG-diacylglycerol (DAG) (such as 1-(monomethoxy-polyethyleneglycol)-2,3-dimyristoylglycerol (PEG-DMG)), PEG-dialkyloxypropyl (DAA), PEG-phospholipid, PEG-ceramide (Cer), a pegylated phosphatidylethanoloamine (PEG-PE), 1,2-dimyristoyl-sn-glycerol, methoxypoly ethylene glycol (DMG-PEG-2K), PEG succinate diacylglycerol (PEGS-DAG) (such as 4-0-(2′,3′-di(tetradecanoyloxy)propyl-1-0-(w-methoxy(polyethoxy)ethyl) butanedioate (PEG-S-DMG)), PEG dialkoxypropylcarbam, N-(carbonyl-methoxypolyethylene glycol 2000)-1,2-distearoyl-sn-glycero-3-phosphoethanolamine sodium salt, or a mixture thereof. Additional exemplary PEG-lipid conjugates are described, for example, in U.S. Pat. Nos. 5,885,613, 6,287,591, US2003/0077829, US2003/0077829, US2005/0175682, US2008/0020058, US2011/0117125, US2010/0130588, US2016/0376224, US2017/0119904, and US/099823, the contents of all of which are incorporated herein by reference in their entirety. In some embodiments, a PEG-lipid is a compound of Formula III, III-α-I, III-α-2, III-b-1, III-b-2, or V of US2018/0028664, the content of which is incorporated herein by reference in its entirety. In some embodiments, a PEG-lipid is of Formula II of US20150376115 or US2016/0376224, the content of both of which is incorporated herein by reference in its entirety. In some embodiments, the PEG-DAA conjugate can be, for example, PEG-dilauryloxypropyl, PEG-dimyristyloxypropyl, PEG-dipalmityloxypropyl, or PEG-distearyloxypropyl.

[1122] The PEG-lipid can be one or more of PEG-DMG, PEG-dilaurylglycerol, PEG-dipalmitoylglycerol, PEG-disterylglycerol, PEG-dilaurylglycamide, PEG-dimyristylglycamide, PEG-dipalmitoylglycamide, PEG-disterylglycamide, PEG-cholesterol (1-[8′-(Cholest-5-en-3[beta]-oxy)carboxamido-3′,6′-dioxaoctanyl]carbamoyl-[omega]-methyl-poly(ethylene glycol), PEG-DMB (3,4-Ditetradecoxylbenzyl-[omega]-methyl-poly(ethylene glycol) ether), and 1,2-dimyristoyl-sn-glycero-3-phosphoethanolamine-N-[methoxy(polyethylene glycol)-2000]. In some embodiments, the PEG-lipid comprises PEG-DMG, 1,2-dimyristoyl-sn-glycero-3-phosphoethanolamine-N-[methoxy(polyethylene glycol)-2000]. In some embodiments, the PEG-lipid comprises a structure selected from:

[chemical structure]

[1123] In some embodiments, lipids conjugated with a molecule other than a PEG can also be used in place of PEG-lipid. For example, polyoxazoline (POZ)-lipid conjugates, polyamide-lipid conjugates (such as ATTA-lipid conjugates), and cationic-polymer lipid (GPL) conjugates can be used in place of or in addition to the PEG-lipid.

[1124] Exemplary conjugated lipids, i.e., PEG-lipids, (POZ)-lipid conjugates, ATTA-lipid conjugates and cationic polymer-lipids are described in the PCT and LIS patent applications listed in Table 2 of WO2019051289A9 and in WO2020106946A1, the contents of all of which are incorporated herein by reference in their entirety.

[1125] In some embodiments an LNP comprises a compound of Formula (xix), a compound of Formula (xxi) and a compound of Formula (xxv). In some embodiments an LNP comprising a formulation of Formula (xix), Formula (xxi) and Formula (xxv) is used to deliver a gene modifying composition described herein to the lung or pulmonary cells.

[1126] In some embodiments, a lipid nanoparticle may comprise one or more cationic lipids selected from Formula (i), Formula (ii), Formula (iii), Formula (vii), and Formula (ix). In some embodiments, the LNP may further comprise one or more neutral lipid, e.g., DSPC, DPPC, DMPC, DOPC, POPC, DOPE, SM, a steroid, e.g., cholesterol, and/or one or more polymer conjugated lipid, e.g., a pegylated lipid, e.g., PEG-DAG, PEG-PE, PEG-S-DAG, PEG-cer or a PEG dialkyoxypropylcarbamate.

[1127] In some embodiments, the PEG or the conjugated lipid can comprise 0-20% (mol) of the total lipid present in the lipid nanoparticle. In some embodiments, PEG or the conjugated lipid content is 0.5-10% or 2-5% (mol) of the total lipid present in the lipid nanoparticle. Molar ratios of the ionizable lipid, non-cationic-lipid, sterol, and PEG/conjugated lipid can be varied as needed. For example, the lipid particle can comprise 30-70% ionizable lipid by mole or by total weight of the composition, 0-60% cholesterol by mole or by total weight of the composition, 0-30% non-cationic-lipid by mole or by total weight of the composition and 1-10% conjugated lipid by mole or by total weight of the composition. Preferably, the composition comprises 30-40% ionizable lipid by mole or by total weight of the composition, 40-50% cholesterol by mole or by total weight of the composition, and 10-20% non-cationic-lipid by mole or by total weight of the composition. In some other embodiments, the composition is 50-75% ionizable lipid by mole or by total weight of the composition, 20-40% cholesterol by mole or by total weight of the composition, and 5 to 10% non-cationic-lipid, by mole or by total weight of the composition and 1-10% conjugated lipid by mole or by total weight of the composition. The composition may contain 60-70% ionizable lipid by mole or by total weight of the composition, 25-35% cholesterol by mole or by total weight of the composition, and 5-10% non-cationic-lipid by mole or by total weight of the composition. The composition may also contain up to 90% ionizable lipid by mole or by total weight of the composition and 2 to 15% non-cationic lipid by mole or by total weight of the composition. The formulation may also be a lipid nanoparticle formulation, for example comprising 8-30% ionizable lipid by mole or by total weight of the composition, 5-30% non-cationic lipid by mole or by total weight of the composition, and 0-20% cholesterol by mole or by total weight of the composition; 4-25% ionizable lipid by mole or by total weight of the composition, 4-25% non-cationic lipid by mole or by total weight of the composition, 2 to 25% cholesterol by mole or by total weight of the composition, 10 to 35% conjugate lipid by mole or by total weight of the composition, and 5% cholesterol by mole or by total weight of the composition; or 2-30% ionizable lipid by mole or by total weight of the composition, 2-30% non-cationic lipid by mole or by total weight of the composition, 1 to 15% cholesterol by mole or by total weight of the composition, 2 to 35% conjugate lipid by mole or by total weight of the composition, and 1-20% cholesterol by mole or by total weight of the composition; or even up to 90% ionizable lipid by mole or by total weight of the composition and 2-10% non-cationic lipids by mole or by total weight of the composition, or even 100% cationic lipid by mole or by total weight of the composition. In some embodiments, the lipid particle formulation comprises ionizable lipid, phospholipid, cholesterol and a PEG-ylated lipid in a molar ratio of 50:10:38.5:1.5. In some other embodiments, the lipid particle formulation comprises ionizable lipid, cholesterol and a PEG-ylated lipid in a molar ratio of 60:38.5:1.5.

[1128] In some embodiments, the lipid particle comprises ionizable lipid, non-cationic lipid (e.g. phospholipid), a sterol (e.g., cholesterol) and a PEG-ylated lipid, where the molar ratio of lipids ranges from 20 to 70 mole percent for the ionizable lipid, with a target of 40-60, the mole percent of non-cationic lipid ranges from 0 to 30, with a target of 0 to 15, the mole percent of sterol ranges from 20 to 70, with a target of 30 to 50, and the mole percent of PEG-ylated lipid ranges from 1 to 6, with a target of 2 to 5.

[1129] In some embodiments, the lipid particle comprises ionizable lipid/non-cationic-lipid/sterol/conjugated lipid at a molar ratio of 50:10:38.5:1.5.

[1130] In an aspect, the disclosure provides a lipid nanoparticle formulation comprising phospholipids, lecithin, phosphatidylcholine and phosphatidylethanolamine.

[1131] In some embodiments, one or more additional compounds can also be included. Those compounds can be administered separately or the additional compounds can be included in the lipid nanoparticles of the invention. In other words, the lipid nanoparticles can contain other compounds in addition to the nucleic acid or at least a second nucleic acid, different than the first. Without limitations, other additional compounds can be selected from the group consisting of small or large organic or inorganic molecules, monosaccharides, disaccharides, trisaccharides, oligosaccharides, polysaccharides, peptides, proteins, peptide analogs and derivatives thereof, peptidomimetics, nucleic acids, nucleic acid analogs and derivatives, an extract made from biological materials, or any combinations thereof.

[1132] In some embodiments, a lipid nanoparticle (or a formulation comprising lipid nanoparticles) lacks reactive impurities (e.g., aldehydes or ketones), or comprises less than a preselected level of reactive impurities (e.g., aldehydes or ketones). While not wishing to be bound by theory, in some embodiments, a lipid reagent is used to make a lipid nanoparticle formulation, and the lipid reagent may comprise a contaminating reactive impurity (e.g., an aldehyde or ketone). A lipid regent may be selected for manufacturing based on having less than a preselected level of reactive impurities (e.g., aldehydes or ketones). Without wishing to be bound by theory, in some embodiments, aldehydes can cause modification and damage of RNA, e.g., cross-linking between bases and/or covalently conjugating lipid to RNA (e.g., forming lipid-RNA adducts). This may, in some instances, lead to failure of a reverse transcriptase reaction and/or incorporation of inappropriate bases, e.g., at the site(s) of lesion(s), e.g., a mutation in a newly synthesized target DNA.

[1133] In some embodiments, a lipid nanoparticle formulation is produced using a lipid reagent comprising less than 5%, 4%, 3%, 2%, 1%, 0.9%, 0.8%, 0.7%, 0.6%, 0.5%, 0.4%, 0.3%, 0.2%, or 0.1% total reactive impurity (e.g., aldehyde) content. In some embodiments, a lipid nanoparticle formulation is produced using a lipid reagent comprising less than 5%, 4%, 3%, 2%, 1%, 0.9%, 0.8%, 0.7%, 0.6%, 0.5%, 0.4%, 0.3%, 0.2%, or 0.1% of any single reactive impurity (e.g., aldehyde) species. In some embodiments, a lipid nanoparticle formulation is produced using a lipid reagent comprising: (i) less than 5%, 4%, 3%, 2%, 1%, 0.9%, 0.8%, 0.7%, 0.6%, 0.5%, 0.4%, 0.3%, 0.2%, or 0.1% total reactive impurity (e.g., aldehyde) content; and (ii) less than 5%, 4%, 3%, 2%, 1%, 0.9%, 0.8%, 0.7%, 0.6%, 0.5%, 0.4%, 0.3%, 0.2%, or 0.1% of any single reactive impurity (e.g., aldehyde) species. In some embodiments, the lipid nanoparticle formulation is produced using a plurality of lipid reagents, and each lipid reagent of the plurality independently meets one or more criterion described in this paragraph. In some embodiments, each lipid reagent of the plurality meets the same criterion, e.g., a criterion of this paragraph.

[1134] In some embodiments, the lipid nanoparticle formulation comprises less than 5%, 4%, 3%, 2%, 1%, 0.9%, 0.8%, 0.7%, 0.6%, 0.5%, 0.4%, 0.3%, 0.2%, or 0.1% total reactive impurity (e.g., aldehyde) content. In some embodiments, the lipid nanoparticle formulation comprises less than 5%, 4%, 3%, 2%, 1%, 0.9%, 0.8%, 0.7%, 0.6%, 0.5%, 0.4%, 0.3%, 0.2%, or 0.1% of any single reactive impurity (e.g., aldehyde) species. In some embodiments, the lipid nanoparticle formulation comprises: (i) less than 5%, 4%, 3%, 2%, 1%, 0.9%, 0.8%, 0.7%, 0.6%, 0.5%, 0.4%, 0.3%, 0.2%, or 0.1% total reactive impurity (e.g., aldehyde) content; and (ii) less than 5%, 4%, 3%, 2%, 1%, 0.9%, 0.8%, 0.7%, 0.6%, 0.5%, 0.4%, 0.3%, 0.2%, or 0.1% of any single reactive impurity (e.g., aldehyde) species.

[1135] In some embodiments, one or more, or optionally all, of the lipid reagents used for a lipid nanoparticle as described herein or a formulation thereof comprise less than 5%, 4%, 3%, 2%, 1%, 0.9%, 0.8%, 0.7%, 0.6%, 0.5%, 0.4%, 0.3%, 0.2%, or 0.1% total reactive impurity (e.g., aldehyde) content. In some embodiments, one or more, or optionally all, of the lipid reagents used for a lipid nanoparticle as described herein or a formulation thereof comprise less than 5%, 4%, 3%, 2%, 1%, 0.9%, 0.8%, 0.7%, 0.6%, 0.5%, 0.4%, 0.3%, 0.2%, or 0.1% of any single reactive impurity (e.g., aldehyde) species. In some embodiments, one or more, or optionally all, of the lipid reagents used for a lipid nanoparticle as described herein or a formulation thereof comprise: (i) less than 5%, 4%, 3%, 2%, 1%, 0.9%, 0.8%, 0.7%, 0.6%, 0.5%, 0.4%, 0.3%, 0.2%, or 0.1% total reactive impurity (e.g., aldehyde) content; and (ii) less than 5%, 4%, 3%, 2%, 1%, 0.9%, 0.8%, 0.7%, 0.6%, 0.5%, 0.4%, 0.3%, 0.2%, or 0.1% of any single reactive impurity (e.g., aldehyde) species.

[1136] In some embodiments, total aldehyde content and/or quantity of any single reactive impurity (e.g., aldehyde) species is determined by liquid chromatography (LC), e.g., coupled with tandem mass spectrometry (MS/MS), e.g., according to the method described in Example 40 of PCT/US21/20948. In some embodiments, reactive impurity (e.g., aldehyde) content and/or quantity of reactive impurity (e.g., aldehyde) species is determined by detecting one or more chemical modifications of a nucleic acid molecule (e.g., an RNA molecule, e.g., as described herein) associated with the presence of reactive impurities (e.g., aldehydes), e.g., in the lipid reagents. In some embodiments, reactive impurity (e.g., aldehyde) content and/or quantity of reactive impurity (e.g., aldehyde) species is determined by detecting one or more chemical modifications of a nucleotide or nucleoside (e.g., a ribonucleotide or ribonucleoside, e.g., comprised in or isolated from a template nucleic acid, e.g., as described herein) associated with the presence of reactive impurities (e.g., aldehydes), e.g., in the lipid reagents, e.g., according to the method described in Example 41 of PCT/US21/20948. In embodiments, chemical modifications of a nucleic acid molecule, nucleotide, or nucleoside are detected by determining the presence of one or more modified nucleotides or nucleosides, e.g., using LC-MS/MS analysis, e.g., according to the method described in Example 41 of PCT/US21/20948.

[1137] In some embodiments, a nucleic acid (e.g., RNA) described herein (e.g., a template nucleic acid or a nucleic acid encoding a gene modifying polypeptide) does not comprise an aldehyde modification, or comprises less than a preselected amount of aldehyde modifications. In some embodiments, on average, a nucleic acid has less than 50, 20, 10, 5, 2, or 1 aldehyde modifications per 1000 nucleotides, e.g., wherein a single cross-linking of two nucleotides is a single aldehyde modification. In some embodiments, the aldehyde modification is an RNA adduct (e.g., a lipid-RNA adduct). In some embodiments, the aldehyde-modified nucleotide is cross-linking between bases. In some embodiments, a nucleic acid (e.g., RNA) described herein comprises less than 50, 20, 10, 5, 2, or 1 cross-links between nucleotide.

[1138] In some embodiments, LNPs are directed to specific tissues by the addition of targeting domains. For example, biological ligands may be displayed on the surface of LNPs to enhance interaction with cells displaying cognate receptors, thus driving association with and cargo delivery to tissues wherein cells express the receptor. In some embodiments, the biological ligand may be a ligand that drives delivery to the liver, e.g., LNPs that display GalNAc result in delivery of nucleic acid cargo to hepatocytes that display asialoglycoprotein receptor (ASGPR). The work of Akinc et al. Mol Ther 18(7):1357-1364 (2010) teaches the conjugation of a trivalent GalNAc ligand to a PEG-lipid (GalNAc-PEG-DSG) to yield LNPs dependent on ASGPR for observable LNP cargo effect (see, e.g., FIG. 6 therein). Other ligand-displaying LNP formulations, e.g., incorporating folate, transferrin, or antibodies, are discussed in WO2017223135, which is incorporated herein by reference in its entirety, in addition to the references used therein, namely Kolhatkar et al., Curr Drug Discov Technol. 2011 8:197-206; Musacchio and Torchilin, Front Biosci. 2011 16:1388-1412; Yu et al., Mol Membr Biol. 2010 27:286-298; Patil et al., Crit Rev Ther Drug Carrier Syst. 2008 25:1-61; Benoit et al., Biomacromolecules. 2011 12:2708-2714; Zhao et al., Expert Opin Drug Deliv. 2008 5:309-319; Akinc et al., Mol Ther. 2010 18:1357-1364; Srinivasan et al., Methods Mol Biol. 2012 820:105-116; Ben-Arie et al., Methods Mol Biol. 2012 757:497-507; Peer 2010 J Control Release. 20:63-68; Peer et al., Proc Natl Acad Sci USA. 2007 104:4095-4100; Kim et al., Methods Mol Biol. 2011 721:339-353; Subramanya et al., Mol Ther. 2010 18:2028-2037; Song et al., Nat Biotechnol. 2005 23:709-717; Peer et al., Science. 2008 319:627-630; and Peer and Lieberman, Gene Ther. 2011 18:1127-1133.

[1139] In some embodiments, LNPs are selected for tissue-specific activity by the addition of a Selective ORgan Targeting (SORT) molecule to a formulation comprising traditional components, such as ionizable cationic lipids, amphipathic phospholipids, cholesterol and poly(ethylene glycol) (PEG) lipids. The teachings of Cheng et al. Nat Nanotechnol 15(4):313-320 (2020) demonstrate that the addition of a supplemental “SORT” component precisely alters the in vivo RNA delivery profile and mediates tissue-specific (e.g., lungs, liver, spleen) gene delivery and editing as a function of the percentage and biophysical property of the SORT molecule.

[1140] In some embodiments, the LNPs comprise biodegradable, ionizable lipids. In some embodiments, the LNPs comprise (9Z,12Z)-3-((4,4-bis(octyloxy)butanoyl)oxy)-2-((((3-(diethylamino)propoxy)carbonyl)oxy)methyl)propyl octadeca-9,12-dienoate, also called 3-((4,4-bis(octyloxy)butanoyl)oxy)-2-((((3-(diethylamino)propoxy)carbonyl)oxy)methyl)propyl(9Z,12Z)-octadeca-9,12-dienoate) or another ionizable lipid. See, e.g, lipids of WO2019/067992, WO/2017/173054, WO2015/095340, and WO2014/136086, as well as references provided therein. In some embodiments, the term cationic and ionizable in the context of LNP lipids is interchangeable, e.g., wherein ionizable lipids are cationic depending on the pH.

[1141] In some embodiments, an LNP described herein comprises a lipid described in Table 19

| | | Molecular | |
|---|---|---|---|
| LIPID ID | Chemical Name | Weight | Structure |
| LIPIDV003 | (9Z,12Z)-3-((4,4- bis(octyloxy)butanoyl)oxy)-2- ((((3- (diethylamino)propoxy)carbonyl) oxy)methyl)propyl octadeca-9, 12-dienoate | 852.29 | [chemical structure] |
| LIPIDV004 | Heptadecan-9-yl 8-((2- hydroxyethyl)(8-(nonyloxy)-8- oxooctyl)amino)octanoate | 710.18 | [chemical structure] |
| LIPIDV005 | | 919.56 | [chemical structure] |

[1142] In some embodiments, multiple components of a gene modifying system may be prepared as a single LNP formulation, e.g., an LNP formulation comprises mRNA encoding for the gene modifying polypeptide and an RNA template. Ratios of nucleic acid components may be varied in order to maximize the properties of a therapeutic. In some embodiments, the ratio of RNA template to mRNA encoding a gene modifying polypeptide is about 1:1 to 100:1, e.g., about 1:1 to 20:1, about 20:1 to 40:1, about 40:1 to 60:1, about 60:1 to 80:1, or about 80:1 to 100:1, by molar ratio. In other embodiments, a system of multiple nucleic acids may be prepared by separate formulations, e.g., one LNP formulation comprising a template RNA and a second LNP formulation comprising an mRNA encoding a gene modifying polypeptide. In some embodiments, the system may comprise more than two nucleic acid components formulated into LNPs. In some embodiments, the system may comprise a protein, e.g., a gene modifying polypeptide, and a template RNA formulated into at least one LNP formulation.

[1143] In some embodiments, the average LNP diameter of the LNP formulation may be between 10s of nm and 100s of nm, e.g., measured by dynamic light scattering (DLS). In some embodiments, the average LNP diameter of the LNP formulation may be from about 40 nm to about 150 nm, such as about 40 nm, 45 nm, 50 nm, 55 nm, 60 nm, 65 nm, 70 nm, 75 nm, 80 nm, 85 nm, 90 nm, 95 nm, 100 nm, 105 nm, 110 nm, 115 nm, 120 nm, 125 nm, 130 nm, 135 nm, 140 nm, 145 nm, or 150 nm. In some embodiments, the average LNP diameter of the LNP formulation may be from about 50 nm to about 100 nm, from about 50 nm to about 90 nm, from about 50 nm to about 80 nm, from about 50 nm to about 70 nm, from about 50 nm to about 60 nm, from about 60 nm to about 100 nm, from about 60 nm to about 90 nm, from about 60 nm to about 80 nm, from about 60 nm to about 70 nm, from about 70 nm to about 100 nm, from about 70 nm to about 90 nm, from about 70 nm to about 80 nm, from about 80 nm to about 100 nm, from about 80 nm to about 90 nm, or from about 90 nm to about 100 nm. In some embodiments, the average LNP diameter of the LNP formulation may be from about 70 nm to about 100 nm. In a particular embodiment, the average LNP diameter of the LNP formulation may be about 80 nm. In some embodiments, the average LNP diameter of the LNP formulation may be about 100 nm. In some embodiments, the average LNP diameter of the LNP formulation ranges from about 1 mm to about 500 mm, from about 5 mm to about 200 mm, from about 10 mm to about 100 mm, from about 20 mm to about 80 mm, from about 25 mm to about 60 mm, from about 30 mm to about 55 mm, from about 35 mm to about 50 mm, or from about 38 mm to about 42 mm.

[1144] An LNP may, in some instances, be relatively homogenous. A polydispersity index may be used to indicate the homogeneity of an LNP, e.g., the particle size distribution of the lipid nanoparticles. A small (e.g., less than 0.3) polydispersity index generally indicates a narrow particle size distribution. An LNP may have a polydispersity index from about 0 to about 0.25, such as 0.01, 0.02, 0.03, 0.04, 0.05, 0.06, 0.07, 0.08, 0.09, 0.10, 0.11, 0.12, 0.13, 0.14, 0.15, 0.16, 0.17, 0.18, 0.19, 0.20, 0.21, 0.22, 0.23, 0.24, or 0.25. In some embodiments, the polydispersity index of an LNP may be from about 0.10 to about 0.20.

[1145] The zeta potential of an LNP may be used to indicate the electrokinetic potential of the composition. In some embodiments, the zeta potential may describe the surface charge of an LNP. Lipid nanoparticles with relatively low charges, positive or negative, are generally desirable, as more highly charged species may interact undesirably with cells, tissues, and other elements in the body. In some embodiments, the zeta potential of an LNP may be from about −10 mV to about +20 mV, from about −10 mV to about +15 mV, from about −10 mV to about +10 mV, from about −10 mV to about +5 mV, from about −10 mV to about 0 mV, from about −10 mV to about −5 mV, from about −5 mV to about +20 mV, from about −5 mV to about +15 mV, from about −5 mV to about +10 mV, from about −5 mV to about +5 mV, from about −5 mV to about 0 mV, from about 0 mV to about +20 mV, from about 0 mV to about +15 mV, from about 0 mV to about +10 mV, from about 0 mV to about +5 mV, from about +5 mV to about +20 mV, from about +5 mV to about +15 mV, or from about +5 mV to about +10 mV.

[1146] The efficiency of encapsulation of a protein and/or nucleic acid, e.g., gene modifying polypeptide or mRNA encoding the polypeptide, describes the amount of protein and/or nucleic acid that is encapsulated or otherwise associated with an LNP after preparation, relative to the initial amount provided. The encapsulation efficiency is desirably high (e.g., close to 100%). The encapsulation efficiency may be measured, for example, by comparing the amount of protein or nucleic acid in a solution containing the lipid nanoparticle before and after breaking up the lipid nanoparticle with one or more organic solvents or detergents. An anion exchange resin may be used to measure the amount of free protein or nucleic acid (e.g., RNA) in a solution. Fluorescence may be used to measure the amount of free protein and/or nucleic acid (e.g., RNA) in a solution. For the lipid nanoparticles described herein, the encapsulation efficiency of a protein and/or nucleic acid may be at least 50%, for example 50%, 55%, 60%, 65%, 70%, 75%, 80%, 85%, 90%, 91%, 92%, 93%, 94%, 95%, 96%, 97%, 98%, 99%, or 100%. In some embodiments, the encapsulation efficiency may be at least 80%. In some embodiments, the encapsulation efficiency may be at least 90%. In some embodiments, the encapsulation efficiency may be at least 95%.

[1147] An LNP may optionally comprise one or more coatings. In some embodiments, an LNP may be formulated in a capsule, film, or table having a coating. A capsule, film, or tablet including a composition described herein may have any useful size, tensile strength, hardness or density.

[1148] Additional exemplary lipids, formulations, methods, and characterization of LNPs are taught by WO2020061457, which is incorporated herein by reference in its entirety.

[1149] In some embodiments, in vitro or ex vivo cell lipofections are performed using Lipofectamine MessengerMax (Thermo Fisher) or TransIT-mRNA Transfection Reagent (Mirus Bio). In certain embodiments, LNPs are formulated using the GenVoy_ILM ionizable lipid mix (Precision NanoSystems). In certain embodiments, LNPs are formulated using 2,2-dilinoleyl-4-dimethylaminoethyl-[1,3]-dioxolane (DLin-KC2-DMA) or dilinoleylmethyl-4-dimethylaminobutyrate (DLin-MC3-DMA or MC3), the formulation and in vivo use of which are taught in Jayaraman et al. Angew Chem Int Ed Engl 51(34):8529-8533 (2012), incorporated herein by reference in its entirety.

[1150] LNP formulations optimized for the delivery of CRISPR-Cas systems, e.g., Cas9-gRNA RNP, gRNA, Cas9 mRNA, are described in WO2019067992 and WO2019067910, both incorporated by reference.

[1151] Additional specific LNP formulations useful for delivery of nucleic acids are described in U.S. Pat. Nos. 8,158,601 and 8,168,775, both incorporated by reference, which include formulations used in patisiran, sold under the name ONPATTRO.

[1152] Exemplary dosing of gene modifying LNP may include about 0.1, 0.25, 0.3, 0.5, 1, 2, 3, 4, 5, 6, 8, 10, or 100 mg/kg (RNA). Exemplary dosing of AAV comprising a nucleic acid encoding one or more components of the system may include an MOI of about 10₁₁, 10¹², 10¹³, and 10¹⁴ vg/kg.

### Kits, Articles of Manufacture, and Pharmaceutical Compositions

[1153] In an aspect the disclosure provides a kit comprising a gene modifying polypeptide or a gene modifying system, e.g., as described herein. In some embodiments, the kit comprises a gene modifying polypeptide (or a nucleic acid encoding the polypeptide) and a template RNA (or DNA encoding the template RNA). In some embodiments, the kit further comprises a reagent for introducing the system into a cell, e.g., transfection reagent, LNP, and the like. In some embodiments, the kit is suitable for any of the methods described herein. In some embodiments, the kit comprises one or more elements, compositions (e.g., pharmaceutical compositions), gene modifying polypeptides, and/or gene modifying systems, or a functional fragment or component thereof, e.g., disposed in an article of manufacture. In some embodiments, the kit comprises instructions for use thereof.

[1154] In an aspect, the disclosure provides an article of manufacture, e.g., in which a kit as described herein, or a component thereof, is disposed.

[1155] In an aspect, the disclosure provides a pharmaceutical composition comprising a gene modifying polypeptide or a gene modifying system, e.g., as described herein. In some embodiments, the pharmaceutical composition further comprises a pharmaceutically acceptable carrier or excipient. In some embodiments, the pharmaceutical composition comprises a template RNA and/or an RNA encoding the polypeptide. In embodiments, the pharmaceutical composition has one or more (e.g., 1, 2, 3, or 4) of the following characteristics:
[1156] (a) less than 1% (e.g., less than 0.5%, 0.4%, 0.3%, 0.2%, or 0.1%) DNA template relative to the template RNA and/or the RNA encoding the polypeptide, e.g., on a molar basis;
[1157] (b) less than 1% (e.g., less than 0.5%, 0.4%, 0.3%, 0.2%, or 0.1%) uncapped RNA relative to the template RNA and/or the RNA encoding the polypeptide, e.g., on a molar basis;
[1158] (c) less than 1% (e.g., less than 0.5%, 0.4%, 0.3%, 0.2%, or 0.1%) partial length RNAs relative to the template RNA and/or the RNA encoding the polypeptide, e.g., on a molar basis;
[1159] (d) substantially lacks unreacted cap dinucleotides.

### Chemistry, Manufacturing, and Controls (CMC)

[1160] Purification of protein therapeutics is described, for example, in Franks, Protein Biotechnology: Isolation, Characterization, and Stabilization, Humana Press (2013); and in Cutler, Protein Purification Protocols (Methods in Molecular Biology), Humana Press (2010).

[1161] In some embodiments, a gene modifying system, polypeptide, and/or template nucleic acid (e.g., template RNA) conforms to certain quality standards. In some embodiments, a gene modifying system, polypeptide, and/or template nucleic acid (e.g., template RNA) produced by a method described herein conforms to certain quality standards. Accordingly, the disclosure is directed, in some aspects, to methods of manufacturing a gene modifying system, polypeptide, and/or template nucleic acid (e.g., template RNA) that conforms to certain quality standards, e.g., in which said quality standards are assayed. The disclosure is also directed, in some aspects, to methods of assaying said quality standards in a gene modifying system, polypeptide, and/or template nucleic acid (e.g., template RNA). In some embodiments, quality standards include, but are not limited to, one or more (e.g., 1, 2, 3, 4, 5, 6, 7, 8, 9, 10, 11, or 12) of the following:
[1162] (i) the length of the template RNA, e.g., whether the template RNA has a length that is above a reference length or within a reference length range, e.g., whether at least 80%, 85%, 90%, 95%, 96%, 97%, 98%, or 99% of the template RNA present is greater than 100, 125, 150, 175, or 200 nucleotides long;
[1163] (ii) the presence, absence, and/or length of a polyA tail on the template RNA, e.g., whether at least 80%, 85%, 90%, 95%, 96%, 97%, 98%, or 99% of the template RNA present contains a polyA tail (e.g., a polyA tail that is at least 5, 10, 20, 30, 50, 70, 100 nucleotides in length (SEQ ID NO: 19266));
[1164] (iii) the presence, absence, and/or type of a 5′ cap on the template RNA, e.g., whether at least 80%, 85%, 90%, 95%, 96%, 97%, 98%, or 99% of the template RNA present contains a 5′ cap, e.g., whether that cap is a 7-methylguanosine cap, e.g., a O-Me-m7G cap;
[1165] (iv) the presence, absence, and/or type of one or more modified nucleotides (e.g., selected from pseudouridine, dihydrouridine, inosine, 7-methylguanosine, 1-N-methylpseudouridine (1-Me-Ψ), 5-methoxyuridine (5-MO-U), 5-methylcytidine (5 mC), or a locked nucleotide) in the template RNA, e.g., whether at least 80%, 85%, 90%, 95%, 96%, 97%, 98%, or 99% of the template RNA present contains one or more modified nucleotides;
[1166] (v) the stability of the template RNA (e.g., over time and/or under a pre-selected condition), e.g., whether at least 80%, 85%, 90%, 95%, 96%, 97%, 98%, or 99% of the template RNA remains intact (e.g., greater than 100, 125, 150, 175, or 200 nucleotides long) after a stability test;
[1167] (vi) the potency of the template RNA in a system for modifying DNA, e.g., whether at least 1% of target sites are modified after a system comprising the template RNA is assayed for potency;
[1168] (vii) the length of the polypeptide, first polypeptide, or second polypeptide, e.g., whether the polypeptide, first polypeptide, or second polypeptide has a length that is above a reference length or within a reference length range, e.g., whether at least 80%, 85%, 90%, 95%, 96%, 97%, 98%, or 99% of the polypeptide, first polypeptide, or second polypeptide present is greater than 600, 650, 700, 750, 800, 850, 900, 950, 1000, 1050, 1100, 1150, 1200, 1250, 1300, 1350, 1400, 1450, 1500, 1600, 1700, 1800, 1900, or 2000 amino acids long (and optionally, no larger than 2500, 2000, 1500, 1400, 1300, 1200, 1100, 1000, 900, 800, 700, or 600 amino acids long); (viii) the presence, absence, and/or type of post-translational modification on the polypeptide, first polypeptide, or second polypeptide, e.g., whether at least 80, 85, 90, 95, 96, 97, 98, or 99% of the polypeptide, first polypeptide, or second polypeptide contains phosphorylation, methylation, acetylation, myristoylation, palmitoylation, isoprenylation, glipyatyon, or lipoylation, or any combination thereof;
[1169] (ix) the presence, absence, and/or type of one or more artificial, synthetic, or non-canonical amino acids (e.g., selected from ornithine, β-alanine, GABA, δ-Aminolevulinic acid, PABA, a D-amino acid (e.g., D-alanine or D-glutamate), aminoisobutyric acid, dehydroalanine, cystathionine, lanthionine, Djenkolic acid, Diaminopimelic acid, Homoalanine, Norvaline, Norleucine, Homonorleucine, homoserine, O-methyl-homoserine and O-ethyl-homoserine, ethionine, selenocysteine, selenohomocysteine, selenomethionine, selenoethionine, tellurocysteine, or telluromethionine) in the polypeptide, first polypeptide, or second polypeptide, e.g., whether at least 80%, 85%, 90%, 95%, 96%, 97%, 98%, or 99% of the polypeptide, first polypeptide, or second polypeptide present contains one or more artificial, synthetic, or non-canonical amino acids;
[1170] (x) the stability of the polypeptide, first polypeptide, or second polypeptide (e.g., over time and/or under a pre-selected condition), e.g., whether at least 80%, 85%, 90%, 95%, 96%, 97%, 98%, or 99% of the polypeptide, first polypeptide, or second polypeptide remains intact (e.g., greater than 600, 650, 700, 750, 800, 850, 900, 950, 1000, 1050, 1100, 1150, 1200, 1250, 1300, 1350, 1400, 1450, 1500, 1600, 1700, 1800, 1900, or 2000 amino acids long (and optionally, no larger than 2500, 2000, 1500, 1400, 1300, 1200, 1100, 1000, 900, 800, 700, or 600 amino acids long)) after a stability test;
[1171] (xi) the potency of the polypeptide, first polypeptide, or second polypeptide in a system for modifying DNA, e.g., whether at least 1% of target sites are modified after a system comprising the polypeptide, first polypeptide, or second polypeptide is assayed for potency; or
[1172] (xii) the presence, absence, and/or level of one or more of a pyrogen, virus, fungus, bacterial pathogen, or host cell protein, e.g., whether the system is free or substantially free of pyrogen, virus, fungus, bacterial pathogen, or host cell protein contamination.

[1173] In some embodiments, a system or pharmaceutical composition described herein is endotoxin free.

[1174] In some embodiments, the presence, absence, and/or level of one or more of a pyrogen, virus, fungus, bacterial pathogen, and/or host cell protein is determined. In embodiments, whether the system is free or substantially free of pyrogen, virus, fungus, bacterial pathogen, and/or host cell protein contamination is determined.

[1175] In some embodiments, a pharmaceutical composition or system as described herein has one or more (e.g., 1, 2, 3, or 4) of the following characteristics:
[1176] (a) less than 1% (e.g., less than 0.5%, 0.4%, 0.3%, 0.2%, or 0.1%) DNA template relative to the template RNA and/or the RNA encoding the polypeptide, e.g., on a molar basis;
[1177] (b) less than 1% (e.g., less than 0.5%, 0.4%, 0.3%, 0.2%, or 0.1%) uncapped RNA relative to the template RNA and/or the RNA encoding the polypeptide, e.g., on a molar basis;
[1178] (c) less than 1% (e.g., less than 0.5%, 0.4%, 0.3%, 0.2%, or 0.1%) partial length RNAs relative to the template RNA and/or the RNA encoding the polypeptide, e.g., on a molar basis;
[1179] (d) substantially lacks unreacted cap dinucleotides.

### Examples

### Example 1: Trans-Recruitment of an RNA Template for RNA-Based Gene Modification

[1180] This example describes the use of an exemplary three (3)-component RNA gene modifying system for the targeted editing of a sequence in the human genome (FIG. 1). More specifically, in this exemplary system, a (1) gene modifying polypeptide binds (2) a guide RNA molecule and (3) a trans-template RNA (ttRNA) molecule, together forming a gene modifying complex, which binds and nicks the target locus and performs templated incorporation of the desired edit in one strand of the genomic DNA. Host repair pathways cause the incorporation of the edit in the second strand, and ligation of the DNA nick. This example further describes the introduction of the 3-component system to mammalian cells for in vitro gene modifying as a means of evaluating the efficacy of various gene modifying system configurations and ttRNA recruitment interactions on editing activity in human cells.

### 1) Gene Modifying Polypeptide:

[1181] The gene modifying polypeptide of this exemplary system includes:
[1182] 1. a Cas-nuclease with one endonuclease domain inactivated (e.g. Spy N863A Cas9),
[1183] 2. a reverse transcriptase (RT), and
[1184] 3. optionally an RNA binding domain (RBD; as in Table 31). The RBD may comprise one or more RBP repeats, e.g., 1-5 repeats in tandem with or without intervening peptide linker sequences.

[1185] These 2-3 domains are brought together either by covalent linkage using (1) peptide linkers, as in Table 10 (FIG. 2A), or (2) intein pairs, as in Table 33, or (3) by the dimerization of two fusion domains (FDs) that (a) is induced by chemical binding or specific wavelengths of light Table 34, or (b) occurs intrinsically in a ligand-free interaction Tables 35 and 36 (FIG. 2B). The FDs may be repeated, in some instances, 1-30 times in tandem with or without intervening peptide linker sequences.

[1186] The 2-3 domains can be assembled in any of the following configurations, where the linkers indicated below can optionally be replaced with intein- or FD-pairs:
[1187] Cas9-linker-RT-linker-(RBP repeat),
[1188] RT-linker-Cas9-linker-(RBP repeat),
[1189] (RBP repeat)ₙ-linker-Cas9-linker-RT
[1190] (RBP repeat)ₙ-linker-RT-linker-Cas9
[1191] Cas9-linker-(RBP repeat)ₙ-linker-RT
[1192] RT-linker-(RBP repeat)ₙ-linker-Cas9

### 2) Exemplary Guide RNA:

[1193] The guide RNA (gRNA) molecule (5′-GCCGAAGCACTGCACGCCGTGTTTTAGAGCTAGAAATAGCAAGTTAAAATAAGGCTAGTCCGTT ATCAACTTGAAAAAGTGGCACCGAGTCGGTGC-3′; SEQ ID NO: 16,701) binds Cas9 and contains a spacer sequence complementary to the exemplary target genomic locus, resulting in localization of the gene modifying complex to the exemplary target genomic locus.

3) Trans-Template RNA (ttRNA):

[1194] An exemplary ttRNA molecule contains a PBS-template region, 3′ to 5′, as below (and as diagrammed in FIG. 3A-3B):
[1195] 1. a 1-17 nt primer binding site (PBS; as in Table 37) that basepairs with the nicked DNA strand allowing primer extension of the nicked DNA, followed immediately by
[1196] 2. a 0-20 nt region of homology with the target locus (homology 1; as in Table 38, “homology 1”)
[1197] 3. the desired modification to the genome—insertion, deletion, or substitution (edit; as in Table 38, “edit”)
[1198] 4. a 0-500 nt region of homology with the target locus (homology 2; as in Table 39, “homology 2”).

[1199] The exemplary ttRNA may optionally also include:
[1200] 5. an RBD recruitment site (RRS; as in Table 40). The RRS may be repeated 1-5 times, e.g., 1-4 times, in tandem with or without intervening RNA linker sequences.

[1201] The exemplary ttRNA may optionally also include:
[1202] 6. one or two end-protecting RNA secondary structure (end block; as in Table 41) that protects the ttRNA molecule from exonuclease-mediated degradation.

[1203] These components of the ttRNA may be assembled in any of the below configurations, where the RRSs may be joined to the PBS-template by an RNA linker sequence of up to 20 nts (the longest sequence being 5′-ACTAACATACAACTAACATA-3′ (SEQ ID NO: 16702)):

| | |
|---|---|
| • | (RRS)ₙ - linker - PBS-template |
| • | (RRS)ₙ - linker - PBS-template - end block |
| • | PBS-template - linker - (RRS)ₙ |
| • | end-block - PBS-template - linker - (RRS)ₙ |
| • | end block - (RRS)ₙ - linker - PBS-template |
| • | end block - (RRS)ₙ - linker - PBS-template - end block |
| • | PBS-template - linker - (RRS)ₙ - end block |
| • | end-block - PBS-template - linker - (RRS)ₙ - end block |
| • | end-block - PBS-template - end block |

### Evaluation of 3-Component Trans-Gene Modifying System Configurations:

[1204] To determine the genome-editing capacity of the various configurations of the trans-gene modifying complex, mammalian HEK293T or U2OS cell lines are generated carrying a genomic landing pad that expresses one of the following:
[1205] i. 150 or 250 bp GFP insertion reporter line: a non-fluorescent partially-deleted-GFP cell line, in which GFP-expression is restored via a 150 or 250 bp insertion of the deleted coding sequence; or
[1206] ii. mKate2 or mCherry insertion reporter line: a GFP-expressing cell line, which loses GFP-expression and gains mKate2 or mCherry expression via the interruption of the GFP coding sequence with a >700 (e.g., >700 or >750) bp insertion that introduces the mKate2 or mCherry coding sequence.

[1207] The gene modifying polypeptide is introduced into these cells by transfection of DNA plasmid or mRNA, or by packaging of DNA plasmid into Lentivirus. The cells are additionally co-transfected/electroporated with a ttRNA-expressing DNA plasmid or ncRNA, and a gRNA-expressing DNA plasmid or ncRNA that are together designed to:
[1208] i. 150 or 250 bp GFP insertion reporter line: restore the GFP coding sequence; or
[1209] ii. mKate2 or mCherry insertion reporter line: interrupt the GFP coding sequence with an mKate2 or mCherry coding sequence.

[1210] To assess the genome-editing capacity of the trans-gene modifying system configurations, cells are analyzed by flow cytometry 4-10 days post-transfection/electroporation of ttRNA and gRNA. The fidelity of the edits are also assessed by collecting genomic DNA 3-10 days post-transfection/electroporation of the ttRNA and gRNA. The frequency of the intended versus unintended mutations at target loci are analyzed by amplicon sequencing.

### Example 2: Trans-Recruitment of an RNA Template for RNA-Based Gene Modifying Via Engagement of the Second DNA Strand by a Cas9-Complex

[1211] This example describes the use of a RNA-based gene modifying system having up to five components for the targeted editing of a sequence in the human genome (FIGS. 4A-4B). More specifically, a (1) gene modifying polypeptide binds (2) a guide RNA molecule and (3) a trans-template RNA (ttRNA) molecule, together forming a gene modifying complex, which binds and nicks the target locus and performs templated incorporation of the desired edit in one strand of the genomic DNA. An additional (4) Cas9 (e.g., a dCas9 or nCas9 domain (FIG. 4A) or such a domain as part of a second different gene modifying polypeptide (FIG. 4B) molecule is recruited to the nicked DNA strand by the trans-template RNA (e.g., by an 5′ end block containing a gRNA spacer), or by (5) its species-matched guide RNA, to form a second complex. The second complex may extend the bubble and facilitate large insertions, and may also be used to introduce a nick on the second strand to initiate second strand synthesis, and/or signal to the cell's endogenous repair system (e.g., mismatch repair system) that the edited strand should be copied and maintained. This example further describes the introduction of the 5 component system to mammalian cells for in vitro gene modifying as a means of evaluating the efficacy of various gene modifying system configurations and ttRNA recruitment interactions on editing activity in human cells.

### 1) Gene Modifying Polypeptide:

[1212] The gene modifying polypeptide includes:
[1213] 1. a Cas-nuclease with one endonuclease domain inactivated (e.g. Spy N863A Cas9),
[1214] 2. a reverse transcriptase (RT), and
[1215] 3. optionally an RNA binding domain (RBD; as in Table 31). The RBD may comprise one or more RBP repeats, e.g., 1-5 repeats in tandem with or without intervening peptide linker sequences.

[1216] These 2-3 domains are brought together either by covalent linkage using (1) peptide linkers, as in Table 10, or (2) intein pairs, as in Table 33, or by the dimerization of two fusion domains (FDs) that (a) is induced by chemical binding or or specific wavelengths of light Table 34, or (b) occurs intrinsically in a ligand-free interaction Tables 35 and 36. The FDs may, in some instances, be repeated 1-30 times in tandem with or without intervening peptide linker sequences.

[1217] The 2-3 domains can be assembled in any of the following configurations, where the linkers indicated below can, in some instances, be replaced with intein- or FD-pairs:
[1218] Cas9-linker-RT-linker-(RBP repeat),
[1219] RT-linker-Cas9-linker-(RBP repeat),
[1220] (RBP repeat)ₙ-linker-Cas9-linker-RT
[1221] (RBP repeat)ₙ-linker-RT-linker-Cas9
[1222] Cas9-linker-(RBP repeat)ₙ-linker-RT
[1223] RT-linker-(RBP repeat)ₙ-linker-Cas9

### 2) Exemplary Guide RNA:

[1224] The guide RNA (gRNA) molecule (5′-GCCGAAGCACTGCACGCCGTGTTTTAGAGCTAGAAATAGCAAGTTAAAATAAGGCTAGTCCGTT ATCAACTTGAAAAAGTGGCACCGAGTCGGTGC-3′; SEQ ID NO: 16,701) binds Cas9 and contains a spacer sequence complementary to the exemplary target genomic locus, resulting in localization of the gene modifying complex to the exemplary target genomic locus.

3) Trans-Template RNA (ttRNA):

[1225] An exemplary ttRNA molecule contains a PBS-template region, 3′ to 5′, as below:
[1226] 1. an 1-17 nt primer binding site (PBS; as in Table 37) that basepairs with the nicked DNA strand allowing primer extension of the nicked DNA, followed immediately by
[1227] 2. a 0-20 nt region of homology with the target locus (homology 1; as in Table 38, “homology 1”)
[1228] 3. the desired modification to the genome—insertion, deletion, or substitution (edit; as in Table 38, “edit”)
[1229] 4. a 0-500 nt region of homology with the target locus (homology 2; as in Table 39, “homology 2”).

[1230] The exemplary ttRNA may optionally also include:
[1231] 5. an RBD recruitment site (RRS; as in Table 40). The RRS may be repeated 1-5 times (e.g., 1-4 times) in tandem with or without intervening RNA linker sequences.

[1232] The exemplary ttRNA may optionally also include:
[1233] 6. one or two end-protecting RNA secondary structure (end block; as in Table 41) that protects the ttRNA molecule from exonuclease-mediated degradation.

[1234] These components of the ttRNA may be assembled in any of the below configurations, where the RRSs may be joined to the PBS-template by an RNA linker sequence of up to 20 nts (the longest sequence being 5′-ACTAACATACAACTAACATA-3′; SEQ ID NO: 16,702):

| | |
|---|---|
| • | (RRS)ₙ - linker - PBS-template |
| • | (RRS)ₙ - linker - PBS-template - end block |
| • | PBS-template - linker - (RRS)ₙ |
| • | end-block - PBS-template - linker - (RRS)ₙ |
| • | end block - (RRS)ₙ - linker - PBS-template |
| • | end block - (RRS)ₙ - linker - PBS-template - end block |
| • | PBS-template - linker - (RRS)ₙ - end block |
| • | end-block - PBS-template - linker - (RRS)ₙ - end block |

| | |
|---|---|
| • | end-block - PBS-template - end block |

### 4) Additional (Second) Cas9 or Different Gene Modifying Polypeptide:

[1235] An additional nickase (e.g., Spy N863A Cas9, or an orthogonal Cas9) or catalytically inactive (“dead”) Cas9 as in Table 43, which binds the nicked DNA strand by pairing with a gRNA scaffold and/or gRNA spacer contained in the ttRNA (FIG. 4B), or which binds a separate gRNA (FIG. 4A; see also 5, below). A nickase Cas9 paired with a full spacer is used to introduce a nick on the second, unnicked strand. Alternatively, a dead Cas9 or a nickase paired with a gRNA-2 having a spacer with less than 17 nt complementarity to the target opens up the DNA bubble for long RT reactions, without nicking the second strand. An additional nickase or catalytically inactive Cas9 may be a separate domain (e.g., FIG. 4A) or a part of an additional (second) gene modifying polypeptide different from (1) (FIG. 4B).

### 5) Optional Second Cas9/Different-Paired Guide RNA:

[1236] The second guide RNA (gRNA-2) molecule with a spacer sequence complementary to the nicked strand, as in Table 44, may be added to recruit the 2^{nd} Cas9 to the nicked DNA strand for DNA bubble extension or second strand nicking. A gRNA-2 spacer may be fully complementary to the target strand to stimulate the nickase activity of the 2^{nd} Cas9, or it may contain 17 or fewer nucleotides of complementarity to inhibit nicking by the 2^{nd} Cas9.

[1237] To determine the genome-editing capacity of the various configurations of the trans-gene modifying system complex, mammalian HEK293T or U2OS cell lines are generated carrying a genomic landing pad that expresses one of the following:
[1238] i. 150 or 250 bp GFP insertion reporter line: a non-fluorescent partially-deleted-GFP cell line, in which GFP-expression is restored via a 150 or 250 bp insertion of the deleted coding sequence; or
[1239] ii. mKate2 or mCherry insertion reporter line: a GFP-expressing cell line, which loses GFP-expression and gains mKate2 or mCherry expression via the interruption of the GFP coding sequence with a >700 (e.g., >750) bp insertion that introduces the mKate2 or mCherry coding sequence.

[1240] The gene modifying polypeptide is introduced in these cells by transfection of DNA plasmid or mRNA, or by packaging of DNA plasmid into Lentivirus. The cells are additionally co-transfected/electroporated with 1) a ttRNA-expressing DNA plasmid or ncRNA, 2) a gRNA-expressing DNA plasmid or ncRNA that are together designed to:
[1241] i. 150 or 250 bp GFP insertion reporter line: restore a GFP coding sequence; or
[1242] ii. mKate2 or mCherry insertion reporter line: interrupt the GFP coding sequence with an mKate2 or mCherry coding sequence,
   along with 3) a DNA plasmid or mRNA expressing a 2nd Cas9, and optionally 4) a gRNA-2-expressing DNA plasmid or ncRNA.

[1243] To assess the genome-editing capacity of the trans-gene modifying system configurations, cells are analyzed by flow cytometry 4-10 days post-transfection/electroporation of ttRNA and gRNA. The fidelity of the edits are also assessed by collecting genomic DNA 3-10 days post-transfection/electroporation of the ttRNA and gRNA. The frequency of the intended versus unintended mutations at target loci are analyzed by amplicon sequencing.

### Example 3: Generation of Exemplary Drivers

[1244] This example describes the generation of exemplary drivers for use in the three, four, or five component RNA-based gene modifying systems described in Examples 1 and 2.

### 1) Gene Modifying Polypeptide:

[1245] A series of 216 exemplary gene modifying polypeptides were generated containing:
[1246] 1. a Cas-nuclease with one endonuclease domain inactivated (in this example, Spy N863A Cas9),
[1247] 2. either of two reverse transcriptases (RTs) (the RTs of the gene modifying polypeptide encoded by: PLV10993 or PLV10990/RNAIVT338), and
[1248] 3. an RNA binding domain (RBD) containing 1, 2, or 4 RBP repeats (in this example, 1, 2, or 4 MCPv2 domains as provided in Table 31), with each RBP repeat connected to the other RBP repeats by one of 4 linker peptides from Table 10.
   These 3 domains were connected using peptide linkers, e.g., as found in Table 10.

[1249] The sequence of the RT of the gene modifying polypeptide encoded by PLV10990/RNAIVT338 and the sequence of the RT of the gene modifying polypeptide encoded by PLV10993 are provided below.

```
PLV10990/RNAIVT338 RT:
  (SEQ ID NO: 16,706)
TAPLEEEYRLFLEAPIQNVTLLEQWKREIPKVWAEINPPGLASTQAPIHVQLLSTALPVRVRQYPIT
LEAKRSLRETIRKFRAAGILRPVHSPWNTPLLPVRKSGTSEYRMVQDLREVNKRVETIHPTVPNP
YTLLSLLPPDRIWYSVLDLKDAFFCIPLAPESQLIFAFEWADAEEGESGQLTWTRLPQGFKNSPTL
FNEALNRDLQGFRLDHPSVSLLQYVDDLLIAADTQAACLSATRDLLMTLAELGYRVSGKKAQLC
QEEVTYLGFKIHKGSRSLSNSRTQAILQIPVPKTKRQVREFLGKIGYCRLFIPGFAELAQPLYAATR
PGNDPLVWGEKEEEAFQSLKLALTQPPALALPSLDKPFQLFVEETSGAAKGVLTQALGPWKRPV
AYLSKRLDPVAAGWPRCLRAIAAAALLTREASKLTFGQDIEITSSHNLESLLRSPPDKWLTNARIT
QYQVLLLDPPRVRFKQTAALNPATLLPETDDTLPIHHCLDTLDSLTSTRPDLTDQPLAQAEATLFT
DGSSYIRDGKRYAGAAVVTLDSVIWAEPLPIGTSAQKAELIALTKALEWSKDKSVNIYTDSRYAF
ATLHVHGMIYRERGWLTAGGKAIKNAPEILALLTAVWLPKRVAVMHCKGHQKDDAPTSTGNR
RADEVAREVAIRPLSTQATIS
PLV10993 RT:
  (SEQ ID NO: 16,707)
TLNIEDEHRLHETSKEPDVSLGSTWLSDFPQAWAETGGMGLAVRQAPLIIPLKATSTPVSIKQYP
MSQEARLGIKPHIQRLLDQGILVPCQSPWNTPLLPVKKPGTNDYRPVQDLREVNKRVEDIHPTVP
NPYNLLSGLPPSHQWYTVLDLKDAFFCLRLHPTSQPLFAFEWRDPEMGISGQLTWTRLPQGFKN
SPTLFNEALHRDLADFRIQHPDLILLQYVDDLLLAATSELDCQQGTRALLQTLGNLGYRASAKKA
QICQKQVKYLGYLLKEGQRWLTEARKETVMGQPTPKTPRQLREFLGKAGFCRLFIPGFAEMAAP
LYPLTKPGTLFNWGPDQQKAYQEIKQALLTAPALGLPDLTKPFELFVDEKQGYAKGVLTQKLGP
WRRPVAYLSKKLDPVAAGWPPCLRMVAAIAVLTKDAGKLTMGQPLVILAPHAVEALVKQPPDR
WLSNARMTHYQALLLDTDRVQFGPVVALNPATLLPLPEEGLQHNCLDILAEAHGTRPDLTDQPL
PDADHTWYTDGSSLLQEGQRKAGAAVTTETEVIWAKALPAGTSAQRAELIALTQALKMAEGKK
LNVYTDSRYAFATAHIHGEIYRRRGWLTSEGKEIKNKDEILALLKALFLPKRLSIIHCPGHQKGHS
AEARGNRMADQAARKAAITETPDTSTLL
```

[1250] The series of 216 exemplary gene modifying polypeptides encompassed a subset of the configurations set forth in Examples 1 and 2:
[1251] Configuration 1: Cas9-linker (RBP repeat)ₙ-linker-RT
[1252] Configuration 2: RT-linker-(RBP repeat)ₙ-linker-Cas9
[1253] Configuration 3: Cas9-linker-RT-linker-(RBP repeat)ₙ

[1254] The sequences of the exemplary gene modifying polypeptides are given below:

TABLE S1
Exemplary gene modifying sequences for Configuration 1 (i.e., Cas9-linker (RBP repeat)n-linker-RT)

| | | SEQ ID |
|---|---|---|
| Identifier | Full Amino Acid Sequence | NO: |
| PL11941 | MPAAKRVKLDGGDKKYSIGLDIGTNSVGWAVITDEYKVPSKKFKVLGNTDRHSIKKNLIGALLFDSGETAEATRLKRTARRRYTRRKNRICYLQEIFSNEMAKV | 16,001 |
| | DDSFFHRLEESFLVEEDKKHERHPIFGNIVDEVAYHEKYPTIYHLRKKLVDSTDKADLRLIYLALAHMIKFRGHFLIEGDLNPDNSDVDKLFIQLVQTYNQLFEE | |
| | NPINASGVDAKAILSARLSKSRRLENLIAQLPGEKKNGLFGNLIALSLGLTPNFKSNFDLAEDAKLQLSKDTYDDDLDNLLAQIGDQYADLFLAAKNLSDAILLS | |
| | DILRVNTEITKAPLSASMIKRYDEHHQDLTLLKALVRQQLPEKYKEIFFDQSKNGYAGYIDGGASQEEFYKFIKPILEKMDGTEELLVKLNREDLLRKQRTFDNG | |
| | SIPHQIHLGELHAILRRQEDFYPFLKDNREKIEKILTFRIPYYVGPLARGNSRFAWMTRKSEETITPWNFEEVVDKGASAQSFIERMTNFDKNLPNEKVLPKHSL | |
| | LYEYFTVYNELTKVKYVTEGMRKPAFLSGEQKKAIVDLLFKTNRKVTVKQLKEDYFKKIECFDSVEISGVEDRFNASLGTYHDLLKIIKDKDFLDNEENEDILEDIV | |
| | LTLTLFEDREMIEERLKTYAHLFDDKVMKQLKRRRYTGWGRLSRKLINGIRDKQSGKTILDFLKSDGFANRNFMQLIHDDSLTFKEDIQKAQVSGQGDSLHE | |
| | HIANLAGSPAIKKGILQTVKVVDELVKVMGRHKPENIVIEMARENQTTQKGQKNSRERMKRIEEGIKELGSQILKEHPVENTQLQNEKLYLYYLQNGRDMYV | |
| | DQELDINRLSDYDVDHIVPQSFLKDDSIDNKVLTRSDKARGKSDNVPSEEVVKKMKNYWRQLLNAKLITQRKFDNLTKAERGGLSELDKAGFIKRQLVETRQI | |
| | TKHVAQILDSRMNTKYDENDKLIREVKVITLKSKLVSDFRKDFQFYKVREINNYHHAHDAYLNAVVGTALIKKYPKLESEFVYGDYKVYDVRKMIAKSEQEIGK | |
| | ATAKYFFYSNIMNFFKTEITLANGEIRKRPLIETNGETGEIVWDKGRDFATVRKVLSMPQVNIVKKTEVQTGGFSKESILPKRNSDKLIARKKDWDPKKYGGFD | |
| | SPTVAYSVLVVAKVEKGKSKKLKSVKELLGITIMERSSFEKNPIDFLEAKGYKEVKKDLIIKLPKYSLFELENGRKRMLASAGELQKGNELALPSKYVNFLYLASHY | |
| | EKLKGSPEDNEQKQLFVEQHKHYLDEIIEQISEFSKRVILADANLDKVLSAYNKHRDKPIREQAENIIHLFTLTNLGAPAAFKYFDTTIDRKRYTSTKEVLDATLIH | |
| | QSITGLYETRIDLSQLGGDAEAAAKEAAAKEAAAKEAAAKALEAEAAAKEAAAKEAAAKEAAAKAMASNFTQFVLVDNGGTGDVTVAPSNFANGIAEWIS | |
| | SNSRSQAYKVTCSVRQSSAQNRKYTIKVEVPKGAWRSYLNMELTIPIFATNSDCELIVKAMQGLLKDGNPIPSAIAANSGIYAEAAAKEAAAKEAAAKEAAAK | |
| | ALEAEAAAKEAAAKEAAAKEAAAKATAPLEEEYRLFLEAPIQNVTLLEQWKREIPKVWAEINPPGLASTQAPIHVQLLSTALPVRVRQYPITLEAKRSLRETIRK | |
| | FRAAGILRPVHSPWNTPLLPVRKSGTSEYRMVQDLREVNKRVETIHPTVPNPYTLLSLLPPDRIWYSVLDLKDAFFCIPLAPESQLIFAFEWADAEEGESGQLT | |
| | WTRLPQGFKNSPTLFNEALNRDLQGFRLDHPSVSLLQYVDDLLIAADTQAACLSATRDLLMTLAELGYRVSGKKAQLCQEEVTYLGFKIHKGSRSLSNSRTQA | |
| | ILQIPVPKTKRQVREFLGKIGYCRLFIPGFAELAQPLYAATRPGNDPLVWGEKEEEAFQSLKLALTQPPALALPSLDKPFQLFVEETSGAAKGVLTQALGPWKR | |
| | PVAYLSKRLDPVAAGWPRCLRAIAAAALLTREASKLTFGQDIEITSSHNLESLLRSPPDKWLTNARITQYQVLLLDPPRVRFKQTAALNPATLLPETDDTLPIHH | |
| | CLDTLDSLTSTRPDLTDQPLAQAEATLFTDGSSYIRDGKRYAGAAVVTLDSVIWAEPLPIGTSAQKAELIALTKALEWSKDKSVNIYTDSRYAFATLHVHGMIY | |
| | RERGWLTAGGKAIKNAPEILALLTAVWLPKRVAVMHCKGHQKDDAPTSTGNRRADEVAREVAIRPLSTQATISKRTADGSEFESPKKKAKVE | |
| PL11942 | MPAAKRVKLDGGDKKYSIGLDIGTNSVGWAVITDEYKVPSKKFKVLGNTDRHSIKKNLIGALLFDSGETAEATRLKRTARRRYTRRKNRICYLQEIFSNEMAKV | 16,002 |
| | DDSFFHRLEESFLVEEDKKHERHPIFGNIVDEVAYHEKYPTIYHLRKKLVDSTDKADLRLIYLALAHMIKFRGHFLIEGDLNPDNSDVDKLFIQLVQTYNQLFEE | |
| | NPINASGVDAKAILSARLSKSRRLENLIAQLPGEKKNGLFGNLIALSLGLTPNFKSNFDLAEDAKLQLSKDTYDDDLDNLLAQIGDQYADLFLAAKNLSDAILLS | |
| | DILRVNTEITKAPLSASMIKRYDEHHQDLTLLKALVRQQLPEKYKEIFFDQSKNGYAGYIDGGASQEEFYKFIKPILEKMDGTEELLVKLNREDLLRKQRTFDNG | |
| | SIPHQIHLGELHAILRRQEDFYPFLKDNREKIEKILTFRIPYYVGPLARGNSRFAWMTRKSEETITPWNFEEVVDKGASAQSFIERMTNFDKNLPNEKVLPKHSL | |
| | LYEYFTVYNELTKVKYVTEGMRKPAFLSGEQKKAIVDLLFKTNRKVTVKQLKEDYFKKIECFDSVEISGVEDRFNASLGTYHDLLKIIKDKDFLDNEENEDILEDIV | |
| | LTLTLFEDREMIEERLKTYAHLFDDKVMKQLKRRRYTGWGRLSRKLINGIRDKQSGKTILDFLKSDGFANRNFMQLIHDDSLTFKEDIQKAQVSGQGDSLHE | |
| | HIANLAGSPAIKKGILQTVKVVDELVKVMGRHKPENIVIEMARENQTTQKGQKNSRERMKRIEEGIKELGSQILKEHPVENTQLQNEKLYLYYLQNGRDMYV | |
| | DQELDINRLSDYDVDHIVPQSFLKDDSIDNKVLTRSDKARGKSDNVPSEEVVKKMKNYWRQLLNAKLITQRKFDNLTKAERGGLSELDKAGFIKRQLVETRQI | |
| | TKHVAQILDSRMNTKYDENDKLIREVKVITLKSKLVSDFRKDFQFYKVREINNYHHAHDAYLNAVVGTALIKKYPKLESEFVYGDYKVYDVRKMIAKSEQEIGK | |
| | ATAKYFFYSNIMNFFKTEITLANGEIRKRPLIETNGETGEIVWDKGRDFATVRKVLSMPQVNIVKKTEVQTGGFSKESILPKRNSDKLIARKKDWDPKKYGGFD | |
| | SPTVAYSVLVVAKVEKGKSKKLKSVKELLGITIMERSSFEKNPIDFLEAKGYKEVKKDLIIKLPKYSLFELENGRKRMLASAGELQKGNELALPSKYVNFLYLASHY | |
| | EKLKGSPEDNEQKQLFVEQHKHYLDEIIEQISEFSKRVILADANLDKVLSAYNKHRDKPIREQAENIIHLFTLTNLGAPAAFKYFDTTIDRKRYTSTKEVLDATLIH | |
| | QSITGLYETRIDLSQLGGDAEAAAKEAAAKEAAAKEAAAKALEAEAAAKEAAAKEAAAKEAAAKAMASNFTQFVLVDNGGTGDVTVAPSNFANGIAEWIS | |
| | SNSRSQAYKVTCSVRQSSAQNRKYTIKVEVPKGAWRSYLNMELTIPIFATNSDCELIVKAMQGLLKDGNPIPSAIAANSGIYSGGSSGGSSGSETPGTSESATP | |
| | ESSGGSSGGSSTAPLEEEYRLFLEAPIQNVTLLEQWKREIPKVWAEINPPGLASTQAPIHVQLLSTALPVRVRQYPITLEAKRSLRETIRKFRAAGILRPVHSPW | |
| | NTPLLPVRKSGTSEYRMVQDLREVNKRVETIHPTVPNPYTLLSLLPPDRIWYSVLDLKDAFFCIPLAPESQLIFAFEWADAEEGESGQLTWTRLPQGFKNSPTL | |
| | FNEALNRDLQGFRLDHPSVSLLQYVDDLLIAADTQAACLSATRDLLMTLAELGYRVSGKKAQLCQEEVTYLGFKIHKGSRSLSNSRTQAILQIPVPKTKRQVRE | |
| | FLGKIGYCRLFIPGFAELAQPLYAATRPGNDPLVWGEKEEEAFQSLKLALTQPPALALPSLDKPFQLFVEETSGAAKGVLTQALGPWKRPVAYLSKRLDPVAA | |
| | GWPRCLRAIAAAALLTREASKLTFGQDIEITSSHNLESLLRSPPDKWLTNARITQYQVLLLDPPRVRFKQTAALNPATLLPETDDTLPIHHCLDTLDSLTSTRPDL | |
| | TDQPLAQAEATLFTDGSSYIRDGKRYAGAAVVTLDSVIWAEPLPIGTSAQKAELIALTKALEWSKDKSVNIYTDSRYAFATLHVHGMIYRERGWLTAGGKAIK | |
| | NAPEILALLTAVWLPKRVAVMHCKGHQKDDAPTSTGNRRADEVAREVAIRPLSTQATISKRTADGSEFESPKKKAKVE | |
| PL11943 | MPAAKRVKLDGGDKKYSIGLDIGTNSVGWAVITDEYKVPSKKFKVLGNTDRHSIKKNLIGALLFDSGETAEATRLKRTARRRYTRRKNRICYLQEIFSNEMAKV | |
| | DDSFFHRLEESFLVEEDKKHERHPIFGNIVDEVAYHEKYPTIYHLRKKLVDSTDKADLRLIYLALAHMIKFRGHFLIEGDLNPDNSDVDKLFIQLVQTYNQLFEE | |
| | NPINASGVDAKAILSARLSKSRRLENLIAQLPGEKKNGLFGNLIALSLGLTPNFKSNFDLAEDAKLQLSKDTYDDDLDNLLAQIGDQYADLFLAAKNLSDAILLS | |
| | DILRVNTEITKAPLSASMIKRYDEHHQDLTLLKALVRQQLPEKYKEIFFDQSKNGYAGYIDGGASQEEFYKFIKPILEKMDGTEELLVKLNREDLLRKQRTFDNG | |
| | SIPHQIHLGELHAILRRQEDFYPFLKDNREKIEKILTFRIPYYVGPLARGNSRFAWMTRKSEETITPWNFEEVVDKGASAQSFIERMTNFDKNLPNEKVLPKHSL | |
| | LYEYFTVYNELTKVKYVTEGMRKPAFLSGEQKKAIVDLLFKTNRKVTVKQLKEDYFKKIECFDSVEISGVEDRFNASLGTYHDLLKIIKDKDFLDNEENEDILEDIV | 16,003 |
| | LTLTLFEDREMIEERLKTYAHLFDDKVMKQLKRRRYTGWGRLSRKLINGIRDKQSGKTILDFLKSDGFANRNFMQLIHDDSLTFKEDIQKAQVSGQGDSLHE | |
| | HIANLAGSPAIKKGILQTVKVVDELVKVMGRHKPENIVIEMARENQTTQKGQKNSRERMKRIEEGIKELGSQILKEHPVENTQLQNEKLYLYYLQNGRDMYV | |
| | DQELDINRLSDYDVDHIVPQSFLKDDSIDNKVLTRSDKARGKSDNVPSEEVVKKMKNYWRQLLNAKLITQRKFDNLTKAERGGLSELDKAGFIKRQLVETRQI | |
| | TKHVAQILDSRMNTKYDENDKLIREVKVITLKSKLVSDFRKDFQFYKVREINNYHHAHDAYLNAVVGTALIKKYPKLESEFVYGDYKVYDVRKMIAKSEQEIGK | |
| | ATAKYFFYSNIMNFFKTEITLANGEIRKRPLIETNGETGEIVWDKGRDFATVRKVLSMPQVNIVKKTEVQTGGFSKESILPKRNSDKLIARKKDWDPKKYGGFD | |
| | SPTVAYSVLVVAKVEKGKSKKLKSVKELLGITIMERSSFEKNPIDFLEAKGYKEVKKDLIIKLPKYSLFELENGRKRMLASAGELQKGNELALPSKYVNFLYLASHY | |
| | EKLKGSPEDNEQKQLFVEQHKHYLDEIIEQISEFSKRVILADANLDKVLSAYNKHRDKPIREQAENIIHLFTLTNLGAPAAFKYFDTTIDRKRYTSTKEVLDATLIH | |
| | QSITGLYETRIDLSQLGGDAEAAAKEAAAKEAAAKEAAAKALEAEAAAKEAAAKEAAAKEAAAKAMASNFTQFVLVDNGGTGDVTVAPSNFANGIAEWIS | |
| | SNSRSQAYKVTCSVRQSSAQNRKYTIKVEVPKGAWRSYLNMELTIPIFATNSDCELIVKAMQGLLKDGNPIPSAIAANSGIYGSSGSSGSSGSSGSSGSSTAPL | |
| | EEEYRLFLEAPIQNVTLLEQWKREIPKVWAEINPPGLASTQAPIHVQLLSTALPVRVRQYPITLEAKRSLRETIRKFRAAGILRPVHSPWNTPLLPVRKSGTSEYR | |
| | MVQDLREVNKRVETIHPTVPNPYTLLSLLPPDRIWYSVLDLKDAFFCIPLAPESQLIFAFEWADAEEGESGQLTWTRLPQGFKNSPTLFNEALNRDLQGFRLD | |
| | HPSVSLLQYVDDLLIAADTQAACLSATRDLLMTLAELGYRVSGKKAQLCQEEVTYLGFKIHKGSRSLSNSRTQAILQIPVPKTKRQVREFLGKIGYCRLFIPGFAE | |
| | LAQPLYAATRPGNDPLVWGEKEEEAFQSLKLALTQPPALALPSLDKPFQLFVEETSGAAKGVLTQALGPWKRPVAYLSKRLDPVAAGWPRCLRAIAAAALLT | |
| | REASKLTFGQDIEITSSHNLESLLRSPPDKWLTNARITQYQVLLLDPPRVRFKQTAALNPATLLPETDDTLPIHHCLDTLDSLTSTRPDLTDQPLAQAEATLFTD | |
| | GSSYIRDGKRYAGAAVVTLDSVIWAEPLPIGTSAQKAELIALTKALEWSKDKSVNIYTDSRYAFATLHVHGMIYRERGWLTAGGKAIKNAPEILALLTAVWLPK | |
| | RVAVMHCKGHQKDDAPTSTGNRRADEVAREVAIRPLSTQATISKRTADGSEFESPKKKAKVE | |
| PL11944 | MPAAKRVKLDGGDKKYSIGLDIGTNSVGWAVITDEYKVPSKKFKVLGNTDRHSIKKNLIGALLFDSGETAEATRLKRTARRRYTRRKNRICYLQEIFSNEMAKV | 16,004 |
| | DDSFFHRLEESFLVEEDKKHERHPIFGNIVDEVAYHEKYPTIYHLRKKLVDSTDKADLRLIYLALAHMIKFRGHFLIEGDLNPDNSDVDKLFIQLVQTYNQLFEE | |
| | NPINASGVDAKAILSARLSKSRRLENLIAQLPGEKKNGLFGNLIALSLGLTPNFKSNFDLAEDAKLQLSKDTYDDDLDNLLAQIGDQYADLFLAAKNLSDAILLS | |
| | DILRVNTEITKAPLSASMIKRYDEHHQDLTLLKALVRQQLPEKYKEIFFDQSKNGYAGYIDGGASQEEFYKFIKPILEKMDGTEELLVKLNREDLLRKQRTFDNG | |
| | SIPHQIHLGELHAILRRQEDFYPFLKDNREKIEKILTFRIPYYVGPLARGNSRFAWMTRKSEETITPWNFEEVVDKGASAQSFIERMTNFDKNLPNEKVLPKHSL | |
| | LYEYFTVYNELTKVKYVTEGMRKPAFLSGEQKKAIVDLLFKTNRKVTVKQLKEDYFKKIECFDSVEISGVEDRFNASLGTYHDLLKIIKDKDFLDNEENEDILEDIV | |
| | LTLTLFEDREMIEERLKTYAHLFDDKVMKQLKRRRYTGWGRLSRKLINGIRDKQSGKTILDFLKSDGFANRNFMQLIHDDSLTFKEDIQKAQVSGQGDSLHE | |
| | HIANLAGSPAIKKGILQTVKVVDELVKVMGRHKPENIVIEMARENQTTQKGQKNSRERMKRIEEGIKELGSQILKEHPVENTQLQNEKLYLYYLQNGRDMYV | |
| | DQELDINRLSDYDVDHIVPQSFLKDDSIDNKVLTRSDKARGKSDNVPSEEVVKKMKNYWRQLLNAKLITQRKFDNLTKAERGGLSELDKAGFIKRQLVETRQI | |
| | TKHVAQILDSRMNTKYDENDKLIREVKVITLKSKLVSDFRKDFQFYKVREINNYHHAHDAYLNAVVGTALIKKYPKLESEFVYGDYKVYDVRKMIAKSEQEIGK | |
| | ATAKYFFYSNIMNFFKTEITLANGEIRKRPLIETNGETGEIVWDKGRDFATVRKVLSMPQVNIVKKTEVQTGGFSKESILPKRNSDKLIARKKDWDPKKYGGFD | |
| | SPTVAYSVLVVAKVEKGKSKKLKSVKELLGITIMERSSFEKNPIDFLEAKGYKEVKKDLIIKLPKYSLFELENGRKRMLASAGELQKGNELALPSKYVNFLYLASHY | |
| | EKLKGSPEDNEQKQLFVEQHKHYLDEIIEQISEFSKRVILADANLDKVLSAYNKHRDKPIREQAENIIHLFTLTNLGAPAAFKYFDTTIDRKRYTSTKEVLDATLIH | |
| | QSITGLYETRIDLSQLGGDAEAAAKEAAAKEAAAKEAAAKALEAEAAAKEAAAKEAAAKEAAAKAMASNFTQFVLVDNGGTGDVTVAPSNFANGIAEWIS | |
| | SNSRSQAYKVTCSVRQSSAQNRKYTIKVEVPKGAWRSYLNMELTIPIFATNSDCELIVKAMQGLLKDGNPIPSAIAANSGIYGSSGGGEAAAKTAPLEEEYRLF | |
| | LEAPIQNVTLLEQWKREIPKVWAEINPPGLASTQAPIHVQLLSTALPVRVRQYPITLEAKRSLRETIRKFRAAGILRPVHSPWNTPLLPVRKSGTSEYRMVQDL | |
| | REVNKRVETIHPTVPNPYTLLSLLPPDRIWYSVLDLKDAFFCIPLAPESQLIFAFEWADAEEGESGQLTWTRLPQGFKNSPTLFNEALNRDLQGFRLDHPSVSL | |
| | LQYVDDLLIAADTQAACLSATRDLLMTLAELGYRVSGKKAQLCQEEVTYLGFKIHKGSRSLSNSRTQAILQIPVPKTKRQVREFLGKIGYCRLFIPGFAELAQPLY | |
| | AATRPGNDPLVWGEKEEEAFQSLKLALTQPPALALPSLDKPFQLFVEETSGAAKGVLTQALGPWKRPVAYLSKRLDPVAAGWPRCLRAIAAAALLTREASKL | |
| | TFGQDIEITSSHNLESLLRSPPDKWLTNARITQYQVLLLDPPRVRFKQTAALNPATLLPETDDTLPIHHCLDTLDSLTSTRPDLTDQPLAQAEATLFTDGSSYIRD | |
| | GKRYAGAAVVTLDSVIWAEPLPIGTSAQKAELIALTKALEWSKDKSVNIYTDSRYAFATLHVHGMIYRERGWLTAGGKAIKNAPEILALLTAVWLPKRVAVM | |
| | HCKGHQKDDAPTSTGNRRADEVAREVAIRPLSTQATISKRTADGSEFESPKKKAKVE | |
| PL11945/ | MPAAKRVKLDGGDKKYSIGLDIGTNSVGWAVITDEYKVPSKKFKVLGNTDRHSIKKNLIGALLFDSGETAEATRLKRTARRRYTRRKNRICYLQEIFSNEMAKV | 16,005 |
| PL24678 | DDSFFHRLEESFLVEEDKKHERHPIFGNIVDEVAYHEKYPTIYHLRKKLVDSTDKADLRLIYLALAHMIKFRGHFLIEGDLNPDNSDVDKLFIQLVQTYNQLFEE | |
| | NPINASGVDAKAILSARLSKSRRLENLIAQLPGEKKNGLFGNLIALSLGLTPNFKSNFDLAEDAKLQLSKDTYDDDLDNLLAQIGDQYADLFLAAKNLSDAILLS | |
| | DILRVNTEITKAPLSASMIKRYDEHHQDLTLLKALVRQQLPEKYKEIFFDQSKNGYAGYIDGGASQEEFYKFIKPILEKMDGTEELLVKLNREDLLRKQRTFDNG | |
| | SIPHQIHLGELHAILRRQEDFYPFLKDNREKIEKILTFRIPYYVGPLARGNSRFAWMTRKSEETITPWNFEEVVDKGASAQSFIERMTNFDKNLPNEKVLPKHSL | |
| | LYEYFTVYNELTKVKYVTEGMRKPAFLSGEQKKAIVDLLFKTNRKVTVKQLKEDYFKKIECFDSVEISGVEDRFNASLGTYHDLLKIIKDKDFLDNEENEDILEDIV | |
| | LTLTLFEDREMIEERLKTYAHLFDDKVMKQLKRRRYTGWGRLSRKLINGIRDKQSGKTILDFLKSDGFANRNFMQLIHDDSLTFKEDIQKAQVSGQGDSLHE | |
| | HIANLAGSPAIKKGILQTVKVVDELVKVMGRHKPENIVIEMARENQTTQKGQKNSRERMKRIEEGIKELGSQILKEHPVENTQLQNEKLYLYYLQNGRDMYV | |
| | DQELDINRLSDYDVDHIVPQSFLKDDSIDNKVLTRSDKARGKSDNVPSEEVVKKMKNYWRQLLNAKLITQRKFDNLTKAERGGLSELDKAGFIKRQLVETRQI | |
| | TKHVAQILDSRMNTKYDENDKLIREVKVITLKSKLVSDFRKDFQFYKVREINNYHHAHDAYLNAVVGTALIKKYPKLESEFVYGDYKVYDVRKMIAKSEQEIGK | |
| | ATAKYFFYSNIMNFFKTEITLANGEIRKRPLIETNGETGEIVWDKGRDFATVRKVLSMPQVNIVKKTEVQTGGFSKESILPKRNSDKLIARKKDWDPKKYGGFD | |
| | SPTVAYSVLVVAKVEKGKSKKLKSVKELLGITIMERSSFEKNPIDFLEAKGYKEVKKDLIIKLPKYSLFELENGRKRMLASAGELQKGNELALPSKYVNFLYLASHY | |
| | EKLKGSPEDNEQKQLFVEQHKHYLDEIIEQISEFSKRVILADANLDKVLSAYNKHRDKPIREQAENIIHLFTLTNLGAPAAFKYFDTTIDRKRYTSTKEVLDATLIH | |
| | QSITGLYETRIDLSQLGGDAEAAAKEAAAKEAAAKEAAAKALEAEAAAKEAAAKEAAAKEAAAKAMASNFTQFVLVDNGGTGDVTVAPSNFANGIAEWIS | |
| | SNSRSQAYKVTCSVRQSSAQNRKYTIKVEVPKGAWRSYLNMELTIPIFATNSDCELIVKAMQGLLKDGNPIPSAIAANSGIYGGSGGSMASNFTQFVLVDNG | |
| | GTGDVTVAPSNFANGIAEWISSNSRSQAYKVTCSVRQSSAQNRKYTIKVEVPKGAWRSYLNMELTIPIFATNSDCELIVKAMQGLLKDGNPIPSAIAANSGIY | |
| | AEAAAKEAAAKEAAAKEAAAKALEAEAAAKEAAAKEAAAKEAAAKATAPLEEEYRLFLEAPIQNVTLLEQWKREIPKVWAEINPPGLASTQAPIHVQLLSTAL | |
| | PVRVRQYPITLEAKRSLRETIRKFRAAGILRPVHSPWNTPLLPVRKSGTSEYRMVQDLREVNKRVETIHPTVPNPYTLLSLLPPDRIWYSVLDLKDAFFCIPLAPE | |
| | SQLIFAFEWADAEEGESGQLTWTRLPQGFKNSPTLFNEALNRDLQGFRLDHPSVSLLQYVDDLLIAADTQAACLSATRDLLMTLAELGYRVSGKKAQLCQEE | |
| | VTYLGFKIHKGSRSLSNSRTQAILQIPVPKTKRQVREFLGKIGYCRLFIPGFAELAQPLYAATRPGNDPLVWGEKEEEAFQSLKLALTQPPALALPSLDKPFQLFV | |
| | EETSGAAKGVLTQALGPWKRPVAYLSKRLDPVAAGWPRCLRAIAAAALLTREASKLTFGQDIEITSSHNLESLLRSPPDKWLTNARITQYQVLLLDPPRVRFK | |
| | QTAALNPATLLPETDDTLPIHHCLDTLDSLTSTRPDLTDQPLAQAEATLFTDGSSYIRDGKRYAGAAVVTLDSVIWAEPLPIGTSAQKAELIALTKALEWSKDKS | |
| | VNIYTDSRYAFATLHVHGMIYRERGWLTAGGKAIKNAPEILALLTAVWLPKRVAVMHCKGHQKDDAPTSTGNRRADEVAREVAIRPLSTQATISKRTADGS | |
| | EFESPKKKAKVE | |
| PL11946 | MPAAKRVKLDGGDKKYSIGLDIGTNSVGWAVITDEYKVPSKKFKVLGNTDRHSIKKNLIGALLFDSGETAEATRLKRTARRRYTRRKNRICYLQEIFSNEMAKV | 16,006 |
| | DDSFFHRLEESFLVEEDKKHERHPIFGNIVDEVAYHEKYPTIYHLRKKLVDSTDKADLRLIYLALAHMIKFRGHFLIEGDLNPDNSDVDKLFIQLVQTYNQLFEE | |
| | NPINASGVDAKAILSARLSKSRRLENLIAQLPGEKKNGLFGNLIALSLGLTPNFKSNFDLAEDAKLQLSKDTYDDDLDNLLAQIGDQYADLFLAAKNLSDAILLS | |
| | DILRVNTEITKAPLSASMIKRYDEHHQDLTLLKALVRQQLPEKYKEIFFDQSKNGYAGYIDGGASQEEFYKFIKPILEKMDGTEELLVKLNREDLLRKQRTFDNG | |
| | SIPHQIHLGELHAILRRQEDFYPFLKDNREKIEKILTFRIPYYVGPLARGNSRFAWMTRKSEETITPWNFEEVVDKGASAQSFIERMTNFDKNLPNEKVLPKHSL | |
| | LYEYFTVYNELTKVKYVTEGMRKPAFLSGEQKKAIVDLLFKTNRKVTVKQLKEDYFKKIECFDSVEISGVEDRFNASLGTYHDLLKIIKDKDFLDNEENEDILEDIV | |
| | LTLTLFEDREMIEERLKTYAHLFDDKVMKQLKRRRYTGWGRLSRKLINGIRDKQSGKTILDFLKSDGFANRNFMQLIHDDSLTFKEDIQKAQVSGQGDSLHE | |
| | HIANLAGSPAIKKGILQTVKVVDELVKVMGRHKPENIVIEMARENQTTQKGQKNSRERMKRIEEGIKELGSQILKEHPVENTQLQNEKLYLYYLQNGRDMYV | |
| | DQELDINRLSDYDVDHIVPQSFLKDDSIDNKVLTRSDKARGKSDNVPSEEVVKKMKNYWRQLLNAKLITQRKFDNLTKAERGGLSELDKAGFIKRQLVETRQI | |
| | TKHVAQILDSRMNTKYDENDKLIREVKVITLKSKLVSDFRKDFQFYKVREINNYHHAHDAYLNAVVGTALIKKYPKLESEFVYGDYKVYDVRKMIAKSEQEIGK | |
| | ATAKYFFYSNIMNFFKTEITLANGEIRKRPLIETNGETGEIVWDKGRDFATVRKVLSMPQVNIVKKTEVQTGGFSKESILPKRNSDKLIARKKDWDPKKYGGFD | |
| | SPTVAYSVLVVAKVEKGKSKKLKSVKELLGITIMERSSFEKNPIDFLEAKGYKEVKKDLIIKLPKYSLFELENGRKRMLASAGELQKGNELALPSKYVNFLYLASHY | |
| | EKLKGSPEDNEQKQLFVEQHKHYLDEIIEQISEFSKRVILADANLDKVLSAYNKHRDKPIREQAENIIHLFTLTNLGAPAAFKYFDTTIDRKRYTSTKEVLDATLIH | |
| | QSITGLYETRIDLSQLGGDAEAAAKEAAAKEAAAKEAAAKALEAEAAAKEAAAKEAAAKEAAAKAMASNFTQFVLVDNGGTGDVTVAPSNFANGIAEWIS | |
| | SNSRSQAYKVTCSVRQSSAQNRKYTIKVEVPKGAWRSYLNMELTIPIFATNSDCELIVKAMQGLLKDGNPIPSAIAANSGIYGGSGGSMASNFTQFVLVDNG | |
| | GTGDVTVAPSNFANGIAEWISSNSRSQAYKVTCSVRQSSAQNRKYTIKVEVPKGAWRSYLNMELTIPIFATNSDCELIVKAMQGLLKDGNPIPSAIAANSGIY | |
| | SGGSSGGSSGSETPGTSESATPESSGGSSGGSSTAPLEEEYRLFLEAPIQNVTLLEQWKREIPKVWAEINPPGLASTQAPIHVQLLSTALPVRVRQYPITLEAKR | |
| | SLRETIRKFRAAGILRPVHSPWNTPLLPVRKSGTSEYRMVQDLREVNKRVETIHPTVPNPYTLLSLLPPDRIWYSVLDLKDAFFCIPLAPESQLIFAFEWADAEE | |
| | GESGQLTWTRLPQGFKNSPTLFNEALNRDLQGFRLDHPSVSLLQYVDDLLIAADTQAACLSATRDLLMTLAELGYRVSGKKAQLCQEEVTYLGFKIHKGSRSL | |
| | SNSRTQAILQIPVPKTKRQVREFLGKIGYCRLFIPGFAELAQPLYAATRPGNDPLVWGEKEEEAFQSLKLALTQPPALALPSLDKPFQLFVEETSGAAKGVLTQ | |
| | ALGPWKRPVAYLSKRLDPVAAGWPRCLRAIAAAALLTREASKLTFGQDIEITSSHNLESLLRSPPDKWLTNARITQYQVLLLDPPRVRFKQTAALNPATLLPET | |
| | DDTLPIHHCLDTLDSLTSTRPDLTDQPLAQAEATLFTDGSSYIRDGKRYAGAAVVTLDSVIWAEPLPIGTSAQKAELIALTKALEWSKDKSVNIYTDSRYAFATL | |
| | HVHGMIYRERGWLTAGGKAIKNAPEILALLTAVWLPKRVAVMHCKGHQKDDAPTSTGNRRADEVAREVAIRPLSTQATISKRTADGSEFESPKKKAKVE | |
| PL11947 | MPAAKRVKLDGGDKKYSIGLDIGTNSVGWAVITDEYKVPSKKFKVLGNTDRHSIKKNLIGALLFDSGETAEATRLKRTARRRYTRRKNRICYLQEIFSNEMAKV | 16,007 |
| | DDSFFHRLEESFLVEEDKKHERHPIFGNIVDEVAYHEKYPTIYHLRKKLVDSTDKADLRLIYLALAHMIKFRGHFLIEGDLNPDNSDVDKLFIQLVQTYNQLFEE | |
| | NPINASGVDAKAILSARLSKSRRLENLIAQLPGEKKNGLFGNLIALSLGLTPNFKSNFDLAEDAKLQLSKDTYDDDLDNLLAQIGDQYADLFLAAKNLSDAILLS | |
| | DILRVNTEITKAPLSASMIKRYDEHHQDLTLLKALVRQQLPEKYKEIFFDQSKNGYAGYIDGGASQEEFYKFIKPILEKMDGTEELLVKLNREDLLRKQRTFDNG | |
| | SIPHQIHLGELHAILRRQEDFYPFLKDNREKIEKILTFRIPYYVGPLARGNSRFAWMTRKSEETITPWNFEEVVDKGASAQSFIERMTNFDKNLPNEKVLPKHSL | |
| | LYEYFTVYNELTKVKYVTEGMRKPAFLSGEQKKAIVDLLFKTNRKVTVKQLKEDYFKKIECFDSVEISGVEDRFNASLGTYHDLLKIIKDKDFLDNEENEDILEDIV | |
| | LTLTLFEDREMIEERLKTYAHLFDDKVMKQLKRRRYTGWGRLSRKLINGIRDKQSGKTILDFLKSDGFANRNFMQLIHDDSLTFKEDIQKAQVSGQGDSLHE | |
| | HIANLAGSPAIKKGILQTVKVVDELVKVMGRHKPENIVIEMARENQTTQKGQKNSRERMKRIEEGIKELGSQILKEHPVENTQLQNEKLYLYYLQNGRDMYV | |
| | DQELDINRLSDYDVDHIVPQSFLKDDSIDNKVLTRSDKARGKSDNVPSEEVVKKMKNYWRQLLNAKLITQRKFDNLTKAERGGLSELDKAGFIKRQLVETRQI | |
| | TKHVAQILDSRMNTKYDENDKLIREVKVITLKSKLVSDFRKDFQFYKVREINNYHHAHDAYLNAVVGTALIKKYPKLESEFVYGDYKVYDVRKMIAKSEQEIGK | |
| | ATAKYFFYSNIMNFFKTEITLANGEIRKRPLIETNGETGEIVWDKGRDFATVRKVLSMPQVNIVKKTEVQTGGFSKESILPKRNSDKLIARKKDWDPKKYGGFD | |
| | SPTVAYSVLVVAKVEKGKSKKLKSVKELLGITIMERSSFEKNPIDFLEAKGYKEVKKDLIIKLPKYSLFELENGRKRMLASAGELQKGNELALPSKYVNFLYLASHY | |
| | EKLKGSPEDNEQKQLFVEQHKHYLDEIIEQISEFSKRVILADANLDKVLSAYNKHRDKPIREQAENIIHLFTLTNLGAPAAFKYFDTTIDRKRYTSTKEVLDATLIH | |
| | QSITGLYETRIDLSQLGGDAEAAAKEAAAKEAAAKEAAAKALEAEAAAKEAAAKEAAAKEAAAKAMASNFTQFVLVDNGGTGDVTVAPSNFANGIAEWIS | |
| | SNSRSQAYKVTCSVRQSSAQNRKYTIKVEVPKGAWRSYLNMELTIPIFATNSDCELIVKAMQGLLKDGNPIPSAIAANSGIYGGSGGSMASNFTQFVLVDNG | |
| | GTGDVTVAPSNFANGIAEWISSNSRSQAYKVTCSVRQSSAQNRKYTIKVEVPKGAWRSYLNMELTIPIFATNSDCELIVKAMQGLLKDGNPIPSAIAANSGIY | |
| | GSSGSSGSSGSSGSSGSSTAPLEEEYRLFLEAPIQNVTLLEQWKREIPKVWAEINPPGLASTQAPIHVQLLSTALPVRVRQYPITLEAKRSLRETIRKFRAAGILRP | |
| | VHSPWNTPLLPVRKSGTSEYRMVQDLREVNKRVETIHPTVPNPYTLLSLLPPDRIWYSVLDLKDAFFCIPLAPESQLIFAFEWADAEEGESGQLTWTRLPQGF | |
| | KNSPTLFNEALNRDLQGFRLDHPSVSLLQYVDDLLIAADTQAACLSATRDLLMTLAELGYRVSGKKAQLCQEEVTYLGFKIHKGSRSLSNSRTQAILQIPVPKT | |
| | KRQVREFLGKIGYCRLFIPGFAELAQPLYAATRPGNDPLVWGEKEEEAFQSLKLALTQPPALALPSLDKPFQLFVEETSGAAKGVLTQALGPWKRPVAYLSKR | |
| | LDPVAAGWPRCLRAIAAAALLTREASKLTFGQDIEITSSHNLESLLRSPPDKWLTNARITQYQVLLLDPPRVRFKQTAALNPATLLPETDDTLPIHHCLDTLDSL | |
| | TSTRPDLTDQPLAQAEATLFTDGSSYIRDGKRYAGAAVVTLDSVIWAEPLPIGTSAQKAELIALTKALEWSKDKSVNIYTDSRYAFATLHVHGMIYRERGWLT | |
| | AGGKAIKNAPEILALLTAVWLPKRVAVMHCKGHQKDDAPTSTGNRRADEVAREVAIRPLSTQATISKRTADGSEFESPKKKAKVE | |
| PL11948 | MPAAKRVKLDGGDKKYSIGLDIGTNSVGWAVITDEYKVPSKKFKVLGNTDRHSIKKNLIGALLFDSGETAEATRLKRTARRRYTRRKNRICYLQEIFSNEMAKV | 16,008 |
| | DDSFFHRLEESFLVEEDKKHERHPIFGNIVDEVAYHEKYPTIYHLRKKLVDSTDKADLRLIYLALAHMIKFRGHFLIEGDLNPDNSDVDKLFIQLVQTYNQLFEE | |
| | NPINASGVDAKAILSARLSKSRRLENLIAQLPGEKKNGLFGNLIALSLGLTPNFKSNFDLAEDAKLQLSKDTYDDDLDNLLAQIGDQYADLFLAAKNLSDAILLS | |
| | DILRVNTEITKAPLSASMIKRYDEHHQDLTLLKALVRQQLPEKYKEIFFDQSKNGYAGYIDGGASQEEFYKFIKPILEKMDGTEELLVKLNREDLLRKQRTFDNG | |
| | SIPHQIHLGELHAILRRQEDFYPFLKDNREKIEKILTFRIPYYVGPLARGNSRFAWMTRKSEETITPWNFEEVVDKGASAQSFIERMTNFDKNLPNEKVLPKHSL | |
| | LYEYFTVYNELTKVKYVTEGMRKPAFLSGEQKKAIVDLLFKTNRKVTVKQLKEDYFKKIECFDSVEISGVEDRFNASLGTYHDLLKIIKDKDFLDNEENEDILEDIV | |
| | LTLTLFEDREMIEERLKTYAHLFDDKVMKQLKRRRYTGWGRLSRKLINGIRDKQSGKTILDFLKSDGFANRNFMQLIHDDSLTFKEDIQKAQVSGQGDSLHE | |
| | HIANLAGSPAIKKGILQTVKVVDELVKVMGRHKPENIVIEMARENQTTQKGQKNSRERMKRIEEGIKELGSQILKEHPVENTQLQNEKLYLYYLQNGRDMYV | |
| | DQELDINRLSDYDVDHIVPQSFLKDDSIDNKVLTRSDKARGKSDNVPSEEVVKKMKNYWRQLLNAKLITQRKFDNLTKAERGGLSELDKAGFIKRQLVETRQI | |
| | TKHVAQILDSRMNTKYDENDKLIREVKVITLKSKLVSDFRKDFQFYKVREINNYHHAHDAYLNAVVGTALIKKYPKLESEFVYGDYKVYDVRKMIAKSEQEIGK | |
| | ATAKYFFYSNIMNFFKTEITLANGEIRKRPLIETNGETGEIVWDKGRDFATVRKVLSMPQVNIVKKTEVQTGGFSKESILPKRNSDKLIARKKDWDPKKYGGFD | |
| | SPTVAYSVLVVAKVEKGKSKKLKSVKELLGITIMERSSFEKNPIDFLEAKGYKEVKKDLIIKLPKYSLFELENGRKRMLASAGELQKGNELALPSKYVNFLYLASHY | |
| | EKLKGSPEDNEQKQLFVEQHKHYLDEIIEQISEFSKRVILADANLDKVLSAYNKHRDKPIREQAENIIHLFTLTNLGAPAAFKYFDTTIDRKRYTSTKEVLDATLIH | |
| | QSITGLYETRIDLSQLGGDAEAAAKEAAAKEAAAKEAAAKALEAEAAAKEAAAKEAAAKEAAAKAMASNFTQFVLVDNGGTGDVTVAPSNFANGIAEWIS | |
| | SNSRSQAYKVTCSVRQSSAQNRKYTIKVEVPKGAWRSYLNMELTIPIFATNSDCELIVKAMQGLLKDGNPIPSAIAANSGIYGGSGGSMASNFTQFVLVDNG | |
| | GTGDVTVAPSNFANGIAEWISSNSRSQAYKVTCSVRQSSAQNRKYTIKVEVPKGAWRSYLNMELTIPIFATNSDCELIVKAMQGLLKDGNPIPSAIAANSGIY | |
| | GSSGGGEAAAKTAPLEEEYRLFLEAPIQNVTLLEQWKREIPKVWAEINPPGLASTQAPIHVQLLSTALPVRVRQYPITLEAKRSLRETIRKFRAAGILRPVHSPW | |
| | NTPLLPVRKSGTSEYRMVQDLREVNKRVETIHPTVPNPYTLLSLLPPDRIWYSVLDLKDAFFCIPLAPESQLIFAFEWADAEEGESGQLTWTRLPQGFKNSPTL | |
| | FNEALNRDLQGFRLDHPSVSLLQYVDDLLIAADTQAACLSATRDLLMTLAELGYRVSGKKAQLCQEEVTYLGFKIHKGSRSLSNSRTQAILQIPVPKTKRQVRE | |
| | FLGKIGYCRLFIPGFAELAQPLYAATRPGNDPLVWGEKEEEAFQSLKLALTQPPALALPSLDKPFQLFVEETSGAAKGVLTQALGPWKRPVAYLSKRLDPVAA | |
| | GWPRCLRAIAAAALLTREASKLTFGQDIEITSSHNLESLLRSPPDKWLTNARITQYQVLLLDPPRVRFKQTAALNPATLLPETDDTLPIHHCLDTLDSLTSTRPDL | |
| | TDQPLAQAEATLFTDGSSYIRDGKRYAGAAVVTLDSVIWAEPLPIGTSAQKAELIALTKALEWSKDKSVNIYTDSRYAFATLHVHGMIYRERGWLTAGGKAIK | |
| | NAPEILALLTAVWLPKRVAVMHCKGHQKDDAPTSTGNRRADEVAREVAIRPLSTQATISKRTADGSEFESPKKKAKVE | |
| PL11949 | MPAAKRVKLDGGDKKYSIGLDIGTNSVGWAVITDEYKVPSKKFKVLGNTDRHSIKKNLIGALLFDSGETAEATRLKRTARRRYTRRKNRICYLQEIFSNEMAKV | 16,009 |
| | DDSFFHRLEESFLVEEDKKHERHPIFGNIVDEVAYHEKYPTIYHLRKKLVDSTDKADLRLIYLALAHMIKFRGHFLIEGDLNPDNSDVDKLFIQLVQTYNQLFEE | |
| | NPINASGVDAKAILSARLSKSRRLENLIAQLPGEKKNGLFGNLIALSLGLTPNFKSNFDLAEDAKLQLSKDTYDDDLDNLLAQIGDQYADLFLAAKNLSDAILLS | |
| | DILRVNTEITKAPLSASMIKRYDEHHQDLTLLKALVRQQLPEKYKEIFFDQSKNGYAGYIDGGASQEEFYKFIKPILEKMDGTEELLVKLNREDLLRKQRTFDNG | |
| | SIPHQIHLGELHAILRRQEDFYPFLKDNREKIEKILTFRIPYYVGPLARGNSRFAWMTRKSEETITPWNFEEVVDKGASAQSFIERMTNFDKNLPNEKVLPKHSL | |
| | LYEYFTVYNELTKVKYVTEGMRKPAFLSGEQKKAIVDLLFKTNRKVTVKQLKEDYFKKIECFDSVEISGVEDRFNASLGTYHDLLKIIKDKDFLDNEENEDILEDIV | |
| | LTLTLFEDREMIEERLKTYAHLFDDKVMKQLKRRRYTGWGRLSRKLINGIRDKQSGKTILDFLKSDGFANRNFMQLIHDDSLTFKEDIQKAQVSGQGDSLHE | |
| | HIANLAGSPAIKKGILQTVKVVDELVKVMGRHKPENIVIEMARENQTTQKGQKNSRERMKRIEEGIKELGSQILKEHPVENTQLQNEKLYLYYLQNGRDMYV | |
| | DQELDINRLSDYDVDHIVPQSFLKDDSIDNKVLTRSDKARGKSDNVPSEEVVKKMKNYWRQLLNAKLITQRKFDNLTKAERGGLSELDKAGFIKRQLVETRQI | |
| | TKHVAQILDSRMNTKYDENDKLIREVKVITLKSKLVSDFRKDFQFYKVREINNYHHAHDAYLNAVVGTALIKKYPKLESEFVYGDYKVYDVRKMIAKSEQEIGK | |
| | ATAKYFFYSNIMNFFKTEITLANGEIRKRPLIETNGETGEIVWDKGRDFATVRKVLSMPQVNIVKKTEVQTGGFSKESILPKRNSDKLIARKKDWDPKKYGGFD | |
| | SPTVAYSVLVVAKVEKGKSKKLKSVKELLGITIMERSSFEKNPIDFLEAKGYKEVKKDLIIKLPKYSLFELENGRKRMLASAGELQKGNELALPSKYVNFLYLASHY | |
| | EKLKGSPEDNEQKQLFVEQHKHYLDEIIEQISEFSKRVILADANLDKVLSAYNKHRDKPIREQAENIIHLFTLTNLGAPAAFKYFDTTIDRKRYTSTKEVLDATLIH | |
| | QSITGLYETRIDLSQLGGDAEAAAKEAAAKEAAAKEAAAKALEAEAAAKEAAAKEAAAKEAAAKAMASNFTQFVLVDNGGTGDVTVAPSNFANGIAEWIS | |
| | SNSRSQAYKVTCSVRQSSAQNRKYTIKVEVPKGAWRSYLNMELTIPIFATNSDCELIVKAMQGLLKDGNPIPSAIAANSGIYGGSGGSMASNFTQFVLVDNG | |
| | GTGDVTVAPSNFANGIAEWISSNSRSQAYKVTCSVRQSSAQNRKYTIKVEVPKGAWRSYLNMELTIPIFATNSDCELIVKAMQGLLKDGNPIPSAIAANSGIY | |
| | GGGSGGGSGGGSGGGSMASNFTQFVLVDNGGTGDVTVAPSNFANGIAEWISSNSRSQAYKVTCSVRQSSAQNRKYTIKVEVPKGAWRSYLNMELTIPIF | |
| | ATNSDCELIVKAMQGLLKDGNPIPSAIAANSGIYGGSGGSMASNFTQFVLVDNGGTGDVTVAPSNFANGIAEWISSNSRSQAYKVTCSVRQSSAQNRKYTI | |
| | KVEVPKGAWRSYLNMELTIPIFATNSDCELIVKAMQGLLKDGNPIPSAIAANSGIYAEAAAKEAAAKEAAAKEAAAKALEAEAAAKEAAAKEAAAKEAAAKA | |
| | TAPLEEEYRLFLEAPIQNVTLLEQWKREIPKVWAEINPPGLASTQAPIHVQLLSTALPVRVRQYPITLEAKRSLRETIRKFRAAGILRPVHSPWNTPLLPVRKSGT | |
| | SEYRMVQDLREVNKRVETIHPTVPNPYTLLSLLPPDRIWYSVLDLKDAFFCIPLAPESQLIFAFEWADAEEGESGQLTWTRLPQGFKNSPTLFNEALNRDLQG | |
| | FRLDHPSVSLLQYVDDLLIAADTQAACLSATRDLLMTLAELGYRVSGKKAQLCQEEVTYLGFKIHKGSRSLSNSRTQAILQIPVPKTKRQVREFLGKIGYCRLFIP | |
| | GFAELAQPLYAATRPGNDPLVWGEKEEEAFQSLKLALTQPPALALPSLDKPFQLFVEETSGAAKGVLTQALGPWKRPVAYLSKRLDPVAAGWPRCLRAIAA | |
| | AALLTREASKLTFGQDIEITSSHNLESLLRSPPDKWLTNARITQYQVLLLDPPRVRFKQTAALNPATLLPETDDTLPIHHCLDTLDSLTSTRPDLTDQPLAQAEAT | |
| | LFTDGSSYIRDGKRYAGAAVVTLDSVIWAEPLPIGTSAQKAELIALTKALEWSKDKSVNIYTDSRYAFATLHVHGMIYRERGWLTAGGKAIKNAPEILALLTAV | |
| | WLPKRVAVMHCKGHQKDDAPTSTGNRRADEVAREVAIRPLSTQATISKRTADGSEFESPKKKAKVE | |
| PL11950 | MPAAKRVKLDGGDKKYSIGLDIGTNSVGWAVITDEYKVPSKKFKVLGNTDRHSIKKNLIGALLFDSGETAEATRLKRTARRRYTRRKNRICYLQEIFSNEMAKV | 16,010 |
| | DDSFFHRLEESFLVEEDKKHERHPIFGNIVDEVAYHEKYPTIYHLRKKLVDSTDKADLRLIYLALAHMIKFRGHFLIEGDLNPDNSDVDKLFIQLVQTYNQLFEE | |
| | NPINASGVDAKAILSARLSKSRRLENLIAQLPGEKKNGLFGNLIALSLGLTPNFKSNFDLAEDAKLQLSKDTYDDDLDNLLAQIGDQYADLFLAAKNLSDAILLS | |
| | DILRVNTEITKAPLSASMIKRYDEHHQDLTLLKALVRQQLPEKYKEIFFDQSKNGYAGYIDGGASQEEFYKFIKPILEKMDGTEELLVKLNREDLLRKQRTFDNG | |
| | SIPHQIHLGELHAILRRQEDFYPFLKDNREKIEKILTFRIPYYVGPLARGNSRFAWMTRKSEETITPWNFEEVVDKGASAQSFIERMTNFDKNLPNEKVLPKHSL | |
| | LYEYFTVYNELTKVKYVTEGMRKPAFLSGEQKKAIVDLLFKTNRKVTVKQLKEDYFKKIECFDSVEISGVEDRFNASLGTYHDLLKIIKDKDFLDNEENEDILEDIV | |
| | LTLTLFEDREMIEERLKTYAHLFDDKVMKQLKRRRYTGWGRLSRKLINGIRDKQSGKTILDFLKSDGFANRNFMQLIHDDSLTFKEDIQKAQVSGQGDSLHE | |
| | HIANLAGSPAIKKGILQTVKVVDELVKVMGRHKPENIVIEMARENQTTQKGQKNSRERMKRIEEGIKELGSQILKEHPVENTQLQNEKLYLYYLQNGRDMYV | |
| | DQELDINRLSDYDVDHIVPQSFLKDDSIDNKVLTRSDKARGKSDNVPSEEVVKKMKNYWRQLLNAKLITQRKFDNLTKAERGGLSELDKAGFIKRQLVETRQI | |
| | TKHVAQILDSRMNTKYDENDKLIREVKVITLKSKLVSDFRKDFQFYKVREINNYHHAHDAYLNAVVGTALIKKYPKLESEFVYGDYKVYDVRKMIAKSEQEIGK | |
| | ATAKYFFYSNIMNFFKTEITLANGEIRKRPLIETNGETGEIVWDKGRDFATVRKVLSMPQVNIVKKTEVQTGGFSKESILPKRNSDKLIARKKDWDPKKYGGFD | |
| | SPTVAYSVLVVAKVEKGKSKKLKSVKELLGITIMERSSFEKNPIDFLEAKGYKEVKKDLIIKLPKYSLFELENGRKRMLASAGELQKGNELALPSKYVNFLYLASHY | |
| | EKLKGSPEDNEQKQLFVEQHKHYLDEIIEQISEFSKRVILADANLDKVLSAYNKHRDKPIREQAENIIHLFTLTNLGAPAAFKYFDTTIDRKRYTSTKEVLDATLIH | |
| | QSITGLYETRIDLSQLGGDAEAAAKEAAAKEAAAKEAAAKALEAEAAAKEAAAKEAAAKEAAAKAMASNFTQFVLVDNGGTGDVTVAPSNFANGIAEWIS | |
| | SNSRSQAYKVTCSVRQSSAQNRKYTIKVEVPKGAWRSYLNMELTIPIFATNSDCELIVKAMQGLLKDGNPIPSAIAANSGIYGGSGGSMASNFTQFVLVDNG | |
| | GTGDVTVAPSNFANGIAEWISSNSRSQAYKVTCSVRQSSAQNRKYTIKVEVPKGAWRSYLNMELTIPIFATNSDCELIVKAMQGLLKDGNPIPSAIAANSGIY | |
| | GGGSGGGSGGGSGGGSMASNFTQFVLVDNGGTGDVTVAPSNFANGIAEWISSNSRSQAYKVTCSVRQSSAQNRKYTIKVEVPKGAWRSYLNMELTIPIF | |
| | ATNSDCELIVKAMQGLLKDGNPIPSAIAANSGIYGGSGGSMASNFTQFVLVDNGGTGDVTVAPSNFANGIAEWISSNSRSQAYKVTCSVRQSSAQNRKYTI | |
| | KVEVPKGAWRSYLNMELTIPIFATNSDCELIVKAMQGLLKDGNPIPSAIAANSGIYSGGSSGGSSGSETPGTSESATPESSGGSSGGSSTAPLEEEYRLFLEAPI | |
| | QNVTLLEQWKREIPKVWAEINPPGLASTQAPIHVQLLSTALPVRVRQYPITLEAKRSLRETIRKFRAAGILRPVHSPWNTPLLPVRKSGTSEYRMVQDLREVN | |
| | KRVETIHPTVPNPYTLLSLLPPDRIWYSVLDLKDAFFCIPLAPESQLIFAFEWADAEEGESGQLTWTRLPQGFKNSPTLFNEALNRDLQGFRLDHPSVSLLQYV | |
| | DDLLIAADTQAACLSATRDLLMTLAELGYRVSGKKAQLCQEEVTYLGFKIHKGSRSLSNSRTQAILQIPVPKTKRQVREFLGKIGYCRLFIPGFAELAQPLYAAT | |
| | RPGNDPLVWGEKEEEAFQSLKLALTQPPALALPSLDKPFQLFVEETSGAAKGVLTQALGPWKRPVAYLSKRLDPVAAGWPRCLRAIAAAALLTREASKLTFG | |
| | QDIEITSSHNLESLLRSPPDKWLTNARITQYQVLLLDPPRVRFKQTAALNPATLLPETDDTLPIHHCLDTLDSLTSTRPDLTDQPLAQAEATLFTDGSSYIRDGKR | |
| | YAGAAVVTLDSVIWAEPLPIGTSAQKAELIALTKALEWSKDKSVNIYTDSRYAFATLHVHGMIYRERGWLTAGGKAIKNAPEILALLTAVWLPKRVAVMHCK | |
| | GHQKDDAPTSTGNRRADEVAREVAIRPLSTQATISKRTADGSEFESPKKKAKVE | |
| PL11951 | MPAAKRVKLDGGDKKYSIGLDIGTNSVGWAVITDEYKVPSKKFKVLGNTDRHSIKKNLIGALLFDSGETAEATRLKRTARRRYTRRKNRICYLQEIFSNEMAKV | 16,011 |
| | DDSFFHRLEESFLVEEDKKHERHPIFGNIVDEVAYHEKYPTIYHLRKKLVDSTDKADLRLIYLALAHMIKFRGHFLIEGDLNPDNSDVDKLFIQLVQTYNQLFEE | |
| | NPINASGVDAKAILSARLSKSRRLENLIAQLPGEKKNGLFGNLIALSLGLTPNFKSNFDLAEDAKLQLSKDTYDDDLDNLLAQIGDQYADLFLAAKNLSDAILLS | |
| | DILRVNTEITKAPLSASMIKRYDEHHQDLTLLKALVRQQLPEKYKEIFFDQSKNGYAGYIDGGASQEEFYKFIKPILEKMDGTEELLVKLNREDLLRKQRTFDNG | |
| | SIPHQIHLGELHAILRRQEDFYPFLKDNREKIEKILTFRIPYYVGPLARGNSRFAWMTRKSEETITPWNFEEVVDKGASAQSFIERMTNFDKNLPNEKVLPKHSL | |
| | LYEYFTVYNELTKVKYVTEGMRKPAFLSGEQKKAIVDLLFKTNRKVTVKQLKEDYFKKIECFDSVEISGVEDRFNASLGTYHDLLKIIKDKDFLDNEENEDILEDIV | |
| | LTLTLFEDREMIEERLKTYAHLFDDKVMKQLKRRRYTGWGRLSRKLINGIRDKQSGKTILDFLKSDGFANRNFMQLIHDDSLTFKEDIQKAQVSGQGDSLHE | |
| | HIANLAGSPAIKKGILQTVKVVDELVKVMGRHKPENIVIEMARENQTTQKGQKNSRERMKRIEEGIKELGSQILKEHPVENTQLQNEKLYLYYLQNGRDMYV | |
| | DQELDINRLSDYDVDHIVPQSFLKDDSIDNKVLTRSDKARGKSDNVPSEEVVKKMKNYWRQLLNAKLITQRKFDNLTKAERGGLSELDKAGFIKRQLVETRQI | |
| | TKHVAQILDSRMNTKYDENDKLIREVKVITLKSKLVSDFRKDFQFYKVREINNYHHAHDAYLNAVVGTALIKKYPKLESEFVYGDYKVYDVRKMIAKSEQEIGK | |
| | ATAKYFFYSNIMNFFKTEITLANGEIRKRPLIETNGETGEIVWDKGRDFATVRKVLSMPQVNIVKKTEVQTGGFSKESILPKRNSDKLIARKKDWDPKKYGGFD | |
| | SPTVAYSVLVVAKVEKGKSKKLKSVKELLGITIMERSSFEKNPIDFLEAKGYKEVKKDLIIKLPKYSLFELENGRKRMLASAGELQKGNELALPSKYVNFLYLASHY | |
| | EKLKGSPEDNEQKQLFVEQHKHYLDEIIEQISEFSKRVILADANLDKVLSAYNKHRDKPIREQAENIIHLFTLTNLGAPAAFKYFDTTIDRKRYTSTKEVLDATLIH | |
| | QSITGLYETRIDLSQLGGDAEAAAKEAAAKEAAAKEAAAKALEAEAAAKEAAAKEAAAKEAAAKAMASNFTQFVLVDNGGTGDVTVAPSNFANGIAEWIS | |
| | SNSRSQAYKVTCSVRQSSAQNRKYTIKVEVPKGAWRSYLNMELTIPIFATNSDCELIVKAMQGLLKDGNPIPSAIAANSGIYGGSGGSMASNFTQFVLVDNG | |
| | GTGDVTVAPSNFANGIAEWISSNSRSQAYKVTCSVRQSSAQNRKYTIKVEVPKGAWRSYLNMELTIPIFATNSDCELIVKAMQGLLKDGNPIPSAIAANSGIY | |
| | GGGSGGGSGGGSGGGSMASNFTQFVLVDNGGTGDVTVAPSNFANGIAEWISSNSRSQAYKVTCSVRQSSAQNRKYTIKVEVPKGAWRSYLNMELTIPIF | |
| | ATNSDCELIVKAMQGLLKDGNPIPSAIAANSGIYGGSGGSMASNFTQFVLVDNGGTGDVTVAPSNFANGIAEWISSNSRSQAYKVTCSVRQSSAQNRKYTI | |
| | KVEVPKGAWRSYLNMELTIPIFATNSDCELIVKAMQGLLKDGNPIPSAIAANSGIYGSSGSSGSSGSSGSSGSSTAPLEEEYRLFLEAPIQNVTLLEQWKREIPK | |
| | VWAEINPPGLASTQAPIHVQLLSTALPVRVRQYPITLEAKRSLRETIRKFRAAGILRPVHSPWNTPLLPVRKSGTSEYRMVQDLREVNKRVETIHPTVPNPYTL | |
| | LSLLPPDRIWYSVLDLKDAFFCIPLAPESQLIFAFEWADAEEGESGQLTWTRLPQGFKNSPTLFNEALNRDLQGFRLDHPSVSLLQYVDDLLIAADTQAACLSA | |
| | TRDLLMTLAELGYRVSGKKAQLCQEEVTYLGFKIHKGSRSLSNSRTQAILQIPVPKTKRQVREFLGKIGYCRLFIPGFAELAQPLYAATRPGNDPLVWGEKEEE | |
| | AFQSLKLALTQPPALALPSLDKPFQLFVEETSGAAKGVLTQALGPWKRPVAYLSKRLDPVAAGWPRCLRAIAAAALLTREASKLTFGQDIEITSSHNLESLLRSP | |
| | PDKWLTNARITQYQVLLLDPPRVRFKQTAALNPATLLPETDDTLPIHHCLDTLDSLTSTRPDLTDQPLAQAEATLFTDGSSYIRDGKRYAGAAVVTLDSVIWA | |
| | EPLPIGTSAQKAELIALTKALEWSKDKSVNIYTDSRYAFATLHVHGMIYRERGWLTAGGKAIKNAPEILALLTAVWLPKRVAVMHCKGHQKDDAPTSTGNRR | |
| | ADEVAREVAIRPLSTQATISKRTADGSEFESPKKKAKVE | |
| PL11952 | MPAAKRVKLDGGDKKYSIGLDIGTNSVGWAVITDEYKVPSKKFKVLGNTDRHSIKKNLIGALLFDSGETAEATRLKRTARRRYTRRKNRICYLQEIFSNEMAKV | 16,012 |
| | DDSFFHRLEESFLVEEDKKHERHPIFGNIVDEVAYHEKYPTIYHLRKKLVDSTDKADLRLIYLALAHMIKFRGHFLIEGDLNPDNSDVDKLFIQLVQTYNQLFEE | |
| | NPINASGVDAKAILSARLSKSRRLENLIAQLPGEKKNGLFGNLIALSLGLTPNFKSNFDLAEDAKLQLSKDTYDDDLDNLLAQIGDQYADLFLAAKNLSDAILLS | |
| | DILRVNTEITKAPLSASMIKRYDEHHQDLTLLKALVRQQLPEKYKEIFFDQSKNGYAGYIDGGASQEEFYKFIKPILEKMDGTEELLVKLNREDLLRKQRTFDNG | |
| | SIPHQIHLGELHAILRRQEDFYPFLKDNREKIEKILTFRIPYYVGPLARGNSRFAWMTRKSEETITPWNFEEVVDKGASAQSFIERMTNFDKNLPNEKVLPKHSL | |
| | LYEYFTVYNELTKVKYVTEGMRKPAFLSGEQKKAIVDLLFKTNRKVTVKQLKEDYFKKIECFDSVEISGVEDRFNASLGTYHDLLKIIKDKDFLDNEENEDILEDIV | |
| | LTLTLFEDREMIEERLKTYAHLFDDKVMKQLKRRRYTGWGRLSRKLINGIRDKQSGKTILDFLKSDGFANRNFMQLIHDDSLTFKEDIQKAQVSGQGDSLHE | |
| | HIANLAGSPAIKKGILQTVKVVDELVKVMGRHKPENIVIEMARENQTTQKGQKNSRERMKRIEEGIKELGSQILKEHPVENTQLQNEKLYLYYLQNGRDMYV | |
| | DQELDINRLSDYDVDHIVPQSFLKDDSIDNKVLTRSDKARGKSDNVPSEEVVKKMKNYWRQLLNAKLITQRKFDNLTKAERGGLSELDKAGFIKRQLVETRQI | |
| | TKHVAQILDSRMNTKYDENDKLIREVKVITLKSKLVSDFRKDFQFYKVREINNYHHAHDAYLNAVVGTALIKKYPKLESEFVYGDYKVYDVRKMIAKSEQEIGK | |
| | ATAKYFFYSNIMNFFKTEITLANGEIRKRPLIETNGETGEIVWDKGRDFATVRKVLSMPQVNIVKKTEVQTGGFSKESILPKRNSDKLIARKKDWDPKKYGGFD | |
| | SPTVAYSVLVVAKVEKGKSKKLKSVKELLGITIMERSSFEKNPIDFLEAKGYKEVKKDLIIKLPKYSLFELENGRKRMLASAGELQKGNELALPSKYVNFLYLASHY | |
| | EKLKGSPEDNEQKQLFVEQHKHYLDEIIEQISEFSKRVILADANLDKVLSAYNKHRDKPIREQAENIIHLFTLTNLGAPAAFKYFDTTIDRKRYTSTKEVLDATLIH | |
| | QSITGLYETRIDLSQLGGDAEAAAKEAAAKEAAAKEAAAKALEAEAAAKEAAAKEAAAKEAAAKAMASNFTQFVLVDNGGTGDVTVAPSNFANGIAEWIS | |
| | SNSRSQAYKVTCSVRQSSAQNRKYTIKVEVPKGAWRSYLNMELTIPIFATNSDCELIVKAMQGLLKDGNPIPSAIAANSGIYGGSGGSMASNFTQFVLVDNG | |
| | GTGDVTVAPSNFANGIAEWISSNSRSQAYKVTCSVRQSSAQNRKYTIKVEVPKGAWRSYLNMELTIPIFATNSDCELIVKAMQGLLKDGNPIPSAIAANSGIY | |
| | GGGSGGGSGGGSGGGSMASNFTQFVLVDNGGTGDVTVAPSNFANGIAEWISSNSRSQAYKVTCSVRQSSAQNRKYTIKVEVPKGAWRSYLNMELTIPIF | |
| | ATNSDCELIVKAMQGLLKDGNPIPSAIAANSGIYGGSGGSMASNFTQFVLVDNGGTGDVTVAPSNFANGIAEWISSNSRSQAYKVTCSVRQSSAQNRKYTI | |
| | KVEVPKGAWRSYLNMELTIPIFATNSDCELIVKAMQGLLKDGNPIPSAIAANSGIYGSSGGGEAAAKTAPLEEEYRLFLEAPIQNVTLLEQWKREIPKVWAEIN | |
| | PPGLASTQAPIHVQLLSTALPVRVRQYPITLEAKRSLRETIRKFRAAGILRPVHSPWNTPLLPVRKSGTSEYRMVQDLREVNKRVETIHPTVPNPYTLLSLLPPD | |
| | RIWYSVLDLKDAFFCIPLAPESQLIFAFEWADAEEGESGQLTWTRLPQGFKNSPTLFNEALNRDLQGFRLDHPSVSLLQYVDDLLIAADTQAACLSATRDLLM | |
| | TLAELGYRVSGKKAQLCQEEVTYLGFKIHKGSRSLSNSRTQAILQIPVPKTKRQVREFLGKIGYCRLFIPGFAELAQPLYAATRPGNDPLVWGEKEEEAFQSLKL | |
| | ALTQPPALALPSLDKPFQLFVEETSGAAKGVLTQALGPWKRPVAYLSKRLDPVAAGWPRCLRAIAAAALLTREASKLTFGQDIEITSSHNLESLLRSPPDKWLT | |
| | NARITQYQVLLLDPPRVRFKQTAALNPATLLPETDDTLPIHHCLDTLDSLTSTRPDLTDQPLAQAEATLFTDGSSYIRDGKRYAGAAVVTLDSVIWAEPLPIGTS | |
| | AQKAELIALTKALEWSKDKSVNIYTDSRYAFATLHVHGMIYRERGWLTAGGKAIKNAPEILALLTAVWLPKRVAVMHCKGHQKDDAPTSTGNRRADEVAR | |
| | EVAIRPLSTQATISKRTADGSEFESPKKKAKVE | |
| PL11953 | MPAAKRVKLDGGDKKYSIGLDIGTNSVGWAVITDEYKVPSKKFKVLGNTDRHSIKKNLIGALLFDSGETAEATRLKRTARRRYTRRKNRICYLQEIFSNEMAKV | 16,013 |
| | DDSFFHRLEESFLVEEDKKHERHPIFGNIVDEVAYHEKYPTIYHLRKKLVDSTDKADLRLIYLALAHMIKFRGHFLIEGDLNPDNSDVDKLFIQLVQTYNQLFEE | |
| | NPINASGVDAKAILSARLSKSRRLENLIAQLPGEKKNGLFGNLIALSLGLTPNFKSNFDLAEDAKLQLSKDTYDDDLDNLLAQIGDQYADLFLAAKNLSDAILLS | |
| | DILRVNTEITKAPLSASMIKRYDEHHQDLTLLKALVRQQLPEKYKEIFFDQSKNGYAGYIDGGASQEEFYKFIKPILEKMDGTEELLVKLNREDLLRKQRTFDNG | |
| | SIPHQIHLGELHAILRRQEDFYPFLKDNREKIEKILTFRIPYYVGPLARGNSRFAWMTRKSEETITPWNFEEVVDKGASAQSFIERMTNFDKNLPNEKVLPKHSL | |
| | LYEYFTVYNELTKVKYVTEGMRKPAFLSGEQKKAIVDLLFKTNRKVTVKQLKEDYFKKIECFDSVEISGVEDRFNASLGTYHDLLKIIKDKDFLDNEENEDILEDIV | |
| | LTLTLFEDREMIEERLKTYAHLFDDKVMKQLKRRRYTGWGRLSRKLINGIRDKQSGKTILDFLKSDGFANRNFMQLIHDDSLTFKEDIQKAQVSGQGDSLHE | |
| | HIANLAGSPAIKKGILQTVKVVDELVKVMGRHKPENIVIEMARENQTTQKGQKNSRERMKRIEEGIKELGSQILKEHPVENTQLQNEKLYLYYLQNGRDMYV | |
| | DQELDINRLSDYDVDHIVPQSFLKDDSIDNKVLTRSDKARGKSDNVPSEEVVKKMKNYWRQLLNAKLITQRKFDNLTKAERGGLSELDKAGFIKRQLVETRQI | |
| | TKHVAQILDSRMNTKYDENDKLIREVKVITLKSKLVSDFRKDFQFYKVREINNYHHAHDAYLNAVVGTALIKKYPKLESEFVYGDYKVYDVRKMIAKSEQEIGK | |
| | ATAKYFFYSNIMNFFKTEITLANGEIRKRPLIETNGETGEIVWDKGRDFATVRKVLSMPQVNIVKKTEVQTGGFSKESILPKRNSDKLIARKKDWDPKKYGGFD | |
| | SPTVAYSVLVVAKVEKGKSKKLKSVKELLGITIMERSSFEKNPIDFLEAKGYKEVKKDLIIKLPKYSLFELENGRKRMLASAGELQKGNELALPSKYVNFLYLASHY | |
| | EKLKGSPEDNEQKQLFVEQHKHYLDEIIEQISEFSKRVILADANLDKVLSAYNKHRDKPIREQAENIIHLFTLTNLGAPAAFKYFDTTIDRKRYTSTKEVLDATLIH | |
| | QSITGLYETRIDLSQLGGDSGGSSGGSSGSETPGTSESATPESSGGSSGGSSMASNFTQFVLVDNGGTGDVTVAPSNFANGIAEWISSNSRSQAYKVTCSVR | |
| | QSSAQNRKYTIKVEVPKGAWRSYLNMELTIPIFATNSDCELIVKAMQGLLKDGNPIPSAIAANSGIYAEAAAKEAAAKEAAAKEAAAKALEAEAAAKEAAAKE | |
| | AAAKEAAAKATAPLEEEYRLFLEAPIQNVTLLEQWKREIPKVWAEINPPGLASTQAPIHVQLLSTALPVRVRQYPITLEAKRSLRETIRKFRAAGILRPVHSPWN | |
| | TPLLPVRKSGTSEYRMVQDLREVNKRVETIHPTVPNPYTLLSLLPPDRIWYSVLDLKDAFFCIPLAPESQLIFAFEWADAEEGESGQLTWTRLPQGFKNSPTLF | |
| | NEALNRDLQGFRLDHPSVSLLQYVDDLLIAADTQAACLSATRDLLMTLAELGYRVSGKKAQLCQEEVTYLGFKIHKGSRSLSNSRTQAILQIPVPKTKRQVREF | |
| | LGKIGYCRLFIPGFAELAQPLYAATRPGNDPLVWGEKEEEAFQSLKLALTQPPALALPSLDKPFQLFVEETSGAAKGVLTQALGPWKRPVAYLSKRLDPVAAG | |
| | WPRCLRAIAAAALLTREASKLTFGQDIEITSSHNLESLLRSPPDKWLTNARITQYQVLLLDPPRVRFKQTAALNPATLLPETDDTLPIHHCLDTLDSLTSTRPDLT | |
| | DQPLAQAEATLFTDGSSYIRDGKRYAGAAVVTLDSVIWAEPLPIGTSAQKAELIALTKALEWSKDKSVNIYTDSRYAFATLHVHGMIYRERGWLTAGGKAIKN | |
| | APEILALLTAVWLPKRVAVMHCKGHQKDDAPTSTGNRRADEVAREVAIRPLSTQATISKRTADGSEFESPKKKAKVE | |
| PL11954 | MPAAKRVKLDGGDKKYSIGLDIGTNSVGWAVITDEYKVPSKKFKVLGNTDRHSIKKNLIGALLFDSGETAEATRLKRTARRRYTRRKNRICYLQEIFSNEMAKV | 16,014 |
| | DDSFFHRLEESFLVEEDKKHERHPIFGNIVDEVAYHEKYPTIYHLRKKLVDSTDKADLRLIYLALAHMIKFRGHFLIEGDLNPDNSDVDKLFIQLVQTYNQLFEE | |
| | NPINASGVDAKAILSARLSKSRRLENLIAQLPGEKKNGLFGNLIALSLGLTPNFKSNFDLAEDAKLQLSKDTYDDDLDNLLAQIGDQYADLFLAAKNLSDAILLS | |
| | DILRVNTEITKAPLSASMIKRYDEHHQDLTLLKALVRQQLPEKYKEIFFDQSKNGYAGYIDGGASQEEFYKFIKPILEKMDGTEELLVKLNREDLLRKQRTFDNG | |
| | SIPHQIHLGELHAILRRQEDFYPFLKDNREKIEKILTFRIPYYVGPLARGNSRFAWMTRKSEETITPWNFEEVVDKGASAQSFIERMTNFDKNLPNEKVLPKHSL | |
| | LYEYFTVYNELTKVKYVTEGMRKPAFLSGEQKKAIVDLLFKTNRKVTVKQLKEDYFKKIECFDSVEISGVEDRFNASLGTYHDLLKIIKDKDFLDNEENEDILEDIV | |
| | LTLTLFEDREMIEERLKTYAHLFDDKVMKQLKRRRYTGWGRLSRKLINGIRDKQSGKTILDFLKSDGFANRNFMQLIHDDSLTFKEDIQKAQVSGQGDSLHE | |
| | HIANLAGSPAIKKGILQTVKVVDELVKVMGRHKPENIVIEMARENQTTQKGQKNSRERMKRIEEGIKELGSQILKEHPVENTQLQNEKLYLYYLQNGRDMYV | |
| | DQELDINRLSDYDVDHIVPQSFLKDDSIDNKVLTRSDKARGKSDNVPSEEVVKKMKNYWRQLLNAKLITQRKFDNLTKAERGGLSELDKAGFIKRQLVETRQI | |
| | TKHVAQILDSRMNTKYDENDKLIREVKVITLKSKLVSDFRKDFQFYKVREINNYHHAHDAYLNAVVGTALIKKYPKLESEFVYGDYKVYDVRKMIAKSEQEIGK | |
| | ATAKYFFYSNIMNFFKTEITLANGEIRKRPLIETNGETGEIVWDKGRDFATVRKVLSMPQVNIVKKTEVQTGGFSKESILPKRNSDKLIARKKDWDPKKYGGFD | |
| | SPTVAYSVLVVAKVEKGKSKKLKSVKELLGITIMERSSFEKNPIDFLEAKGYKEVKKDLIIKLPKYSLFELENGRKRMLASAGELQKGNELALPSKYVNFLYLASHY | |
| | EKLKGSPEDNEQKQLFVEQHKHYLDEIIEQISEFSKRVILADANLDKVLSAYNKHRDKPIREQAENIIHLFTLTNLGAPAAFKYFDTTIDRKRYTSTKEVLDATLIH | |
| | QSITGLYETRIDLSQLGGDSGGSSGGSSGSETPGTSESATPESSGGSSGGSSMASNFTQFVLVDNGGTGDVTVAPSNFANGIAEWISSNSRSQAYKVTCSVR | |
| | QSSAQNRKYTIKVEVPKGAWRSYLNMELTIPIFATNSDCELIVKAMQGLLKDGNPIPSAIAANSGIYSGGSSGGSSGSETPGTSESATPESSGGSSGGSSTAPL | |
| | EEEYRLFLEAPIQNVTLLEQWKREIPKVWAEINPPGLASTQAPIHVQLLSTALPVRVRQYPITLEAKRSLRETIRKFRAAGILRPVHSPWNTPLLPVRKSGTSEYR | |
| | MVQDLREVNKRVETIHPTVPNPYTLLSLLPPDRIWYSVLDLKDAFFCIPLAPESQLIFAFEWADAEEGESGQLTWTRLPQGFKNSPTLFNEALNRDLQGFRLD | |
| | HPSVSLLQYVDDLLIAADTQAACLSATRDLLMTLAELGYRVSGKKAQLCQEEVTYLGFKIHKGSRSLSNSRTQAILQIPVPKTKRQVREFLGKIGYCRLFIPGFAE | |
| | LAQPLYAATRPGNDPLVWGEKEEEAFQSLKLALTQPPALALPSLDKPFQLFVEETSGAAKGVLTQALGPWKRPVAYLSKRLDPVAAGWPRCLRAIAAAALLT | |
| | REASKLTFGQDIEITSSHNLESLLRSPPDKWLTNARITQYQVLLLDPPRVRFKQTAALNPATLLPETDDTLPIHHCLDTLDSLTSTRPDLTDQPLAQAEATLFTD | |
| | GSSYIRDGKRYAGAAVVTLDSVIWAEPLPIGTSAQKAELIALTKALEWSKDKSVNIYTDSRYAFATLHVHGMIYRERGWLTAGGKAIKNAPEILALLTAVWLPK | |
| | RVAVMHCKGHQKDDAPTSTGNRRADEVAREVAIRPLSTQATISKRTADGSEFESPKKKAKVE | |
| PL11955 | MPAAKRVKLDGGDKKYSIGLDIGTNSVGWAVITDEYKVPSKKFKVLGNTDRHSIKKNLIGALLFDSGETAEATRLKRTARRRYTRRKNRICYLQEIFSNEMAKV | 16,015 |
| | DDSFFHRLEESFLVEEDKKHERHPIFGNIVDEVAYHEKYPTIYHLRKKLVDSTDKADLRLIYLALAHMIKFRGHFLIEGDLNPDNSDVDKLFIQLVQTYNQLFEE | |
| | NPINASGVDAKAILSARLSKSRRLENLIAQLPGEKKNGLFGNLIALSLGLTPNFKSNFDLAEDAKLQLSKDTYDDDLDNLLAQIGDQYADLFLAAKNLSDAILLS | |
| | DILRVNTEITKAPLSASMIKRYDEHHQDLTLLKALVRQQLPEKYKEIFFDQSKNGYAGYIDGGASQEEFYKFIKPILEKMDGTEELLVKLNREDLLRKQRTFDNG | |
| | SIPHQIHLGELHAILRRQEDFYPFLKDNREKIEKILTFRIPYYVGPLARGNSRFAWMTRKSEETITPWNFEEVVDKGASAQSFIERMTNFDKNLPNEKVLPKHSL | |
| | LYEYFTVYNELTKVKYVTEGMRKPAFLSGEQKKAIVDLLFKTNRKVTVKQLKEDYFKKIECFDSVEISGVEDRFNASLGTYHDLLKIIKDKDFLDNEENEDILEDIV | |
| | LTLTLFEDREMIEERLKTYAHLFDDKVMKQLKRRRYTGWGRLSRKLINGIRDKQSGKTILDFLKSDGFANRNFMQLIHDDSLTFKEDIQKAQVSGQGDSLHE | |
| | HIANLAGSPAIKKGILQTVKVVDELVKVMGRHKPENIVIEMARENQTTQKGQKNSRERMKRIEEGIKELGSQILKEHPVENTQLQNEKLYLYYLQNGRDMYV | |
| | DQELDINRLSDYDVDHIVPQSFLKDDSIDNKVLTRSDKARGKSDNVPSEEVVKKMKNYWRQLLNAKLITQRKFDNLTKAERGGLSELDKAGFIKRQLVETRQI | |
| | TKHVAQILDSRMNTKYDENDKLIREVKVITLKSKLVSDFRKDFQFYKVREINNYHHAHDAYLNAVVGTALIKKYPKLESEFVYGDYKVYDVRKMIAKSEQEIGK | |
| | ATAKYFFYSNIMNFFKTEITLANGEIRKRPLIETNGETGEIVWDKGRDFATVRKVLSMPQVNIVKKTEVQTGGFSKESILPKRNSDKLIARKKDWDPKKYGGFD | |
| | SPTVAYSVLVVAKVEKGKSKKLKSVKELLGITIMERSSFEKNPIDFLEAKGYKEVKKDLIIKLPKYSLFELENGRKRMLASAGELQKGNELALPSKYVNFLYLASHY | |
| | EKLKGSPEDNEQKQLFVEQHKHYLDEIIEQISEFSKRVILADANLDKVLSAYNKHRDKPIREQAENIIHLFTLTNLGAPAAFKYFDTTIDRKRYTSTKEVLDATLIH | |
| | QSITGLYETRIDLSQLGGDSGGSSGGSSGSETPGTSESATPESSGGSSGGSSMASNFTQFVLVDNGGTGDVTVAPSNFANGIAEWISSNSRSQAYKVTCSVR | |
| | QSSAQNRKYTIKVEVPKGAWRSYLNMELTIPIFATNSDCELIVKAMQGLLKDGNPIPSAIAANSGIYGSSGSSGSSGSSGSSGSSTAPLEEEYRLFLEAPIQNVT | |
| | LLEQWKREIPKVWAEINPPGLASTQAPIHVQLLSTALPVRVRQYPITLEAKRSLRETIRKFRAAGILRPVHSPWNTPLLPVRKSGTSEYRMVQDLREVNKRVET | |
| | IHPTVPNPYTLLSLLPPDRIWYSVLDLKDAFFCIPLAPESQLIFAFEWADAEEGESGQLTWTRLPQGFKNSPTLFNEALNRDLQGFRLDHPSVSLLQYVDDLLIA | |
| | ADTQAACLSATRDLLMTLAELGYRVSGKKAQLCQEEVTYLGFKIHKGSRSLSNSRTQAILQIPVPKTKRQVREFLGKIGYCRLFIPGFAELAQPLYAATRPGND | |
| | PLVWGEKEEEAFQSLKLALTQPPALALPSLDKPFQLFVEETSGAAKGVLTQALGPWKRPVAYLSKRLDPVAAGWPRCLRAIAAAALLTREASKLTFGQDIEITS | |
| | SHNLESLLRSPPDKWLTNARITQYQVLLLDPPRVRFKQTAALNPATLLPETDDTLPIHHCLDTLDSLTSTRPDLTDQPLAQAEATLFTDGSSYIRDGKRYAGAA | |
| | VVTLDSVIWAEPLPIGTSAQKAELIALTKALEWSKDKSVNIYTDSRYAFATLHVHGMIYRERGWLTAGGKAIKNAPEILALLTAVWLPKRVAVMHCKGHQKD | |
| | DAPTSTGNRRADEVAREVAIRPLSTQATISKRTADGSEFESPKKKAKVE | |
| PL11956 | MPAAKRVKLDGGDKKYSIGLDIGTNSVGWAVITDEYKVPSKKFKVLGNTDRHSIKKNLIGALLFDSGETAEATRLKRTARRRYTRRKNRICYLQEIFSNEMAKV | 16,016 |
| | DDSFFHRLEESFLVEEDKKHERHPIFGNIVDEVAYHEKYPTIYHLRKKLVDSTDKADLRLIYLALAHMIKFRGHFLIEGDLNPDNSDVDKLFIQLVQTYNQLFEE | |
| | NPINASGVDAKAILSARLSKSRRLENLIAQLPGEKKNGLFGNLIALSLGLTPNFKSNFDLAEDAKLQLSKDTYDDDLDNLLAQIGDQYADLFLAAKNLSDAILLS | |
| | DILRVNTEITKAPLSASMIKRYDEHHQDLTLLKALVRQQLPEKYKEIFFDQSKNGYAGYIDGGASQEEFYKFIKPILEKMDGTEELLVKLNREDLLRKQRTFDNG | |
| | SIPHQIHLGELHAILRRQEDFYPFLKDNREKIEKILTFRIPYYVGPLARGNSRFAWMTRKSEETITPWNFEEVVDKGASAQSFIERMTNFDKNLPNEKVLPKHSL | |
| | LYEYFTVYNELTKVKYVTEGMRKPAFLSGEQKKAIVDLLFKTNRKVTVKQLKEDYFKKIECFDSVEISGVEDRFNASLGTYHDLLKIIKDKDFLDNEENEDILEDIV | |
| | LTLTLFEDREMIEERLKTYAHLFDDKVMKQLKRRRYTGWGRLSRKLINGIRDKQSGKTILDFLKSDGFANRNFMQLIHDDSLTFKEDIQKAQVSGQGDSLHE | |
| | HIANLAGSPAIKKGILQTVKVVDELVKVMGRHKPENIVIEMARENQTTQKGQKNSRERMKRIEEGIKELGSQILKEHPVENTQLQNEKLYLYYLQNGRDMYV | |
| | DQELDINRLSDYDVDHIVPQSFLKDDSIDNKVLTRSDKARGKSDNVPSEEVVKKMKNYWRQLLNAKLITQRKFDNLTKAERGGLSELDKAGFIKRQLVETRQI | |
| | TKHVAQILDSRMNTKYDENDKLIREVKVITLKSKLVSDFRKDFQFYKVREINNYHHAHDAYLNAVVGTALIKKYPKLESEFVYGDYKVYDVRKMIAKSEQEIGK | |
| | ATAKYFFYSNIMNFFKTEITLANGEIRKRPLIETNGETGEIVWDKGRDFATVRKVLSMPQVNIVKKTEVQTGGFSKESILPKRNSDKLIARKKDWDPKKYGGFD | |
| | SPTVAYSVLVVAKVEKGKSKKLKSVKELLGITIMERSSFEKNPIDFLEAKGYKEVKKDLIIKLPKYSLFELENGRKRMLASAGELQKGNELALPSKYVNFLYLASHY | |
| | EKLKGSPEDNEQKQLFVEQHKHYLDEIIEQISEFSKRVILADANLDKVLSAYNKHRDKPIREQAENIIHLFTLTNLGAPAAFKYFDTTIDRKRYTSTKEVLDATLIH | |
| | QSITGLYETRIDLSQLGGDSGGSSGGSSGSETPGTSESATPESSGGSSGGSSMASNFTQFVLVDNGGTGDVTVAPSNFANGIAEWISSNSRSQAYKVTCSVR | |
| | QSSAQNRKYTIKVEVPKGAWRSYLNMELTIPIFATNSDCELIVKAMQGLLKDGNPIPSAIAANSGIYGSSGGGEAAAKTAPLEEEYRLFLEAPIQNVTLLEQWK | |
| | REIPKVWAEINPPGLASTQAPIHVQLLSTALPVRVRQYPITLEAKRSLRETIRKFRAAGILRPVHSPWNTPLLPVRKSGTSEYRMVQDLREVNKRVETIHPTVP | |
| | NPYTLLSLLPPDRIWYSVLDLKDAFFCIPLAPESQLIFAFEWADAEEGESGQLTWTRLPQGFKNSPTLFNEALNRDLQGFRLDHPSVSLLQYVDDLLIAADTQA | |
| | ACLSATRDLLMTLAELGYRVSGKKAQLCQEEVTYLGFKIHKGSRSLSNSRTQAILQIPVPKTKRQVREFLGKIGYCRLFIPGFAELAQPLYAATRPGNDPLVWG | |
| | EKEEEAFQSLKLALTQPPALALPSLDKPFQLFVEETSGAAKGVLTQALGPWKRPVAYLSKRLDPVAAGWPRCLRAIAAAALLTREASKLTFGQDIEITSSHNLES | |
| | LLRSPPDKWLTNARITQYQVLLLDPPRVRFKQTAALNPATLLPETDDTLPIHHCLDTLDSLTSTRPDLTDQPLAQAEATLFTDGSSYIRDGKRYAGAAVVTLDS | |
| | VIWAEPLPIGTSAQKAELIALTKALEWSKDKSVNIYTDSRYAFATLHVHGMIYRERGWLTAGGKAIKNAPEILALLTAVWLPKRVAVMHCKGHQKDDAPTST | |
| | GNRRADEVAREVAIRPLSTQATISKRTADGSEFESPKKKAKVE | |
| PL11957 | MPAAKRVKLDGGDKKYSIGLDIGTNSVGWAVITDEYKVPSKKFKVLGNTDRHSIKKNLIGALLFDSGETAEATRLKRTARRRYTRRKNRICYLQEIFSNEMAKV | 16,017 |
| | DDSFFHRLEESFLVEEDKKHERHPIFGNIVDEVAYHEKYPTIYHLRKKLVDSTDKADLRLIYLALAHMIKFRGHFLIEGDLNPDNSDVDKLFIQLVQTYNQLFEE | |
| | NPINASGVDAKAILSARLSKSRRLENLIAQLPGEKKNGLFGNLIALSLGLTPNFKSNFDLAEDAKLQLSKDTYDDDLDNLLAQIGDQYADLFLAAKNLSDAILLS | |
| | DILRVNTEITKAPLSASMIKRYDEHHQDLTLLKALVRQQLPEKYKEIFFDQSKNGYAGYIDGGASQEEFYKFIKPILEKMDGTEELLVKLNREDLLRKQRTFDNG | |
| | SIPHQIHLGELHAILRRQEDFYPFLKDNREKIEKILTFRIPYYVGPLARGNSRFAWMTRKSEETITPWNFEEVVDKGASAQSFIERMTNFDKNLPNEKVLPKHSL | |
| | LYEYFTVYNELTKVKYVTEGMRKPAFLSGEQKKAIVDLLFKTNRKVTVKQLKEDYFKKIECFDSVEISGVEDRFNASLGTYHDLLKIIKDKDFLDNEENEDILEDIV | |
| | LTLTLFEDREMIEERLKTYAHLFDDKVMKQLKRRRYTGWGRLSRKLINGIRDKQSGKTILDFLKSDGFANRNFMQLIHDDSLTFKEDIQKAQVSGQGDSLHE | |
| | HIANLAGSPAIKKGILQTVKVVDELVKVMGRHKPENIVIEMARENQTTQKGQKNSRERMKRIEEGIKELGSQILKEHPVENTQLQNEKLYLYYLQNGRDMYV | |
| | DQELDINRLSDYDVDHIVPQSFLKDDSIDNKVLTRSDKARGKSDNVPSEEVVKKMKNYWRQLLNAKLITQRKFDNLTKAERGGLSELDKAGFIKRQLVETRQI | |
| | TKHVAQILDSRMNTKYDENDKLIREVKVITLKSKLVSDFRKDFQFYKVREINNYHHAHDAYLNAVVGTALIKKYPKLESEFVYGDYKVYDVRKMIAKSEQEIGK | |
| | ATAKYFFYSNIMNFFKTEITLANGEIRKRPLIETNGETGEIVWDKGRDFATVRKVLSMPQVNIVKKTEVQTGGFSKESILPKRNSDKLIARKKDWDPKKYGGFD | |
| | SPTVAYSVLVVAKVEKGKSKKLKSVKELLGITIMERSSFEKNPIDFLEAKGYKEVKKDLIIKLPKYSLFELENGRKRMLASAGELQKGNELALPSKYVNFLYLASHY | |
| | EKLKGSPEDNEQKQLFVEQHKHYLDEIIEQISEFSKRVILADANLDKVLSAYNKHRDKPIREQAENIIHLFTLTNLGAPAAFKYFDTTIDRKRYTSTKEVLDATLIH | |
| | QSITGLYETRIDLSQLGGDSGGSSGGSSGSETPGTSESATPESSGGSSGGSSMASNFTQFVLVDNGGTGDVTVAPSNFANGIAEWISSNSRSQAYKVTCSVR | |
| | QSSAQNRKYTIKVEVPKGAWRSYLNMELTIPIFATNSDCELIVKAMQGLLKDGNPIPSAIAANSGIYGGSGGSMASNFTQFVLVDNGGTGDVTVAPSNFAN | |
| | GIAEWISSNSRSQAYKVTCSVRQSSAQNRKYTIKVEVPKGAWRSYLNMELTIPIFATNSDCELIVKAMQGLLKDGNPIPSAIAANSGIYAEAAAKEAAAKEAA | |
| | AKEAAAKALEAEAAAKEAAAKEAAAKEAAAKATAPLEEEYRLFLEAPIQNVTLLEQWKREIPKVWAEINPPGLASTQAPIHVQLLSTALPVRVRQYPITLEAKR | |
| | SLRETIRKFRAAGILRPVHSPWNTPLLPVRKSGTSEYRMVQDLREVNKRVETIHPTVPNPYTLLSLLPPDRIWYSVLDLKDAFFCIPLAPESQLIFAFEWADAEE | |
| | GESGQLTWTRLPQGFKNSPTLFNEALNRDLQGFRLDHPSVSLLQYVDDLLIAADTQAACLSATRDLLMTLAELGYRVSGKKAQLCQEEVTYLGFKIHKGSRSL | |
| | SNSRTQAILQIPVPKTKRQVREFLGKIGYCRLFIPGFAELAQPLYAATRPGNDPLVWGEKEEEAFQSLKLALTQPPALALPSLDKPFQLFVEETSGAAKGVLTQ | |
| | ALGPWKRPVAYLSKRLDPVAAGWPRCLRAIAAAALLTREASKLTFGQDIEITSSHNLESLLRSPPDKWLTNARITQYQVLLLDPPRVRFKQTAALNPATLLPET | |
| | DDTLPIHHCLDTLDSLTSTRPDLTDQPLAQAEATLFTDGSSYIRDGKRYAGAAVVTLDSVIWAEPLPIGTSAQKAELIALTKALEWSKDKSVNIYTDSRYAFATL | |
| | HVHGMIYRERGWLTAGGKAIKNAPEILALLTAVWLPKRVAVMHCKGHQKDDAPTSTGNRRADEVAREVAIRPLSTQATISKRTADGSEFESPKKKAKVE | |
| PL11958 | MPAAKRVKLDGGDKKYSIGLDIGTNSVGWAVITDEYKVPSKKFKVLGNTDRHSIKKNLIGALLFDSGETAEATRLKRTARRRYTRRKNRICYLQEIFSNEMAKV | 16,018 |
| | DDSFFHRLEESFLVEEDKKHERHPIFGNIVDEVAYHEKYPTIYHLRKKLVDSTDKADLRLIYLALAHMIKFRGHFLIEGDLNPDNSDVDKLFIQLVQTYNQLFEE | |
| | NPINASGVDAKAILSARLSKSRRLENLIAQLPGEKKNGLFGNLIALSLGLTPNFKSNFDLAEDAKLQLSKDTYDDDLDNLLAQIGDQYADLFLAAKNLSDAILLS | |
| | DILRVNTEITKAPLSASMIKRYDEHHQDLTLLKALVRQQLPEKYKEIFFDQSKNGYAGYIDGGASQEEFYKFIKPILEKMDGTEELLVKLNREDLLRKQRTFDNG | |
| | SIPHQIHLGELHAILRRQEDFYPFLKDNREKIEKILTFRIPYYVGPLARGNSRFAWMTRKSEETITPWNFEEVVDKGASAQSFIERMTNFDKNLPNEKVLPKHSL | |
| | LYEYFTVYNELTKVKYVTEGMRKPAFLSGEQKKAIVDLLFKTNRKVTVKQLKEDYFKKIECFDSVEISGVEDRFNASLGTYHDLLKIIKDKDFLDNEENEDILEDIV | |
| | LTLTLFEDREMIEERLKTYAHLFDDKVMKQLKRRRYTGWGRLSRKLINGIRDKQSGKTILDFLKSDGFANRNFMQLIHDDSLTFKEDIQKAQVSGQGDSLHE | |
| | HIANLAGSPAIKKGILQTVKVVDELVKVMGRHKPENIVIEMARENQTTQKGQKNSRERMKRIEEGIKELGSQILKEHPVENTQLQNEKLYLYYLQNGRDMYV | |
| | DQELDINRLSDYDVDHIVPQSFLKDDSIDNKVLTRSDKARGKSDNVPSEEVVKKMKNYWRQLLNAKLITQRKFDNLTKAERGGLSELDKAGFIKRQLVETRQI | |
| | TKHVAQILDSRMNTKYDENDKLIREVKVITLKSKLVSDFRKDFQFYKVREINNYHHAHDAYLNAVVGTALIKKYPKLESEFVYGDYKVYDVRKMIAKSEQEIGK | |
| | ATAKYFFYSNIMNFFKTEITLANGEIRKRPLIETNGETGEIVWDKGRDFATVRKVLSMPQVNIVKKTEVQTGGFSKESILPKRNSDKLIARKKDWDPKKYGGFD | |
| | SPTVAYSVLVVAKVEKGKSKKLKSVKELLGITIMERSSFEKNPIDFLEAKGYKEVKKDLIIKLPKYSLFELENGRKRMLASAGELQKGNELALPSKYVNFLYLASHY | |
| | EKLKGSPEDNEQKQLFVEQHKHYLDEIIEQISEFSKRVILADANLDKVLSAYNKHRDKPIREQAENIIHLFTLTNLGAPAAFKYFDTTIDRKRYTSTKEVLDATLIH | |
| | QSITGLYETRIDLSQLGGDSGGSSGGSSGSETPGTSESATPESSGGSSGGSSMASNFTQFVLVDNGGTGDVTVAPSNFANGIAEWISSNSRSQAYKVTCSVR | |
| | QSSAQNRKYTIKVEVPKGAWRSYLNMELTIPIFATNSDCELIVKAMQGLLKDGNPIPSAIAANSGIYGGSGGSMASNFTQFVLVDNGGTGDVTVAPSNFAN | |
| | GIAEWISSNSRSQAYKVTCSVRQSSAQNRKYTIKVEVPKGAWRSYLNMELTIPIFATNSDCELIVKAMQGLLKDGNPIPSAIAANSGIYSGGSSGGSSGSETPG | |
| | TSESATPESSGGSSGGSSTAPLEEEYRLFLEAPIQNVTLLEQWKREIPKVWAEINPPGLASTQAPIHVQLLSTALPVRVRQYPITLEAKRSLRETIRKFRAAGILRP | |
| | VHSPWNTPLLPVRKSGTSEYRMVQDLREVNKRVETIHPTVPNPYTLLSLLPPDRIWYSVLDLKDAFFCIPLAPESQLIFAFEWADAEEGESGQLTWTRLPQGF | |
| | KNSPTLFNEALNRDLQGFRLDHPSVSLLQYVDDLLIAADTQAACLSATRDLLMTLAELGYRVSGKKAQLCQEEVTYLGFKIHKGSRSLSNSRTQAILQIPVPKT | |
| | KRQVREFLGKIGYCRLFIPGFAELAQPLYAATRPGNDPLVWGEKEEEAFQSLKLALTQPPALALPSLDKPFQLFVEETSGAAKGVLTQALGPWKRPVAYLSKR | |
| | LDPVAAGWPRCLRAIAAAALLTREASKLTFGQDIEITSSHNLESLLRSPPDKWLTNARITQYQVLLLDPPRVRFKQTAALNPATLLPETDDTLPIHHCLDTLDSL | |
| | TSTRPDLTDQPLAQAEATLFTDGSSYIRDGKRYAGAAVVTLDSVIWAEPLPIGTSAQKAELIALTKALEWSKDKSVNIYTDSRYAFATLHVHGMIYRERGWLT | |
| | AGGKAIKNAPEILALLTAVWLPKRVAVMHCKGHQKDDAPTSTGNRRADEVAREVAIRPLSTQATISKRTADGSEFESPKKKAKVE | |
| PL11959 | MPAAKRVKLDGGDKKYSIGLDIGTNSVGWAVITDEYKVPSKKFKVLGNTDRHSIKKNLIGALLFDSGETAEATRLKRTARRRYTRRKNRICYLQEIFSNEMAKV | 16,019 |
| | DDSFFHRLEESFLVEEDKKHERHPIFGNIVDEVAYHEKYPTIYHLRKKLVDSTDKADLRLIYLALAHMIKFRGHFLIEGDLNPDNSDVDKLFIQLVQTYNQLFEE | |
| | NPINASGVDAKAILSARLSKSRRLENLIAQLPGEKKNGLFGNLIALSLGLTPNFKSNFDLAEDAKLQLSKDTYDDDLDNLLAQIGDQYADLFLAAKNLSDAILLS | |
| | DILRVNTEITKAPLSASMIKRYDEHHQDLTLLKALVRQQLPEKYKEIFFDQSKNGYAGYIDGGASQEEFYKFIKPILEKMDGTEELLVKLNREDLLRKQRTFDNG | |
| | SIPHQIHLGELHAILRRQEDFYPFLKDNREKIEKILTFRIPYYVGPLARGNSRFAWMTRKSEETITPWNFEEVVDKGASAQSFIERMTNFDKNLPNEKVLPKHSL | |
| | LYEYFTVYNELTKVKYVTEGMRKPAFLSGEQKKAIVDLLFKTNRKVTVKQLKEDYFKKIECFDSVEISGVEDRFNASLGTYHDLLKIIKDKDFLDNEENEDILEDIV | |
| | LTLTLFEDREMIEERLKTYAHLFDDKVMKQLKRRRYTGWGRLSRKLINGIRDKQSGKTILDFLKSDGFANRNFMQLIHDDSLTFKEDIQKAQVSGQGDSLHE | |
| | HIANLAGSPAIKKGILQTVKVVDELVKVMGRHKPENIVIEMARENQTTQKGQKNSRERMKRIEEGIKELGSQILKEHPVENTQLQNEKLYLYYLQNGRDMYV | |
| | DQELDINRLSDYDVDHIVPQSFLKDDSIDNKVLTRSDKARGKSDNVPSEEVVKKMKNYWRQLLNAKLITQRKFDNLTKAERGGLSELDKAGFIKRQLVETRQI | |
| | TKHVAQILDSRMNTKYDENDKLIREVKVITLKSKLVSDFRKDFQFYKVREINNYHHAHDAYLNAVVGTALIKKYPKLESEFVYGDYKVYDVRKMIAKSEQEIGK | |
| | ATAKYFFYSNIMNFFKTEITLANGEIRKRPLIETNGETGEIVWDKGRDFATVRKVLSMPQVNIVKKTEVQTGGFSKESILPKRNSDKLIARKKDWDPKKYGGFD | |
| | SPTVAYSVLVVAKVEKGKSKKLKSVKELLGITIMERSSFEKNPIDFLEAKGYKEVKKDLIIKLPKYSLFELENGRKRMLASAGELQKGNELALPSKYVNFLYLASHY | |
| | EKLKGSPEDNEQKQLFVEQHKHYLDEIIEQISEFSKRVILADANLDKVLSAYNKHRDKPIREQAENIIHLFTLTNLGAPAAFKYFDTTIDRKRYTSTKEVLDATLIH | |
| | QSITGLYETRIDLSQLGGDSGGSSGGSSGSETPGTSESATPESSGGSSGGSSMASNFTQFVLVDNGGTGDVTVAPSNFANGIAEWISSNSRSQAYKVTCSVR | |
| | QSSAQNRKYTIKVEVPKGAWRSYLNMELTIPIFATNSDCELIVKAMQGLLKDGNPIPSAIAANSGIYGGSGGSMASNFTQFVLVDNGGTGDVTVAPSNFAN | |
| | GIAEWISSNSRSQAYKVTCSVRQSSAQNRKYTIKVEVPKGAWRSYLNMELTIPIFATNSDCELIVKAMQGLLKDGNPIPSAIAANSGIYGSSGSSGSSGSSGSS | |
| | GSSTAPLEEEYRLFLEAPIQNVTLLEQWKREIPKVWAEINPPGLASTQAPIHVQLLSTALPVRVRQYPITLEAKRSLRETIRKFRAAGILRPVHSPWNTPLLPVRK | |
| | SGTSEYRMVQDLREVNKRVETIHPTVPNPYTLLSLLPPDRIWYSVLDLKDAFFCIPLAPESQLIFAFEWADAEEGESGQLTWTRLPQGFKNSPTLFNEALNRDL | |
| | QGFRLDHPSVSLLQYVDDLLIAADTQAACLSATRDLLMTLAELGYRVSGKKAQLCQEEVTYLGFKIHKGSRSLSNSRTQAILQIPVPKTKRQVREFLGKIGYCRL | |
| | FIPGFAELAQPLYAATRPGNDPLVWGEKEEEAFQSLKLALTQPPALALPSLDKPFQLFVEETSGAAKGVLTQALGPWKRPVAYLSKRLDPVAAGWPRCLRAI | |
| | AAAALLTREASKLTFGQDIEITSSHNLESLLRSPPDKWLTNARITQYQVLLLDPPRVRFKQTAALNPATLLPETDDTLPIHHCLDTLDSLTSTRPDLTDQPLAQA | |
| | EATLFTDGSSYIRDGKRYAGAAVVTLDSVIWAEPLPIGTSAQKAELIALTKALEWSKDKSVNIYTDSRYAFATLHVHGMIYRERGWLTAGGKAIKNAPEILALL | |
| | TAVWLPKRVAVMHCKGHQKDDAPTSTGNRRADEVAREVAIRPLSTQATISKRTADGSEFESPKKKAKVE | |
| PL11960 | MPAAKRVKLDGGDKKYSIGLDIGTNSVGWAVITDEYKVPSKKFKVLGNTDRHSIKKNLIGALLFDSGETAEATRLKRTARRRYTRRKNRICYLQEIFSNEMAKV | 16,020 |
| | DDSFFHRLEESFLVEEDKKHERHPIFGNIVDEVAYHEKYPTIYHLRKKLVDSTDKADLRLIYLALAHMIKFRGHFLIEGDLNPDNSDVDKLFIQLVQTYNQLFEE | |
| | NPINASGVDAKAILSARLSKSRRLENLIAQLPGEKKNGLFGNLIALSLGLTPNFKSNFDLAEDAKLQLSKDTYDDDLDNLLAQIGDQYADLFLAAKNLSDAILLS | |
| | DILRVNTEITKAPLSASMIKRYDEHHQDLTLLKALVRQQLPEKYKEIFFDQSKNGYAGYIDGGASQEEFYKFIKPILEKMDGTEELLVKLNREDLLRKQRTFDNG | |
| | SIPHQIHLGELHAILRRQEDFYPFLKDNREKIEKILTFRIPYYVGPLARGNSRFAWMTRKSEETITPWNFEEVVDKGASAQSFIERMTNFDKNLPNEKVLPKHSL | |
| | LYEYFTVYNELTKVKYVTEGMRKPAFLSGEQKKAIVDLLFKTNRKVTVKQLKEDYFKKIECFDSVEISGVEDRFNASLGTYHDLLKIIKDKDFLDNEENEDILEDIV | |
| | LTLTLFEDREMIEERLKTYAHLFDDKVMKQLKRRRYTGWGRLSRKLINGIRDKQSGKTILDFLKSDGFANRNFMQLIHDDSLTFKEDIQKAQVSGQGDSLHE | |
| | HIANLAGSPAIKKGILQTVKVVDELVKVMGRHKPENIVIEMARENQTTQKGQKNSRERMKRIEEGIKELGSQILKEHPVENTQLQNEKLYLYYLQNGRDMYV | |
| | DQELDINRLSDYDVDHIVPQSFLKDDSIDNKVLTRSDKARGKSDNVPSEEVVKKMKNYWRQLLNAKLITQRKFDNLTKAERGGLSELDKAGFIKRQLVETRQI | |
| | TKHVAQILDSRMNTKYDENDKLIREVKVITLKSKLVSDFRKDFQFYKVREINNYHHAHDAYLNAVVGTALIKKYPKLESEFVYGDYKVYDVRKMIAKSEQEIGK | |
| | ATAKYFFYSNIMNFFKTEITLANGEIRKRPLIETNGETGEIVWDKGRDFATVRKVLSMPQVNIVKKTEVQTGGFSKESILPKRNSDKLIARKKDWDPKKYGGFD | |
| | SPTVAYSVLVVAKVEKGKSKKLKSVKELLGITIMERSSFEKNPIDFLEAKGYKEVKKDLIIKLPKYSLFELENGRKRMLASAGELQKGNELALPSKYVNFLYLASHY | |
| | EKLKGSPEDNEQKQLFVEQHKHYLDEIIEQISEFSKRVILADANLDKVLSAYNKHRDKPIREQAENIIHLFTLTNLGAPAAFKYFDTTIDRKRYTSTKEVLDATLIH | |
| | QSITGLYETRIDLSQLGGDSGGSSGGSSGSETPGTSESATPESSGGSSGGSSMASNFTQFVLVDNGGTGDVTVAPSNFANGIAEWISSNSRSQAYKVTCSVR | |
| | QSSAQNRKYTIKVEVPKGAWRSYLNMELTIPIFATNSDCELIVKAMQGLLKDGNPIPSAIAANSGIYGGSGGSMASNFTQFVLVDNGGTGDVTVAPSNFAN | |
| | GIAEWISSNSRSQAYKVTCSVRQSSAQNRKYTIKVEVPKGAWRSYLNMELTIPIFATNSDCELIVKAMQGLLKDGNPIPSAIAANSGIYGSSGGGEAAAKTAP | |
| | LEEEYRLFLEAPIQNVTLLEQWKREIPKVWAEINPPGLASTQAPIHVQLLSTALPVRVRQYPITLEAKRSLRETIRKFRAAGILRPVHSPWNTPLLPVRKSGTSEY | |
| | RMVQDLREVNKRVETIHPTVPNPYTLLSLLPPDRIWYSVLDLKDAFFCIPLAPESQLIFAFEWADAEEGESGQLTWTRLPQGFKNSPTLFNEALNRDLQGFRL | |
| | DHPSVSLLQYVDDLLIAADTQAACLSATRDLLMTLAELGYRVSGKKAQLCQEEVTYLGFKIHKGSRSLSNSRTQAILQIPVPKTKRQVREFLGKIGYCRLFIPGF | |
| | AELAQPLYAATRPGNDPLVWGEKEEEAFQSLKLALTQPPALALPSLDKPFQLFVEETSGAAKGVLTQALGPWKRPVAYLSKRLDPVAAGWPRCLRAIAAAAL | |
| | LTREASKLTFGQDIEITSSHNLESLLRSPPDKWLTNARITQYQVLLLDPPRVRFKQTAALNPATLLPETDDTLPIHHCLDTLDSLTSTRPDLTDQPLAQAEATLFT | |
| | DGSSYIRDGKRYAGAAVVTLDSVIWAEPLPIGTSAQKAELIALTKALEWSKDKSVNIYTDSRYAFATLHVHGMIYRERGWLTAGGKAIKNAPEILALLTAVWL | |
| | PKRVAVMHCKGHQKDDAPTSTGNRRADEVAREVAIRPLSTQATISKRTADGSEFESPKKKAKVE | |
| PL11961 | MPAAKRVKLDGGDKKYSIGLDIGTNSVGWAVITDEYKVPSKKFKVLGNTDRHSIKKNLIGALLFDSGETAEATRLKRTARRRYTRRKNRICYLQEIFSNEMAKV | 16,021 |
| | DDSFFHRLEESFLVEEDKKHERHPIFGNIVDEVAYHEKYPTIYHLRKKLVDSTDKADLRLIYLALAHMIKFRGHFLIEGDLNPDNSDVDKLFIQLVQTYNQLFEE | |
| | NPINASGVDAKAILSARLSKSRRLENLIAQLPGEKKNGLFGNLIALSLGLTPNFKSNFDLAEDAKLQLSKDTYDDDLDNLLAQIGDQYADLFLAAKNLSDAILLS | |
| | DILRVNTEITKAPLSASMIKRYDEHHQDLTLLKALVRQQLPEKYKEIFFDQSKNGYAGYIDGGASQEEFYKFIKPILEKMDGTEELLVKLNREDLLRKQRTFDNG | |
| | SIPHQIHLGELHAILRRQEDFYPFLKDNREKIEKILTFRIPYYVGPLARGNSRFAWMTRKSEETITPWNFEEVVDKGASAQSFIERMTNFDKNLPNEKVLPKHSL | |
| | LYEYFTVYNELTKVKYVTEGMRKPAFLSGEQKKAIVDLLFKTNRKVTVKQLKEDYFKKIECFDSVEISGVEDRFNASLGTYHDLLKIIKDKDFLDNEENEDILEDIV | |
| | LTLTLFEDREMIEERLKTYAHLFDDKVMKQLKRRRYTGWGRLSRKLINGIRDKQSGKTILDFLKSDGFANRNFMQLIHDDSLTFKEDIQKAQVSGQGDSLHE | |
| | HIANLAGSPAIKKGILQTVKVVDELVKVMGRHKPENIVIEMARENQTTQKGQKNSRERMKRIEEGIKELGSQILKEHPVENTQLQNEKLYLYYLQNGRDMYV | |
| | DQELDINRLSDYDVDHIVPQSFLKDDSIDNKVLTRSDKARGKSDNVPSEEVVKKMKNYWRQLLNAKLITQRKFDNLTKAERGGLSELDKAGFIKRQLVETRQI | |
| | TKHVAQILDSRMNTKYDENDKLIREVKVITLKSKLVSDFRKDFQFYKVREINNYHHAHDAYLNAVVGTALIKKYPKLESEFVYGDYKVYDVRKMIAKSEQEIGK | |
| | ATAKYFFYSNIMNFFKTEITLANGEIRKRPLIETNGETGEIVWDKGRDFATVRKVLSMPQVNIVKKTEVQTGGFSKESILPKRNSDKLIARKKDWDPKKYGGFD | |
| | SPTVAYSVLVVAKVEKGKSKKLKSVKELLGITIMERSSFEKNPIDFLEAKGYKEVKKDLIIKLPKYSLFELENGRKRMLASAGELQKGNELALPSKYVNFLYLASHY | |
| | EKLKGSPEDNEQKQLFVEQHKHYLDEIIEQISEFSKRVILADANLDKVLSAYNKHRDKPIREQAENIIHLFTLTNLGAPAAFKYFDTTIDRKRYTSTKEVLDATLIH | |
| | QSITGLYETRIDLSQLGGDSGGSSGGSSGSETPGTSESATPESSGGSSGGSSMASNFTQFVLVDNGGTGDVTVAPSNFANGIAEWISSNSRSQAYKVTCSVR | |
| | QSSAQNRKYTIKVEVPKGAWRSYLNMELTIPIFATNSDCELIVKAMQGLLKDGNPIPSAIAANSGIYGGSGGSMASNFTQFVLVDNGGTGDVTVAPSNFAN | |
| | GIAEWISSNSRSQAYKVTCSVRQSSAQNRKYTIKVEVPKGAWRSYLNMELTIPIFATNSDCELIVKAMQGLLKDGNPIPSAIAANSGIYGGGSGGGSGGGSG | |
| | GGSMASNFTQFVLVDNGGTGDVTVAPSNFANGIAEWISSNSRSQAYKVTCSVRQSSAQNRKYTIKVEVPKGAWRSYLNMELTIPIFATNSDCELIVKAMQ | |
| | GLLKDGNPIPSAIAANSGIYGGSGGSMASNFTQFVLVDNGGTGDVTVAPSNFANGIAEWISSNSRSQAYKVTCSVRQSSAQNRKYTIKVEVPKGAWRSYLN | |
| | MELTIPIFATNSDCELIVKAMQGLLKDGNPIPSAIAANSGIYAEAAAKEAAAKEAAAKEAAAKALEAEAAAKEAAAKEAAAKEAAAKATAPLEEEYRLFLEAPI | |
| | QNVTLLEQWKREIPKVWAEINPPGLASTQAPIHVQLLSTALPVRVRQYPITLEAKRSLRETIRKFRAAGILRPVHSPWNTPLLPVRKSGTSEYRMVQDLREVN | |
| | KRVETIHPTVPNPYTLLSLLPPDRIWYSVLDLKDAFFCIPLAPESQLIFAFEWADAEEGESGQLTWTRLPQGFKNSPTLFNEALNRDLQGFRLDHPSVSLLQYV | |
| | DDLLIAADTQAACLSATRDLLMTLAELGYRVSGKKAQLCQEEVTYLGFKIHKGSRSLSNSRTQAILQIPVPKTKRQVREFLGKIGYCRLFIPGFAELAQPLYAAT | |
| | RPGNDPLVWGEKEEEAFQSLKLALTQPPALALPSLDKPFQLFVEETSGAAKGVLTQALGPWKRPVAYLSKRLDPVAAGWPRCLRAIAAAALLTREASKLTFG | |
| | QDIEITSSHNLESLLRSPPDKWLTNARITQYQVLLLDPPRVRFKQTAALNPATLLPETDDTLPIHHCLDTLDSLTSTRPDLTDQPLAQAEATLFTDGSSYIRDGKR | |
| | YAGAAVVTLDSVIWAEPLPIGTSAQKAELIALTKALEWSKDKSVNIYTDSRYAFATLHVHGMIYRERGWLTAGGKAIKNAPEILALLTAVWLPKRVAVMHCK | |
| | GHQKDDAPTSTGNRRADEVAREVAIRPLSTQATISKRTADGSEFESPKKKAKVE | |
| PL11962 | MPAAKRVKLDGGDKKYSIGLDIGTNSVGWAVITDEYKVPSKKFKVLGNTDRHSIKKNLIGALLFDSGETAEATRLKRTARRRYTRRKNRICYLQEIFSNEMAKV | 16,022 |
| | DDSFFHRLEESFLVEEDKKHERHPIFGNIVDEVAYHEKYPTIYHLRKKLVDSTDKADLRLIYLALAHMIKFRGHFLIEGDLNPDNSDVDKLFIQLVQTYNQLFEE | |
| | NPINASGVDAKAILSARLSKSRRLENLIAQLPGEKKNGLFGNLIALSLGLTPNFKSNFDLAEDAKLQLSKDTYDDDLDNLLAQIGDQYADLFLAAKNLSDAILLS | |
| | DILRVNTEITKAPLSASMIKRYDEHHQDLTLLKALVRQQLPEKYKEIFFDQSKNGYAGYIDGGASQEEFYKFIKPILEKMDGTEELLVKLNREDLLRKQRTFDNG | |
| | SIPHQIHLGELHAILRRQEDFYPFLKDNREKIEKILTFRIPYYVGPLARGNSRFAWMTRKSEETITPWNFEEVVDKGASAQSFIERMTNFDKNLPNEKVLPKHSL | |
| | LYEYFTVYNELTKVKYVTEGMRKPAFLSGEQKKAIVDLLFKTNRKVTVKQLKEDYFKKIECFDSVEISGVEDRFNASLGTYHDLLKIIKDKDFLDNEENEDILEDIV | |
| | LTLTLFEDREMIEERLKTYAHLFDDKVMKQLKRRRYTGWGRLSRKLINGIRDKQSGKTILDFLKSDGFANRNFMQLIHDDSLTFKEDIQKAQVSGQGDSLHE | |
| | HIANLAGSPAIKKGILQTVKVVDELVKVMGRHKPENIVIEMARENQTTQKGQKNSRERMKRIEEGIKELGSQILKEHPVENTQLQNEKLYLYYLQNGRDMYV | |
| | DQELDINRLSDYDVDHIVPQSFLKDDSIDNKVLTRSDKARGKSDNVPSEEVVKKMKNYWRQLLNAKLITQRKFDNLTKAERGGLSELDKAGFIKRQLVETRQI | |
| | TKHVAQILDSRMNTKYDENDKLIREVKVITLKSKLVSDFRKDFQFYKVREINNYHHAHDAYLNAVVGTALIKKYPKLESEFVYGDYKVYDVRKMIAKSEQEIGK | |
| | ATAKYFFYSNIMNFFKTEITLANGEIRKRPLIETNGETGEIVWDKGRDFATVRKVLSMPQVNIVKKTEVQTGGFSKESILPKRNSDKLIARKKDWDPKKYGGFD | |
| | SPTVAYSVLVVAKVEKGKSKKLKSVKELLGITIMERSSFEKNPIDFLEAKGYKEVKKDLIIKLPKYSLFELENGRKRMLASAGELQKGNELALPSKYVNFLYLASHY | |
| | EKLKGSPEDNEQKQLFVEQHKHYLDEIIEQISEFSKRVILADANLDKVLSAYNKHRDKPIREQAENIIHLFTLTNLGAPAAFKYFDTTIDRKRYTSTKEVLDATLIH | |
| | QSITGLYETRIDLSQLGGDSGGSSGGSSGSETPGTSESATPESSGGSSGGSSMASNFTQFVLVDNGGTGDVTVAPSNFANGIAEWISSNSRSQAYKVTCSVR | |
| | QSSAQNRKYTIKVEVPKGAWRSYLNMELTIPIFATNSDCELIVKAMQGLLKDGNPIPSAIAANSGIYGGSGGSMASNFTQFVLVDNGGTGDVTVAPSNFAN | |
| | GIAEWISSNSRSQAYKVTCSVRQSSAQNRKYTIKVEVPKGAWRSYLNMELTIPIFATNSDCELIVKAMQGLLKDGNPIPSAIAANSGIYGGGSGGGSGGGSG | |
| | GGSMASNFTQFVLVDNGGTGDVTVAPSNFANGIAEWISSNSRSQAYKVTCSVRQSSAQNRKYTIKVEVPKGAWRSYLNMELTIPIFATNSDCELIVKAMQ | |
| | GLLKDGNPIPSAIAANSGIYGGSGGSMASNFTQFVLVDNGGTGDVTVAPSNFANGIAEWISSNSRSQAYKVTCSVRQSSAQNRKYTIKVEVPKGAWRSYLN | |
| | MELTIPIFATNSDCELIVKAMQGLLKDGNPIPSAIAANSGIYSGGSSGGSSGSETPGTSESATPESSGGSSGGSSTAPLEEEYRLFLEAPIQNVTLLEQWKREIPK | |
| | VWAEINPPGLASTQAPIHVQLLSTALPVRVRQYPITLEAKRSLRETIRKFRAAGILRPVHSPWNTPLLPVRKSGTSEYRMVQDLREVNKRVETIHPTVPNPYTL | |
| | LSLLPPDRIWYSVLDLKDAFFCIPLAPESQLIFAFEWADAEEGESGQLTWTRLPQGFKNSPTLFNEALNRDLQGFRLDHPSVSLLQYVDDLLIAADTQAACLSA | |
| | TRDLLMTLAELGYRVSGKKAQLCQEEVTYLGFKIHKGSRSLSNSRTQAILQIPVPKTKRQVREFLGKIGYCRLFIPGFAELAQPLYAATRPGNDPLVWGEKEEE | |
| | AFQSLKLALTQPPALALPSLDKPFQLFVEETSGAAKGVLTQALGPWKRPVAYLSKRLDPVAAGWPRCLRAIAAAALLTREASKLTFGQDIEITSSHNLESLLRSP | |
| | PDKWLTNARITQYQVLLLDPPRVRFKQTAALNPATLLPETDDTLPIHHCLDTLDSLTSTRPDLTDQPLAQAEATLFTDGSSYIRDGKRYAGAAVVTLDSVIWA | |
| | EPLPIGTSAQKAELIALTKALEWSKDKSVNIYTDSRYAFATLHVHGMIYRERGWLTAGGKAIKNAPEILALLTAVWLPKRVAVMHCKGHQKDDAPTSTGNRR | |
| | ADEVAREVAIRPLSTQATISKRTADGSEFESPKKKAKVE | |
| PL11963 | MPAAKRVKLDGGDKKYSIGLDIGTNSVGWAVITDEYKVPSKKFKVLGNTDRHSIKKNLIGALLFDSGETAEATRLKRTARRRYTRRKNRICYLQEIFSNEMAKV | 16,023 |
| | DDSFFHRLEESFLVEEDKKHERHPIFGNIVDEVAYHEKYPTIYHLRKKLVDSTDKADLRLIYLALAHMIKFRGHFLIEGDLNPDNSDVDKLFIQLVQTYNQLFEE | |
| | NPINASGVDAKAILSARLSKSRRLENLIAQLPGEKKNGLFGNLIALSLGLTPNFKSNFDLAEDAKLQLSKDTYDDDLDNLLAQIGDQYADLFLAAKNLSDAILLS | |
| | DILRVNTEITKAPLSASMIKRYDEHHQDLTLLKALVRQQLPEKYKEIFFDQSKNGYAGYIDGGASQEEFYKFIKPILEKMDGTEELLVKLNREDLLRKQRTFDNG | |
| | SIPHQIHLGELHAILRRQEDFYPFLKDNREKIEKILTFRIPYYVGPLARGNSRFAWMTRKSEETITPWNFEEVVDKGASAQSFIERMTNFDKNLPNEKVLPKHSL | |
| | LYEYFTVYNELTKVKYVTEGMRKPAFLSGEQKKAIVDLLFKTNRKVTVKQLKEDYFKKIECFDSVEISGVEDRFNASLGTYHDLLKIIKDKDFLDNEENEDILEDIV | |
| | LTLTLFEDREMIEERLKTYAHLFDDKVMKQLKRRRYTGWGRLSRKLINGIRDKQSGKTILDFLKSDGFANRNFMQLIHDDSLTFKEDIQKAQVSGQGDSLHE | |
| | HIANLAGSPAIKKGILQTVKVVDELVKVMGRHKPENIVIEMARENQTTQKGQKNSRERMKRIEEGIKELGSQILKEHPVENTQLQNEKLYLYYLQNGRDMYV | |
| | DQELDINRLSDYDVDHIVPQSFLKDDSIDNKVLTRSDKARGKSDNVPSEEVVKKMKNYWRQLLNAKLITQRKFDNLTKAERGGLSELDKAGFIKRQLVETRQI | |
| | TKHVAQILDSRMNTKYDENDKLIREVKVITLKSKLVSDFRKDFQFYKVREINNYHHAHDAYLNAVVGTALIKKYPKLESEFVYGDYKVYDVRKMIAKSEQEIGK | |
| | ATAKYFFYSNIMNFFKTEITLANGEIRKRPLIETNGETGEIVWDKGRDFATVRKVLSMPQVNIVKKTEVQTGGFSKESILPKRNSDKLIARKKDWDPKKYGGFD | |
| | SPTVAYSVLVVAKVEKGKSKKLKSVKELLGITIMERSSFEKNPIDFLEAKGYKEVKKDLIIKLPKYSLFELENGRKRMLASAGELQKGNELALPSKYVNFLYLASHY | |
| | EKLKGSPEDNEQKQLFVEQHKHYLDEIIEQISEFSKRVILADANLDKVLSAYNKHRDKPIREQAENIIHLFTLTNLGAPAAFKYFDTTIDRKRYTSTKEVLDATLIH | |
| | QSITGLYETRIDLSQLGGDSGGSSGGSSGSETPGTSESATPESSGGSSGGSSMASNFTQFVLVDNGGTGDVTVAPSNFANGIAEWISSNSRSQAYKVTCSVR | |
| | QSSAQNRKYTIKVEVPKGAWRSYLNMELTIPIFATNSDCELIVKAMQGLLKDGNPIPSAIAANSGIYGGSGGSMASNFTQFVLVDNGGTGDVTVAPSNFAN | |
| | GIAEWISSNSRSQAYKVTCSVRQSSAQNRKYTIKVEVPKGAWRSYLNMELTIPIFATNSDCELIVKAMQGLLKDGNPIPSAIAANSGIYGGGSGGGSGGGSG | |
| | GGSMASNFTQFVLVDNGGTGDVTVAPSNFANGIAEWISSNSRSQAYKVTCSVRQSSAQNRKYTIKVEVPKGAWRSYLNMELTIPIFATNSDCELIVKAMQ | |
| | GLLKDGNPIPSAIAANSGIYGGSGGSMASNFTQFVLVDNGGTGDVTVAPSNFANGIAEWISSNSRSQAYKVTCSVRQSSAQNRKYTIKVEVPKGAWRSYLN | |
| | MELTIPIFATNSDCELIVKAMQGLLKDGNPIPSAIAANSGIYGSSGSSGSSGSSGSSGSSTAPLEEEYRLFLEAPIQNVTLLEQWKREIPKVWAEINPPGLASTQ | |
| | APIHVQLLSTALPVRVRQYPITLEAKRSLRETIRKFRAAGILRPVHSPWNTPLLPVRKSGTSEYRMVQDLREVNKRVETIHPTVPNPYTLLSLLPPDRIWYSVLDL | |
| | KDAFFCIPLAPESQLIFAFEWADAEEGESGQLTWTRLPQGFKNSPTLFNEALNRDLQGFRLDHPSVSLLQYVDDLLIAADTQAACLSATRDLLMTLAELGYRV | |
| | SGKKAQLCQEEVTYLGFKIHKGSRSLSNSRTQAILQIPVPKTKRQVREFLGKIGYCRLFIPGFAELAQPLYAATRPGNDPLVWGEKEEEAFQSLKLALTQPPALA | |
| | LPSLDKPFQLFVEETSGAAKGVLTQALGPWKRPVAYLSKRLDPVAAGWPRCLRAIAAAALLTREASKLTFGQDIEITSSHNLESLLRSPPDKWLTNARITQYQV | |
| | LLLDPPRVRFKQTAALNPATLLPETDDTLPIHHCLDTLDSLTSTRPDLTDQPLAQAEATLFTDGSSYIRDGKRYAGAAVVTLDSVIWAEPLPIGTSAQKAELIALT | |
| | KALEWSKDKSVNIYTDSRYAFATLHVHGMIYRERGWLTAGGKAIKNAPEILALLTAVWLPKRVAVMHCKGHQKDDAPTSTGNRRADEVAREVAIRPLSTQ | |
| | ATISKRTADGSEFESPKKKAKVE | |
| PL11964 | MPAAKRVKLDGGDKKYSIGLDIGTNSVGWAVITDEYKVPSKKFKVLGNTDRHSIKKNLIGALLFDSGETAEATRLKRTARRRYTRRKNRICYLQEIFSNEMAKV | 16,024 |
| | DDSFFHRLEESFLVEEDKKHERHPIFGNIVDEVAYHEKYPTIYHLRKKLVDSTDKADLRLIYLALAHMIKFRGHFLIEGDLNPDNSDVDKLFIQLVQTYNQLFEE | |
| | NPINASGVDAKAILSARLSKSRRLENLIAQLPGEKKNGLFGNLIALSLGLTPNFKSNFDLAEDAKLQLSKDTYDDDLDNLLAQIGDQYADLFLAAKNLSDAILLS | |
| | DILRVNTEITKAPLSASMIKRYDEHHQDLTLLKALVRQQLPEKYKEIFFDQSKNGYAGYIDGGASQEEFYKFIKPILEKMDGTEELLVKLNREDLLRKQRTFDNG | |
| | SIPHQIHLGELHAILRRQEDFYPFLKDNREKIEKILTFRIPYYVGPLARGNSRFAWMTRKSEETITPWNFEEVVDKGASAQSFIERMTNFDKNLPNEKVLPKHSL | |
| | LYEYFTVYNELTKVKYVTEGMRKPAFLSGEQKKAIVDLLFKTNRKVTVKQLKEDYFKKIECFDSVEISGVEDRFNASLGTYHDLLKIIKDKDFLDNEENEDILEDIV | |
| | LTLTLFEDREMIEERLKTYAHLFDDKVMKQLKRRRYTGWGRLSRKLINGIRDKQSGKTILDFLKSDGFANRNFMQLIHDDSLTFKEDIQKAQVSGQGDSLHE | |
| | HIANLAGSPAIKKGILQTVKVVDELVKVMGRHKPENIVIEMARENQTTQKGQKNSRERMKRIEEGIKELGSQILKEHPVENTQLQNEKLYLYYLQNGRDMYV | |
| | DQELDINRLSDYDVDHIVPQSFLKDDSIDNKVLTRSDKARGKSDNVPSEEVVKKMKNYWRQLLNAKLITQRKFDNLTKAERGGLSELDKAGFIKRQLVETRQI | |
| | TKHVAQILDSRMNTKYDENDKLIREVKVITLKSKLVSDFRKDFQFYKVREINNYHHAHDAYLNAVVGTALIKKYPKLESEFVYGDYKVYDVRKMIAKSEQEIGK | |
| | ATAKYFFYSNIMNFFKTEITLANGEIRKRPLIETNGETGEIVWDKGRDFATVRKVLSMPQVNIVKKTEVQTGGFSKESILPKRNSDKLIARKKDWDPKKYGGFD | |
| | SPTVAYSVLVVAKVEKGKSKKLKSVKELLGITIMERSSFEKNPIDFLEAKGYKEVKKDLIIKLPKYSLFELENGRKRMLASAGELQKGNELALPSKYVNFLYLASHY | |
| | EKLKGSPEDNEQKQLFVEQHKHYLDEIIEQISEFSKRVILADANLDKVLSAYNKHRDKPIREQAENIIHLFTLTNLGAPAAFKYFDTTIDRKRYTSTKEVLDATLIH | |
| | QSITGLYETRIDLSQLGGDSGGSSGGSSGSETPGTSESATPESSGGSSGGSSMASNFTQFVLVDNGGTGDVTVAPSNFANGIAEWISSNSRSQAYKVTCSVR | |
| | QSSAQNRKYTIKVEVPKGAWRSYLNMELTIPIFATNSDCELIVKAMQGLLKDGNPIPSAIAANSGIYGGSGGSMASNFTQFVLVDNGGTGDVTVAPSNFAN | |
| | GIAEWISSNSRSQAYKVTCSVRQSSAQNRKYTIKVEVPKGAWRSYLNMELTIPIFATNSDCELIVKAMQGLLKDGNPIPSAIAANSGIYGGGSGGGSGGGSG | |
| | GGSMASNFTQFVLVDNGGTGDVTVAPSNFANGIAEWISSNSRSQAYKVTCSVRQSSAQNRKYTIKVEVPKGAWRSYLNMELTIPIFATNSDCELIVKAMQ | |
| | GLLKDGNPIPSAIAANSGIYGGSGGSMASNFTQFVLVDNGGTGDVTVAPSNFANGIAEWISSNSRSQAYKVTCSVRQSSAQNRKYTIKVEVPKGAWRSYLN | |
| | MELTIPIFATNSDCELIVKAMQGLLKDGNPIPSAIAANSGIYGSSGGGEAAAKTAPLEEEYRLFLEAPIQNVTLLEQWKREIPKVWAEINPPGLASTQAPIHVQL | |
| | LSTALPVRVRQYPITLEAKRSLRETIRKFRAAGILRPVHSPWNTPLLPVRKSGTSEYRMVQDLREVNKRVETIHPTVPNPYTLLSLLPPDRIWYSVLDLKDAFFCI | |
| | PLAPESQLIFAFEWADAEEGESGQLTWTRLPQGFKNSPTLFNEALNRDLQGFRLDHPSVSLLQYVDDLLIAADTQAACLSATRDLLMTLAELGYRVSGKKAQ | |
| | LCQEEVTYLGFKIHKGSRSLSNSRTQAILQIPVPKTKRQVREFLGKIGYCRLFIPGFAELAQPLYAATRPGNDPLVWGEKEEEAFQSLKLALTQPPALALPSLDKP | |
| | FQLFVEETSGAAKGVLTQALGPWKRPVAYLSKRLDPVAAGWPRCLRAIAAAALLTREASKLTFGQDIEITSSHNLESLLRSPPDKWLTNARITQYQVLLLDPPR | |
| | VRFKQTAALNPATLLPETDDTLPIHHCLDTLDSLTSTRPDLTDQPLAQAEATLFTDGSSYIRDGKRYAGAAVVTLDSVIWAEPLPIGTSAQKAELIALTKALEWS | |
| | KDKSVNIYTDSRYAFATLHVHGMIYRERGWLTAGGKAIKNAPEILALLTAVWLPKRVAVMHCKGHQKDDAPTSTGNRRADEVAREVAIRPLSTQATISKRT | |
| | ADGSEFESPKKKAKVE | |
| PL11965 | MPAAKRVKLDGGDKKYSIGLDIGTNSVGWAVITDEYKVPSKKFKVLGNTDRHSIKKNLIGALLFDSGETAEATRLKRTARRRYTRRKNRICYLQEIFSNEMAKV | 16,025 |
| | DDSFFHRLEESFLVEEDKKHERHPIFGNIVDEVAYHEKYPTIYHLRKKLVDSTDKADLRLIYLALAHMIKFRGHFLIEGDLNPDNSDVDKLFIQLVQTYNQLFEE | |
| | NPINASGVDAKAILSARLSKSRRLENLIAQLPGEKKNGLFGNLIALSLGLTPNFKSNFDLAEDAKLQLSKDTYDDDLDNLLAQIGDQYADLFLAAKNLSDAILLS | |
| | DILRVNTEITKAPLSASMIKRYDEHHQDLTLLKALVRQQLPEKYKEIFFDQSKNGYAGYIDGGASQEEFYKFIKPILEKMDGTEELLVKLNREDLLRKQRTFDNG | |
| | SIPHQIHLGELHAILRRQEDFYPFLKDNREKIEKILTFRIPYYVGPLARGNSRFAWMTRKSEETITPWNFEEVVDKGASAQSFIERMTNFDKNLPNEKVLPKHSL | |
| | LYEYFTVYNELTKVKYVTEGMRKPAFLSGEQKKAIVDLLFKTNRKVTVKQLKEDYFKKIECFDSVEISGVEDRFNASLGTYHDLLKIIKDKDFLDNEENEDILEDIV | |
| | LTLTLFEDREMIEERLKTYAHLFDDKVMKQLKRRRYTGWGRLSRKLINGIRDKQSGKTILDFLKSDGFANRNFMQLIHDDSLTFKEDIQKAQVSGQGDSLHE | |
| | HIANLAGSPAIKKGILQTVKVVDELVKVMGRHKPENIVIEMARENQTTQKGQKNSRERMKRIEEGIKELGSQILKEHPVENTQLQNEKLYLYYLQNGRDMYV | |
| | DQELDINRLSDYDVDHIVPQSFLKDDSIDNKVLTRSDKARGKSDNVPSEEVVKKMKNYWRQLLNAKLITQRKFDNLTKAERGGLSELDKAGFIKRQLVETRQI | |
| | TKHVAQILDSRMNTKYDENDKLIREVKVITLKSKLVSDFRKDFQFYKVREINNYHHAHDAYLNAVVGTALIKKYPKLESEFVYGDYKVYDVRKMIAKSEQEIGK | |
| | ATAKYFFYSNIMNFFKTEITLANGEIRKRPLIETNGETGEIVWDKGRDFATVRKVLSMPQVNIVKKTEVQTGGFSKESILPKRNSDKLIARKKDWDPKKYGGFD | |
| | SPTVAYSVLVVAKVEKGKSKKLKSVKELLGITIMERSSFEKNPIDFLEAKGYKEVKKDLIIKLPKYSLFELENGRKRMLASAGELQKGNELALPSKYVNFLYLASHY | |
| | EKLKGSPEDNEQKQLFVEQHKHYLDEIIEQISEFSKRVILADANLDKVLSAYNKHRDKPIREQAENIIHLFTLTNLGAPAAFKYFDTTIDRKRYTSTKEVLDATLIH | |
| | QSITGLYETRIDLSQLGGDGSSGSSGSSGSSGSSGSSMASNFTQFVLVDNGGTGDVTVAPSNFANGIAEWISSNSRSQAYKVTCSVRQSSAQNRKYTIKVEV | |
| | PKGAWRSYLNMELTIPIFATNSDCELIVKAMQGLLKDGNPIPSAIAANSGIYAEAAAKEAAAKEAAAKEAAAKALEAEAAAKEAAAKEAAAKEAAAKATAPL | |
| | EEEYRLFLEAPIQNVTLLEQWKREIPKVWAEINPPGLASTQAPIHVQLLSTALPVRVRQYPITLEAKRSLRETIRKFRAAGILRPVHSPWNTPLLPVRKSGTSEYR | |
| | MVQDLREVNKRVETIHPTVPNPYTLLSLLPPDRIWYSVLDLKDAFFCIPLAPESQLIFAFEWADAEEGESGQLTWTRLPQGFKNSPTLFNEALNRDLQGFRLD | |
| | HPSVSLLQYVDDLLIAADTQAACLSATRDLLMTLAELGYRVSGKKAQLCQEEVTYLGFKIHKGSRSLSNSRTQAILQIPVPKTKRQVREFLGKIGYCRLFIPGFAE | |
| | LAQPLYAATRPGNDPLVWGEKEEEAFQSLKLALTQPPALALPSLDKPFQLFVEETSGAAKGVLTQALGPWKRPVAYLSKRLDPVAAGWPRCLRAIAAAALLT | |
| | REASKLTFGQDIEITSSHNLESLLRSPPDKWLTNARITQYQVLLLDPPRVRFKQTAALNPATLLPETDDTLPIHHCLDTLDSLTSTRPDLTDQPLAQAEATLFTD | |
| | GSSYIRDGKRYAGAAVVTLDSVIWAEPLPIGTSAQKAELIALTKALEWSKDKSVNIYTDSRYAFATLHVHGMIYRERGWLTAGGKAIKNAPEILALLTAVWLPK | |
| | RVAVMHCKGHQKDDAPTSTGNRRADEVAREVAIRPLSTQATISKRTADGSEFESPKKKAKVE | |
| PL11966 | MPAAKRVKLDGGDKKYSIGLDIGTNSVGWAVITDEYKVPSKKFKVLGNTDRHSIKKNLIGALLFDSGETAEATRLKRTARRRYTRRKNRICYLQEIFSNEMAKV | 16,026 |
| | DDSFFHRLEESFLVEEDKKHERHPIFGNIVDEVAYHEKYPTIYHLRKKLVDSTDKADLRLIYLALAHMIKFRGHFLIEGDLNPDNSDVDKLFIQLVQTYNQLFEE | |
| | NPINASGVDAKAILSARLSKSRRLENLIAQLPGEKKNGLFGNLIALSLGLTPNFKSNFDLAEDAKLQLSKDTYDDDLDNLLAQIGDQYADLFLAAKNLSDAILLS | |
| | DILRVNTEITKAPLSASMIKRYDEHHQDLTLLKALVRQQLPEKYKEIFFDQSKNGYAGYIDGGASQEEFYKFIKPILEKMDGTEELLVKLNREDLLRKQRTFDNG | |
| | SIPHQIHLGELHAILRRQEDFYPFLKDNREKIEKILTFRIPYYVGPLARGNSRFAWMTRKSEETITPWNFEEVVDKGASAQSFIERMTNFDKNLPNEKVLPKHSL | |
| | LYEYFTVYNELTKVKYVTEGMRKPAFLSGEQKKAIVDLLFKTNRKVTVKQLKEDYFKKIECFDSVEISGVEDRFNASLGTYHDLLKIIKDKDFLDNEENEDILEDIV | |
| | LTLTLFEDREMIEERLKTYAHLFDDKVMKQLKRRRYTGWGRLSRKLINGIRDKQSGKTILDFLKSDGFANRNFMQLIHDDSLTFKEDIQKAQVSGQGDSLHE | |
| | HIANLAGSPAIKKGILQTVKVVDELVKVMGRHKPENIVIEMARENQTTQKGQKNSRERMKRIEEGIKELGSQILKEHPVENTQLQNEKLYLYYLQNGRDMYV | |
| | DQELDINRLSDYDVDHIVPQSFLKDDSIDNKVLTRSDKARGKSDNVPSEEVVKKMKNYWRQLLNAKLITQRKFDNLTKAERGGLSELDKAGFIKRQLVETRQI | |
| | TKHVAQILDSRMNTKYDENDKLIREVKVITLKSKLVSDFRKDFQFYKVREINNYHHAHDAYLNAVVGTALIKKYPKLESEFVYGDYKVYDVRKMIAKSEQEIGK | |
| | ATAKYFFYSNIMNFFKTEITLANGEIRKRPLIETNGETGEIVWDKGRDFATVRKVLSMPQVNIVKKTEVQTGGFSKESILPKRNSDKLIARKKDWDPKKYGGFD | |
| | SPTVAYSVLVVAKVEKGKSKKLKSVKELLGITIMERSSFEKNPIDFLEAKGYKEVKKDLIIKLPKYSLFELENGRKRMLASAGELQKGNELALPSKYVNFLYLASHY | |
| | EKLKGSPEDNEQKQLFVEQHKHYLDEIIEQISEFSKRVILADANLDKVLSAYNKHRDKPIREQAENIIHLFTLTNLGAPAAFKYFDTTIDRKRYTSTKEVLDATLIH | |
| | QSITGLYETRIDLSQLGGDGSSGSSGSSGSSGSSGSSMASNFTQFVLVDNGGTGDVTVAPSNFANGIAEWISSNSRSQAYKVTCSVRQSSAQNRKYTIKVEV | |
| | PKGAWRSYLNMELTIPIFATNSDCELIVKAMQGLLKDGNPIPSAIAANSGIYSGGSSGGSSGSETPGTSESATPESSGGSSGGSSTAPLEEEYRLFLEAPIQNVT | |
| | LLEQWKREIPKVWAEINPPGLASTQAPIHVQLLSTALPVRVRQYPITLEAKRSLRETIRKFRAAGILRPVHSPWNTPLLPVRKSGTSEYRMVQDLREVNKRVET | |
| | IHPTVPNPYTLLSLLPPDRIWYSVLDLKDAFFCIPLAPESQLIFAFEWADAEEGESGQLTWTRLPQGFKNSPTLFNEALNRDLQGFRLDHPSVSLLQYVDDLLIA | |
| | ADTQAACLSATRDLLMTLAELGYRVSGKKAQLCQEEVTYLGFKIHKGSRSLSNSRTQAILQIPVPKTKRQVREFLGKIGYCRLFIPGFAELAQPLYAATRPGND | |
| | PLVWGEKEEEAFQSLKLALTQPPALALPSLDKPFQLFVEETSGAAKGVLTQALGPWKRPVAYLSKRLDPVAAGWPRCLRAIAAAALLTREASKLTFGQDIEITS | |
| | SHNLESLLRSPPDKWLTNARITQYQVLLLDPPRVRFKQTAALNPATLLPETDDTLPIHHCLDTLDSLTSTRPDLTDQPLAQAEATLFTDGSSYIRDGKRYAGAA | |
| | VVTLDSVIWAEPLPIGTSAQKAELIALTKALEWSKDKSVNIYTDSRYAFATLHVHGMIYRERGWLTAGGKAIKNAPEILALLTAVWLPKRVAVMHCKGHQKD | |
| | DAPTSTGNRRADEVAREVAIRPLSTQATISKRTADGSEFESPKKKAKVE | |
| PL11967 | MPAAKRVKLDGGDKKYSIGLDIGTNSVGWAVITDEYKVPSKKFKVLGNTDRHSIKKNLIGALLFDSGETAEATRLKRTARRRYTRRKNRICYLQEIFSNEMAKV | 16,027 |
| | DDSFFHRLEESFLVEEDKKHERHPIFGNIVDEVAYHEKYPTIYHLRKKLVDSTDKADLRLIYLALAHMIKFRGHFLIEGDLNPDNSDVDKLFIQLVQTYNQLFEE | |
| | NPINASGVDAKAILSARLSKSRRLENLIAQLPGEKKNGLFGNLIALSLGLTPNFKSNFDLAEDAKLQLSKDTYDDDLDNLLAQIGDQYADLFLAAKNLSDAILLS | |
| | DILRVNTEITKAPLSASMIKRYDEHHQDLTLLKALVRQQLPEKYKEIFFDQSKNGYAGYIDGGASQEEFYKFIKPILEKMDGTEELLVKLNREDLLRKQRTFDNG | |
| | SIPHQIHLGELHAILRRQEDFYPFLKDNREKIEKILTFRIPYYVGPLARGNSRFAWMTRKSEETITPWNFEEVVDKGASAQSFIERMTNFDKNLPNEKVLPKHSL | |
| | LYEYFTVYNELTKVKYVTEGMRKPAFLSGEQKKAIVDLLFKTNRKVTVKQLKEDYFKKIECFDSVEISGVEDRFNASLGTYHDLLKIIKDKDFLDNEENEDILEDIV | |
| | LTLTLFEDREMIEERLKTYAHLFDDKVMKQLKRRRYTGWGRLSRKLINGIRDKQSGKTILDFLKSDGFANRNFMQLIHDDSLTFKEDIQKAQVSGQGDSLHE | |
| | HIANLAGSPAIKKGILQTVKVVDELVKVMGRHKPENIVIEMARENQTTQKGQKNSRERMKRIEEGIKELGSQILKEHPVENTQLQNEKLYLYYLQNGRDMYV | |
| | DQELDINRLSDYDVDHIVPQSFLKDDSIDNKVLTRSDKARGKSDNVPSEEVVKKMKNYWRQLLNAKLITQRKFDNLTKAERGGLSELDKAGFIKRQLVETRQI | |
| | TKHVAQILDSRMNTKYDENDKLIREVKVITLKSKLVSDFRKDFQFYKVREINNYHHAHDAYLNAVVGTALIKKYPKLESEFVYGDYKVYDVRKMIAKSEQEIGK | |
| | ATAKYFFYSNIMNFFKTEITLANGEIRKRPLIETNGETGEIVWDKGRDFATVRKVLSMPQVNIVKKTEVQTGGFSKESILPKRNSDKLIARKKDWDPKKYGGFD | |
| | SPTVAYSVLVVAKVEKGKSKKLKSVKELLGITIMERSSFEKNPIDFLEAKGYKEVKKDLIIKLPKYSLFELENGRKRMLASAGELQKGNELALPSKYVNFLYLASHY | |
| | EKLKGSPEDNEQKQLFVEQHKHYLDEIIEQISEFSKRVILADANLDKVLSAYNKHRDKPIREQAENIIHLFTLTNLGAPAAFKYFDTTIDRKRYTSTKEVLDATLIH | |
| | QSITGLYETRIDLSQLGGDGSSGSSGSSGSSGSSGSSMASNFTQFVLVDNGGTGDVTVAPSNFANGIAEWISSNSRSQAYKVTCSVRQSSAQNRKYTIKVEV | |
| | PKGAWRSYLNMELTIPIFATNSDCELIVKAMQGLLKDGNPIPSAIAANSGIYGSSGSSGSSGSSGSSGSSTAPLEEEYRLFLEAPIQNVTLLEQWKREIPKVWAE | |
| | INPPGLASTQAPIHVQLLSTALPVRVRQYPITLEAKRSLRETIRKFRAAGILRPVHSPWNTPLLPVRKSGTSEYRMVQDLREVNKRVETIHPTVPNPYTLLSLLPP | |
| | DRIWYSVLDLKDAFFCIPLAPESQLIFAFEWADAEEGESGQLTWTRLPQGFKNSPTLFNEALNRDLQGFRLDHPSVSLLQYVDDLLIAADTQAACLSATRDLL | |
| | MTLAELGYRVSGKKAQLCQEEVTYLGFKIHKGSRSLSNSRTQAILQIPVPKTKRQVREFLGKIGYCRLFIPGFAELAQPLYAATRPGNDPLVWGEKEEEAFQSL | |
| | KLALTQPPALALPSLDKPFQLFVEETSGAAKGVLTQALGPWKRPVAYLSKRLDPVAAGWPRCLRAIAAAALLTREASKLTFGQDIEITSSHNLESLLRSPPDKW | |
| | LTNARITQYQVLLLDPPRVRFKQTAALNPATLLPETDDTLPIHHCLDTLDSLTSTRPDLTDQPLAQAEATLFTDGSSYIRDGKRYAGAAVVTLDSVIWAEPLPIG | |
| | TSAQKAELIALTKALEWSKDKSVNIYTDSRYAFATLHVHGMIYRERGWLTAGGKAIKNAPEILALLTAVWLPKRVAVMHCKGHQKDDAPTSTGNRRADEVA | |
| | REVAIRPLSTQATISKRTADGSEFESPKKKAKVE | |
| PL11968 | MPAAKRVKLDGGDKKYSIGLDIGTNSVGWAVITDEYKVPSKKFKVLGNTDRHSIKKNLIGALLFDSGETAEATRLKRTARRRYTRRKNRICYLQEIFSNEMAKV | 16,028 |
| | DDSFFHRLEESFLVEEDKKHERHPIFGNIVDEVAYHEKYPTIYHLRKKLVDSTDKADLRLIYLALAHMIKFRGHFLIEGDLNPDNSDVDKLFIQLVQTYNQLFEE | |
| | NPINASGVDAKAILSARLSKSRRLENLIAQLPGEKKNGLFGNLIALSLGLTPNFKSNFDLAEDAKLQLSKDTYDDDLDNLLAQIGDQYADLFLAAKNLSDAILLS | |
| | DILRVNTEITKAPLSASMIKRYDEHHQDLTLLKALVRQQLPEKYKEIFFDQSKNGYAGYIDGGASQEEFYKFIKPILEKMDGTEELLVKLNREDLLRKQRTFDNG | |
| | SIPHQIHLGELHAILRRQEDFYPFLKDNREKIEKILTFRIPYYVGPLARGNSRFAWMTRKSEETITPWNFEEVVDKGASAQSFIERMTNFDKNLPNEKVLPKHSL | |
| | LYEYFTVYNELTKVKYVTEGMRKPAFLSGEQKKAIVDLLFKTNRKVTVKQLKEDYFKKIECFDSVEISGVEDRFNASLGTYHDLLKIIKDKDFLDNEENEDILEDIV | |
| | LTLTLFEDREMIEERLKTYAHLFDDKVMKQLKRRRYTGWGRLSRKLINGIRDKQSGKTILDFLKSDGFANRNFMQLIHDDSLTFKEDIQKAQVSGQGDSLHE | |
| | HIANLAGSPAIKKGILQTVKVVDELVKVMGRHKPENIVIEMARENQTTQKGQKNSRERMKRIEEGIKELGSQILKEHPVENTQLQNEKLYLYYLQNGRDMYV | |
| | DQELDINRLSDYDVDHIVPQSFLKDDSIDNKVLTRSDKARGKSDNVPSEEVVKKMKNYWRQLLNAKLITQRKFDNLTKAERGGLSELDKAGFIKRQLVETRQI | |
| | TKHVAQILDSRMNTKYDENDKLIREVKVITLKSKLVSDFRKDFQFYKVREINNYHHAHDAYLNAVVGTALIKKYPKLESEFVYGDYKVYDVRKMIAKSEQEIGK | |
| | ATAKYFFYSNIMNFFKTEITLANGEIRKRPLIETNGETGEIVWDKGRDFATVRKVLSMPQVNIVKKTEVQTGGFSKESILPKRNSDKLIARKKDWDPKKYGGFD | |
| | SPTVAYSVLVVAKVEKGKSKKLKSVKELLGITIMERSSFEKNPIDFLEAKGYKEVKKDLIIKLPKYSLFELENGRKRMLASAGELQKGNELALPSKYVNFLYLASHY | |
| | EKLKGSPEDNEQKQLFVEQHKHYLDEIIEQISEFSKRVILADANLDKVLSAYNKHRDKPIREQAENIIHLFTLTNLGAPAAFKYFDTTIDRKRYTSTKEVLDATLIH | |
| | QSITGLYETRIDLSQLGGDGSSGSSGSSGSSGSSGSSMASNFTQFVLVDNGGTGDVTVAPSNFANGIAEWISSNSRSQAYKVTCSVRQSSAQNRKYTIKVEV | |
| | PKGAWRSYLNMELTIPIFATNSDCELIVKAMQGLLKDGNPIPSAIAANSGIYGSSGGGEAAAKTAPLEEEYRLFLEAPIQNVTLLEQWKREIPKVWAEINPPGL | |
| | ASTQAPIHVQLLSTALPVRVRQYPITLEAKRSLRETIRKFRAAGILRPVHSPWNTPLLPVRKSGTSEYRMVQDLREVNKRVETIHPTVPNPYTLLSLLPPDRIWY | |
| | SVLDLKDAFFCIPLAPESQLIFAFEWADAEEGESGQLTWTRLPQGFKNSPTLFNEALNRDLQGFRLDHPSVSLLQYVDDLLIAADTQAACLSATRDLLMTLAE | |
| | LGYRVSGKKAQLCQEEVTYLGFKIHKGSRSLSNSRTQAILQIPVPKTKRQVREFLGKIGYCRLFIPGFAELAQPLYAATRPGNDPLVWGEKEEEAFQSLKLALTQ | |
| | PPALALPSLDKPFQLFVEETSGAAKGVLTQALGPWKRPVAYLSKRLDPVAAGWPRCLRAIAAAALLTREASKLTFGQDIEITSSHNLESLLRSPPDKWLTNARI | |
| | TQYQVLLLDPPRVRFKQTAALNPATLLPETDDTLPIHHCLDTLDSLTSTRPDLTDQPLAQAEATLFTDGSSYIRDGKRYAGAAVVTLDSVIWAEPLPIGTSAQK | |
| | AELIALTKALEWSKDKSVNIYTDSRYAFATLHVHGMIYRERGWLTAGGKAIKNAPEILALLTAVWLPKRVAVMHCKGHQKDDAPTSTGNRRADEVAREVAI | |
| | RPLSTQATISKRTADGSEFESPKKKAKVE | |
| PL11969 | MPAAKRVKLDGGDKKYSIGLDIGTNSVGWAVITDEYKVPSKKFKVLGNTDRHSIKKNLIGALLFDSGETAEATRLKRTARRRYTRRKNRICYLQEIFSNEMAKV | 16,029 |
| | DDSFFHRLEESFLVEEDKKHERHPIFGNIVDEVAYHEKYPTIYHLRKKLVDSTDKADLRLIYLALAHMIKFRGHFLIEGDLNPDNSDVDKLFIQLVQTYNQLFEE | |
| | NPINASGVDAKAILSARLSKSRRLENLIAQLPGEKKNGLFGNLIALSLGLTPNFKSNFDLAEDAKLQLSKDTYDDDLDNLLAQIGDQYADLFLAAKNLSDAILLS | |
| | DILRVNTEITKAPLSASMIKRYDEHHQDLTLLKALVRQQLPEKYKEIFFDQSKNGYAGYIDGGASQEEFYKFIKPILEKMDGTEELLVKLNREDLLRKQRTFDNG | |
| | SIPHQIHLGELHAILRRQEDFYPFLKDNREKIEKILTFRIPYYVGPLARGNSRFAWMTRKSEETITPWNFEEVVDKGASAQSFIERMTNFDKNLPNEKVLPKHSL | |
| | LYEYFTVYNELTKVKYVTEGMRKPAFLSGEQKKAIVDLLFKTNRKVTVKQLKEDYFKKIECFDSVEISGVEDRFNASLGTYHDLLKIIKDKDFLDNEENEDILEDIV | |
| | LTLTLFEDREMIEERLKTYAHLFDDKVMKQLKRRRYTGWGRLSRKLINGIRDKQSGKTILDFLKSDGFANRNFMQLIHDDSLTFKEDIQKAQVSGQGDSLHE | |
| | HIANLAGSPAIKKGILQTVKVVDELVKVMGRHKPENIVIEMARENQTTQKGQKNSRERMKRIEEGIKELGSQILKEHPVENTQLQNEKLYLYYLQNGRDMYV | |
| | DQELDINRLSDYDVDHIVPQSFLKDDSIDNKVLTRSDKARGKSDNVPSEEVVKKMKNYWRQLLNAKLITQRKFDNLTKAERGGLSELDKAGFIKRQLVETRQI | |
| | TKHVAQILDSRMNTKYDENDKLIREVKVITLKSKLVSDFRKDFQFYKVREINNYHHAHDAYLNAVVGTALIKKYPKLESEFVYGDYKVYDVRKMIAKSEQEIGK | |
| | ATAKYFFYSNIMNFFKTEITLANGEIRKRPLIETNGETGEIVWDKGRDFATVRKVLSMPQVNIVKKTEVQTGGFSKESILPKRNSDKLIARKKDWDPKKYGGFD | |
| | SPTVAYSVLVVAKVEKGKSKKLKSVKELLGITIMERSSFEKNPIDFLEAKGYKEVKKDLIIKLPKYSLFELENGRKRMLASAGELQKGNELALPSKYVNFLYLASHY | |
| | EKLKGSPEDNEQKQLFVEQHKHYLDEIIEQISEFSKRVILADANLDKVLSAYNKHRDKPIREQAENIIHLFTLTNLGAPAAFKYFDTTIDRKRYTSTKEVLDATLIH | |
| | QSITGLYETRIDLSQLGGDGSSGSSGSSGSSGSSGSSMASNFTQFVLVDNGGTGDVTVAPSNFANGIAEWISSNSRSQAYKVTCSVRQSSAQNRKYTIKVEV | |
| | PKGAWRSYLNMELTIPIFATNSDCELIVKAMQGLLKDGNPIPSAIAANSGIYGGSGGSMASNFTQFVLVDNGGTGDVTVAPSNFANGIAEWISSNSRSQAY | |
| | KVTCSVRQSSAQNRKYTIKVEVPKGAWRSYLNMELTIPIFATNSDCELIVKAMQGLLKDGNPIPSAIAANSGIYAEAAAKEAAAKEAAAKEAAAKALEAEAAA | |
| | KEAAAKEAAAKEAAAKATAPLEEEYRLFLEAPIQNVTLLEQWKREIPKVWAEINPPGLASTQAPIHVQLLSTALPVRVRQYPITLEAKRSLRETIRKFRAAGILRP | |
| | VHSPWNTPLLPVRKSGTSEYRMVQDLREVNKRVETIHPTVPNPYTLLSLLPPDRIWYSVLDLKDAFFCIPLAPESQLIFAFEWADAEEGESGQLTWTRLPQGF | |
| | KNSPTLFNEALNRDLQGFRLDHPSVSLLQYVDDLLIAADTQAACLSATRDLLMTLAELGYRVSGKKAQLCQEEVTYLGFKIHKGSRSLSNSRTQAILQIPVPKT | |
| | KRQVREFLGKIGYCRLFIPGFAELAQPLYAATRPGNDPLVWGEKEEEAFQSLKLALTQPPALALPSLDKPFQLFVEETSGAAKGVLTQALGPWKRPVAYLSKR | |
| | LDPVAAGWPRCLRAIAAAALLTREASKLTFGQDIEITSSHNLESLLRSPPDKWLTNARITQYQVLLLDPPRVRFKQTAALNPATLLPETDDTLPIHHCLDTLDSL | |
| | TSTRPDLTDQPLAQAEATLFTDGSSYIRDGKRYAGAAVVTLDSVIWAEPLPIGTSAQKAELIALTKALEWSKDKSVNIYTDSRYAFATLHVHGMIYRERGWLT | |
| | AGGKAIKNAPEILALLTAVWLPKRVAVMHCKGHQKDDAPTSTGNRRADEVAREVAIRPLSTQATISKRTADGSEFESPKKKAKVE | |
| PL11970 | MPAAKRVKLDGGDKKYSIGLDIGTNSVGWAVITDEYKVPSKKFKVLGNTDRHSIKKNLIGALLFDSGETAEATRLKRTARRRYTRRKNRICYLQEIFSNEMAKV | 16,030 |
| | DDSFFHRLEESFLVEEDKKHERHPIFGNIVDEVAYHEKYPTIYHLRKKLVDSTDKADLRLIYLALAHMIKFRGHFLIEGDLNPDNSDVDKLFIQLVQTYNQLFEE | |
| | NPINASGVDAKAILSARLSKSRRLENLIAQLPGEKKNGLFGNLIALSLGLTPNFKSNFDLAEDAKLQLSKDTYDDDLDNLLAQIGDQYADLFLAAKNLSDAILLS | |
| | DILRVNTEITKAPLSASMIKRYDEHHQDLTLLKALVRQQLPEKYKEIFFDQSKNGYAGYIDGGASQEEFYKFIKPILEKMDGTEELLVKLNREDLLRKQRTFDNG | |
| | SIPHQIHLGELHAILRRQEDFYPFLKDNREKIEKILTFRIPYYVGPLARGNSRFAWMTRKSEETITPWNFEEVVDKGASAQSFIERMTNFDKNLPNEKVLPKHSL | |
| | LYEYFTVYNELTKVKYVTEGMRKPAFLSGEQKKAIVDLLFKTNRKVTVKQLKEDYFKKIECFDSVEISGVEDRFNASLGTYHDLLKIIKDKDFLDNEENEDILEDIV | |
| | LTLTLFEDREMIEERLKTYAHLFDDKVMKQLKRRRYTGWGRLSRKLINGIRDKQSGKTILDFLKSDGFANRNFMQLIHDDSLTFKEDIQKAQVSGQGDSLHE | |
| | HIANLAGSPAIKKGILQTVKVVDELVKVMGRHKPENIVIEMARENQTTQKGQKNSRERMKRIEEGIKELGSQILKEHPVENTQLQNEKLYLYYLQNGRDMYV | |
| | DQELDINRLSDYDVDHIVPQSFLKDDSIDNKVLTRSDKARGKSDNVPSEEVVKKMKNYWRQLLNAKLITQRKFDNLTKAERGGLSELDKAGFIKRQLVETRQI | |
| | TKHVAQILDSRMNTKYDENDKLIREVKVITLKSKLVSDFRKDFQFYKVREINNYHHAHDAYLNAVVGTALIKKYPKLESEFVYGDYKVYDVRKMIAKSEQEIGK | |
| | ATAKYFFYSNIMNFFKTEITLANGEIRKRPLIETNGETGEIVWDKGRDFATVRKVLSMPQVNIVKKTEVQTGGFSKESILPKRNSDKLIARKKDWDPKKYGGFD | |
| | SPTVAYSVLVVAKVEKGKSKKLKSVKELLGITIMERSSFEKNPIDFLEAKGYKEVKKDLIIKLPKYSLFELENGRKRMLASAGELQKGNELALPSKYVNFLYLASHY | |
| | EKLKGSPEDNEQKQLFVEQHKHYLDEIIEQISEFSKRVILADANLDKVLSAYNKHRDKPIREQAENIIHLFTLTNLGAPAAFKYFDTTIDRKRYTSTKEVLDATLIH | |
| | QSITGLYETRIDLSQLGGDGSSGSSGSSGSSGSSGSSMASNFTQFVLVDNGGTGDVTVAPSNFANGIAEWISSNSRSQAYKVTCSVRQSSAQNRKYTIKVEV | |
| | PKGAWRSYLNMELTIPIFATNSDCELIVKAMQGLLKDGNPIPSAIAANSGIYGGSGGSMASNFTQFVLVDNGGTGDVTVAPSNFANGIAEWISSNSRSQAY | |
| | KVTCSVRQSSAQNRKYTIKVEVPKGAWRSYLNMELTIPIFATNSDCELIVKAMQGLLKDGNPIPSAIAANSGIYSGGSSGGSSGSETPGTSESATPESSGGSSG | |
| | GSSTAPLEEEYRLFLEAPIQNVTLLEQWKREIPKVWAEINPPGLASTQAPIHVQLLSTALPVRVRQYPITLEAKRSLRETIRKFRAAGILRPVHSPWNTPLLPVRK | |
| | SGTSEYRMVQDLREVNKRVETIHPTVPNPYTLLSLLPPDRIWYSVLDLKDAFFCIPLAPESQLIFAFEWADAEEGESGQLTWTRLPQGFKNSPTLFNEALNRDL | |
| | QGFRLDHPSVSLLQYVDDLLIAADTQAACLSATRDLLMTLAELGYRVSGKKAQLCQEEVTYLGFKIHKGSRSLSNSRTQAILQIPVPKTKRQVREFLGKIGYCRL | |
| | FIPGFAELAQPLYAATRPGNDPLVWGEKEEEAFQSLKLALTQPPALALPSLDKPFQLFVEETSGAAKGVLTQALGPWKRPVAYLSKRLDPVAAGWPRCLRAI | |
| | AAAALLTREASKLTFGQDIEITSSHNLESLLRSPPDKWLTNARITQYQVLLLDPPRVRFKQTAALNPATLLPETDDTLPIHHCLDTLDSLTSTRPDLTDQPLAQA | |
| | EATLFTDGSSYIRDGKRYAGAAVVTLDSVIWAEPLPIGTSAQKAELIALTKALEWSKDKSVNIYTDSRYAFATLHVHGMIYRERGWLTAGGKAIKNAPEILALL | |
| | TAVWLPKRVAVMHCKGHQKDDAPTSTGNRRADEVAREVAIRPLSTQATISKRTADGSEFESPKKKAKVE | |
| PL11971 | MPAAKRVKLDGGDKKYSIGLDIGTNSVGWAVITDEYKVPSKKFKVLGNTDRHSIKKNLIGALLFDSGETAEATRLKRTARRRYTRRKNRICYLQEIFSNEMAKV | 16,031 |
| | DDSFFHRLEESFLVEEDKKHERHPIFGNIVDEVAYHEKYPTIYHLRKKLVDSTDKADLRLIYLALAHMIKFRGHFLIEGDLNPDNSDVDKLFIQLVQTYNQLFEE | |
| | NPINASGVDAKAILSARLSKSRRLENLIAQLPGEKKNGLFGNLIALSLGLTPNFKSNFDLAEDAKLQLSKDTYDDDLDNLLAQIGDQYADLFLAAKNLSDAILLS | |
| | DILRVNTEITKAPLSASMIKRYDEHHQDLTLLKALVRQQLPEKYKEIFFDQSKNGYAGYIDGGASQEEFYKFIKPILEKMDGTEELLVKLNREDLLRKQRTFDNG | |
| | SIPHQIHLGELHAILRRQEDFYPFLKDNREKIEKILTFRIPYYVGPLARGNSRFAWMTRKSEETITPWNFEEVVDKGASAQSFIERMTNFDKNLPNEKVLPKHSL | |
| | LYEYFTVYNELTKVKYVTEGMRKPAFLSGEQKKAIVDLLFKTNRKVTVKQLKEDYFKKIECFDSVEISGVEDRFNASLGTYHDLLKIIKDKDFLDNEENEDILEDIV | |
| | LTLTLFEDREMIEERLKTYAHLFDDKVMKQLKRRRYTGWGRLSRKLINGIRDKQSGKTILDFLKSDGFANRNFMQLIHDDSLTFKEDIQKAQVSGQGDSLHE | |
| | HIANLAGSPAIKKGILQTVKVVDELVKVMGRHKPENIVIEMARENQTTQKGQKNSRERMKRIEEGIKELGSQILKEHPVENTQLQNEKLYLYYLQNGRDMYV | |
| | DQELDINRLSDYDVDHIVPQSFLKDDSIDNKVLTRSDKARGKSDNVPSEEVVKKMKNYWRQLLNAKLITQRKFDNLTKAERGGLSELDKAGFIKRQLVETRQI | |
| | TKHVAQILDSRMNTKYDENDKLIREVKVITLKSKLVSDFRKDFQFYKVREINNYHHAHDAYLNAVVGTALIKKYPKLESEFVYGDYKVYDVRKMIAKSEQEIGK | |
| | ATAKYFFYSNIMNFFKTEITLANGEIRKRPLIETNGETGEIVWDKGRDFATVRKVLSMPQVNIVKKTEVQTGGFSKESILPKRNSDKLIARKKDWDPKKYGGFD | |
| | SPTVAYSVLVVAKVEKGKSKKLKSVKELLGITIMERSSFEKNPIDFLEAKGYKEVKKDLIIKLPKYSLFELENGRKRMLASAGELQKGNELALPSKYVNFLYLASHY | |
| | EKLKGSPEDNEQKQLFVEQHKHYLDEIIEQISEFSKRVILADANLDKVLSAYNKHRDKPIREQAENIIHLFTLTNLGAPAAFKYFDTTIDRKRYTSTKEVLDATLIH | |
| | QSITGLYETRIDLSQLGGDGSSGSSGSSGSSGSSGSSMASNFTQFVLVDNGGTGDVTVAPSNFANGIAEWISSNSRSQAYKVTCSVRQSSAQNRKYTIKVEV | |
| | PKGAWRSYLNMELTIPIFATNSDCELIVKAMQGLLKDGNPIPSAIAANSGIYGGSGGSMASNFTQFVLVDNGGTGDVTVAPSNFANGIAEWISSNSRSQAY | |
| | KVTCSVRQSSAQNRKYTIKVEVPKGAWRSYLNMELTIPIFATNSDCELIVKAMQGLLKDGNPIPSAIAANSGIYGSSGSSGSSGSSGSSGSSTAPLEEEYRLFLE | |
| | APIQNVTLLEQWKREIPKVWAEINPPGLASTQAPIHVQLLSTALPVRVRQYPITLEAKRSLRETIRKFRAAGILRPVHSPWNTPLLPVRKSGTSEYRMVQDLRE | |
| | VNKRVETIHPTVPNPYTLLSLLPPDRIWYSVLDLKDAFFCIPLAPESQLIFAFEWADAEEGESGQLTWTRLPQGFKNSPTLFNEALNRDLQGFRLDHPSVSLLQ | |
| | YVDDLLIAADTQAACLSATRDLLMTLAELGYRVSGKKAQLCQEEVTYLGFKIHKGSRSLSNSRTQAILQIPVPKTKRQVREFLGKIGYCRLFIPGFAELAQPLYA | |
| | ATRPGNDPLVWGEKEEEAFQSLKLALTQPPALALPSLDKPFQLFVEETSGAAKGVLTQALGPWKRPVAYLSKRLDPVAAGWPRCLRAIAAAALLTREASKLT | |
| | FGQDIEITSSHNLESLLRSPPDKWLTNARITQYQVLLLDPPRVRFKQTAALNPATLLPETDDTLPIHHCLDTLDSLTSTRPDLTDQPLAQAEATLFTDGSSYIRD | |
| | GKRYAGAAVVTLDSVIWAEPLPIGTSAQKAELIALTKALEWSKDKSVNIYTDSRYAFATLHVHGMIYRERGWLTAGGKAIKNAPEILALLTAVWLPKRVAVM | |
| | HCKGHQKDDAPTSTGNRRADEVAREVAIRPLSTQATISKRTADGSEFESPKKKAKVE | |
| PL11972 | MPAAKRVKLDGGDKKYSIGLDIGTNSVGWAVITDEYKVPSKKFKVLGNTDRHSIKKNLIGALLFDSGETAEATRLKRTARRRYTRRKNRICYLQEIFSNEMAKV | 16,032 |
| | DDSFFHRLEESFLVEEDKKHERHPIFGNIVDEVAYHEKYPTIYHLRKKLVDSTDKADLRLIYLALAHMIKFRGHFLIEGDLNPDNSDVDKLFIQLVQTYNQLFEE | |
| | NPINASGVDAKAILSARLSKSRRLENLIAQLPGEKKNGLFGNLIALSLGLTPNFKSNFDLAEDAKLQLSKDTYDDDLDNLLAQIGDQYADLFLAAKNLSDAILLS | |
| | DILRVNTEITKAPLSASMIKRYDEHHQDLTLLKALVRQQLPEKYKEIFFDQSKNGYAGYIDGGASQEEFYKFIKPILEKMDGTEELLVKLNREDLLRKQRTFDNG | |
| | SIPHQIHLGELHAILRRQEDFYPFLKDNREKIEKILTFRIPYYVGPLARGNSRFAWMTRKSEETITPWNFEEVVDKGASAQSFIERMTNFDKNLPNEKVLPKHSL | |
| | LYEYFTVYNELTKVKYVTEGMRKPAFLSGEQKKAIVDLLFKTNRKVTVKQLKEDYFKKIECFDSVEISGVEDRFNASLGTYHDLLKIIKDKDFLDNEENEDILEDIV | |
| | LTLTLFEDREMIEERLKTYAHLFDDKVMKQLKRRRYTGWGRLSRKLINGIRDKQSGKTILDFLKSDGFANRNFMQLIHDDSLTFKEDIQKAQVSGQGDSLHE | |
| | HIANLAGSPAIKKGILQTVKVVDELVKVMGRHKPENIVIEMARENQTTQKGQKNSRERMKRIEEGIKELGSQILKEHPVENTQLQNEKLYLYYLQNGRDMYV | |
| | DQELDINRLSDYDVDHIVPQSFLKDDSIDNKVLTRSDKARGKSDNVPSEEVVKKMKNYWRQLLNAKLITQRKFDNLTKAERGGLSELDKAGFIKRQLVETRQI | |
| | TKHVAQILDSRMNTKYDENDKLIREVKVITLKSKLVSDFRKDFQFYKVREINNYHHAHDAYLNAVVGTALIKKYPKLESEFVYGDYKVYDVRKMIAKSEQEIGK | |
| | ATAKYFFYSNIMNFFKTEITLANGEIRKRPLIETNGETGEIVWDKGRDFATVRKVLSMPQVNIVKKTEVQTGGFSKESILPKRNSDKLIARKKDWDPKKYGGFD | |
| | SPTVAYSVLVVAKVEKGKSKKLKSVKELLGITIMERSSFEKNPIDFLEAKGYKEVKKDLIIKLPKYSLFELENGRKRMLASAGELQKGNELALPSKYVNFLYLASHY | |
| | EKLKGSPEDNEQKQLFVEQHKHYLDEIIEQISEFSKRVILADANLDKVLSAYNKHRDKPIREQAENIIHLFTLTNLGAPAAFKYFDTTIDRKRYTSTKEVLDATLIH | |
| | QSITGLYETRIDLSQLGGDGSSGSSGSSGSSGSSGSSMASNFTQFVLVDNGGTGDVTVAPSNFANGIAEWISSNSRSQAYKVTCSVRQSSAQNRKYTIKVEV | |
| | PKGAWRSYLNMELTIPIFATNSDCELIVKAMQGLLKDGNPIPSAIAANSGIYGGSGGSMASNFTQFVLVDNGGTGDVTVAPSNFANGIAEWISSNSRSQAY | |
| | KVTCSVRQSSAQNRKYTIKVEVPKGAWRSYLNMELTIPIFATNSDCELIVKAMQGLLKDGNPIPSAIAANSGIYGSSGGGEAAAKTAPLEEEYRLFLEAPIQNV | |
| | TLLEQWKREIPKVWAEINPPGLASTQAPIHVQLLSTALPVRVRQYPITLEAKRSLRETIRKFRAAGILRPVHSPWNTPLLPVRKSGTSEYRMVQDLREVNKRVE | |
| | TIHPTVPNPYTLLSLLPPDRIWYSVLDLKDAFFCIPLAPESQLIFAFEWADAEEGESGQLTWTRLPQGFKNSPTLFNEALNRDLQGFRLDHPSVSLLQYVDDLLI | |
| | AADTQAACLSATRDLLMTLAELGYRVSGKKAQLCQEEVTYLGFKIHKGSRSLSNSRTQAILQIPVPKTKRQVREFLGKIGYCRLFIPGFAELAQPLYAATRPGN | |
| | DPLVWGEKEEEAFQSLKLALTQPPALALPSLDKPFQLFVEETSGAAKGVLTQALGPWKRPVAYLSKRLDPVAAGWPRCLRAIAAAALLTREASKLTFGQDIEI | |
| | TSSHNLESLLRSPPDKWLTNARITQYQVLLLDPPRVRFKQTAALNPATLLPETDDTLPIHHCLDTLDSLTSTRPDLTDQPLAQAEATLFTDGSSYIRDGKRYAGA | |
| | AVVTLDSVIWAEPLPIGTSAQKAELIALTKALEWSKDKSVNIYTDSRYAFATLHVHGMIYRERGWLTAGGKAIKNAPEILALLTAVWLPKRVAVMHCKGHQK | |
| | DDAPTSTGNRRADEVAREVAIRPLSTQATISKRTADGSEFESPKKKAKVE | |
| PL11973 | MPAAKRVKLDGGDKKYSIGLDIGTNSVGWAVITDEYKVPSKKFKVLGNTDRHSIKKNLIGALLFDSGETAEATRLKRTARRRYTRRKNRICYLQEIFSNEMAKV | 16,033 |
| | DDSFFHRLEESFLVEEDKKHERHPIFGNIVDEVAYHEKYPTIYHLRKKLVDSTDKADLRLIYLALAHMIKFRGHFLIEGDLNPDNSDVDKLFIQLVQTYNQLFEE | |
| | NPINASGVDAKAILSARLSKSRRLENLIAQLPGEKKNGLFGNLIALSLGLTPNFKSNFDLAEDAKLQLSKDTYDDDLDNLLAQIGDQYADLFLAAKNLSDAILLS | |
| | DILRVNTEITKAPLSASMIKRYDEHHQDLTLLKALVRQQLPEKYKEIFFDQSKNGYAGYIDGGASQEEFYKFIKPILEKMDGTEELLVKLNREDLLRKQRTFDNG | |
| | SIPHQIHLGELHAILRRQEDFYPFLKDNREKIEKILTFRIPYYVGPLARGNSRFAWMTRKSEETITPWNFEEVVDKGASAQSFIERMTNFDKNLPNEKVLPKHSL | |
| | LYEYFTVYNELTKVKYVTEGMRKPAFLSGEQKKAIVDLLFKTNRKVTVKQLKEDYFKKIECFDSVEISGVEDRFNASLGTYHDLLKIIKDKDFLDNEENEDILEDIV | |
| | LTLTLFEDREMIEERLKTYAHLFDDKVMKQLKRRRYTGWGRLSRKLINGIRDKQSGKTILDFLKSDGFANRNFMQLIHDDSLTFKEDIQKAQVSGQGDSLHE | |
| | HIANLAGSPAIKKGILQTVKVVDELVKVMGRHKPENIVIEMARENQTTQKGQKNSRERMKRIEEGIKELGSQILKEHPVENTQLQNEKLYLYYLQNGRDMYV | |
| | DQELDINRLSDYDVDHIVPQSFLKDDSIDNKVLTRSDKARGKSDNVPSEEVVKKMKNYWRQLLNAKLITQRKFDNLTKAERGGLSELDKAGFIKRQLVETRQI | |
| | TKHVAQILDSRMNTKYDENDKLIREVKVITLKSKLVSDFRKDFQFYKVREINNYHHAHDAYLNAVVGTALIKKYPKLESEFVYGDYKVYDVRKMIAKSEQEIGK | |
| | ATAKYFFYSNIMNFFKTEITLANGEIRKRPLIETNGETGEIVWDKGRDFATVRKVLSMPQVNIVKKTEVQTGGFSKESILPKRNSDKLIARKKDWDPKKYGGFD | |
| | SPTVAYSVLVVAKVEKGKSKKLKSVKELLGITIMERSSFEKNPIDFLEAKGYKEVKKDLIIKLPKYSLFELENGRKRMLASAGELQKGNELALPSKYVNFLYLASHY | |
| | EKLKGSPEDNEQKQLFVEQHKHYLDEIIEQISEFSKRVILADANLDKVLSAYNKHRDKPIREQAENIIHLFTLTNLGAPAAFKYFDTTIDRKRYTSTKEVLDATLIH | |
| | QSITGLYETRIDLSQLGGDGSSGSSGSSGSSGSSGSSMASNFTQFVLVDNGGTGDVTVAPSNFANGIAEWISSNSRSQAYKVTCSVRQSSAQNRKYTIKVEV | |
| | PKGAWRSYLNMELTIPIFATNSDCELIVKAMQGLLKDGNPIPSAIAANSGIYGGSGGSMASNFTQFVLVDNGGTGDVTVAPSNFANGIAEWISSNSRSQAY | |
| | KVTCSVRQSSAQNRKYTIKVEVPKGAWRSYLNMELTIPIFATNSDCELIVKAMQGLLKDGNPIPSAIAANSGIYGGGSGGGSGGGSGGGSMASNFTQFVLV | |
| | DNGGTGDVTVAPSNFANGIAEWISSNSRSQAYKVTCSVRQSSAQNRKYTIKVEVPKGAWRSYLNMELTIPIFATNSDCELIVKAMQGLLKDGNPIPSAIAAN | |
| | SGIYGGSGGSMASNFTQFVLVDNGGTGDVTVAPSNFANGIAEWISSNSRSQAYKVTCSVRQSSAQNRKYTIKVEVPKGAWRSYLNMELTIPIFATNSDCELI | |
| | VKAMQGLLKDGNPIPSAIAANSGIYAEAAAKEAAAKEAAAKEAAAKALEAEAAAKEAAAKEAAAKEAAAKATAPLEEEYRLFLEAPIQNVTLLEQWKREIPK | |
| | VWAEINPPGLASTQAPIHVQLLSTALPVRVRQYPITLEAKRSLRETIRKFRAAGILRPVHSPWNTPLLPVRKSGTSEYRMVQDLREVNKRVETIHPTVPNPYTL | |
| | LSLLPPDRIWYSVLDLKDAFFCIPLAPESQLIFAFEWADAEEGESGQLTWTRLPQGFKNSPTLFNEALNRDLQGFRLDHPSVSLLQYVDDLLIAADTQAACLSA | |
| | TRDLLMTLAELGYRVSGKKAQLCQEEVTYLGFKIHKGSRSLSNSRTQAILQIPVPKTKRQVREFLGKIGYCRLFIPGFAELAQPLYAATRPGNDPLVWGEKEEE | |
| | AFQSLKLALTQPPALALPSLDKPFQLFVEETSGAAKGVLTQALGPWKRPVAYLSKRLDPVAAGWPRCLRAIAAAALLTREASKLTFGQDIEITSSHNLESLLRSP | |
| | PDKWLTNARITQYQVLLLDPPRVRFKQTAALNPATLLPETDDTLPIHHCLDTLDSLTSTRPDLTDQPLAQAEATLFTDGSSYIRDGKRYAGAAVVTLDSVIWA | |
| | EPLPIGTSAQKAELIALTKALEWSKDKSVNIYTDSRYAFATLHVHGMIYRERGWLTAGGKAIKNAPEILALLTAVWLPKRVAVMHCKGHQKDDAPTSTGNRR | |
| | ADEVAREVAIRPLSTQATISKRTADGSEFESPKKKAKVE | |
| PL11974 | MPAAKRVKLDGGDKKYSIGLDIGTNSVGWAVITDEYKVPSKKFKVLGNTDRHSIKKNLIGALLFDSGETAEATRLKRTARRRYTRRKNRICYLQEIFSNEMAKV | 16,034 |
| | DDSFFHRLEESFLVEEDKKHERHPIFGNIVDEVAYHEKYPTIYHLRKKLVDSTDKADLRLIYLALAHMIKFRGHFLIEGDLNPDNSDVDKLFIQLVQTYNQLFEE | |
| | NPINASGVDAKAILSARLSKSRRLENLIAQLPGEKKNGLFGNLIALSLGLTPNFKSNFDLAEDAKLQLSKDTYDDDLDNLLAQIGDQYADLFLAAKNLSDAILLS | |
| | DILRVNTEITKAPLSASMIKRYDEHHQDLTLLKALVRQQLPEKYKEIFFDQSKNGYAGYIDGGASQEEFYKFIKPILEKMDGTEELLVKLNREDLLRKQRTFDNG | |
| | SIPHQIHLGELHAILRRQEDFYPFLKDNREKIEKILTFRIPYYVGPLARGNSRFAWMTRKSEETITPWNFEEVVDKGASAQSFIERMTNFDKNLPNEKVLPKHSL | |
| | LYEYFTVYNELTKVKYVTEGMRKPAFLSGEQKKAIVDLLFKTNRKVTVKQLKEDYFKKIECFDSVEISGVEDRFNASLGTYHDLLKIIKDKDFLDNEENEDILEDIV | |
| | LTLTLFEDREMIEERLKTYAHLFDDKVMKQLKRRRYTGWGRLSRKLINGIRDKQSGKTILDFLKSDGFANRNFMQLIHDDSLTFKEDIQKAQVSGQGDSLHE | |
| | HIANLAGSPAIKKGILQTVKVVDELVKVMGRHKPENIVIEMARENQTTQKGQKNSRERMKRIEEGIKELGSQILKEHPVENTQLQNEKLYLYYLQNGRDMYV | |
| | DQELDINRLSDYDVDHIVPQSFLKDDSIDNKVLTRSDKARGKSDNVPSEEVVKKMKNYWRQLLNAKLITQRKFDNLTKAERGGLSELDKAGFIKRQLVETRQI | |
| | TKHVAQILDSRMNTKYDENDKLIREVKVITLKSKLVSDFRKDFQFYKVREINNYHHAHDAYLNAVVGTALIKKYPKLESEFVYGDYKVYDVRKMIAKSEQEIGK | |
| | ATAKYFFYSNIMNFFKTEITLANGEIRKRPLIETNGETGEIVWDKGRDFATVRKVLSMPQVNIVKKTEVQTGGFSKESILPKRNSDKLIARKKDWDPKKYGGFD | |
| | SPTVAYSVLVVAKVEKGKSKKLKSVKELLGITIMERSSFEKNPIDFLEAKGYKEVKKDLIIKLPKYSLFELENGRKRMLASAGELQKGNELALPSKYVNFLYLASHY | |
| | EKLKGSPEDNEQKQLFVEQHKHYLDEIIEQISEFSKRVILADANLDKVLSAYNKHRDKPIREQAENIIHLFTLTNLGAPAAFKYFDTTIDRKRYTSTKEVLDATLIH | |
| | QSITGLYETRIDLSQLGGDGSSGSSGSSGSSGSSGSSMASNFTQFVLVDNGGTGDVTVAPSNFANGIAEWISSNSRSQAYKVTCSVRQSSAQNRKYTIKVEV | |
| | PKGAWRSYLNMELTIPIFATNSDCELIVKAMQGLLKDGNPIPSAIAANSGIYGGSGGSMASNFTQFVLVDNGGTGDVTVAPSNFANGIAEWISSNSRSQAY | |
| | KVTCSVRQSSAQNRKYTIKVEVPKGAWRSYLNMELTIPIFATNSDCELIVKAMQGLLKDGNPIPSAIAANSGIYGGGSGGGSGGGSGGGSMASNFTQFVLV | |
| | DNGGTGDVTVAPSNFANGIAEWISSNSRSQAYKVTCSVRQSSAQNRKYTIKVEVPKGAWRSYLNMELTIPIFATNSDCELIVKAMQGLLKDGNPIPSAIAAN | |
| | SGIYGGSGGSMASNFTQFVLVDNGGTGDVTVAPSNFANGIAEWISSNSRSQAYKVTCSVRQSSAQNRKYTIKVEVPKGAWRSYLNMELTIPIFATNSDCELI | |
| | VKAMQGLLKDGNPIPSAIAANSGIYSGGSSGGSSGSETPGTSESATPESSGGSSGGSSTAPLEEEYRLFLEAPIQNVTLLEQWKREIPKVWAEINPPGLASTQA | |
| | PIHVQLLSTALPVRVRQYPITLEAKRSLRETIRKFRAAGILRPVHSPWNTPLLPVRKSGTSEYRMVQDLREVNKRVETIHPTVPNPYTLLSLLPPDRIWYSVLDLK | |
| | DAFFCIPLAPESQLIFAFEWADAEEGESGQLTWTRLPQGFKNSPTLFNEALNRDLQGFRLDHPSVSLLQYVDDLLIAADTQAACLSATRDLLMTLAELGYRVS | |
| | GKKAQLCQEEVTYLGFKIHKGSRSLSNSRTQAILQIPVPKTKRQVREFLGKIGYCRLFIPGFAELAQPLYAATRPGNDPLVWGEKEEEAFQSLKLALTQPPALAL | |
| | PSLDKPFQLFVEETSGAAKGVLTQALGPWKRPVAYLSKRLDPVAAGWPRCLRAIAAAALLTREASKLTFGQDIEITSSHNLESLLRSPPDKWLTNARITQYQVL | |
| | LLDPPRVRFKQTAALNPATLLPETDDTLPIHHCLDTLDSLTSTRPDLTDQPLAQAEATLFTDGSSYIRDGKRYAGAAVVTLDSVIWAEPLPIGTSAQKAELIALT | |
| | KALEWSKDKSVNIYTDSRYAFATLHVHGMIYRERGWLTAGGKAIKNAPEILALLTAVWLPKRVAVMHCKGHQKDDAPTSTGNRRADEVAREVAIRPLSTQ | |
| | ATISKRTADGSEFESPKKKAKVE | |
| PL11975 | MPAAKRVKLDGGDKKYSIGLDIGTNSVGWAVITDEYKVPSKKFKVLGNTDRHSIKKNLIGALLFDSGETAEATRLKRTARRRYTRRKNRICYLQEIFSNEMAKV | 16,035 |
| | DDSFFHRLEESFLVEEDKKHERHPIFGNIVDEVAYHEKYPTIYHLRKKLVDSTDKADLRLIYLALAHMIKFRGHFLIEGDLNPDNSDVDKLFIQLVQTYNQLFEE | |
| | NPINASGVDAKAILSARLSKSRRLENLIAQLPGEKKNGLFGNLIALSLGLTPNFKSNFDLAEDAKLQLSKDTYDDDLDNLLAQIGDQYADLFLAAKNLSDAILLS | |
| | DILRVNTEITKAPLSASMIKRYDEHHQDLTLLKALVRQQLPEKYKEIFFDQSKNGYAGYIDGGASQEEFYKFIKPILEKMDGTEELLVKLNREDLLRKQRTFDNG | |
| | SIPHQIHLGELHAILRRQEDFYPFLKDNREKIEKILTFRIPYYVGPLARGNSRFAWMTRKSEETITPWNFEEVVDKGASAQSFIERMTNFDKNLPNEKVLPKHSL | |
| | LYEYFTVYNELTKVKYVTEGMRKPAFLSGEQKKAIVDLLFKTNRKVTVKQLKEDYFKKIECFDSVEISGVEDRFNASLGTYHDLLKIIKDKDFLDNEENEDILEDIV | |
| | LTLTLFEDREMIEERLKTYAHLFDDKVMKQLKRRRYTGWGRLSRKLINGIRDKQSGKTILDFLKSDGFANRNFMQLIHDDSLTFKEDIQKAQVSGQGDSLHE | |
| | HIANLAGSPAIKKGILQTVKVVDELVKVMGRHKPENIVIEMARENQTTQKGQKNSRERMKRIEEGIKELGSQILKEHPVENTQLQNEKLYLYYLQNGRDMYV | |
| | DQELDINRLSDYDVDHIVPQSFLKDDSIDNKVLTRSDKARGKSDNVPSEEVVKKMKNYWRQLLNAKLITQRKFDNLTKAERGGLSELDKAGFIKRQLVETRQI | |
| | TKHVAQILDSRMNTKYDENDKLIREVKVITLKSKLVSDFRKDFQFYKVREINNYHHAHDAYLNAVVGTALIKKYPKLESEFVYGDYKVYDVRKMIAKSEQEIGK | |
| | ATAKYFFYSNIMNFFKTEITLANGEIRKRPLIETNGETGEIVWDKGRDFATVRKVLSMPQVNIVKKTEVQTGGFSKESILPKRNSDKLIARKKDWDPKKYGGFD | |
| | SPTVAYSVLVVAKVEKGKSKKLKSVKELLGITIMERSSFEKNPIDFLEAKGYKEVKKDLIIKLPKYSLFELENGRKRMLASAGELQKGNELALPSKYVNFLYLASHY | |
| | EKLKGSPEDNEQKQLFVEQHKHYLDEIIEQISEFSKRVILADANLDKVLSAYNKHRDKPIREQAENIIHLFTLTNLGAPAAFKYFDTTIDRKRYTSTKEVLDATLIH | |
| | QSITGLYETRIDLSQLGGDGSSGSSGSSGSSGSSGSSMASNFTQFVLVDNGGTGDVTVAPSNFANGIAEWISSNSRSQAYKVTCSVRQSSAQNRKYTIKVEV | |
| | PKGAWRSYLNMELTIPIFATNSDCELIVKAMQGLLKDGNPIPSAIAANSGIYGGSGGSMASNFTQFVLVDNGGTGDVTVAPSNFANGIAEWISSNSRSQAY | |
| | KVTCSVRQSSAQNRKYTIKVEVPKGAWRSYLNMELTIPIFATNSDCELIVKAMQGLLKDGNPIPSAIAANSGIYGGGSGGGSGGGSGGGSMASNFTQFVLV | |
| | DNGGTGDVTVAPSNFANGIAEWISSNSRSQAYKVTCSVRQSSAQNRKYTIKVEVPKGAWRSYLNMELTIPIFATNSDCELIVKAMQGLLKDGNPIPSAIAAN | |
| | SGIYGGSGGSMASNFTQFVLVDNGGTGDVTVAPSNFANGIAEWISSNSRSQAYKVTCSVRQSSAQNRKYTIKVEVPKGAWRSYLNMELTIPIFATNSDCELI | |
| | VKAMQGLLKDGNPIPSAIAANSGIYGSSGSSGSSGSSGSSGSSTAPLEEEYRLFLEAPIQNVTLLEQWKREIPKVWAEINPPGLASTQAPIHVQLLSTALPVRVR | |
| | QYPITLEAKRSLRETIRKFRAAGILRPVHSPWNTPLLPVRKSGTSEYRMVQDLREVNKRVETIHPTVPNPYTLLSLLPPDRIWYSVLDLKDAFFCIPLAPESQLIFA | |
| | FEWADAEEGESGQLTWTRLPQGFKNSPTLFNEALNRDLQGFRLDHPSVSLLQYVDDLLIAADTQAACLSATRDLLMTLAELGYRVSGKKAQLCQEEVTYLG | |
| | FKIHKGSRSLSNSRTQAILQIPVPKTKRQVREFLGKIGYCRLFIPGFAELAQPLYAATRPGNDPLVWGEKEEEAFQSLKLALTQPPALALPSLDKPFQLFVEETSG | |
| | AAKGVLTQALGPWKRPVAYLSKRLDPVAAGWPRCLRAIAAAALLTREASKLTFGQDIEITSSHNLESLLRSPPDKWLTNARITQYQVLLLDPPRVRFKQTAAL | |
| | NPATLLPETDDTLPIHHCLDTLDSLTSTRPDLTDQPLAQAEATLFTDGSSYIRDGKRYAGAAVVTLDSVIWAEPLPIGTSAQKAELIALTKALEWSKDKSVNIYT | |
| | DSRYAFATLHVHGMIYRERGWLTAGGKAIKNAPEILALLTAVWLPKRVAVMHCKGHQKDDAPTSTGNRRADEVAREVAIRPLSTQATISKRTADGSEFESP | |
| | KKKAKVE | |
| PL11976 | MPAAKRVKLDGGDKKYSIGLDIGTNSVGWAVITDEYKVPSKKFKVLGNTDRHSIKKNLIGALLFDSGETAEATRLKRTARRRYTRRKNRICYLQEIFSNEMAKV | 16,036 |
| | DDSFFHRLEESFLVEEDKKHERHPIFGNIVDEVAYHEKYPTIYHLRKKLVDSTDKADLRLIYLALAHMIKFRGHFLIEGDLNPDNSDVDKLFIQLVQTYNQLFEE | |
| | NPINASGVDAKAILSARLSKSRRLENLIAQLPGEKKNGLFGNLIALSLGLTPNFKSNFDLAEDAKLQLSKDTYDDDLDNLLAQIGDQYADLFLAAKNLSDAILLS | |
| | DILRVNTEITKAPLSASMIKRYDEHHQDLTLLKALVRQQLPEKYKEIFFDQSKNGYAGYIDGGASQEEFYKFIKPILEKMDGTEELLVKLNREDLLRKQRTFDNG | |
| | SIPHQIHLGELHAILRRQEDFYPFLKDNREKIEKILTFRIPYYVGPLARGNSRFAWMTRKSEETITPWNFEEVVDKGASAQSFIERMTNFDKNLPNEKVLPKHSL | |
| | LYEYFTVYNELTKVKYVTEGMRKPAFLSGEQKKAIVDLLFKTNRKVTVKQLKEDYFKKIECFDSVEISGVEDRFNASLGTYHDLLKIIKDKDFLDNEENEDILEDIV | |
| | LTLTLFEDREMIEERLKTYAHLFDDKVMKQLKRRRYTGWGRLSRKLINGIRDKQSGKTILDFLKSDGFANRNFMQLIHDDSLTFKEDIQKAQVSGQGDSLHE | |
| | HIANLAGSPAIKKGILQTVKVVDELVKVMGRHKPENIVIEMARENQTTQKGQKNSRERMKRIEEGIKELGSQILKEHPVENTQLQNEKLYLYYLQNGRDMYV | |
| | DQELDINRLSDYDVDHIVPQSFLKDDSIDNKVLTRSDKARGKSDNVPSEEVVKKMKNYWRQLLNAKLITQRKFDNLTKAERGGLSELDKAGFIKRQLVETRQI | |
| | TKHVAQILDSRMNTKYDENDKLIREVKVITLKSKLVSDFRKDFQFYKVREINNYHHAHDAYLNAVVGTALIKKYPKLESEFVYGDYKVYDVRKMIAKSEQEIGK | |
| | ATAKYFFYSNIMNFFKTEITLANGEIRKRPLIETNGETGEIVWDKGRDFATVRKVLSMPQVNIVKKTEVQTGGFSKESILPKRNSDKLIARKKDWDPKKYGGFD | |
| | SPTVAYSVLVVAKVEKGKSKKLKSVKELLGITIMERSSFEKNPIDFLEAKGYKEVKKDLIIKLPKYSLFELENGRKRMLASAGELQKGNELALPSKYVNFLYLASHY | |
| | EKLKGSPEDNEQKQLFVEQHKHYLDEIIEQISEFSKRVILADANLDKVLSAYNKHRDKPIREQAENIIHLFTLTNLGAPAAFKYFDTTIDRKRYTSTKEVLDATLIH | |
| | QSITGLYETRIDLSQLGGDGSSGSSGSSGSSGSSGSSMASNFTQFVLVDNGGTGDVTVAPSNFANGIAEWISSNSRSQAYKVTCSVRQSSAQNRKYTIKVEV | |
| | PKGAWRSYLNMELTIPIFATNSDCELIVKAMQGLLKDGNPIPSAIAANSGIYGGSGGSMASNFTQFVLVDNGGTGDVTVAPSNFANGIAEWISSNSRSQAY | |
| | KVTCSVRQSSAQNRKYTIKVEVPKGAWRSYLNMELTIPIFATNSDCELIVKAMQGLLKDGNPIPSAIAANSGIYGGGSGGGSGGGSGGGSMASNFTQFVLV | |
| | DNGGTGDVTVAPSNFANGIAEWISSNSRSQAYKVTCSVRQSSAQNRKYTIKVEVPKGAWRSYLNMELTIPIFATNSDCELIVKAMQGLLKDGNPIPSAIAAN | |
| | SGIYGGSGGSMASNFTQFVLVDNGGTGDVTVAPSNFANGIAEWISSNSRSQAYKVTCSVRQSSAQNRKYTIKVEVPKGAWRSYLNMELTIPIFATNSDCELI | |
| | VKAMQGLLKDGNPIPSAIAANSGIYGSSGGGEAAAKTAPLEEEYRLFLEAPIQNVTLLEQWKREIPKVWAEINPPGLASTQAPIHVQLLSTALPVRVRQYPITL | |
| | EAKRSLRETIRKFRAAGILRPVHSPWNTPLLPVRKSGTSEYRMVQDLREVNKRVETIHPTVPNPYTLLSLLPPDRIWYSVLDLKDAFFCIPLAPESQLIFAFEWA | |
| | DAEEGESGQLTWTRLPQGFKNSPTLFNEALNRDLQGFRLDHPSVSLLQYVDDLLIAADTQAACLSATRDLLMTLAELGYRVSGKKAQLCQEEVTYLGFKIHK | |
| | GSRSLSNSRTQAILQIPVPKTKRQVREFLGKIGYCRLFIPGFAELAQPLYAATRPGNDPLVWGEKEEEAFQSLKLALTQPPALALPSLDKPFQLFVEETSGAAKG | |
| | VLTQALGPWKRPVAYLSKRLDPVAAGWPRCLRAIAAAALLTREASKLTFGQDIEITSSHNLESLLRSPPDKWLTNARITQYQVLLLDPPRVRFKQTAALNPATL | |
| | LPETDDTLPIHHCLDTLDSLTSTRPDLTDQPLAQAEATLFTDGSSYIRDGKRYAGAAVVTLDSVIWAEPLPIGTSAQKAELIALTKALEWSKDKSVNIYTDSRYA | |
| | FATLHVHGMIYRERGWLTAGGKAIKNAPEILALLTAVWLPKRVAVMHCKGHQKDDAPTSTGNRRADEVAREVAIRPLSTQATISKRTADGSEFESPKKKAK | |
| | VE | |
| PL11977 | MPAAKRVKLDGGDKKYSIGLDIGTNSVGWAVITDEYKVPSKKFKVLGNTDRHSIKKNLIGALLFDSGETAEATRLKRTARRRYTRRKNRICYLQEIFSNEMAKV | 16,037 |
| | DDSFFHRLEESFLVEEDKKHERHPIFGNIVDEVAYHEKYPTIYHLRKKLVDSTDKADLRLIYLALAHMIKFRGHFLIEGDLNPDNSDVDKLFIQLVQTYNQLFEE | |
| | NPINASGVDAKAILSARLSKSRRLENLIAQLPGEKKNGLFGNLIALSLGLTPNFKSNFDLAEDAKLQLSKDTYDDDLDNLLAQIGDQYADLFLAAKNLSDAILLS | |
| | DILRVNTEITKAPLSASMIKRYDEHHQDLTLLKALVRQQLPEKYKEIFFDQSKNGYAGYIDGGASQEEFYKFIKPILEKMDGTEELLVKLNREDLLRKQRTFDNG | |
| | SIPHQIHLGELHAILRRQEDFYPFLKDNREKIEKILTFRIPYYVGPLARGNSRFAWMTRKSEETITPWNFEEVVDKGASAQSFIERMTNFDKNLPNEKVLPKHSL | |
| | LYEYFTVYNELTKVKYVTEGMRKPAFLSGEQKKAIVDLLFKTNRKVTVKQLKEDYFKKIECFDSVEISGVEDRFNASLGTYHDLLKIIKDKDFLDNEENEDILEDIV | |
| | LTLTLFEDREMIEERLKTYAHLFDDKVMKQLKRRRYTGWGRLSRKLINGIRDKQSGKTILDFLKSDGFANRNFMQLIHDDSLTFKEDIQKAQVSGQGDSLHE | |
| | HIANLAGSPAIKKGILQTVKVVDELVKVMGRHKPENIVIEMARENQTTQKGQKNSRERMKRIEEGIKELGSQILKEHPVENTQLQNEKLYLYYLQNGRDMYV | |
| | DQELDINRLSDYDVDHIVPQSFLKDDSIDNKVLTRSDKARGKSDNVPSEEVVKKMKNYWRQLLNAKLITQRKFDNLTKAERGGLSELDKAGFIKRQLVETRQI | |
| | TKHVAQILDSRMNTKYDENDKLIREVKVITLKSKLVSDFRKDFQFYKVREINNYHHAHDAYLNAVVGTALIKKYPKLESEFVYGDYKVYDVRKMIAKSEQEIGK | |
| | ATAKYFFYSNIMNFFKTEITLANGEIRKRPLIETNGETGEIVWDKGRDFATVRKVLSMPQVNIVKKTEVQTGGFSKESILPKRNSDKLIARKKDWDPKKYGGFD | |
| | SPTVAYSVLVVAKVEKGKSKKLKSVKELLGITIMERSSFEKNPIDFLEAKGYKEVKKDLIIKLPKYSLFELENGRKRMLASAGELQKGNELALPSKYVNFLYLASHY | |
| | EKLKGSPEDNEQKQLFVEQHKHYLDEIIEQISEFSKRVILADANLDKVLSAYNKHRDKPIREQAENIIHLFTLTNLGAPAAFKYFDTTIDRKRYTSTKEVLDATLIH | |
| | QSITGLYETRIDLSQLGGDGSSGGGEAAAKMASNFTQFVLVDNGGTGDVTVAPSNFANGIAEWISSNSRSQAYKVTCSVRQSSAQNRKYTIKVEVPKGAW | |
| | RSYLNMELTIPIFATNSDCELIVKAMQGLLKDGNPIPSAIAANSGIYAEAAAKEAAAKEAAAKEAAAKALEAEAAAKEAAAKEAAAKEAAAKATAPLEEEYRLF | |
| | LEAPIQNVTLLEQWKREIPKVWAEINPPGLASTQAPIHVQLLSTALPVRVRQYPITLEAKRSLRETIRKFRAAGILRPVHSPWNTPLLPVRKSGTSEYRMVQDL | |
| | REVNKRVETIHPTVPNPYTLLSLLPPDRIWYSVLDLKDAFFCIPLAPESQLIFAFEWADAEEGESGQLTWTRLPQGFKNSPTLFNEALNRDLQGFRLDHPSVSL | |
| | LQYVDDLLIAADTQAACLSATRDLLMTLAELGYRVSGKKAQLCQEEVTYLGFKIHKGSRSLSNSRTQAILQIPVPKTKRQVREFLGKIGYCRLFIPGFAELAQPLY | |
| | AATRPGNDPLVWGEKEEEAFQSLKLALTQPPALALPSLDKPFQLFVEETSGAAKGVLTQALGPWKRPVAYLSKRLDPVAAGWPRCLRAIAAAALLTREASKL | |
| | TFGQDIEITSSHNLESLLRSPPDKWLTNARITQYQVLLLDPPRVRFKQTAALNPATLLPETDDTLPIHHCLDTLDSLTSTRPDLTDQPLAQAEATLFTDGSSYIRD | |
| | GKRYAGAAVVTLDSVIWAEPLPIGTSAQKAELIALTKALEWSKDKSVNIYTDSRYAFATLHVHGMIYRERGWLTAGGKAIKNAPEILALLTAVWLPKRVAVM | |
| | HCKGHQKDDAPTSTGNRRADEVAREVAIRPLSTQATISKRTADGSEFESPKKKAKVE | |
| PL11978 | MPAAKRVKLDGGDKKYSIGLDIGTNSVGWAVITDEYKVPSKKFKVLGNTDRHSIKKNLIGALLFDSGETAEATRLKRTARRRYTRRKNRICYLQEIFSNEMAKV | 16,038 |
| | DDSFFHRLEESFLVEEDKKHERHPIFGNIVDEVAYHEKYPTIYHLRKKLVDSTDKADLRLIYLALAHMIKFRGHFLIEGDLNPDNSDVDKLFIQLVQTYNQLFEE | |
| | NPINASGVDAKAILSARLSKSRRLENLIAQLPGEKKNGLFGNLIALSLGLTPNFKSNFDLAEDAKLQLSKDTYDDDLDNLLAQIGDQYADLFLAAKNLSDAILLS | |
| | DILRVNTEITKAPLSASMIKRYDEHHQDLTLLKALVRQQLPEKYKEIFFDQSKNGYAGYIDGGASQEEFYKFIKPILEKMDGTEELLVKLNREDLLRKQRTFDNG | |
| | SIPHQIHLGELHAILRRQEDFYPFLKDNREKIEKILTFRIPYYVGPLARGNSRFAWMTRKSEETITPWNFEEVVDKGASAQSFIERMTNFDKNLPNEKVLPKHSL | |
| | LYEYFTVYNELTKVKYVTEGMRKPAFLSGEQKKAIVDLLFKTNRKVTVKQLKEDYFKKIECFDSVEISGVEDRFNASLGTYHDLLKIIKDKDFLDNEENEDILEDIV | |
| | LTLTLFEDREMIEERLKTYAHLFDDKVMKQLKRRRYTGWGRLSRKLINGIRDKQSGKTILDFLKSDGFANRNFMQLIHDDSLTFKEDIQKAQVSGQGDSLHE | |
| | HIANLAGSPAIKKGILQTVKVVDELVKVMGRHKPENIVIEMARENQTTQKGQKNSRERMKRIEEGIKELGSQILKEHPVENTQLQNEKLYLYYLQNGRDMYV | |
| | DQELDINRLSDYDVDHIVPQSFLKDDSIDNKVLTRSDKARGKSDNVPSEEVVKKMKNYWRQLLNAKLITQRKFDNLTKAERGGLSELDKAGFIKRQLVETRQI | |
| | TKHVAQILDSRMNTKYDENDKLIREVKVITLKSKLVSDFRKDFQFYKVREINNYHHAHDAYLNAVVGTALIKKYPKLESEFVYGDYKVYDVRKMIAKSEQEIGK | |
| | ATAKYFFYSNIMNFFKTEITLANGEIRKRPLIETNGETGEIVWDKGRDFATVRKVLSMPQVNIVKKTEVQTGGFSKESILPKRNSDKLIARKKDWDPKKYGGFD | |
| | SPTVAYSVLVVAKVEKGKSKKLKSVKELLGITIMERSSFEKNPIDFLEAKGYKEVKKDLIIKLPKYSLFELENGRKRMLASAGELQKGNELALPSKYVNFLYLASHY | |
| | EKLKGSPEDNEQKQLFVEQHKHYLDEIIEQISEFSKRVILADANLDKVLSAYNKHRDKPIREQAENIIHLFTLTNLGAPAAFKYFDTTIDRKRYTSTKEVLDATLIH | |
| | QSITGLYETRIDLSQLGGDGSSGGGEAAAKMASNFTQFVLVDNGGTGDVTVAPSNFANGIAEWISSNSRSQAYKVTCSVRQSSAQNRKYTIKVEVPKGAW | |
| | RSYLNMELTIPIFATNSDCELIVKAMQGLLKDGNPIPSAIAANSGIYSGGSSGGSSGSETPGTSESATPESSGGSSGGSSTAPLEEEYRLFLEAPIQNVTLLEQWK | |
| | REIPKVWAEINPPGLASTQAPIHVQLLSTALPVRVRQYPITLEAKRSLRETIRKFRAAGILRPVHSPWNTPLLPVRKSGTSEYRMVQDLREVNKRVETIHPTVP | |
| | NPYTLLSLLPPDRIWYSVLDLKDAFFCIPLAPESQLIFAFEWADAEEGESGQLTWTRLPQGFKNSPTLFNEALNRDLQGFRLDHPSVSLLQYVDDLLIAADTQA | |
| | ACLSATRDLLMTLAELGYRVSGKKAQLCQEEVTYLGFKIHKGSRSLSNSRTQAILQIPVPKTKRQVREFLGKIGYCRLFIPGFAELAQPLYAATRPGNDPLVWG | |
| | EKEEEAFQSLKLALTQPPALALPSLDKPFQLFVEETSGAAKGVLTQALGPWKRPVAYLSKRLDPVAAGWPRCLRAIAAAALLTREASKLTFGQDIEITSSHNLES | |
| | LLRSPPDKWLTNARITQYQVLLLDPPRVRFKQTAALNPATLLPETDDTLPIHHCLDTLDSLTSTRPDLTDQPLAQAEATLFTDGSSYIRDGKRYAGAAVVTLDS | |
| | VIWAEPLPIGTSAQKAELIALTKALEWSKDKSVNIYTDSRYAFATLHVHGMIYRERGWLTAGGKAIKNAPEILALLTAVWLPKRVAVMHCKGHQKDDAPTST | |
| | GNRRADEVAREVAIRPLSTQATISKRTADGSEFESPKKKAKVE | |
| PL11979 | MPAAKRVKLDGGDKKYSIGLDIGTNSVGWAVITDEYKVPSKKFKVLGNTDRHSIKKNLIGALLFDSGETAEATRLKRTARRRYTRRKNRICYLQEIFSNEMAKV | 16,039 |
| | DDSFFHRLEESFLVEEDKKHERHPIFGNIVDEVAYHEKYPTIYHLRKKLVDSTDKADLRLIYLALAHMIKFRGHFLIEGDLNPDNSDVDKLFIQLVQTYNQLFEE | |
| | NPINASGVDAKAILSARLSKSRRLENLIAQLPGEKKNGLFGNLIALSLGLTPNFKSNFDLAEDAKLQLSKDTYDDDLDNLLAQIGDQYADLFLAAKNLSDAILLS | |
| | DILRVNTEITKAPLSASMIKRYDEHHQDLTLLKALVRQQLPEKYKEIFFDQSKNGYAGYIDGGASQEEFYKFIKPILEKMDGTEELLVKLNREDLLRKQRTFDNG | |
| | SIPHQIHLGELHAILRRQEDFYPFLKDNREKIEKILTFRIPYYVGPLARGNSRFAWMTRKSEETITPWNFEEVVDKGASAQSFIERMTNFDKNLPNEKVLPKHSL | |
| | LYEYFTVYNELTKVKYVTEGMRKPAFLSGEQKKAIVDLLFKTNRKVTVKQLKEDYFKKIECFDSVEISGVEDRFNASLGTYHDLLKIIKDKDFLDNEENEDILEDIV | |
| | LTLTLFEDREMIEERLKTYAHLFDDKVMKQLKRRRYTGWGRLSRKLINGIRDKQSGKTILDFLKSDGFANRNFMQLIHDDSLTFKEDIQKAQVSGQGDSLHE | |
| | HIANLAGSPAIKKGILQTVKVVDELVKVMGRHKPENIVIEMARENQTTQKGQKNSRERMKRIEEGIKELGSQILKEHPVENTQLQNEKLYLYYLQNGRDMYV | |
| | DQELDINRLSDYDVDHIVPQSFLKDDSIDNKVLTRSDKARGKSDNVPSEEVVKKMKNYWRQLLNAKLITQRKFDNLTKAERGGLSELDKAGFIKRQLVETRQI | |
| | TKHVAQILDSRMNTKYDENDKLIREVKVITLKSKLVSDFRKDFQFYKVREINNYHHAHDAYLNAVVGTALIKKYPKLESEFVYGDYKVYDVRKMIAKSEQEIGK | |
| | ATAKYFFYSNIMNFFKTEITLANGEIRKRPLIETNGETGEIVWDKGRDFATVRKVLSMPQVNIVKKTEVQTGGFSKESILPKRNSDKLIARKKDWDPKKYGGFD | |
| | SPTVAYSVLVVAKVEKGKSKKLKSVKELLGITIMERSSFEKNPIDFLEAKGYKEVKKDLIIKLPKYSLFELENGRKRMLASAGELQKGNELALPSKYVNFLYLASHY | |
| | EKLKGSPEDNEQKQLFVEQHKHYLDEIIEQISEFSKRVILADANLDKVLSAYNKHRDKPIREQAENIIHLFTLTNLGAPAAFKYFDTTIDRKRYTSTKEVLDATLIH | |
| | QSITGLYETRIDLSQLGGDGSSGGGEAAAKMASNFTQFVLVDNGGTGDVTVAPSNFANGIAEWISSNSRSQAYKVTCSVRQSSAQNRKYTIKVEVPKGAW | |
| | RSYLNMELTIPIFATNSDCELIVKAMQGLLKDGNPIPSAIAANSGIYGSSGSSGSSGSSGSSGSSTAPLEEEYRLFLEAPIQNVTLLEQWKREIPKVWAEINPPGL | |
| | ASTQAPIHVQLLSTALPVRVRQYPITLEAKRSLRETIRKFRAAGILRPVHSPWNTPLLPVRKSGTSEYRMVQDLREVNKRVETIHPTVPNPYTLLSLLPPDRIWY | |
| | SVLDLKDAFFCIPLAPESQLIFAFEWADAEEGESGQLTWTRLPQGFKNSPTLFNEALNRDLQGFRLDHPSVSLLQYVDDLLIAADTQAACLSATRDLLMTLAE | |
| | LGYRVSGKKAQLCQEEVTYLGFKIHKGSRSLSNSRTQAILQIPVPKTKRQVREFLGKIGYCRLFIPGFAELAQPLYAATRPGNDPLVWGEKEEEAFQSLKLALTQ | |
| | PPALALPSLDKPFQLFVEETSGAAKGVLTQALGPWKRPVAYLSKRLDPVAAGWPRCLRAIAAAALLTREASKLTFGQDIEITSSHNLESLLRSPPDKWLTNARI | |
| | TQYQVLLLDPPRVRFKQTAALNPATLLPETDDTLPIHHCLDTLDSLTSTRPDLTDQPLAQAEATLFTDGSSYIRDGKRYAGAAVVTLDSVIWAEPLPIGTSAQK | |
| | AELIALTKALEWSKDKSVNIYTDSRYAFATLHVHGMIYRERGWLTAGGKAIKNAPEILALLTAVWLPKRVAVMHCKGHQKDDAPTSTGNRRADEVAREVAI | |
| | RPLSTQATISKRTADGSEFESPKKKAKVE | |
| PL11980 | MPAAKRVKLDGGDKKYSIGLDIGTNSVGWAVITDEYKVPSKKFKVLGNTDRHSIKKNLIGALLFDSGETAEATRLKRTARRRYTRRKNRICYLQEIFSNEMAKV | 16,040 |
| | DDSFFHRLEESFLVEEDKKHERHPIFGNIVDEVAYHEKYPTIYHLRKKLVDSTDKADLRLIYLALAHMIKFRGHFLIEGDLNPDNSDVDKLFIQLVQTYNQLFEE | |
| | NPINASGVDAKAILSARLSKSRRLENLIAQLPGEKKNGLFGNLIALSLGLTPNFKSNFDLAEDAKLQLSKDTYDDDLDNLLAQIGDQYADLFLAAKNLSDAILLS | |
| | DILRVNTEITKAPLSASMIKRYDEHHQDLTLLKALVRQQLPEKYKEIFFDQSKNGYAGYIDGGASQEEFYKFIKPILEKMDGTEELLVKLNREDLLRKQRTFDNG | |
| | SIPHQIHLGELHAILRRQEDFYPFLKDNREKIEKILTFRIPYYVGPLARGNSRFAWMTRKSEETITPWNFEEVVDKGASAQSFIERMTNFDKNLPNEKVLPKHSL | |
| | LYEYFTVYNELTKVKYVTEGMRKPAFLSGEQKKAIVDLLFKTNRKVTVKQLKEDYFKKIECFDSVEISGVEDRFNASLGTYHDLLKIIKDKDFLDNEENEDILEDIV | |
| | LTLTLFEDREMIEERLKTYAHLFDDKVMKQLKRRRYTGWGRLSRKLINGIRDKQSGKTILDFLKSDGFANRNFMQLIHDDSLTFKEDIQKAQVSGQGDSLHE | |
| | HIANLAGSPAIKKGILQTVKVVDELVKVMGRHKPENIVIEMARENQTTQKGQKNSRERMKRIEEGIKELGSQILKEHPVENTQLQNEKLYLYYLQNGRDMYV | |
| | DQELDINRLSDYDVDHIVPQSFLKDDSIDNKVLTRSDKARGKSDNVPSEEVVKKMKNYWRQLLNAKLITQRKFDNLTKAERGGLSELDKAGFIKRQLVETRQI | |
| | TKHVAQILDSRMNTKYDENDKLIREVKVITLKSKLVSDFRKDFQFYKVREINNYHHAHDAYLNAVVGTALIKKYPKLESEFVYGDYKVYDVRKMIAKSEQEIGK | |
| | ATAKYFFYSNIMNFFKTEITLANGEIRKRPLIETNGETGEIVWDKGRDFATVRKVLSMPQVNIVKKTEVQTGGFSKESILPKRNSDKLIARKKDWDPKKYGGFD | |
| | SPTVAYSVLVVAKVEKGKSKKLKSVKELLGITIMERSSFEKNPIDFLEAKGYKEVKKDLIIKLPKYSLFELENGRKRMLASAGELQKGNELALPSKYVNFLYLASHY | |
| | EKLKGSPEDNEQKQLFVEQHKHYLDEIIEQISEFSKRVILADANLDKVLSAYNKHRDKPIREQAENIIHLFTLTNLGAPAAFKYFDTTIDRKRYTSTKEVLDATLIH | |
| | QSITGLYETRIDLSQLGGDGSSGGGEAAAKMASNFTQFVLVDNGGTGDVTVAPSNFANGIAEWISSNSRSQAYKVTCSVRQSSAQNRKYTIKVEVPKGAW | |
| | RSYLNMELTIPIFATNSDCELIVKAMQGLLKDGNPIPSAIAANSGIYGSSGGGEAAAKTAPLEEEYRLFLEAPIQNVTLLEQWKREIPKVWAEINPPGLASTQA | |
| | PIHVQLLSTALPVRVRQYPITLEAKRSLRETIRKFRAAGILRPVHSPWNTPLLPVRKSGTSEYRMVQDLREVNKRVETIHPTVPNPYTLLSLLPPDRIWYSVLDLK | |
| | DAFFCIPLAPESQLIFAFEWADAEEGESGQLTWTRLPQGFKNSPTLFNEALNRDLQGFRLDHPSVSLLQYVDDLLIAADTQAACLSATRDLLMTLAELGYRVS | |
| | GKKAQLCQEEVTYLGFKIHKGSRSLSNSRTQAILQIPVPKTKRQVREFLGKIGYCRLFIPGFAELAQPLYAATRPGNDPLVWGEKEEEAFQSLKLALTQPPALAL | |
| | PSLDKPFQLFVEETSGAAKGVLTQALGPWKRPVAYLSKRLDPVAAGWPRCLRAIAAAALLTREASKLTFGQDIEITSSHNLESLLRSPPDKWLTNARITQYQVL | |
| | LLDPPRVRFKQTAALNPATLLPETDDTLPIHHCLDTLDSLTSTRPDLTDQPLAQAEATLFTDGSSYIRDGKRYAGAAVVTLDSVIWAEPLPIGTSAQKAELIALT | |
| | KALEWSKDKSVNIYTDSRYAFATLHVHGMIYRERGWLTAGGKAIKNAPEILALLTAVWLPKRVAVMHCKGHQKDDAPTSTGNRRADEVAREVAIRPLSTQ | |
| | ATISKRTADGSEFESPKKKAKVE | |
| PL11981 | MPAAKRVKLDGGDKKYSIGLDIGTNSVGWAVITDEYKVPSKKFKVLGNTDRHSIKKNLIGALLFDSGETAEATRLKRTARRRYTRRKNRICYLQEIFSNEMAKV | 16,041 |
| | DDSFFHRLEESFLVEEDKKHERHPIFGNIVDEVAYHEKYPTIYHLRKKLVDSTDKADLRLIYLALAHMIKFRGHFLIEGDLNPDNSDVDKLFIQLVQTYNQLFEE | |
| | NPINASGVDAKAILSARLSKSRRLENLIAQLPGEKKNGLFGNLIALSLGLTPNFKSNFDLAEDAKLQLSKDTYDDDLDNLLAQIGDQYADLFLAAKNLSDAILLS | |
| | DILRVNTEITKAPLSASMIKRYDEHHQDLTLLKALVRQQLPEKYKEIFFDQSKNGYAGYIDGGASQEEFYKFIKPILEKMDGTEELLVKLNREDLLRKQRTFDNG | |
| | SIPHQIHLGELHAILRRQEDFYPFLKDNREKIEKILTFRIPYYVGPLARGNSRFAWMTRKSEETITPWNFEEVVDKGASAQSFIERMTNFDKNLPNEKVLPKHSL | |
| | LYEYFTVYNELTKVKYVTEGMRKPAFLSGEQKKAIVDLLFKTNRKVTVKQLKEDYFKKIECFDSVEISGVEDRFNASLGTYHDLLKIIKDKDFLDNEENEDILEDIV | |
| | LTLTLFEDREMIEERLKTYAHLFDDKVMKQLKRRRYTGWGRLSRKLINGIRDKQSGKTILDFLKSDGFANRNFMQLIHDDSLTFKEDIQKAQVSGQGDSLHE | |
| | HIANLAGSPAIKKGILQTVKVVDELVKVMGRHKPENIVIEMARENQTTQKGQKNSRERMKRIEEGIKELGSQILKEHPVENTQLQNEKLYLYYLQNGRDMYV | |
| | DQELDINRLSDYDVDHIVPQSFLKDDSIDNKVLTRSDKARGKSDNVPSEEVVKKMKNYWRQLLNAKLITQRKFDNLTKAERGGLSELDKAGFIKRQLVETRQI | |
| | TKHVAQILDSRMNTKYDENDKLIREVKVITLKSKLVSDFRKDFQFYKVREINNYHHAHDAYLNAVVGTALIKKYPKLESEFVYGDYKVYDVRKMIAKSEQEIGK | |
| | ATAKYFFYSNIMNFFKTEITLANGEIRKRPLIETNGETGEIVWDKGRDFATVRKVLSMPQVNIVKKTEVQTGGFSKESILPKRNSDKLIARKKDWDPKKYGGFD | |
| | SPTVAYSVLVVAKVEKGKSKKLKSVKELLGITIMERSSFEKNPIDFLEAKGYKEVKKDLIIKLPKYSLFELENGRKRMLASAGELQKGNELALPSKYVNFLYLASHY | |
| | EKLKGSPEDNEQKQLFVEQHKHYLDEIIEQISEFSKRVILADANLDKVLSAYNKHRDKPIREQAENIIHLFTLTNLGAPAAFKYFDTTIDRKRYTSTKEVLDATLIH | |
| | QSITGLYETRIDLSQLGGDGSSGGGEAAAKMASNFTQFVLVDNGGTGDVTVAPSNFANGIAEWISSNSRSQAYKVTCSVRQSSAQNRKYTIKVEVPKGAW | |
| | RSYLNMELTIPIFATNSDCELIVKAMQGLLKDGNPIPSAIAANSGIYGGSGGSMASNFTQFVLVDNGGTGDVTVAPSNFANGIAEWISSNSRSQAYKVTCSV | |
| | RQSSAQNRKYTIKVEVPKGAWRSYLNMELTIPIFATNSDCELIVKAMQGLLKDGNPIPSAIAANSGIYAEAAAKEAAAKEAAAKEAAAKALEAEAAAKEAAAK | |
| | EAAAKEAAAKATAPLEEEYRLFLEAPIQNVTLLEQWKREIPKVWAEINPPGLASTQAPIHVQLLSTALPVRVRQYPITLEAKRSLRETIRKFRAAGILRPVHSPW | |
| | NTPLLPVRKSGTSEYRMVQDLREVNKRVETIHPTVPNPYTLLSLLPPDRIWYSVLDLKDAFFCIPLAPESQLIFAFEWADAEEGESGQLTWTRLPQGFKNSPTL | |
| | FNEALNRDLQGFRLDHPSVSLLQYVDDLLIAADTQAACLSATRDLLMTLAELGYRVSGKKAQLCQEEVTYLGFKIHKGSRSLSNSRTQAILQIPVPKTKRQVRE | |
| | FLGKIGYCRLFIPGFAELAQPLYAATRPGNDPLVWGEKEEEAFQSLKLALTQPPALALPSLDKPFQLFVEETSGAAKGVLTQALGPWKRPVAYLSKRLDPVAA | |
| | GWPRCLRAIAAAALLTREASKLTFGQDIEITSSHNLESLLRSPPDKWLTNARITQYQVLLLDPPRVRFKQTAALNPATLLPETDDTLPIHHCLDTLDSLTSTRPDL | |
| | TDQPLAQAEATLFTDGSSYIRDGKRYAGAAVVTLDSVIWAEPLPIGTSAQKAELIALTKALEWSKDKSVNIYTDSRYAFATLHVHGMIYRERGWLTAGGKAIK | |
| | NAPEILALLTAVWLPKRVAVMHCKGHQKDDAPTSTGNRRADEVAREVAIRPLSTQATISKRTADGSEFESPKKKAKVE | |
| PL11982 | MPAAKRVKLDGGDKKYSIGLDIGTNSVGWAVITDEYKVPSKKFKVLGNTDRHSIKKNLIGALLFDSGETAEATRLKRTARRRYTRRKNRICYLQEIFSNEMAKV | 16,042 |
| | DDSFFHRLEESFLVEEDKKHERHPIFGNIVDEVAYHEKYPTIYHLRKKLVDSTDKADLRLIYLALAHMIKFRGHFLIEGDLNPDNSDVDKLFIQLVQTYNQLFEE | |
| | NPINASGVDAKAILSARLSKSRRLENLIAQLPGEKKNGLFGNLIALSLGLTPNFKSNFDLAEDAKLQLSKDTYDDDLDNLLAQIGDQYADLFLAAKNLSDAILLS | |
| | DILRVNTEITKAPLSASMIKRYDEHHQDLTLLKALVRQQLPEKYKEIFFDQSKNGYAGYIDGGASQEEFYKFIKPILEKMDGTEELLVKLNREDLLRKQRTFDNG | |
| | SIPHQIHLGELHAILRRQEDFYPFLKDNREKIEKILTFRIPYYVGPLARGNSRFAWMTRKSEETITPWNFEEVVDKGASAQSFIERMTNFDKNLPNEKVLPKHSL | |
| | LYEYFTVYNELTKVKYVTEGMRKPAFLSGEQKKAIVDLLFKTNRKVTVKQLKEDYFKKIECFDSVEISGVEDRFNASLGTYHDLLKIIKDKDFLDNEENEDILEDIV | |
| | LTLTLFEDREMIEERLKTYAHLFDDKVMKQLKRRRYTGWGRLSRKLINGIRDKQSGKTILDFLKSDGFANRNFMQLIHDDSLTFKEDIQKAQVSGQGDSLHE | |
| | HIANLAGSPAIKKGILQTVKVVDELVKVMGRHKPENIVIEMARENQTTQKGQKNSRERMKRIEEGIKELGSQILKEHPVENTQLQNEKLYLYYLQNGRDMYV | |
| | DQELDINRLSDYDVDHIVPQSFLKDDSIDNKVLTRSDKARGKSDNVPSEEVVKKMKNYWRQLLNAKLITQRKFDNLTKAERGGLSELDKAGFIKRQLVETRQI | |
| | TKHVAQILDSRMNTKYDENDKLIREVKVITLKSKLVSDFRKDFQFYKVREINNYHHAHDAYLNAVVGTALIKKYPKLESEFVYGDYKVYDVRKMIAKSEQEIGK | |
| | ATAKYFFYSNIMNFFKTEITLANGEIRKRPLIETNGETGEIVWDKGRDFATVRKVLSMPQVNIVKKTEVQTGGFSKESILPKRNSDKLIARKKDWDPKKYGGFD | |
| | SPTVAYSVLVVAKVEKGKSKKLKSVKELLGITIMERSSFEKNPIDFLEAKGYKEVKKDLIIKLPKYSLFELENGRKRMLASAGELQKGNELALPSKYVNFLYLASHY | |
| | EKLKGSPEDNEQKQLFVEQHKHYLDEIIEQISEFSKRVILADANLDKVLSAYNKHRDKPIREQAENIIHLFTLTNLGAPAAFKYFDTTIDRKRYTSTKEVLDATLIH | |
| | QSITGLYETRIDLSQLGGDGSSGGGEAAAKMASNFTQFVLVDNGGTGDVTVAPSNFANGIAEWISSNSRSQAYKVTCSVRQSSAQNRKYTIKVEVPKGAW | |
| | RSYLNMELTIPIFATNSDCELIVKAMQGLLKDGNPIPSAIAANSGIYGGSGGSMASNFTQFVLVDNGGTGDVTVAPSNFANGIAEWISSNSRSQAYKVTCSV | |
| | RQSSAQNRKYTIKVEVPKGAWRSYLNMELTIPIFATNSDCELIVKAMQGLLKDGNPIPSAIAANSGIYSGGSSGGSSGSETPGTSESATPESSGGSSGGSSTAP | |
| | LEEEYRLFLEAPIQNVTLLEQWKREIPKVWAEINPPGLASTQAPIHVQLLSTALPVRVRQYPITLEAKRSLRETIRKFRAAGILRPVHSPWNTPLLPVRKSGTSEY | |
| | RMVQDLREVNKRVETIHPTVPNPYTLLSLLPPDRIWYSVLDLKDAFFCIPLAPESQLIFAFEWADAEEGESGQLTWTRLPQGFKNSPTLFNEALNRDLQGFRL | |
| | DHPSVSLLQYVDDLLIAADTQAACLSATRDLLMTLAELGYRVSGKKAQLCQEEVTYLGFKIHKGSRSLSNSRTQAILQIPVPKTKRQVREFLGKIGYCRLFIPGF | |
| | AELAQPLYAATRPGNDPLVWGEKEEEAFQSLKLALTQPPALALPSLDKPFQLFVEETSGAAKGVLTQALGPWKRPVAYLSKRLDPVAAGWPRCLRAIAAAAL | |
| | LTREASKLTFGQDIEITSSHNLESLLRSPPDKWLTNARITQYQVLLLDPPRVRFKQTAALNPATLLPETDDTLPIHHCLDTLDSLTSTRPDLTDQPLAQAEATLFT | |
| | DGSSYIRDGKRYAGAAVVTLDSVIWAEPLPIGTSAQKAELIALTKALEWSKDKSVNIYTDSRYAFATLHVHGMIYRERGWLTAGGKAIKNAPEILALLTAVWL | |
| | PKRVAVMHCKGHQKDDAPTSTGNRRADEVAREVAIRPLSTQATISKRTADGSEFESPKKKAKVE | |
| PL11983 | MPAAKRVKLDGGDKKYSIGLDIGTNSVGWAVITDEYKVPSKKFKVLGNTDRHSIKKNLIGALLFDSGETAEATRLKRTARRRYTRRKNRICYLQEIFSNEMAKV | 16,043 |
| | DDSFFHRLEESFLVEEDKKHERHPIFGNIVDEVAYHEKYPTIYHLRKKLVDSTDKADLRLIYLALAHMIKFRGHFLIEGDLNPDNSDVDKLFIQLVQTYNQLFEE | |
| | NPINASGVDAKAILSARLSKSRRLENLIAQLPGEKKNGLFGNLIALSLGLTPNFKSNFDLAEDAKLQLSKDTYDDDLDNLLAQIGDQYADLFLAAKNLSDAILLS | |
| | DILRVNTEITKAPLSASMIKRYDEHHQDLTLLKALVRQQLPEKYKEIFFDQSKNGYAGYIDGGASQEEFYKFIKPILEKMDGTEELLVKLNREDLLRKQRTFDNG | |
| | SIPHQIHLGELHAILRRQEDFYPFLKDNREKIEKILTFRIPYYVGPLARGNSRFAWMTRKSEETITPWNFEEVVDKGASAQSFIERMTNFDKNLPNEKVLPKHSL | |
| | LYEYFTVYNELTKVKYVTEGMRKPAFLSGEQKKAIVDLLFKTNRKVTVKQLKEDYFKKIECFDSVEISGVEDRFNASLGTYHDLLKIIKDKDFLDNEENEDILEDIV | |
| | LTLTLFEDREMIEERLKTYAHLFDDKVMKQLKRRRYTGWGRLSRKLINGIRDKQSGKTILDFLKSDGFANRNFMQLIHDDSLTFKEDIQKAQVSGQGDSLHE | |
| | HIANLAGSPAIKKGILQTVKVVDELVKVMGRHKPENIVIEMARENQTTQKGQKNSRERMKRIEEGIKELGSQILKEHPVENTQLQNEKLYLYYLQNGRDMYV | |
| | DQELDINRLSDYDVDHIVPQSFLKDDSIDNKVLTRSDKARGKSDNVPSEEVVKKMKNYWRQLLNAKLITQRKFDNLTKAERGGLSELDKAGFIKRQLVETRQI | |
| | TKHVAQILDSRMNTKYDENDKLIREVKVITLKSKLVSDFRKDFQFYKVREINNYHHAHDAYLNAVVGTALIKKYPKLESEFVYGDYKVYDVRKMIAKSEQEIGK | |
| | ATAKYFFYSNIMNFFKTEITLANGEIRKRPLIETNGETGEIVWDKGRDFATVRKVLSMPQVNIVKKTEVQTGGFSKESILPKRNSDKLIARKKDWDPKKYGGFD | |
| | SPTVAYSVLVVAKVEKGKSKKLKSVKELLGITIMERSSFEKNPIDFLEAKGYKEVKKDLIIKLPKYSLFELENGRKRMLASAGELQKGNELALPSKYVNFLYLASHY | |
| | EKLKGSPEDNEQKQLFVEQHKHYLDEIIEQISEFSKRVILADANLDKVLSAYNKHRDKPIREQAENIIHLFTLTNLGAPAAFKYFDTTIDRKRYTSTKEVLDATLIH | |
| | QSITGLYETRIDLSQLGGDGSSGGGEAAAKMASNFTQFVLVDNGGTGDVTVAPSNFANGIAEWISSNSRSQAYKVTCSVRQSSAQNRKYTIKVEVPKGAW | |
| | RSYLNMELTIPIFATNSDCELIVKAMQGLLKDGNPIPSAIAANSGIYGGSGGSMASNFTQFVLVDNGGTGDVTVAPSNFANGIAEWISSNSRSQAYKVTCSV | |
| | RQSSAQNRKYTIKVEVPKGAWRSYLNMELTIPIFATNSDCELIVKAMQGLLKDGNPIPSAIAANSGIYGSSGSSGSSGSSGSSGSSTAPLEEEYRLFLEAPIQNV | |
| | TLLEQWKREIPKVWAEINPPGLASTQAPIHVQLLSTALPVRVRQYPITLEAKRSLRETIRKFRAAGILRPVHSPWNTPLLPVRKSGTSEYRMVQDLREVNKRVE | |
| | TIHPTVPNPYTLLSLLPPDRIWYSVLDLKDAFFCIPLAPESQLIFAFEWADAEEGESGQLTWTRLPQGFKNSPTLFNEALNRDLQGFRLDHPSVSLLQYVDDLLI | |
| | AADTQAACLSATRDLLMTLAELGYRVSGKKAQLCQEEVTYLGFKIHKGSRSLSNSRTQAILQIPVPKTKRQVREFLGKIGYCRLFIPGFAELAQPLYAATRPGN | |
| | DPLVWGEKEEEAFQSLKLALTQPPALALPSLDKPFQLFVEETSGAAKGVLTQALGPWKRPVAYLSKRLDPVAAGWPRCLRAIAAAALLTREASKLTFGQDIEI | |
| | TSSHNLESLLRSPPDKWLTNARITQYQVLLLDPPRVRFKQTAALNPATLLPETDDTLPIHHCLDTLDSLTSTRPDLTDQPLAQAEATLFTDGSSYIRDGKRYAGA | |
| | AVVTLDSVIWAEPLPIGTSAQKAELIALTKALEWSKDKSVNIYTDSRYAFATLHVHGMIYRERGWLTAGGKAIKNAPEILALLTAVWLPKRVAVMHCKGHQK | |
| | DDAPTSTGNRRADEVAREVAIRPLSTQATISKRTADGSEFESPKKKAKVE | |
| PL11984 | MPAAKRVKLDGGDKKYSIGLDIGTNSVGWAVITDEYKVPSKKFKVLGNTDRHSIKKNLIGALLFDSGETAEATRLKRTARRRYTRRKNRICYLQEIFSNEMAKV | 16,044 |
| | DDSFFHRLEESFLVEEDKKHERHPIFGNIVDEVAYHEKYPTIYHLRKKLVDSTDKADLRLIYLALAHMIKFRGHFLIEGDLNPDNSDVDKLFIQLVQTYNQLFEE | |
| | NPINASGVDAKAILSARLSKSRRLENLIAQLPGEKKNGLFGNLIALSLGLTPNFKSNFDLAEDAKLQLSKDTYDDDLDNLLAQIGDQYADLFLAAKNLSDAILLS | |
| | DILRVNTEITKAPLSASMIKRYDEHHQDLTLLKALVRQQLPEKYKEIFFDQSKNGYAGYIDGGASQEEFYKFIKPILEKMDGTEELLVKLNREDLLRKQRTFDNG | |
| | SIPHQIHLGELHAILRRQEDFYPFLKDNREKIEKILTFRIPYYVGPLARGNSRFAWMTRKSEETITPWNFEEVVDKGASAQSFIERMTNFDKNLPNEKVLPKHSL | |
| | LYEYFTVYNELTKVKYVTEGMRKPAFLSGEQKKAIVDLLFKTNRKVTVKQLKEDYFKKIECFDSVEISGVEDRFNASLGTYHDLLKIIKDKDFLDNEENEDILEDIV | |
| | LTLTLFEDREMIEERLKTYAHLFDDKVMKQLKRRRYTGWGRLSRKLINGIRDKQSGKTILDFLKSDGFANRNFMQLIHDDSLTFKEDIQKAQVSGQGDSLHE | |
| | HIANLAGSPAIKKGILQTVKVVDELVKVMGRHKPENIVIEMARENQTTQKGQKNSRERMKRIEEGIKELGSQILKEHPVENTQLQNEKLYLYYLQNGRDMYV | |
| | DQELDINRLSDYDVDHIVPQSFLKDDSIDNKVLTRSDKARGKSDNVPSEEVVKKMKNYWRQLLNAKLITQRKFDNLTKAERGGLSELDKAGFIKRQLVETRQI | |
| | TKHVAQILDSRMNTKYDENDKLIREVKVITLKSKLVSDFRKDFQFYKVREINNYHHAHDAYLNAVVGTALIKKYPKLESEFVYGDYKVYDVRKMIAKSEQEIGK | |
| | ATAKYFFYSNIMNFFKTEITLANGEIRKRPLIETNGETGEIVWDKGRDFATVRKVLSMPQVNIVKKTEVQTGGFSKESILPKRNSDKLIARKKDWDPKKYGGFD | |
| | SPTVAYSVLVVAKVEKGKSKKLKSVKELLGITIMERSSFEKNPIDFLEAKGYKEVKKDLIIKLPKYSLFELENGRKRMLASAGELQKGNELALPSKYVNFLYLASHY | |
| | EKLKGSPEDNEQKQLFVEQHKHYLDEIIEQISEFSKRVILADANLDKVLSAYNKHRDKPIREQAENIIHLFTLTNLGAPAAFKYFDTTIDRKRYTSTKEVLDATLIH | |
| | QSITGLYETRIDLSQLGGDGSSGGGEAAAKMASNFTQFVLVDNGGTGDVTVAPSNFANGIAEWISSNSRSQAYKVTCSVRQSSAQNRKYTIKVEVPKGAW | |
| | RSYLNMELTIPIFATNSDCELIVKAMQGLLKDGNPIPSAIAANSGIYGGSGGSMASNFTQFVLVDNGGTGDVTVAPSNFANGIAEWISSNSRSQAYKVTCSV | |
| | RQSSAQNRKYTIKVEVPKGAWRSYLNMELTIPIFATNSDCELIVKAMQGLLKDGNPIPSAIAANSGIYGSSGGGEAAAKTAPLEEEYRLFLEAPIQNVTLLEQW | |
| | KREIPKVWAEINPPGLASTQAPIHVQLLSTALPVRVRQYPITLEAKRSLRETIRKFRAAGILRPVHSPWNTPLLPVRKSGTSEYRMVQDLREVNKRVETIHPTVP | |
| | NPYTLLSLLPPDRIWYSVLDLKDAFFCIPLAPESQLIFAFEWADAEEGESGQLTWTRLPQGFKNSPTLFNEALNRDLQGFRLDHPSVSLLQYVDDLLIAADTQA | |
| | ACLSATRDLLMTLAELGYRVSGKKAQLCQEEVTYLGFKIHKGSRSLSNSRTQAILQIPVPKTKRQVREFLGKIGYCRLFIPGFAELAQPLYAATRPGNDPLVWG | |
| | EKEEEAFQSLKLALTQPPALALPSLDKPFQLFVEETSGAAKGVLTQALGPWKRPVAYLSKRLDPVAAGWPRCLRAIAAAALLTREASKLTFGQDIEITSSHNLES | |
| | LLRSPPDKWLTNARITQYQVLLLDPPRVRFKQTAALNPATLLPETDDTLPIHHCLDTLDSLTSTRPDLTDQPLAQAEATLFTDGSSYIRDGKRYAGAAVVTLDS | |
| | VIWAEPLPIGTSAQKAELIALTKALEWSKDKSVNIYTDSRYAFATLHVHGMIYRERGWLTAGGKAIKNAPEILALLTAVWLPKRVAVMHCKGHQKDDAPTST | |
| | GNRRADEVAREVAIRPLSTQATISKRTADGSEFESPKKKAKVE | |
| PL11985 | MPAAKRVKLDGGDKKYSIGLDIGTNSVGWAVITDEYKVPSKKFKVLGNTDRHSIKKNLIGALLFDSGETAEATRLKRTARRRYTRRKNRICYLQEIFSNEMAKV | 16,045 |
| | DDSFFHRLEESFLVEEDKKHERHPIFGNIVDEVAYHEKYPTIYHLRKKLVDSTDKADLRLIYLALAHMIKFRGHFLIEGDLNPDNSDVDKLFIQLVQTYNQLFEE | |
| | NPINASGVDAKAILSARLSKSRRLENLIAQLPGEKKNGLFGNLIALSLGLTPNFKSNFDLAEDAKLQLSKDTYDDDLDNLLAQIGDQYADLFLAAKNLSDAILLS | |
| | DILRVNTEITKAPLSASMIKRYDEHHQDLTLLKALVRQQLPEKYKEIFFDQSKNGYAGYIDGGASQEEFYKFIKPILEKMDGTEELLVKLNREDLLRKQRTFDNG | |
| | SIPHQIHLGELHAILRRQEDFYPFLKDNREKIEKILTFRIPYYVGPLARGNSRFAWMTRKSEETITPWNFEEVVDKGASAQSFIERMTNFDKNLPNEKVLPKHSL | |
| | LYEYFTVYNELTKVKYVTEGMRKPAFLSGEQKKAIVDLLFKTNRKVTVKQLKEDYFKKIECFDSVEISGVEDRFNASLGTYHDLLKIIKDKDFLDNEENEDILEDIV | |
| | LTLTLFEDREMIEERLKTYAHLFDDKVMKQLKRRRYTGWGRLSRKLINGIRDKQSGKTILDFLKSDGFANRNFMQLIHDDSLTFKEDIQKAQVSGQGDSLHE | |
| | HIANLAGSPAIKKGILQTVKVVDELVKVMGRHKPENIVIEMARENQTTQKGQKNSRERMKRIEEGIKELGSQILKEHPVENTQLQNEKLYLYYLQNGRDMYV | |
| | DQELDINRLSDYDVDHIVPQSFLKDDSIDNKVLTRSDKARGKSDNVPSEEVVKKMKNYWRQLLNAKLITQRKFDNLTKAERGGLSELDKAGFIKRQLVETRQI | |
| | TKHVAQILDSRMNTKYDENDKLIREVKVITLKSKLVSDFRKDFQFYKVREINNYHHAHDAYLNAVVGTALIKKYPKLESEFVYGDYKVYDVRKMIAKSEQEIGK | |
| | ATAKYFFYSNIMNFFKTEITLANGEIRKRPLIETNGETGEIVWDKGRDFATVRKVLSMPQVNIVKKTEVQTGGFSKESILPKRNSDKLIARKKDWDPKKYGGFD | |
| | SPTVAYSVLVVAKVEKGKSKKLKSVKELLGITIMERSSFEKNPIDFLEAKGYKEVKKDLIIKLPKYSLFELENGRKRMLASAGELQKGNELALPSKYVNFLYLASHY | |
| | EKLKGSPEDNEQKQLFVEQHKHYLDEIIEQISEFSKRVILADANLDKVLSAYNKHRDKPIREQAENIIHLFTLTNLGAPAAFKYFDTTIDRKRYTSTKEVLDATLIH | |
| | QSITGLYETRIDLSQLGGDGSSGGGEAAAKMASNFTQFVLVDNGGTGDVTVAPSNFANGIAEWISSNSRSQAYKVTCSVRQSSAQNRKYTIKVEVPKGAW | |
| | RSYLNMELTIPIFATNSDCELIVKAMQGLLKDGNPIPSAIAANSGIYGGSGGSMASNFTQFVLVDNGGTGDVTVAPSNFANGIAEWISSNSRSQAYKVTCSV | |
| | RQSSAQNRKYTIKVEVPKGAWRSYLNMELTIPIFATNSDCELIVKAMQGLLKDGNPIPSAIAANSGIYGGGSGGGSGGGSGGGSMASNFTQFVLVDNGGT | |
| | GDVTVAPSNFANGIAEWISSNSRSQAYKVTCSVRQSSAQNRKYTIKVEVPKGAWRSYLNMELTIPIFATNSDCELIVKAMQGLLKDGNPIPSAIAANSGIYGG | |
| | SGGSMASNFTQFVLVDNGGTGDVTVAPSNFANGIAEWISSNSRSQAYKVTCSVRQSSAQNRKYTIKVEVPKGAWRSYLNMELTIPIFATNSDCELIVKAMQ | |
| | GLLKDGNPIPSAIAANSGIYAEAAAKEAAAKEAAAKEAAAKALEAEAAAKEAAAKEAAAKEAAAKATAPLEEEYRLFLEAPIQNVTLLEQWKREIPKVWAEIN | |
| | PPGLASTQAPIHVQLLSTALPVRVRQYPITLEAKRSLRETIRKFRAAGILRPVHSPWNTPLLPVRKSGTSEYRMVQDLREVNKRVETIHPTVPNPYTLLSLLPPD | |
| | RIWYSVLDLKDAFFCIPLAPESQLIFAFEWADAEEGESGQLTWTRLPQGFKNSPTLFNEALNRDLQGFRLDHPSVSLLQYVDDLLIAADTQAACLSATRDLLM | |
| | TLAELGYRVSGKKAQLCQEEVTYLGFKIHKGSRSLSNSRTQAILQIPVPKTKRQVREFLGKIGYCRLFIPGFAELAQPLYAATRPGNDPLVWGEKEEEAFQSLKL | |
| | ALTQPPALALPSLDKPFQLFVEETSGAAKGVLTQALGPWKRPVAYLSKRLDPVAAGWPRCLRAIAAAALLTREASKLTFGQDIEITSSHNLESLLRSPPDKWLT | |
| | NARITQYQVLLLDPPRVRFKQTAALNPATLLPETDDTLPIHHCLDTLDSLTSTRPDLTDQPLAQAEATLFTDGSSYIRDGKRYAGAAVVTLDSVIWAEPLPIGTS | |
| | AQKAELIALTKALEWSKDKSVNIYTDSRYAFATLHVHGMIYRERGWLTAGGKAIKNAPEILALLTAVWLPKRVAVMHCKGHQKDDAPTSTGNRRADEVAR | |
| | EVAIRPLSTQATISKRTADGSEFESPKKKAKVE | |
| PL11986 | MPAAKRVKLDGGDKKYSIGLDIGTNSVGWAVITDEYKVPSKKFKVLGNTDRHSIKKNLIGALLFDSGETAEATRLKRTARRRYTRRKNRICYLQEIFSNEMAKV | 16,046 |
| | DDSFFHRLEESFLVEEDKKHERHPIFGNIVDEVAYHEKYPTIYHLRKKLVDSTDKADLRLIYLALAHMIKFRGHFLIEGDLNPDNSDVDKLFIQLVQTYNQLFEE | |
| | NPINASGVDAKAILSARLSKSRRLENLIAQLPGEKKNGLFGNLIALSLGLTPNFKSNFDLAEDAKLQLSKDTYDDDLDNLLAQIGDQYADLFLAAKNLSDAILLS | |
| | DILRVNTEITKAPLSASMIKRYDEHHQDLTLLKALVRQQLPEKYKEIFFDQSKNGYAGYIDGGASQEEFYKFIKPILEKMDGTEELLVKLNREDLLRKQRTFDNG | |
| | SIPHQIHLGELHAILRRQEDFYPFLKDNREKIEKILTFRIPYYVGPLARGNSRFAWMTRKSEETITPWNFEEVVDKGASAQSFIERMTNFDKNLPNEKVLPKHSL | |
| | LYEYFTVYNELTKVKYVTEGMRKPAFLSGEQKKAIVDLLFKTNRKVTVKQLKEDYFKKIECFDSVEISGVEDRFNASLGTYHDLLKIIKDKDFLDNEENEDILEDIV | |
| | LTLTLFEDREMIEERLKTYAHLFDDKVMKQLKRRRYTGWGRLSRKLINGIRDKQSGKTILDFLKSDGFANRNFMQLIHDDSLTFKEDIQKAQVSGQGDSLHE | |
| | HIANLAGSPAIKKGILQTVKVVDELVKVMGRHKPENIVIEMARENQTTQKGQKNSRERMKRIEEGIKELGSQILKEHPVENTQLQNEKLYLYYLQNGRDMYV | |
| | DQELDINRLSDYDVDHIVPQSFLKDDSIDNKVLTRSDKARGKSDNVPSEEVVKKMKNYWRQLLNAKLITQRKFDNLTKAERGGLSELDKAGFIKRQLVETRQI | |
| | TKHVAQILDSRMNTKYDENDKLIREVKVITLKSKLVSDFRKDFQFYKVREINNYHHAHDAYLNAVVGTALIKKYPKLESEFVYGDYKVYDVRKMIAKSEQEIGK | |
| | ATAKYFFYSNIMNFFKTEITLANGEIRKRPLIETNGETGEIVWDKGRDFATVRKVLSMPQVNIVKKTEVQTGGFSKESILPKRNSDKLIARKKDWDPKKYGGFD | |
| | SPTVAYSVLVVAKVEKGKSKKLKSVKELLGITIMERSSFEKNPIDFLEAKGYKEVKKDLIIKLPKYSLFELENGRKRMLASAGELQKGNELALPSKYVNFLYLASHY | |
| | EKLKGSPEDNEQKQLFVEQHKHYLDEIIEQISEFSKRVILADANLDKVLSAYNKHRDKPIREQAENIIHLFTLTNLGAPAAFKYFDTTIDRKRYTSTKEVLDATLIH | |
| | QSITGLYETRIDLSQLGGDGSSGGGEAAAKMASNFTQFVLVDNGGTGDVTVAPSNFANGIAEWISSNSRSQAYKVTCSVRQSSAQNRKYTIKVEVPKGAW | |
| | RSYLNMELTIPIFATNSDCELIVKAMQGLLKDGNPIPSAIAANSGIYGGSGGSMASNFTQFVLVDNGGTGDVTVAPSNFANGIAEWISSNSRSQAYKVTCSV | |
| | RQSSAQNRKYTIKVEVPKGAWRSYLNMELTIPIFATNSDCELIVKAMQGLLKDGNPIPSAIAANSGIYGGGSGGGSGGGSGGGSMASNFTQFVLVDNGGT | |
| | GDVTVAPSNFANGIAEWISSNSRSQAYKVTCSVRQSSAQNRKYTIKVEVPKGAWRSYLNMELTIPIFATNSDCELIVKAMQGLLKDGNPIPSAIAANSGIYGG | |
| | SGGSMASNFTQFVLVDNGGTGDVTVAPSNFANGIAEWISSNSRSQAYKVTCSVRQSSAQNRKYTIKVEVPKGAWRSYLNMELTIPIFATNSDCELIVKAMQ | |
| | GLLKDGNPIPSAIAANSGIYSGGSSGGSSGSETPGTSESATPESSGGSSGGSSTAPLEEEYRLFLEAPIQNVTLLEQWKREIPKVWAEINPPGLASTQAPIHVQL | |
| | LSTALPVRVRQYPITLEAKRSLRETIRKFRAAGILRPVHSPWNTPLLPVRKSGTSEYRMVQDLREVNKRVETIHPTVPNPYTLLSLLPPDRIWYSVLDLKDAFFCI | |
| | PLAPESQLIFAFEWADAEEGESGQLTWTRLPQGFKNSPTLFNEALNRDLQGFRLDHPSVSLLQYVDDLLIAADTQAACLSATRDLLMTLAELGYRVSGKKAQ | |
| | LCQEEVTYLGFKIHKGSRSLSNSRTQAILQIPVPKTKRQVREFLGKIGYCRLFIPGFAELAQPLYAATRPGNDPLVWGEKEEEAFQSLKLALTQPPALALPSLDKP | |
| | FQLFVEETSGAAKGVLTQALGPWKRPVAYLSKRLDPVAAGWPRCLRAIAAAALLTREASKLTFGQDIEITSSHNLESLLRSPPDKWLTNARITQYQVLLLDPPR | |
| | VRFKQTAALNPATLLPETDDTLPIHHCLDTLDSLTSTRPDLTDQPLAQAEATLFTDGSSYIRDGKRYAGAAVVTLDSVIWAEPLPIGTSAQKAELIALTKALEWS | |
| | KDKSVNIYTDSRYAFATLHVHGMIYRERGWLTAGGKAIKNAPEILALLTAVWLPKRVAVMHCKGHQKDDAPTSTGNRRADEVAREVAIRPLSTQATISKRT | |
| | ADGSEFESPKKKAKVE | |
| PL11987 | MPAAKRVKLDGGDKKYSIGLDIGTNSVGWAVITDEYKVPSKKFKVLGNTDRHSIKKNLIGALLFDSGETAEATRLKRTARRRYTRRKNRICYLQEIFSNEMAKV | 16,047 |
| | DDSFFHRLEESFLVEEDKKHERHPIFGNIVDEVAYHEKYPTIYHLRKKLVDSTDKADLRLIYLALAHMIKFRGHFLIEGDLNPDNSDVDKLFIQLVQTYNQLFEE | |
| | NPINASGVDAKAILSARLSKSRRLENLIAQLPGEKKNGLFGNLIALSLGLTPNFKSNFDLAEDAKLQLSKDTYDDDLDNLLAQIGDQYADLFLAAKNLSDAILLS | |
| | DILRVNTEITKAPLSASMIKRYDEHHQDLTLLKALVRQQLPEKYKEIFFDQSKNGYAGYIDGGASQEEFYKFIKPILEKMDGTEELLVKLNREDLLRKQRTFDNG | |
| | SIPHQIHLGELHAILRRQEDFYPFLKDNREKIEKILTFRIPYYVGPLARGNSRFAWMTRKSEETITPWNFEEVVDKGASAQSFIERMTNFDKNLPNEKVLPKHSL | |
| | LYEYFTVYNELTKVKYVTEGMRKPAFLSGEQKKAIVDLLFKTNRKVTVKQLKEDYFKKIECFDSVEISGVEDRFNASLGTYHDLLKIIKDKDFLDNEENEDILEDIV | |
| | LTLTLFEDREMIEERLKTYAHLFDDKVMKQLKRRRYTGWGRLSRKLINGIRDKQSGKTILDFLKSDGFANRNFMQLIHDDSLTFKEDIQKAQVSGQGDSLHE | |
| | HIANLAGSPAIKKGILQTVKVVDELVKVMGRHKPENIVIEMARENQTTQKGQKNSRERMKRIEEGIKELGSQILKEHPVENTQLQNEKLYLYYLQNGRDMYV | |
| | DQELDINRLSDYDVDHIVPQSFLKDDSIDNKVLTRSDKARGKSDNVPSEEVVKKMKNYWRQLLNAKLITQRKFDNLTKAERGGLSELDKAGFIKRQLVETRQI | |
| | TKHVAQILDSRMNTKYDENDKLIREVKVITLKSKLVSDFRKDFQFYKVREINNYHHAHDAYLNAVVGTALIKKYPKLESEFVYGDYKVYDVRKMIAKSEQEIGK | |
| | ATAKYFFYSNIMNFFKTEITLANGEIRKRPLIETNGETGEIVWDKGRDFATVRKVLSMPQVNIVKKTEVQTGGFSKESILPKRNSDKLIARKKDWDPKKYGGFD | |
| | SPTVAYSVLVVAKVEKGKSKKLKSVKELLGITIMERSSFEKNPIDFLEAKGYKEVKKDLIIKLPKYSLFELENGRKRMLASAGELQKGNELALPSKYVNFLYLASHY | |
| | EKLKGSPEDNEQKQLFVEQHKHYLDEIIEQISEFSKRVILADANLDKVLSAYNKHRDKPIREQAENIIHLFTLTNLGAPAAFKYFDTTIDRKRYTSTKEVLDATLIH | |
| | QSITGLYETRIDLSQLGGDGSSGGGEAAAKMASNFTQFVLVDNGGTGDVTVAPSNFANGIAEWISSNSRSQAYKVTCSVRQSSAQNRKYTIKVEVPKGAW | |
| | RSYLNMELTIPIFATNSDCELIVKAMQGLLKDGNPIPSAIAANSGIYGGSGGSMASNFTQFVLVDNGGTGDVTVAPSNFANGIAEWISSNSRSQAYKVTCSV | |
| | RQSSAQNRKYTIKVEVPKGAWRSYLNMELTIPIFATNSDCELIVKAMQGLLKDGNPIPSAIAANSGIYGGGSGGGSGGGSGGGSMASNFTQFVLVDNGGT | |
| | GDVTVAPSNFANGIAEWISSNSRSQAYKVTCSVRQSSAQNRKYTIKVEVPKGAWRSYLNMELTIPIFATNSDCELIVKAMQGLLKDGNPIPSAIAANSGIYGG | |
| | SGGSMASNFTQFVLVDNGGTGDVTVAPSNFANGIAEWISSNSRSQAYKVTCSVRQSSAQNRKYTIKVEVPKGAWRSYLNMELTIPIFATNSDCELIVKAMQ | |
| | GLLKDGNPIPSAIAANSGIYGSSGSSGSSGSSGSSGSSTAPLEEEYRLFLEAPIQNVTLLEQWKREIPKVWAEINPPGLASTQAPIHVQLLSTALPVRVRQYPITL | |
| | EAKRSLRETIRKFRAAGILRPVHSPWNTPLLPVRKSGTSEYRMVQDLREVNKRVETIHPTVPNPYTLLSLLPPDRIWYSVLDLKDAFFCIPLAPESQLIFAFEWA | |
| | DAEEGESGQLTWTRLPQGFKNSPTLFNEALNRDLQGFRLDHPSVSLLQYVDDLLIAADTQAACLSATRDLLMTLAELGYRVSGKKAQLCQEEVTYLGFKIHK | |
| | GSRSLSNSRTQAILQIPVPKTKRQVREFLGKIGYCRLFIPGFAELAQPLYAATRPGNDPLVWGEKEEEAFQSLKLALTQPPALALPSLDKPFQLFVEETSGAAKG | |
| | VLTQALGPWKRPVAYLSKRLDPVAAGWPRCLRAIAAAALLTREASKLTFGQDIEITSSHNLESLLRSPPDKWLTNARITQYQVLLLDPPRVRFKQTAALNPATL | |
| | LPETDDTLPIHHCLDTLDSLTSTRPDLTDQPLAQAEATLFTDGSSYIRDGKRYAGAAVVTLDSVIWAEPLPIGTSAQKAELIALTKALEWSKDKSVNIYTDSRYA | |
| | FATLHVHGMIYRERGWLTAGGKAIKNAPEILALLTAVWLPKRVAVMHCKGHQKDDAPTSTGNRRADEVAREVAIRPLSTQATISKRTADGSEFESPKKKAK | |
| | VE | |
| PL11988 | MPAAKRVKLDGGDKKYSIGLDIGTNSVGWAVITDEYKVPSKKFKVLGNTDRHSIKKNLIGALLFDSGETAEATRLKRTARRRYTRRKNRICYLQEIFSNEMAKV | 16,048 |
| | DDSFFHRLEESFLVEEDKKHERHPIFGNIVDEVAYHEKYPTIYHLRKKLVDSTDKADLRLIYLALAHMIKFRGHFLIEGDLNPDNSDVDKLFIQLVQTYNQLFEE | |
| | NPINASGVDAKAILSARLSKSRRLENLIAQLPGEKKNGLFGNLIALSLGLTPNFKSNFDLAEDAKLQLSKDTYDDDLDNLLAQIGDQYADLFLAAKNLSDAILLS | |
| | DILRVNTEITKAPLSASMIKRYDEHHQDLTLLKALVRQQLPEKYKEIFFDQSKNGYAGYIDGGASQEEFYKFIKPILEKMDGTEELLVKLNREDLLRKQRTFDNG | |
| | SIPHQIHLGELHAILRRQEDFYPFLKDNREKIEKILTFRIPYYVGPLARGNSRFAWMTRKSEETITPWNFEEVVDKGASAQSFIERMTNFDKNLPNEKVLPKHSL | |
| | LYEYFTVYNELTKVKYVTEGMRKPAFLSGEQKKAIVDLLFKTNRKVTVKQLKEDYFKKIECFDSVEISGVEDRFNASLGTYHDLLKIIKDKDFLDNEENEDILEDIV | |
| | LTLTLFEDREMIEERLKTYAHLFDDKVMKQLKRRRYTGWGRLSRKLINGIRDKQSGKTILDFLKSDGFANRNFMQLIHDDSLTFKEDIQKAQVSGQGDSLHE | |
| | HIANLAGSPAIKKGILQTVKVVDELVKVMGRHKPENIVIEMARENQTTQKGQKNSRERMKRIEEGIKELGSQILKEHPVENTQLQNEKLYLYYLQNGRDMYV | |
| | DQELDINRLSDYDVDHIVPQSFLKDDSIDNKVLTRSDKARGKSDNVPSEEVVKKMKNYWRQLLNAKLITQRKFDNLTKAERGGLSELDKAGFIKRQLVETRQI | |
| | TKHVAQILDSRMNTKYDENDKLIREVKVITLKSKLVSDFRKDFQFYKVREINNYHHAHDAYLNAVVGTALIKKYPKLESEFVYGDYKVYDVRKMIAKSEQEIGK | |
| | ATAKYFFYSNIMNFFKTEITLANGEIRKRPLIETNGETGEIVWDKGRDFATVRKVLSMPQVNIVKKTEVQTGGFSKESILPKRNSDKLIARKKDWDPKKYGGFD | |
| | SPTVAYSVLVVAKVEKGKSKKLKSVKELLGITIMERSSFEKNPIDFLEAKGYKEVKKDLIIKLPKYSLFELENGRKRMLASAGELQKGNELALPSKYVNFLYLASHY | |
| | EKLKGSPEDNEQKQLFVEQHKHYLDEIIEQISEFSKRVILADANLDKVLSAYNKHRDKPIREQAENIIHLFTLTNLGAPAAFKYFDTTIDRKRYTSTKEVLDATLIH | |
| | QSITGLYETRIDLSQLGGDGSSGGGEAAAKMASNFTQFVLVDNGGTGDVTVAPSNFANGIAEWISSNSRSQAYKVTCSVRQSSAQNRKYTIKVEVPKGAW | |
| | RSYLNMELTIPIFATNSDCELIVKAMQGLLKDGNPIPSAIAANSGIYGGSGGSMASNFTQFVLVDNGGTGDVTVAPSNFANGIAEWISSNSRSQAYKVTCSV | |
| | RQSSAQNRKYTIKVEVPKGAWRSYLNMELTIPIFATNSDCELIVKAMQGLLKDGNPIPSAIAANSGIYGGGSGGGSGGGSGGGSMASNFTQFVLVDNGGT | |
| | GDVTVAPSNFANGIAEWISSNSRSQAYKVTCSVRQSSAQNRKYTIKVEVPKGAWRSYLNMELTIPIFATNSDCELIVKAMQGLLKDGNPIPSAIAANSGIYGG | |
| | SGGSMASNFTQFVLVDNGGTGDVTVAPSNFANGIAEWISSNSRSQAYKVTCSVRQSSAQNRKYTIKVEVPKGAWRSYLNMELTIPIFATNSDCELIVKAMQ | |
| | GLLKDGNPIPSAIAANSGIYGSSGGGEAAAKTAPLEEEYRLFLEAPIQNVTLLEQWKREIPKVWAEINPPGLASTQAPIHVQLLSTALPVRVRQYPITLEAKRSL | |
| | RETIRKFRAAGILRPVHSPWNTPLLPVRKSGTSEYRMVQDLREVNKRVETIHPTVPNPYTLLSLLPPDRIWYSVLDLKDAFFCIPLAPESQLIFAFEWADAEEGE | |
| | SGQLTWTRLPQGFKNSPTLFNEALNRDLQGFRLDHPSVSLLQYVDDLLIAADTQAACLSATRDLLMTLAELGYRVSGKKAQLCQEEVTYLGFKIHKGSRSLSN | |
| | SRTQAILQIPVPKTKRQVREFLGKIGYCRLFIPGFAELAQPLYAATRPGNDPLVWGEKEEEAFQSLKLALTQPPALALPSLDKPFQLFVEETSGAAKGVLTQALG | |
| | PWKRPVAYLSKRLDPVAAGWPRCLRAIAAAALLTREASKLTFGQDIEITSSHNLESLLRSPPDKWLTNARITQYQVLLLDPPRVRFKQTAALNPATLLPETDDT | |
| | LPIHHCLDTLDSLTSTRPDLTDQPLAQAEATLFTDGSSYIRDGKRYAGAAVVTLDSVIWAEPLPIGTSAQKAELIALTKALEWSKDKSVNIYTDSRYAFATLHVH | |
| | GMIYRERGWLTAGGKAIKNAPEILALLTAVWLPKRVAVMHCKGHQKDDAPTSTGNRRADEVAREVAIRPLSTQATISKRTADGSEFESPKKKAKVE | |
| PL11989 | MPAAKRVKLDGGDKKYSIGLDIGTNSVGWAVITDEYKVPSKKFKVLGNTDRHSIKKNLIGALLFDSGETAEATRLKRTARRRYTRRKNRICYLQEIFSNEMAKV | 16,049 |
| | DDSFFHRLEESFLVEEDKKHERHPIFGNIVDEVAYHEKYPTIYHLRKKLVDSTDKADLRLIYLALAHMIKFRGHFLIEGDLNPDNSDVDKLFIQLVQTYNQLFEE | |
| | NPINASGVDAKAILSARLSKSRRLENLIAQLPGEKKNGLFGNLIALSLGLTPNFKSNFDLAEDAKLQLSKDTYDDDLDNLLAQIGDQYADLFLAAKNLSDAILLS | |
| | DILRVNTEITKAPLSASMIKRYDEHHQDLTLLKALVRQQLPEKYKEIFFDQSKNGYAGYIDGGASQEEFYKFIKPILEKMDGTEELLVKLNREDLLRKQRTFDNG | |
| | SIPHQIHLGELHAILRRQEDFYPFLKDNREKIEKILTFRIPYYVGPLARGNSRFAWMTRKSEETITPWNFEEVVDKGASAQSFIERMTNFDKNLPNEKVLPKHSL | |
| | LYEYFTVYNELTKVKYVTEGMRKPAFLSGEQKKAIVDLLFKTNRKVTVKQLKEDYFKKIECFDSVEISGVEDRFNASLGTYHDLLKIIKDKDFLDNEENEDILEDIV | |
| | LTLTLFEDREMIEERLKTYAHLFDDKVMKQLKRRRYTGWGRLSRKLINGIRDKQSGKTILDFLKSDGFANRNFMQLIHDDSLTFKEDIQKAQVSGQGDSLHE | |
| | HIANLAGSPAIKKGILQTVKVVDELVKVMGRHKPENIVIEMARENQTTQKGQKNSRERMKRIEEGIKELGSQILKEHPVENTQLQNEKLYLYYLQNGRDMYV | |
| | DQELDINRLSDYDVDHIVPQSFLKDDSIDNKVLTRSDKARGKSDNVPSEEVVKKMKNYWRQLLNAKLITQRKFDNLTKAERGGLSELDKAGFIKRQLVETRQI | |
| | TKHVAQILDSRMNTKYDENDKLIREVKVITLKSKLVSDFRKDFQFYKVREINNYHHAHDAYLNAVVGTALIKKYPKLESEFVYGDYKVYDVRKMIAKSEQEIGK | |
| | ATAKYFFYSNIMNFFKTEITLANGEIRKRPLIETNGETGEIVWDKGRDFATVRKVLSMPQVNIVKKTEVQTGGFSKESILPKRNSDKLIARKKDWDPKKYGGFD | |
| | SPTVAYSVLVVAKVEKGKSKKLKSVKELLGITIMERSSFEKNPIDFLEAKGYKEVKKDLIIKLPKYSLFELENGRKRMLASAGELQKGNELALPSKYVNFLYLASHY | |
| | EKLKGSPEDNEQKQLFVEQHKHYLDEIIEQISEFSKRVILADANLDKVLSAYNKHRDKPIREQAENIIHLFTLTNLGAPAAFKYFDTTIDRKRYTSTKEVLDATLIH | |
| | QSITGLYETRIDLSQLGGDAEAAAKEAAAKEAAAKEAAAKALEAEAAAKEAAAKEAAAKEAAAKAMASNFTQFVLVDNGGTGDVTVAPSNFANGIAEWIS | |
| | SNSRSQAYKVTCSVRQSSAQNRKYTIKVEVPKGAWRSYLNMELTIPIFATNSDCELIVKAMQGLLKDGNPIPSAIAANSGIYAEAAAKEAAAKEAAAKEAAAK | |
| | ALEAEAAAKEAAAKEAAAKEAAAKATLNIEDEHRLHETSKEPDVSLGSTWLSDFPQAWAETGGMGLAVRQAPLIIPLKATSTPVSIKQYPMSQEARLGIKPHI | |
| | QRLLDQGILVPCQSPWNTPLLPVKKPGTNDYRPVQDLREVNKRVEDIHPTVPNPYNLLSGLPPSHQWYTVLDLKDAFFCLRLHPTSQPLFAFEWRDPEMGI | |
| | SGQLTWTRLPQGFKNSPTLFNEALHRDLADFRIQHPDLILLQYVDDLLLAATSELDCQQGTRALLQTLGNLGYRASAKKAQICQKQVKYLGYLLKEGQRWLT | |
| | EARKETVMGQPTPKTPRQLREFLGKAGFCRLFIPGFAEMAAPLYPLTKPGTLFNWGPDQQKAYQEIKQALLTAPALGLPDLTKPFELFVDEKQGYAKGVLTQ | |
| | KLGPWRRPVAYLSKKLDPVAAGWPPCLRMVAAIAVLTKDAGKLTMGQPLVILAPHAVEALVKQPPDRWLSNARMTHYQALLLDTDRVQFGPVVALNPAT | |
| | LLPLPEEGLQHNCLDILAEAHGTRPDLTDQPLPDADHTWYTDGSSLLQEGQRKAGAAVTTETEVIWAKALPAGTSAQRAELIALTQALKMAEGKKLNVYTD | |
| | SRYAFATAHIHGEIYRRRGWLTSEGKEIKNKDEILALLKALFLPKRLSIIHCPGHQKGHSAEARGNRMADQAARKAAITETPDTSTLLKRTADGSEFESPKKKAK | |
| | VE | |
| PL11990 | MPAAKRVKLDGGDKKYSIGLDIGTNSVGWAVITDEYKVPSKKFKVLGNTDRHSIKKNLIGALLFDSGETAEATRLKRTARRRYTRRKNRICYLQEIFSNEMAKV | 16,050 |
| | DDSFFHRLEESFLVEEDKKHERHPIFGNIVDEVAYHEKYPTIYHLRKKLVDSTDKADLRLIYLALAHMIKFRGHFLIEGDLNPDNSDVDKLFIQLVQTYNQLFEE | |
| | NPINASGVDAKAILSARLSKSRRLENLIAQLPGEKKNGLFGNLIALSLGLTPNFKSNFDLAEDAKLQLSKDTYDDDLDNLLAQIGDQYADLFLAAKNLSDAILLS | |
| | DILRVNTEITKAPLSASMIKRYDEHHQDLTLLKALVRQQLPEKYKEIFFDQSKNGYAGYIDGGASQEEFYKFIKPILEKMDGTEELLVKLNREDLLRKQRTFDNG | |
| | SIPHQIHLGELHAILRRQEDFYPFLKDNREKIEKILTFRIPYYVGPLARGNSRFAWMTRKSEETITPWNFEEVVDKGASAQSFIERMTNFDKNLPNEKVLPKHSL | |
| | LYEYFTVYNELTKVKYVTEGMRKPAFLSGEQKKAIVDLLFKTNRKVTVKQLKEDYFKKIECFDSVEISGVEDRFNASLGTYHDLLKIIKDKDFLDNEENEDILEDIV | |
| | LTLTLFEDREMIEERLKTYAHLFDDKVMKQLKRRRYTGWGRLSRKLINGIRDKQSGKTILDFLKSDGFANRNFMQLIHDDSLTFKEDIQKAQVSGQGDSLHE | |
| | HIANLAGSPAIKKGILQTVKVVDELVKVMGRHKPENIVIEMARENQTTQKGQKNSRERMKRIEEGIKELGSQILKEHPVENTQLQNEKLYLYYLQNGRDMYV | |
| | DQELDINRLSDYDVDHIVPQSFLKDDSIDNKVLTRSDKARGKSDNVPSEEVVKKMKNYWRQLLNAKLITQRKFDNLTKAERGGLSELDKAGFIKRQLVETRQI | |
| | TKHVAQILDSRMNTKYDENDKLIREVKVITLKSKLVSDFRKDFQFYKVREINNYHHAHDAYLNAVVGTALIKKYPKLESEFVYGDYKVYDVRKMIAKSEQEIGK | |
| | ATAKYFFYSNIMNFFKTEITLANGEIRKRPLIETNGETGEIVWDKGRDFATVRKVLSMPQVNIVKKTEVQTGGFSKESILPKRNSDKLIARKKDWDPKKYGGFD | |
| | SPTVAYSVLVVAKVEKGKSKKLKSVKELLGITIMERSSFEKNPIDFLEAKGYKEVKKDLIIKLPKYSLFELENGRKRMLASAGELQKGNELALPSKYVNFLYLASHY | |
| | EKLKGSPEDNEQKQLFVEQHKHYLDEIIEQISEFSKRVILADANLDKVLSAYNKHRDKPIREQAENIIHLFTLTNLGAPAAFKYFDTTIDRKRYTSTKEVLDATLIH | |
| | QSITGLYETRIDLSQLGGDAEAAAKEAAAKEAAAKEAAAKALEAEAAAKEAAAKEAAAKEAAAKAMASNFTQFVLVDNGGTGDVTVAPSNFANGIAEWIS | |
| | SNSRSQAYKVTCSVRQSSAQNRKYTIKVEVPKGAWRSYLNMELTIPIFATNSDCELIVKAMQGLLKDGNPIPSAIAANSGIYSGGSSGGSSGSETPGTSESATP | |
| | ESSGGSSGGSSTLNIEDEHRLHETSKEPDVSLGSTWLSDFPQAWAETGGMGLAVRQAPLIIPLKATSTPVSIKQYPMSQEARLGIKPHIQRLLDQGILVPCQS | |
| | PWNTPLLPVKKPGTNDYRPVQDLREVNKRVEDIHPTVPNPYNLLSGLPPSHQWYTVLDLKDAFFCLRLHPTSQPLFAFEWRDPEMGISGQLTWTRLPQGF | |
| | KNSPTLFNEALHRDLADFRIQHPDLILLQYVDDLLLAATSELDCQQGTRALLQTLGNLGYRASAKKAQICQKQVKYLGYLLKEGQRWLTEARKETVMGQPTP | |
| | KTPRQLREFLGKAGFCRLFIPGFAEMAAPLYPLTKPGTLFNWGPDQQKAYQEIKQALLTAPALGLPDLTKPFELFVDEKQGYAKGVLTQKLGPWRRPVAYLS | |
| | KKLDPVAAGWPPCLRMVAAIAVLTKDAGKLTMGQPLVILAPHAVEALVKQPPDRWLSNARMTHYQALLLDTDRVQFGPVVALNPATLLPLPEEGLQHNC | |
| | LDILAEAHGTRPDLTDQPLPDADHTWYTDGSSLLQEGQRKAGAAVTTETEVIWAKALPAGTSAQRAELIALTQALKMAEGKKLNVYTDSRYAFATAHIHGEI | |
| | YRRRGWLTSEGKEIKNKDEILALLKALFLPKRLSIIHCPGHQKGHSAEARGNRMADQAARKAAITETPDTSTLLKRTADGSEFESPKKKAKVE | |
| PL11991 | MPAAKRVKLDGGDKKYSIGLDIGTNSVGWAVITDEYKVPSKKFKVLGNTDRHSIKKNLIGALLFDSGETAEATRLKRTARRRYTRRKNRICYLQEIFSNEMAKV | 16,051 |
| | DDSFFHRLEESFLVEEDKKHERHPIFGNIVDEVAYHEKYPTIYHLRKKLVDSTDKADLRLIYLALAHMIKFRGHFLIEGDLNPDNSDVDKLFIQLVQTYNQLFEE | |
| | NPINASGVDAKAILSARLSKSRRLENLIAQLPGEKKNGLFGNLIALSLGLTPNFKSNFDLAEDAKLQLSKDTYDDDLDNLLAQIGDQYADLFLAAKNLSDAILLS | |
| | DILRVNTEITKAPLSASMIKRYDEHHQDLTLLKALVRQQLPEKYKEIFFDQSKNGYAGYIDGGASQEEFYKFIKPILEKMDGTEELLVKLNREDLLRKQRTFDNG | |
| | SIPHQIHLGELHAILRRQEDFYPFLKDNREKIEKILTFRIPYYVGPLARGNSRFAWMTRKSEETITPWNFEEVVDKGASAQSFIERMTNFDKNLPNEKVLPKHSL | |
| | LYEYFTVYNELTKVKYVTEGMRKPAFLSGEQKKAIVDLLFKTNRKVTVKQLKEDYFKKIECFDSVEISGVEDRFNASLGTYHDLLKIIKDKDFLDNEENEDILEDIV | |
| | LTLTLFEDREMIEERLKTYAHLFDDKVMKQLKRRRYTGWGRLSRKLINGIRDKQSGKTILDFLKSDGFANRNFMQLIHDDSLTFKEDIQKAQVSGQGDSLHE | |
| | HIANLAGSPAIKKGILQTVKVVDELVKVMGRHKPENIVIEMARENQTTQKGQKNSRERMKRIEEGIKELGSQILKEHPVENTQLQNEKLYLYYLQNGRDMYV | |
| | DQELDINRLSDYDVDHIVPQSFLKDDSIDNKVLTRSDKARGKSDNVPSEEVVKKMKNYWRQLLNAKLITQRKFDNLTKAERGGLSELDKAGFIKRQLVETRQI | |
| | TKHVAQILDSRMNTKYDENDKLIREVKVITLKSKLVSDFRKDFQFYKVREINNYHHAHDAYLNAVVGTALIKKYPKLESEFVYGDYKVYDVRKMIAKSEQEIGK | |
| | ATAKYFFYSNIMNFFKTEITLANGEIRKRPLIETNGETGEIVWDKGRDFATVRKVLSMPQVNIVKKTEVQTGGFSKESILPKRNSDKLIARKKDWDPKKYGGFD | |
| | SPTVAYSVLVVAKVEKGKSKKLKSVKELLGITIMERSSFEKNPIDFLEAKGYKEVKKDLIIKLPKYSLFELENGRKRMLASAGELQKGNELALPSKYVNFLYLASHY | |
| | EKLKGSPEDNEQKQLFVEQHKHYLDEIIEQISEFSKRVILADANLDKVLSAYNKHRDKPIREQAENIIHLFTLTNLGAPAAFKYFDTTIDRKRYTSTKEVLDATLIH | |
| | QSITGLYETRIDLSQLGGDAEAAAKEAAAKEAAAKEAAAKALEAEAAAKEAAAKEAAAKEAAAKAMASNFTQFVLVDNGGTGDVTVAPSNFANGIAEWIS | |
| | SNSRSQAYKVTCSVRQSSAQNRKYTIKVEVPKGAWRSYLNMELTIPIFATNSDCELIVKAMQGLLKDGNPIPSAIAANSGIYGSSGSSGSSGSSGSSGSSTLNIE | |
| | DEHRLHETSKEPDVSLGSTWLSDFPQAWAETGGMGLAVRQAPLIIPLKATSTPVSIKQYPMSQEARLGIKPHIQRLLDQGILVPCQSPWNTPLLPVKKPGTN | |
| | DYRPVQDLREVNKRVEDIHPTVPNPYNLLSGLPPSHQWYTVLDLKDAFFCLRLHPTSQPLFAFEWRDPEMGISGQLTWTRLPQGFKNSPTLFNEALHRDLA | |
| | DFRIQHPDLILLQYVDDLLLAATSELDCQQGTRALLQTLGNLGYRASAKKAQICQKQVKYLGYLLKEGQRWLTEARKETVMGQPTPKTPRQLREFLGKAGFC | |
| | RLFIPGFAEMAAPLYPLTKPGTLFNWGPDQQKAYQEIKQALLTAPALGLPDLTKPFELFVDEKQGYAKGVLTQKLGPWRRPVAYLSKKLDPVAAGWPPCLR | |
| | MVAAIAVLTKDAGKLTMGQPLVILAPHAVEALVKQPPDRWLSNARMTHYQALLLDTDRVQFGPVVALNPATLLPLPEEGLQHNCLDILAEAHGTRPDLTD | |
| | QPLPDADHTWYTDGSSLLQEGQRKAGAAVTTETEVIWAKALPAGTSAQRAELIALTQALKMAEGKKLNVYTDSRYAFATAHIHGEIYRRRGWLTSEGKEIK | |
| | NKDEILALLKALFLPKRLSIIHCPGHQKGHSAEARGNRMADQAARKAAITETPDTSTLLKRTADGSEFESPKKKAKVE | |
| PL11992 | MPAAKRVKLDGGDKKYSIGLDIGTNSVGWAVITDEYKVPSKKFKVLGNTDRHSIKKNLIGALLFDSGETAEATRLKRTARRRYTRRKNRICYLQEIFSNEMAKV | 16,052 |
| | DDSFFHRLEESFLVEEDKKHERHPIFGNIVDEVAYHEKYPTIYHLRKKLVDSTDKADLRLIYLALAHMIKFRGHFLIEGDLNPDNSDVDKLFIQLVQTYNQLFEE | |
| | NPINASGVDAKAILSARLSKSRRLENLIAQLPGEKKNGLFGNLIALSLGLTPNFKSNFDLAEDAKLQLSKDTYDDDLDNLLAQIGDQYADLFLAAKNLSDAILLS | |
| | DILRVNTEITKAPLSASMIKRYDEHHQDLTLLKALVRQQLPEKYKEIFFDQSKNGYAGYIDGGASQEEFYKFIKPILEKMDGTEELLVKLNREDLLRKQRTFDNG | |
| | SIPHQIHLGELHAILRRQEDFYPFLKDNREKIEKILTFRIPYYVGPLARGNSRFAWMTRKSEETITPWNFEEVVDKGASAQSFIERMTNFDKNLPNEKVLPKHSL | |
| | LYEYFTVYNELTKVKYVTEGMRKPAFLSGEQKKAIVDLLFKTNRKVTVKQLKEDYFKKIECFDSVEISGVEDRFNASLGTYHDLLKIIKDKDFLDNEENEDILEDIV | |
| | LTLTLFEDREMIEERLKTYAHLFDDKVMKQLKRRRYTGWGRLSRKLINGIRDKQSGKTILDFLKSDGFANRNFMQLIHDDSLTFKEDIQKAQVSGQGDSLHE | |
| | HIANLAGSPAIKKGILQTVKVVDELVKVMGRHKPENIVIEMARENQTTQKGQKNSRERMKRIEEGIKELGSQILKEHPVENTQLQNEKLYLYYLQNGRDMYV | |
| | DQELDINRLSDYDVDHIVPQSFLKDDSIDNKVLTRSDKARGKSDNVPSEEVVKKMKNYWRQLLNAKLITQRKFDNLTKAERGGLSELDKAGFIKRQLVETRQI | |
| | TKHVAQILDSRMNTKYDENDKLIREVKVITLKSKLVSDFRKDFQFYKVREINNYHHAHDAYLNAVVGTALIKKYPKLESEFVYGDYKVYDVRKMIAKSEQEIGK | |
| | ATAKYFFYSNIMNFFKTEITLANGEIRKRPLIETNGETGEIVWDKGRDFATVRKVLSMPQVNIVKKTEVQTGGFSKESILPKRNSDKLIARKKDWDPKKYGGFD | |
| | SPTVAYSVLVVAKVEKGKSKKLKSVKELLGITIMERSSFEKNPIDFLEAKGYKEVKKDLIIKLPKYSLFELENGRKRMLASAGELQKGNELALPSKYVNFLYLASHY | |
| | EKLKGSPEDNEQKQLFVEQHKHYLDEIIEQISEFSKRVILADANLDKVLSAYNKHRDKPIREQAENIIHLFTLTNLGAPAAFKYFDTTIDRKRYTSTKEVLDATLIH | |
| | QSITGLYETRIDLSQLGGDAEAAAKEAAAKEAAAKEAAAKALEAEAAAKEAAAKEAAAKEAAAKAMASNFTQFVLVDNGGTGDVTVAPSNFANGIAEWIS | |
| | SNSRSQAYKVTCSVRQSSAQNRKYTIKVEVPKGAWRSYLNMELTIPIFATNSDCELIVKAMQGLLKDGNPIPSAIAANSGIYGSSGGGEAAAKTLNIEDEHRL | |
| | HETSKEPDVSLGSTWLSDFPQAWAETGGMGLAVRQAPLIIPLKATSTPVSIKQYPMSQEARLGIKPHIQRLLDQGILVPCQSPWNTPLLPVKKPGTNDYRPV | |
| | QDLREVNKRVEDIHPTVPNPYNLLSGLPPSHQWYTVLDLKDAFFCLRLHPTSQPLFAFEWRDPEMGISGQLTWTRLPQGFKNSPTLFNEALHRDLADFRIQ | |
| | HPDLILLQYVDDLLLAATSELDCQQGTRALLQTLGNLGYRASAKKAQICQKQVKYLGYLLKEGQRWLTEARKETVMGQPTPKTPRQLREFLGKAGFCRLFIP | |
| | GFAEMAAPLYPLTKPGTLFNWGPDQQKAYQEIKQALLTAPALGLPDLTKPFELFVDEKQGYAKGVLTQKLGPWRRPVAYLSKKLDPVAAGWPPCLRMVAA | |
| | IAVLTKDAGKLTMGQPLVILAPHAVEALVKQPPDRWLSNARMTHYQALLLDTDRVQFGPVVALNPATLLPLPEEGLQHNCLDILAEAHGTRPDLTDQPLPD | |
| | ADHTWYTDGSSLLQEGQRKAGAAVTTETEVIWAKALPAGTSAQRAELIALTQALKMAEGKKLNVYTDSRYAFATAHIHGEIYRRRGWLTSEGKEIKNKDEIL | |
| | ALLKALFLPKRLSIIHCPGHQKGHSAEARGNRMADQAARKAAITETPDTSTLLKRTADGSEFESPKKKAKVE | |
| PL11993 | MPAAKRVKLDGGDKKYSIGLDIGTNSVGWAVITDEYKVPSKKFKVLGNTDRHSIKKNLIGALLFDSGETAEATRLKRTARRRYTRRKNRICYLQEIFSNEMAKV | 16,053 |
| | DDSFFHRLEESFLVEEDKKHERHPIFGNIVDEVAYHEKYPTIYHLRKKLVDSTDKADLRLIYLALAHMIKFRGHFLIEGDLNPDNSDVDKLFIQLVQTYNQLFEE | |
| | NPINASGVDAKAILSARLSKSRRLENLIAQLPGEKKNGLFGNLIALSLGLTPNFKSNFDLAEDAKLQLSKDTYDDDLDNLLAQIGDQYADLFLAAKNLSDAILLS | |
| | DILRVNTEITKAPLSASMIKRYDEHHQDLTLLKALVRQQLPEKYKEIFFDQSKNGYAGYIDGGASQEEFYKFIKPILEKMDGTEELLVKLNREDLLRKQRTFDNG | |
| | SIPHQIHLGELHAILRRQEDFYPFLKDNREKIEKILTFRIPYYVGPLARGNSRFAWMTRKSEETITPWNFEEVVDKGASAQSFIERMTNFDKNLPNEKVLPKHSL | |
| | LYEYFTVYNELTKVKYVTEGMRKPAFLSGEQKKAIVDLLFKTNRKVTVKQLKEDYFKKIECFDSVEISGVEDRFNASLGTYHDLLKIIKDKDFLDNEENEDILEDIV | |
| | LTLTLFEDREMIEERLKTYAHLFDDKVMKQLKRRRYTGWGRLSRKLINGIRDKQSGKTILDFLKSDGFANRNFMQLIHDDSLTFKEDIQKAQVSGQGDSLHE | |
| | HIANLAGSPAIKKGILQTVKVVDELVKVMGRHKPENIVIEMARENQTTQKGQKNSRERMKRIEEGIKELGSQILKEHPVENTQLQNEKLYLYYLQNGRDMYV | |
| | DQELDINRLSDYDVDHIVPQSFLKDDSIDNKVLTRSDKARGKSDNVPSEEVVKKMKNYWRQLLNAKLITQRKFDNLTKAERGGLSELDKAGFIKRQLVETRQI | |
| | TKHVAQILDSRMNTKYDENDKLIREVKVITLKSKLVSDFRKDFQFYKVREINNYHHAHDAYLNAVVGTALIKKYPKLESEFVYGDYKVYDVRKMIAKSEQEIGK | |
| | ATAKYFFYSNIMNFFKTEITLANGEIRKRPLIETNGETGEIVWDKGRDFATVRKVLSMPQVNIVKKTEVQTGGFSKESILPKRNSDKLIARKKDWDPKKYGGFD | |
| | SPTVAYSVLVVAKVEKGKSKKLKSVKELLGITIMERSSFEKNPIDFLEAKGYKEVKKDLIIKLPKYSLFELENGRKRMLASAGELQKGNELALPSKYVNFLYLASHY | |
| | EKLKGSPEDNEQKQLFVEQHKHYLDEIIEQISEFSKRVILADANLDKVLSAYNKHRDKPIREQAENIIHLFTLTNLGAPAAFKYFDTTIDRKRYTSTKEVLDATLIH | |
| | QSITGLYETRIDLSQLGGDAEAAAKEAAAKEAAAKEAAAKALEAEAAAKEAAAKEAAAKEAAAKAMASNFTQFVLVDNGGTGDVTVAPSNFANGIAEWIS | |
| | SNSRSQAYKVTCSVRQSSAQNRKYTIKVEVPKGAWRSYLNMELTIPIFATNSDCELIVKAMQGLLKDGNPIPSAIAANSGIYGGSGGSMASNFTQFVLVDNG | |
| | GTGDVTVAPSNFANGIAEWISSNSRSQAYKVTCSVRQSSAQNRKYTIKVEVPKGAWRSYLNMELTIPIFATNSDCELIVKAMQGLLKDGNPIPSAIAANSGIY | |
| | AEAAAKEAAAKEAAAKEAAAKALEAEAAAKEAAAKEAAAKEAAAKATLNIEDEHRLHETSKEPDVSLGSTWLSDFPQAWAETGGMGLAVRQAPLIIPLKAT | |
| | STPVSIKQYPMSQEARLGIKPHIQRLLDQGILVPCQSPWNTPLLPVKKPGTNDYRPVQDLREVNKRVEDIHPTVPNPYNLLSGLPPSHQWYTVLDLKDAFFCL | |
| | RLHPTSQPLFAFEWRDPEMGISGQLTWTRLPQGFKNSPTLFNEALHRDLADFRIQHPDLILLQYVDDLLLAATSELDCQQGTRALLQTLGNLGYRASAKKAQ | |
| | ICQKQVKYLGYLLKEGQRWLTEARKETVMGQPTPKTPRQLREFLGKAGFCRLFIPGFAEMAAPLYPLTKPGTLFNWGPDQQKAYQEIKQALLTAPALGLPDL | |
| | TKPFELFVDEKQGYAKGVLTQKLGPWRRPVAYLSKKLDPVAAGWPPCLRMVAAIAVLTKDAGKLTMGQPLVILAPHAVEALVKQPPDRWLSNARMTHYQ | |
| | ALLLDTDRVQFGPVVALNPATLLPLPEEGLQHNCLDILAEAHGTRPDLTDQPLPDADHTWYTDGSSLLQEGQRKAGAAVTTETEVIWAKALPAGTSAQRAE | |
| | LIALTQALKMAEGKKLNVYTDSRYAFATAHIHGEIYRRRGWLTSEGKEIKNKDEILALLKALFLPKRLSIIHCPGHQKGHSAEARGNRMADQAARKAAITETPD | |
| | TSTLLKRTADGSEFESPKKKAKVE | |
| PL11994 | MPAAKRVKLDGGDKKYSIGLDIGTNSVGWAVITDEYKVPSKKFKVLGNTDRHSIKKNLIGALLFDSGETAEATRLKRTARRRYTRRKNRICYLQEIFSNEMAKV | 16,054 |
| | DDSFFHRLEESFLVEEDKKHERHPIFGNIVDEVAYHEKYPTIYHLRKKLVDSTDKADLRLIYLALAHMIKFRGHFLIEGDLNPDNSDVDKLFIQLVQTYNQLFEE | |
| | NPINASGVDAKAILSARLSKSRRLENLIAQLPGEKKNGLFGNLIALSLGLTPNFKSNFDLAEDAKLQLSKDTYDDDLDNLLAQIGDQYADLFLAAKNLSDAILLS | |
| | DILRVNTEITKAPLSASMIKRYDEHHQDLTLLKALVRQQLPEKYKEIFFDQSKNGYAGYIDGGASQEEFYKFIKPILEKMDGTEELLVKLNREDLLRKQRTFDNG | |
| | SIPHQIHLGELHAILRRQEDFYPFLKDNREKIEKILTFRIPYYVGPLARGNSRFAWMTRKSEETITPWNFEEVVDKGASAQSFIERMTNFDKNLPNEKVLPKHSL | |
| | LYEYFTVYNELTKVKYVTEGMRKPAFLSGEQKKAIVDLLFKTNRKVTVKQLKEDYFKKIECFDSVEISGVEDRFNASLGTYHDLLKIIKDKDFLDNEENEDILEDIV | |
| | LTLTLFEDREMIEERLKTYAHLFDDKVMKQLKRRRYTGWGRLSRKLINGIRDKQSGKTILDFLKSDGFANRNFMQLIHDDSLTFKEDIQKAQVSGQGDSLHE | |
| | HIANLAGSPAIKKGILQTVKVVDELVKVMGRHKPENIVIEMARENQTTQKGQKNSRERMKRIEEGIKELGSQILKEHPVENTQLQNEKLYLYYLQNGRDMYV | |
| | DQELDINRLSDYDVDHIVPQSFLKDDSIDNKVLTRSDKARGKSDNVPSEEVVKKMKNYWRQLLNAKLITQRKFDNLTKAERGGLSELDKAGFIKRQLVETRQI | |
| | TKHVAQILDSRMNTKYDENDKLIREVKVITLKSKLVSDFRKDFQFYKVREINNYHHAHDAYLNAVVGTALIKKYPKLESEFVYGDYKVYDVRKMIAKSEQEIGK | |
| | ATAKYFFYSNIMNFFKTEITLANGEIRKRPLIETNGETGEIVWDKGRDFATVRKVLSMPQVNIVKKTEVQTGGFSKESILPKRNSDKLIARKKDWDPKKYGGFD | |
| | SPTVAYSVLVVAKVEKGKSKKLKSVKELLGITIMERSSFEKNPIDFLEAKGYKEVKKDLIIKLPKYSLFELENGRKRMLASAGELQKGNELALPSKYVNFLYLASHY | |
| | EKLKGSPEDNEQKQLFVEQHKHYLDEIIEQISEFSKRVILADANLDKVLSAYNKHRDKPIREQAENIIHLFTLTNLGAPAAFKYFDTTIDRKRYTSTKEVLDATLIH | |
| | QSITGLYETRIDLSQLGGDAEAAAKEAAAKEAAAKEAAAKALEAEAAAKEAAAKEAAAKEAAAKAMASNFTQFVLVDNGGTGDVTVAPSNFANGIAEWIS | |
| | SNSRSQAYKVTCSVRQSSAQNRKYTIKVEVPKGAWRSYLNMELTIPIFATNSDCELIVKAMQGLLKDGNPIPSAIAANSGIYGGSGGSMASNFTQFVLVDNG | |
| | GTGDVTVAPSNFANGIAEWISSNSRSQAYKVTCSVRQSSAQNRKYTIKVEVPKGAWRSYLNMELTIPIFATNSDCELIVKAMQGLLKDGNPIPSAIAANSGIY | |
| | SGGSSGGSSGSETPGTSESATPESSGGSSGGSSTLNIEDEHRLHETSKEPDVSLGSTWLSDFPQAWAETGGMGLAVRQAPLIIPLKATSTPVSIKQYPMSQEA | |
| | RLGIKPHIQRLLDQGILVPCQSPWNTPLLPVKKPGTNDYRPVQDLREVNKRVEDIHPTVPNPYNLLSGLPPSHQWYTVLDLKDAFFCLRLHPTSQPLFAFEW | |
| | RDPEMGISGQLTWTRLPQGFKNSPTLFNEALHRDLADFRIQHPDLILLQYVDDLLLAATSELDCQQGTRALLQTLGNLGYRASAKKAQICQKQVKYLGYLLKE | |
| | GQRWLTEARKETVMGQPTPKTPRQLREFLGKAGFCRLFIPGFAEMAAPLYPLTKPGTLFNWGPDQQKAYQEIKQALLTAPALGLPDLTKPFELFVDEKQGY | |
| | AKGVLTQKLGPWRRPVAYLSKKLDPVAAGWPPCLRMVAAIAVLTKDAGKLTMGQPLVILAPHAVEALVKQPPDRWLSNARMTHYQALLLDTDRVQFGP | |
| | VVALNPATLLPLPEEGLQHNCLDILAEAHGTRPDLTDQPLPDADHTWYTDGSSLLQEGQRKAGAAVTTETEVIWAKALPAGTSAQRAELIALTQALKMAEG | |
| | KKLNVYTDSRYAFATAHIHGEIYRRRGWLTSEGKEIKNKDEILALLKALFLPKRLSIIHCPGHQKGHSAEARGNRMADQAARKAAITETPDTSTLLKRTADGSE | |
| | FESPKKKAKVE | |
| PL11995 | MPAAKRVKLDGGDKKYSIGLDIGTNSVGWAVITDEYKVPSKKFKVLGNTDRHSIKKNLIGALLFDSGETAEATRLKRTARRRYTRRKNRICYLQEIFSNEMAKV | 16,055 |
| | DDSFFHRLEESFLVEEDKKHERHPIFGNIVDEVAYHEKYPTIYHLRKKLVDSTDKADLRLIYLALAHMIKFRGHFLIEGDLNPDNSDVDKLFIQLVQTYNQLFEE | |
| | NPINASGVDAKAILSARLSKSRRLENLIAQLPGEKKNGLFGNLIALSLGLTPNFKSNFDLAEDAKLQLSKDTYDDDLDNLLAQIGDQYADLFLAAKNLSDAILLS | |
| | DILRVNTEITKAPLSASMIKRYDEHHQDLTLLKALVRQQLPEKYKEIFFDQSKNGYAGYIDGGASQEEFYKFIKPILEKMDGTEELLVKLNREDLLRKQRTFDNG | |
| | SIPHQIHLGELHAILRRQEDFYPFLKDNREKIEKILTFRIPYYVGPLARGNSRFAWMTRKSEETITPWNFEEVVDKGASAQSFIERMTNFDKNLPNEKVLPKHSL | |
| | LYEYFTVYNELTKVKYVTEGMRKPAFLSGEQKKAIVDLLFKTNRKVTVKQLKEDYFKKIECFDSVEISGVEDRFNASLGTYHDLLKIIKDKDFLDNEENEDILEDIV | |
| | LTLTLFEDREMIEERLKTYAHLFDDKVMKQLKRRRYTGWGRLSRKLINGIRDKQSGKTILDFLKSDGFANRNFMQLIHDDSLTFKEDIQKAQVSGQGDSLHE | |
| | HIANLAGSPAIKKGILQTVKVVDELVKVMGRHKPENIVIEMARENQTTQKGQKNSRERMKRIEEGIKELGSQILKEHPVENTQLQNEKLYLYYLQNGRDMYV | |
| | DQELDINRLSDYDVDHIVPQSFLKDDSIDNKVLTRSDKARGKSDNVPSEEVVKKMKNYWRQLLNAKLITQRKFDNLTKAERGGLSELDKAGFIKRQLVETRQI | |
| | TKHVAQILDSRMNTKYDENDKLIREVKVITLKSKLVSDFRKDFQFYKVREINNYHHAHDAYLNAVVGTALIKKYPKLESEFVYGDYKVYDVRKMIAKSEQEIGK | |
| | ATAKYFFYSNIMNFFKTEITLANGEIRKRPLIETNGETGEIVWDKGRDFATVRKVLSMPQVNIVKKTEVQTGGFSKESILPKRNSDKLIARKKDWDPKKYGGFD | |
| | SPTVAYSVLVVAKVEKGKSKKLKSVKELLGITIMERSSFEKNPIDFLEAKGYKEVKKDLIIKLPKYSLFELENGRKRMLASAGELQKGNELALPSKYVNFLYLASHY | |
| | EKLKGSPEDNEQKQLFVEQHKHYLDEIIEQISEFSKRVILADANLDKVLSAYNKHRDKPIREQAENIIHLFTLTNLGAPAAFKYFDTTIDRKRYTSTKEVLDATLIH | |
| | QSITGLYETRIDLSQLGGDAEAAAKEAAAKEAAAKEAAAKALEAEAAAKEAAAKEAAAKEAAAKAMASNFTQFVLVDNGGTGDVTVAPSNFANGIAEWIS | |
| | SNSRSQAYKVTCSVRQSSAQNRKYTIKVEVPKGAWRSYLNMELTIPIFATNSDCELIVKAMQGLLKDGNPIPSAIAANSGIYGGSGGSMASNFTQFVLVDNG | |
| | GTGDVTVAPSNFANGIAEWISSNSRSQAYKVTCSVRQSSAQNRKYTIKVEVPKGAWRSYLNMELTIPIFATNSDCELIVKAMQGLLKDGNPIPSAIAANSGIY | |
| | GSSGSSGSSGSSGSSGSSTLNIEDEHRLHETSKEPDVSLGSTWLSDFPQAWAETGGMGLAVRQAPLIIPLKATSTPVSIKQYPMSQEARLGIKPHIQRLLDQGI | |
| | LVPCQSPWNTPLLPVKKPGTNDYRPVQDLREVNKRVEDIHPTVPNPYNLLSGLPPSHQWYTVLDLKDAFFCLRLHPTSQPLFAFEWRDPEMGISGQLTWT | |
| | RLPQGFKNSPTLFNEALHRDLADFRIQHPDLILLQYVDDLLLAATSELDCQQGTRALLQTLGNLGYRASAKKAQICQKQVKYLGYLLKEGQRWLTEARKETV | |
| | MGQPTPKTPRQLREFLGKAGFCRLFIPGFAEMAAPLYPLTKPGTLFNWGPDQQKAYQEIKQALLTAPALGLPDLTKPFELFVDEKQGYAKGVLTQKLGPWR | |
| | RPVAYLSKKLDPVAAGWPPCLRMVAAIAVLTKDAGKLTMGQPLVILAPHAVEALVKQPPDRWLSNARMTHYQALLLDTDRVQFGPVVALNPATLLPLPEE | |
| | GLQHNCLDILAEAHGTRPDLTDQPLPDADHTWYTDGSSLLQEGQRKAGAAVTTETEVIWAKALPAGTSAQRAELIALTQALKMAEGKKLNVYTDSRYAFAT | |
| | AHIHGEIYRRRGWLTSEGKEIKNKDEILALLKALFLPKRLSIIHCPGHQKGHSAEARGNRMADQAARKAAITETPDTSTLLKRTADGSEFESPKKKAKVE | |
| PL11996 | MPAAKRVKLDGGDKKYSIGLDIGTNSVGWAVITDEYKVPSKKFKVLGNTDRHSIKKNLIGALLFDSGETAEATRLKRTARRRYTRRKNRICYLQEIFSNEMAKV | 16,056 |
| | DDSFFHRLEESFLVEEDKKHERHPIFGNIVDEVAYHEKYPTIYHLRKKLVDSTDKADLRLIYLALAHMIKFRGHFLIEGDLNPDNSDVDKLFIQLVQTYNQLFEE | |
| | NPINASGVDAKAILSARLSKSRRLENLIAQLPGEKKNGLFGNLIALSLGLTPNFKSNFDLAEDAKLQLSKDTYDDDLDNLLAQIGDQYADLFLAAKNLSDAILLS | |
| | DILRVNTEITKAPLSASMIKRYDEHHQDLTLLKALVRQQLPEKYKEIFFDQSKNGYAGYIDGGASQEEFYKFIKPILEKMDGTEELLVKLNREDLLRKQRTFDNG | |
| | SIPHQIHLGELHAILRRQEDFYPFLKDNREKIEKILTFRIPYYVGPLARGNSRFAWMTRKSEETITPWNFEEVVDKGASAQSFIERMTNFDKNLPNEKVLPKHSL | |
| | LYEYFTVYNELTKVKYVTEGMRKPAFLSGEQKKAIVDLLFKTNRKVTVKQLKEDYFKKIECFDSVEISGVEDRFNASLGTYHDLLKIIKDKDFLDNEENEDILEDIV | |
| | LTLTLFEDREMIEERLKTYAHLFDDKVMKQLKRRRYTGWGRLSRKLINGIRDKQSGKTILDFLKSDGFANRNFMQLIHDDSLTFKEDIQKAQVSGQGDSLHE | |
| | HIANLAGSPAIKKGILQTVKVVDELVKVMGRHKPENIVIEMARENQTTQKGQKNSRERMKRIEEGIKELGSQILKEHPVENTQLQNEKLYLYYLQNGRDMYV | |
| | DQELDINRLSDYDVDHIVPQSFLKDDSIDNKVLTRSDKARGKSDNVPSEEVVKKMKNYWRQLLNAKLITQRKFDNLTKAERGGLSELDKAGFIKRQLVETRQI | |
| | TKHVAQILDSRMNTKYDENDKLIREVKVITLKSKLVSDFRKDFQFYKVREINNYHHAHDAYLNAVVGTALIKKYPKLESEFVYGDYKVYDVRKMIAKSEQEIGK | |
| | ATAKYFFYSNIMNFFKTEITLANGEIRKRPLIETNGETGEIVWDKGRDFATVRKVLSMPQVNIVKKTEVQTGGFSKESILPKRNSDKLIARKKDWDPKKYGGFD | |
| | SPTVAYSVLVVAKVEKGKSKKLKSVKELLGITIMERSSFEKNPIDFLEAKGYKEVKKDLIIKLPKYSLFELENGRKRMLASAGELQKGNELALPSKYVNFLYLASHY | |
| | EKLKGSPEDNEQKQLFVEQHKHYLDEIIEQISEFSKRVILADANLDKVLSAYNKHRDKPIREQAENIIHLFTLTNLGAPAAFKYFDTTIDRKRYTSTKEVLDATLIH | |
| | QSITGLYETRIDLSQLGGDAEAAAKEAAAKEAAAKEAAAKALEAEAAAKEAAAKEAAAKEAAAKAMASNFTQFVLVDNGGTGDVTVAPSNFANGIAEWIS | |
| | SNSRSQAYKVTCSVRQSSAQNRKYTIKVEVPKGAWRSYLNMELTIPIFATNSDCELIVKAMQGLLKDGNPIPSAIAANSGIYGGSGGSMASNFTQFVLVDNG | |
| | GTGDVTVAPSNFANGIAEWISSNSRSQAYKVTCSVRQSSAQNRKYTIKVEVPKGAWRSYLNMELTIPIFATNSDCELIVKAMQGLLKDGNPIPSAIAANSGIY | |
| | GSSGGGEAAAKTLNIEDEHRLHETSKEPDVSLGSTWLSDFPQAWAETGGMGLAVRQAPLIIPLKATSTPVSIKQYPMSQEARLGIKPHIQRLLDQGILVPCQS | |
| | PWNTPLLPVKKPGTNDYRPVQDLREVNKRVEDIHPTVPNPYNLLSGLPPSHQWYTVLDLKDAFFCLRLHPTSQPLFAFEWRDPEMGISGQLTWTRLPQGF | |
| | KNSPTLFNEALHRDLADFRIQHPDLILLQYVDDLLLAATSELDCQQGTRALLQTLGNLGYRASAKKAQICQKQVKYLGYLLKEGQRWLTEARKETVMGQPTP | |
| | KTPRQLREFLGKAGFCRLFIPGFAEMAAPLYPLTKPGTLFNWGPDQQKAYQEIKQALLTAPALGLPDLTKPFELFVDEKQGYAKGVLTQKLGPWRRPVAYLS | |
| | KKLDPVAAGWPPCLRMVAAIAVLTKDAGKLTMGQPLVILAPHAVEALVKQPPDRWLSNARMTHYQALLLDTDRVQFGPVVALNPATLLPLPEEGLQHNC | |
| | LDILAEAHGTRPDLTDQPLPDADHTWYTDGSSLLQEGQRKAGAAVTTETEVIWAKALPAGTSAQRAELIALTQALKMAEGKKLNVYTDSRYAFATAHIHGEI | |
| | YRRRGWLTSEGKEIKNKDEILALLKALFLPKRLSIIHCPGHQKGHSAEARGNRMADQAARKAAITETPDTSTLLKRTADGSEFESPKKKAKVE | |
| PL11997 | MPAAKRVKLDGGDKKYSIGLDIGTNSVGWAVITDEYKVPSKKFKVLGNTDRHSIKKNLIGALLFDSGETAEATRLKRTARRRYTRRKNRICYLQEI | 16,057 |
| | FSNEMAKVDDSFFHRLEESFLVEEDKKHERHPIFGNIVDEVAYHEKYPTIYHLRKKLVDSTDKADLRLIYLALAHMIKFRGHFLIEGDLNPDNSDV | |
| | DKLFIQLVQTYNQLFEENPINASGVDAKAILSARLSKSRRLENLIAQLPGEKKNGLFGNLIALSLGLTPNFKSNFDLAEDAKLQLSKDTYDDDLDNL | |
| | LAQIGDQYADLFLAAKNLSDAILLSDILRVNTEITKAPLSASMIKRYDEHHQDLTLLKALVRQQLPEKYKEIFFDQSKNGYAGYIDGGASQEEFYKF | |
| | IKPILEKMDGTEELLVKLNREDLLRKQRTFDNGSIPHQIHLGELHAILRRQEDFYPFLKDNREKIEKILTFRIPYYVGPLARGNSRFAWMTRKSEETI | |
| | TPWNFEEVVDKGASAQSFIERMTNFDKNLPNEKVLPKHSLLYEYFTVYNELTKVKYVTEGMRKPAFLSGEQKKAIVDLLFKTNRKVTVKQLKED | |
| | YFKKIECFDSVEISGVEDRFNASLGTYHDLLKIIKDKDFLDNEENEDILEDIVLTLTLFEDREMIEERLKTYAHLFDDKVMKQLKRRRYTGWGRLSR | |
| | KLINGIRDKQSGKTILDFLKSDGFANRNFMQLIHDDSLTFKEDIQKAQVSGQGDSLHEHIANLAGSPAIKKGILQTVKVVDELVKVMGRHKPENI | |
| | VIEMARENQTTQKGQKNSRERMKRIEEGIKELGSQILKEHPVENTQLQNEKLYLYYLQNGRDMYVDQELDINRLSDYDVDHIVPQSFLKDDSI | |
| | DNKVLTRSDKARGKSDNVPSEEVVKKMKNYWRQLLNAKLITQRKFDNLTKAERGGLSELDKAGFIKRQLVETRQITKHVAQILDSRMNTKYDE | |
| | NDKLIREVKVITLKSKLVSDFRKDFQFYKVREINNYHHAHDAYLNAVVGTALIKKYPKLESEFVYGDYKVYDVRKMIAKSEQEIGKATAKYFFYSNI | |
| | MNFFKTEITLANGEIRKRPLIETNGETGEIVWDKGRDFATVRKVLSMPQVNIVKKTEVQTGGFSKESILPKRNSDKLIARKKDWDPKKYGGFDS | |
| | PTVAYSVLVVAKVEKGKSKKLKSVKELLGITIMERSSFEKNPIDFLEAKGYKEVKKDLIIKLPKYSLFELENGRKRMLASAGELQKGNELALPSKYVN | |
| | FLYLASHYEKLKGSPEDNEQKQLFVEQHKHYLDEIIEQISEFSKRVILADANLDKVLSAYNKHRDKPIREQAENIIHLFTLTNLGAPAAFKYFDTTID | |
| | RKRYTSTKEVLDATLIHQSITGLYETRIDLSQLGGDAEAAAKEAAAKEAAAKEAAAKALEAEAAAKEAAAKEAAAKEAAAKAMASNFTQFVLVD | |
| | NGGTGDVTVAPSNFANGIAEWISSNSRSQAYKVTCSVRQSSAQNRKYTIKVEVPKGAWRSYLNMELTIPIFATNSDCELIVKAMQGLLKDGNP | |
| | IPSAIAANSGIYGGSGGSMASNFTQFVLVDNGGTGDVTVAPSNFANGIAEWISSNSRSQAYKVTCSVRQSSAQNRKYTIKVEVPKGAWRSYL | |
| | NMELTIPIFATNSDCELIVKAMQGLLKDGNPIPSAIAANSGIYGGGSGGGSGGGSGGGSMASNFTQFVLVDNGGTGDVTVAPSNFANGIAE | |
| | WISSNSRSQAYKVTCSVRQSSAQNRKYTIKVEVPKGAWRSYLNMELTIPIFATNSDCELIVKAMQGLLKDGNPIPSAIAANSGIYGGSGGSMAS | |
| | NFTQFVLVDNGGTGDVTVAPSNFANGIAEWISSNSRSQAYKVTCSVRQSSAQNRKYTIKVEVPKGAWRSYLNMELTIPIFATNSDCELIVKAM | |
| | QGLLKDGNPIPSAIAANSGIYAEAAAKEAAAKEAAAKEAAAKALEAEAAAKEAAAKEAAAKEAAAKATLNIEDEHRLHETSKEPDVSLGSTWLS | |
| | DFPQAWAETGGMGLAVRQAPLIIPLKATSTPVSIKQYPMSQEARLGIKPHIQRLLDQGILVPCQSPWNTPLLPVKKPGTNDYRPVQDLREVNK | |
| | RVEDIHPTVPNPYNLLSGLPPSHQWYTVLDLKDAFFCLRLHPTSQPLFAFEWRDPEMGISGQLTWTRLPQGFKNSPTLFNEALHRDLADFRIQ | |
| | HPDLILLQYVDDLLLAATSELDCQQGTRALLQTLGNLGYRASAKKAQICQKQVKYLGYLLKEGQRWLTEARKETVMGQPTPKTPRQLREFLGK | |
| | AGFCRLFIPGFAEMAAPLYPLTKPGTLFNWGPDQQKAYQEIKQALLTAPALGLPDLTKPFELFVDEKQGYAKGVLTQKLGPWRRPVAYLSKKL | |
| | DPVAAGWPPCLRMVAAIAVLTKDAGKLTMGQPLVILAPHAVEALVKQPPDRWLSNARMTHYQALLLDTDRVQFGPVVALNPATLLPLPEEG | |
| | LQHNCLDILAEAHGTRPDLTDQPLPDADHTWYTDGSSLLQEGQRKAGAAVTTETEVIWAKALPAGTSAQRAELIALTQALKMAEGKKLNVYT | |
| | DSRYAFATAHIHGEIYRRRGWLTSEGKEIKNKDEILALLKALFLPKRLSIIHCPGHQKGHSAEARGNRMADQAARKAAITETPDTSTLLKRTADGS | |
| | EFESPKKKAKVE | |
| PL11998 | MPAAKRVKLDGGDKKYSIGLDIGTNSVGWAVITDEYKVPSKKFKVLGNTDRHSIKKNLIGALLFDSGETAEATRLKRTARRRYTRRKNRICYLQEIFSNEMAKV | 16,058 |
| | DDSFFHRLEESFLVEEDKKHERHPIFGNIVDEVAYHEKYPTIYHLRKKLVDSTDKADLRLIYLALAHMIKFRGHFLIEGDLNPDNSDVDKLFIQLVQTYNQLFEE | |
| | NPINASGVDAKAILSARLSKSRRLENLIAQLPGEKKNGLFGNLIALSLGLTPNFKSNFDLAEDAKLQLSKDTYDDDLDNLLAQIGDQYADLFLAAKNLSDAILLS | |
| | DILRVNTEITKAPLSASMIKRYDEHHQDLTLLKALVRQQLPEKYKEIFFDQSKNGYAGYIDGGASQEEFYKFIKPILEKMDGTEELLVKLNREDLLRKQRTFDNG | |
| | SIPHQIHLGELHAILRRQEDFYPFLKDNREKIEKILTFRIPYYVGPLARGNSRFAWMTRKSEETITPWNFEEVVDKGASAQSFIERMTNFDKNLPNEKVLPKHSL | |
| | LYEYFTVYNELTKVKYVTEGMRKPAFLSGEQKKAIVDLLFKTNRKVTVKQLKEDYFKKIECFDSVEISGVEDRFNASLGTYHDLLKIIKDKDFLDNEENEDILEDIV | |
| | LTLTLFEDREMIEERLKTYAHLFDDKVMKQLKRRRYTGWGRLSRKLINGIRDKQSGKTILDFLKSDGFANRNFMQLIHDDSLTFKEDIQKAQVSGQGDSLHE | |
| | HIANLAGSPAIKKGILQTVKVVDELVKVMGRHKPENIVIEMARENQTTQKGQKNSRERMKRIEEGIKELGSQILKEHPVENTQLQNEKLYLYYLQNGRDMYV | |
| | DQELDINRLSDYDVDHIVPQSFLKDDSIDNKVLTRSDKARGKSDNVPSEEVVKKMKNYWRQLLNAKLITQRKFDNLTKAERGGLSELDKAGFIKRQLVETRQI | |
| | TKHVAQILDSRMNTKYDENDKLIREVKVITLKSKLVSDFRKDFQFYKVREINNYHHAHDAYLNAVVGTALIKKYPKLESEFVYGDYKVYDVRKMIAKSEQEIGK | |
| | ATAKYFFYSNIMNFFKTEITLANGEIRKRPLIETNGETGEIVWDKGRDFATVRKVLSMPQVNIVKKTEVQTGGFSKESILPKRNSDKLIARKKDWDPKKYGGFD | |
| | SPTVAYSVLVVAKVEKGKSKKLKSVKELLGITIMERSSFEKNPIDFLEAKGYKEVKKDLIIKLPKYSLFELENGRKRMLASAGELQKGNELALPSKYVNFLYLASHY | |
| | EKLKGSPEDNEQKQLFVEQHKHYLDEIIEQISEFSKRVILADANLDKVLSAYNKHRDKPIREQAENIIHLFTLTNLGAPAAFKYFDTTIDRKRYTSTKEVLDATLIH | |
| | QSITGLYETRIDLSQLGGDAEAAAKEAAAKEAAAKEAAAKALEAEAAAKEAAAKEAAAKEAAAKAMASNFTQFVLVDNGGTGDVTVAPSNFANGIAEWIS | |
| | SNSRSQAYKVTCSVRQSSAQNRKYTIKVEVPKGAWRSYLNMELTIPIFATNSDCELIVKAMQGLLKDGNPIPSAIAANSGIYGGSGGSMASNFTQFVLVDNG | |
| | GTGDVTVAPSNFANGIAEWISSNSRSQAYKVTCSVRQSSAQNRKYTIKVEVPKGAWRSYLNMELTIPIFATNSDCELIVKAMQGLLKDGNPIPSAIAANSGIY | |
| | GGGSGGGSGGGSGGGSMASNFTQFVLVDNGGTGDVTVAPSNFANGIAEWISSNSRSQAYKVTCSVRQSSAQNRKYTIKVEVPKGAWRSYLNMELTIPIF | |
| | ATNSDCELIVKAMQGLLKDGNPIPSAIAANSGIYGGSGGSMASNFTQFVLVDNGGTGDVTVAPSNFANGIAEWISSNSRSQAYKVTCSVRQSSAQNRKYTI | |
| | KVEVPKGAWRSYLNMELTIPIFATNSDCELIVKAMQGLLKDGNPIPSAIAANSGIYSGGSSGGSSGSETPGTSESATPESSGGSSGGSSTLNIEDEHRLHETSKE | |
| | PDVSLGSTWLSDFPQAWAETGGMGLAVRQAPLIIPLKATSTPVSIKQYPMSQEARLGIKPHIQRLLDQGILVPCQSPWNTPLLPVKKPGTNDYRPVQDLRE | |
| | VNKRVEDIHPTVPNPYNLLSGLPPSHQWYTVLDLKDAFFCLRLHPTSQPLFAFEWRDPEMGISGQLTWTRLPQGFKNSPTLFNEALHRDLADFRIQHPDLIL | |
| | LQYVDDLLLAATSELDCQQGTRALLQTLGNLGYRASAKKAQICQKQVKYLGYLLKEGQRWLTEARKETVMGQPTPKTPRQLREFLGKAGFCRLFIPGFAEM | |
| | AAPLYPLTKPGTLFNWGPDQQKAYQEIKQALLTAPALGLPDLTKPFELFVDEKQGYAKGVLTQKLGPWRRPVAYLSKKLDPVAAGWPPCLRMVAAIAVLTK | |
| | DAGKLTMGQPLVILAPHAVEALVKQPPDRWLSNARMTHYQALLLDTDRVQFGPVVALNPATLLPLPEEGLQHNCLDILAEAHGTRPDLTDQPLPDADHT | |
| | WYTDGSSLLQEGQRKAGAAVTTETEVIWAKALPAGTSAQRAELIALTQALKMAEGKKLNVYTDSRYAFATAHIHGEIYRRRGWLTSEGKEIKNKDEILALLKA | |
| | LFLPKRLSIIHCPGHQKGHSAEARGNRMADQAARKAAITETPDTSTLLKRTADGSEFESPKKKAKVE | |
| PL11999 | MPAAKRVKLDGGDKKYSIGLDIGTNSVGWAVITDEYKVPSKKFKVLGNTDRHSIKKNLIGALLFDSGETAEATRLKRTARRRYTRRKNRICYLQEIFSNEMAKV | 16,059 |
| | DDSFFHRLEESFLVEEDKKHERHPIFGNIVDEVAYHEKYPTIYHLRKKLVDSTDKADLRLIYLALAHMIKFRGHFLIEGDLNPDNSDVDKLFIQLVQTYNQLFEE | |
| | NPINASGVDAKAILSARLSKSRRLENLIAQLPGEKKNGLFGNLIALSLGLTPNFKSNFDLAEDAKLQLSKDTYDDDLDNLLAQIGDQYADLFLAAKNLSDAILLS | |
| | DILRVNTEITKAPLSASMIKRYDEHHQDLTLLKALVRQQLPEKYKEIFFDQSKNGYAGYIDGGASQEEFYKFIKPILEKMDGTEELLVKLNREDLLRKQRTFDNG | |
| | SIPHQIHLGELHAILRRQEDFYPFLKDNREKIEKILTFRIPYYVGPLARGNSRFAWMTRKSEETITPWNFEEVVDKGASAQSFIERMTNFDKNLPNEKVLPKHSL | |
| | LYEYFTVYNELTKVKYVTEGMRKPAFLSGEQKKAIVDLLFKTNRKVTVKQLKEDYFKKIECFDSVEISGVEDRFNASLGTYHDLLKIIKDKDFLDNEENEDILEDIV | |
| | LTLTLFEDREMIEERLKTYAHLFDDKVMKQLKRRRYTGWGRLSRKLINGIRDKQSGKTILDFLKSDGFANRNFMQLIHDDSLTFKEDIQKAQVSGQGDSLHE | |
| | HIANLAGSPAIKKGILQTVKVVDELVKVMGRHKPENIVIEMARENQTTQKGQKNSRERMKRIEEGIKELGSQILKEHPVENTQLQNEKLYLYYLQNGRDMYV | |
| | DQELDINRLSDYDVDHIVPQSFLKDDSIDNKVLTRSDKARGKSDNVPSEEVVKKMKNYWRQLLNAKLITQRKFDNLTKAERGGLSELDKAGFIKRQLVETRQI | |
| | TKHVAQILDSRMNTKYDENDKLIREVKVITLKSKLVSDFRKDFQFYKVREINNYHHAHDAYLNAVVGTALIKKYPKLESEFVYGDYKVYDVRKMIAKSEQEIGK | |
| | ATAKYFFYSNIMNFFKTEITLANGEIRKRPLIETNGETGEIVWDKGRDFATVRKVLSMPQVNIVKKTEVQTGGFSKESILPKRNSDKLIARKKDWDPKKYGGFD | |
| | SPTVAYSVLVVAKVEKGKSKKLKSVKELLGITIMERSSFEKNPIDFLEAKGYKEVKKDLIIKLPKYSLFELENGRKRMLASAGELQKGNELALPSKYVNFLYLASHY | |
| | EKLKGSPEDNEQKQLFVEQHKHYLDEIIEQISEFSKRVILADANLDKVLSAYNKHRDKPIREQAENIIHLFTLTNLGAPAAFKYFDTTIDRKRYTSTKEVLDATLIH | |
| | QSITGLYETRIDLSQLGGDAEAAAKEAAAKEAAAKEAAAKALEAEAAAKEAAAKEAAAKEAAAKAMASNFTQFVLVDNGGTGDVTVAPSNFANGIAEWIS | |
| | SNSRSQAYKVTCSVRQSSAQNRKYTIKVEVPKGAWRSYLNMELTIPIFATNSDCELIVKAMQGLLKDGNPIPSAIAANSGIYGGSGGSMASNFTQFVLVDNG | |
| | GTGDVTVAPSNFANGIAEWISSNSRSQAYKVTCSVRQSSAQNRKYTIKVEVPKGAWRSYLNMELTIPIFATNSDCELIVKAMQGLLKDGNPIPSAIAANSGIY | |
| | GGGSGGGSGGGSGGGSMASNFTQFVLVDNGGTGDVTVAPSNFANGIAEWISSNSRSQAYKVTCSVRQSSAQNRKYTIKVEVPKGAWRSYLNMELTIPIF | |
| | ATNSDCELIVKAMQGLLKDGNPIPSAIAANSGIYGGSGGSMASNFTQFVLVDNGGTGDVTVAPSNFANGIAEWISSNSRSQAYKVTCSVRQSSAQNRKYTI | |
| | KVEVPKGAWRSYLNMELTIPIFATNSDCELIVKAMQGLLKDGNPIPSAIAANSGIYGSSGSSGSSGSSGSSGSSTLNIEDEHRLHETSKEPDVSLGSTWLSDFP | |
| | QAWAETGGMGLAVRQAPLIIPLKATSTPVSIKQYPMSQEARLGIKPHIQRLLDQGILVPCQSPWNTPLLPVKKPGTNDYRPVQDLREVNKRVEDIHPTVPNP | |
| | YNLLSGLPPSHQWYTVLDLKDAFFCLRLHPTSQPLFAFEWRDPEMGISGQLTWTRLPQGFKNSPTLFNEALHRDLADFRIQHPDLILLQYVDDLLLAATSELD | |
| | CQQGTRALLQTLGNLGYRASAKKAQICQKQVKYLGYLLKEGQRWLTEARKETVMGQPTPKTPRQLREFLGKAGFCRLFIPGFAEMAAPLYPLTKPGTLFNW | |
| | GPDQQKAYQEIKQALLTAPALGLPDLTKPFELFVDEKQGYAKGVLTQKLGPWRRPVAYLSKKLDPVAAGWPPCLRMVAAIAVLTKDAGKLTMGQPLVILAP | |
| | HAVEALVKQPPDRWLSNARMTHYQALLLDTDRVQFGPVVALNPATLLPLPEEGLQHNCLDILAEAHGTRPDLTDQPLPDADHTWYTDGSSLLQEGQRKA | |
| | GAAVTTETEVIWAKALPAGTSAQRAELIALTQALKMAEGKKLNVYTDSRYAFATAHIHGEIYRRRGWLTSEGKEIKNKDEILALLKALFLPKRLSIIHCPGHQKG | |
| | HSAEARGNRMADQAARKAAITETPDTSTLLKRTADGSEFESPKKKAKVE | |
| PL12000 | MPAAKRVKLDGGDKKYSIGLDIGTNSVGWAVITDEYKVPSKKFKVLGNTDRHSIKKNLIGALLFDSGETAEATRLKRTARRRYTRRKNRICYLQEIFSNEMAKV | 16,060 |
| | DDSFFHRLEESFLVEEDKKHERHPIFGNIVDEVAYHEKYPTIYHLRKKLVDSTDKADLRLIYLALAHMIKFRGHFLIEGDLNPDNSDVDKLFIQLVQTYNQLFEE | |
| | NPINASGVDAKAILSARLSKSRRLENLIAQLPGEKKNGLFGNLIALSLGLTPNFKSNFDLAEDAKLQLSKDTYDDDLDNLLAQIGDQYADLFLAAKNLSDAILLS | |
| | DILRVNTEITKAPLSASMIKRYDEHHQDLTLLKALVRQQLPEKYKEIFFDQSKNGYAGYIDGGASQEEFYKFIKPILEKMDGTEELLVKLNREDLLRKQRTFDNG | |
| | SIPHQIHLGELHAILRRQEDFYPFLKDNREKIEKILTFRIPYYVGPLARGNSRFAWMTRKSEETITPWNFEEVVDKGASAQSFIERMTNFDKNLPNEKVLPKHSL | |
| | LYEYFTVYNELTKVKYVTEGMRKPAFLSGEQKKAIVDLLFKTNRKVTVKQLKEDYFKKIECFDSVEISGVEDRFNASLGTYHDLLKIIKDKDFLDNEENEDILEDIV | |
| | LTLTLFEDREMIEERLKTYAHLFDDKVMKQLKRRRYTGWGRLSRKLINGIRDKQSGKTILDFLKSDGFANRNFMQLIHDDSLTFKEDIQKAQVSGQGDSLHE | |
| | HIANLAGSPAIKKGILQTVKVVDELVKVMGRHKPENIVIEMARENQTTQKGQKNSRERMKRIEEGIKELGSQILKEHPVENTQLQNEKLYLYYLQNGRDMYV | |
| | DQELDINRLSDYDVDHIVPQSFLKDDSIDNKVLTRSDKARGKSDNVPSEEVVKKMKNYWRQLLNAKLITQRKFDNLTKAERGGLSELDKAGFIKRQLVETRQI | |
| | TKHVAQILDSRMNTKYDENDKLIREVKVITLKSKLVSDFRKDFQFYKVREINNYHHAHDAYLNAVVGTALIKKYPKLESEFVYGDYKVYDVRKMIAKSEQEIGK | |
| | ATAKYFFYSNIMNFFKTEITLANGEIRKRPLIETNGETGEIVWDKGRDFATVRKVLSMPQVNIVKKTEVQTGGFSKESILPKRNSDKLIARKKDWDPKKYGGFD | |
| | SPTVAYSVLVVAKVEKGKSKKLKSVKELLGITIMERSSFEKNPIDFLEAKGYKEVKKDLIIKLPKYSLFELENGRKRMLASAGELQKGNELALPSKYVNFLYLASHY | |
| | EKLKGSPEDNEQKQLFVEQHKHYLDEIIEQISEFSKRVILADANLDKVLSAYNKHRDKPIREQAENIIHLFTLTNLGAPAAFKYFDTTIDRKRYTSTKEVLDATLIH | |
| | QSITGLYETRIDLSQLGGDAEAAAKEAAAKEAAAKEAAAKALEAEAAAKEAAAKEAAAKEAAAKAMASNFTQFVLVDNGGTGDVTVAPSNFANGIAEWIS | |
| | SNSRSQAYKVTCSVRQSSAQNRKYTIKVEVPKGAWRSYLNMELTIPIFATNSDCELIVKAMQGLLKDGNPIPSAIAANSGIYGGSGGSMASNFTQFVLVDNG | |
| | GTGDVTVAPSNFANGIAEWISSNSRSQAYKVTCSVRQSSAQNRKYTIKVEVPKGAWRSYLNMELTIPIFATNSDCELIVKAMQGLLKDGNPIPSAIAANSGIY | |
| | GGGSGGGSGGGSGGGSMASNFTQFVLVDNGGTGDVTVAPSNFANGIAEWISSNSRSQAYKVTCSVRQSSAQNRKYTIKVEVPKGAWRSYLNMELTIPIF | |
| | ATNSDCELIVKAMQGLLKDGNPIPSAIAANSGIYGGSGGSMASNFTQFVLVDNGGTGDVTVAPSNFANGIAEWISSNSRSQAYKVTCSVRQSSAQNRKYTI | |
| | KVEVPKGAWRSYLNMELTIPIFATNSDCELIVKAMQGLLKDGNPIPSAIAANSGIYGSSGGGEAAAKTLNIEDEHRLHETSKEPDVSLGSTWLSDFPQAWAE | |
| | TGGMGLAVRQAPLIIPLKATSTPVSIKQYPMSQEARLGIKPHIQRLLDQGILVPCQSPWNTPLLPVKKPGTNDYRPVQDLREVNKRVEDIHPTVPNPYNLLSG | |
| | LPPSHQWYTVLDLKDAFFCLRLHPTSQPLFAFEWRDPEMGISGQLTWTRLPQGFKNSPTLFNEALHRDLADFRIQHPDLILLQYVDDLLLAATSELDCQQGT | |
| | RALLQTLGNLGYRASAKKAQICQKQVKYLGYLLKEGQRWLTEARKETVMGQPTPKTPRQLREFLGKAGFCRLFIPGFAEMAAPLYPLTKPGTLFNWGPDQQ | |
| | KAYQEIKQALLTAPALGLPDLTKPFELFVDEKQGYAKGVLTQKLGPWRRPVAYLSKKLDPVAAGWPPCLRMVAAIAVLTKDAGKLTMGQPLVILAPHAVEA | |
| | LVKQPPDRWLSNARMTHYQALLLDTDRVQFGPVVALNPATLLPLPEEGLQHNCLDILAEAHGTRPDLTDQPLPDADHTWYTDGSSLLQEGQRKAGAAVT | |
| | TETEVIWAKALPAGTSAQRAELIALTQALKMAEGKKLNVYTDSRYAFATAHIHGEIYRRRGWLTSEGKEIKNKDEILALLKALFLPKRLSIIHCPGHQKGHSAEA | |
| | RGNRMADQAARKAAITETPDTSTLLKRTADGSEFESPKKKAKVE | |
| PL12001 | MPAAKRVKLDGGDKKYSIGLDIGTNSVGWAVITDEYKVPSKKFKVLGNTDRHSIKKNLIGALLFDSGETAEATRLKRTARRRYTRRKNRICYLQEIFSNEMAKV | 16,061 |
| | DDSFFHRLEESFLVEEDKKHERHPIFGNIVDEVAYHEKYPTIYHLRKKLVDSTDKADLRLIYLALAHMIKFRGHFLIEGDLNPDNSDVDKLFIQLVQTYNQLFEE | |
| | NPINASGVDAKAILSARLSKSRRLENLIAQLPGEKKNGLFGNLIALSLGLTPNFKSNFDLAEDAKLQLSKDTYDDDLDNLLAQIGDQYADLFLAAKNLSDAILLS | |
| | DILRVNTEITKAPLSASMIKRYDEHHQDLTLLKALVRQQLPEKYKEIFFDQSKNGYAGYIDGGASQEEFYKFIKPILEKMDGTEELLVKLNREDLLRKQRTFDNG | |
| | SIPHQIHLGELHAILRRQEDFYPFLKDNREKIEKILTFRIPYYVGPLARGNSRFAWMTRKSEETITPWNFEEVVDKGASAQSFIERMTNFDKNLPNEKVLPKHSL | |
| | LYEYFTVYNELTKVKYVTEGMRKPAFLSGEQKKAIVDLLFKTNRKVTVKQLKEDYFKKIECFDSVEISGVEDRFNASLGTYHDLLKIIKDKDFLDNEENEDILEDIV | |
| | LTLTLFEDREMIEERLKTYAHLFDDKVMKQLKRRRYTGWGRLSRKLINGIRDKQSGKTILDFLKSDGFANRNFMQLIHDDSLTFKEDIQKAQVSGQGDSLHE | |
| | HIANLAGSPAIKKGILQTVKVVDELVKVMGRHKPENIVIEMARENQTTQKGQKNSRERMKRIEEGIKELGSQILKEHPVENTQLQNEKLYLYYLQNGRDMYV | |
| | DQELDINRLSDYDVDHIVPQSFLKDDSIDNKVLTRSDKARGKSDNVPSEEVVKKMKNYWRQLLNAKLITQRKFDNLTKAERGGLSELDKAGFIKRQLVETRQI | |
| | TKHVAQILDSRMNTKYDENDKLIREVKVITLKSKLVSDFRKDFQFYKVREINNYHHAHDAYLNAVVGTALIKKYPKLESEFVYGDYKVYDVRKMIAKSEQEIGK | |
| | ATAKYFFYSNIMNFFKTEITLANGEIRKRPLIETNGETGEIVWDKGRDFATVRKVLSMPQVNIVKKTEVQTGGFSKESILPKRNSDKLIARKKDWDPKKYGGFD | |
| | SPTVAYSVLVVAKVEKGKSKKLKSVKELLGITIMERSSFEKNPIDFLEAKGYKEVKKDLIIKLPKYSLFELENGRKRMLASAGELQKGNELALPSKYVNFLYLASHY | |
| | EKLKGSPEDNEQKQLFVEQHKHYLDEIIEQISEFSKRVILADANLDKVLSAYNKHRDKPIREQAENIIHLFTLTNLGAPAAFKYFDTTIDRKRYTSTKEVLDATLIH | |
| | QSITGLYETRIDLSQLGGDSGGSSGGSSGSETPGTSESATPESSGGSSGGSSMASNFTQFVLVDNGGTGDVTVAPSNFANGIAEWISSNSRSQAYKVTCSVR | |
| | QSSAQNRKYTIKVEVPKGAWRSYLNMELTIPIFATNSDCELIVKAMQGLLKDGNPIPSAIAANSGIYAEAAAKEAAAKEAAAKEAAAKALEAEAAAKEAAAKE | |
| | AAAKEAAAKATLNIEDEHRLHETSKEPDVSLGSTWLSDFPQAWAETGGMGLAVRQAPLIIPLKATSTPVSIKQYPMSQEARLGIKPHIQRLLDQGILVPCQSP | |
| | WNTPLLPVKKPGTNDYRPVQDLREVNKRVEDIHPTVPNPYNLLSGLPPSHQWYTVLDLKDAFFCLRLHPTSQPLFAFEWRDPEMGISGQLTWTRLPQGFK | |
| | NSPTLFNEALHRDLADFRIQHPDLILLQYVDDLLLAATSELDCQQGTRALLQTLGNLGYRASAKKAQICQKQVKYLGYLLKEGQRWLTEARKETVMGQPTPK | |
| | TPRQLREFLGKAGFCRLFIPGFAEMAAPLYPLTKPGTLFNWGPDQQKAYQEIKQALLTAPALGLPDLTKPFELFVDEKQGYAKGVLTQKLGPWRRPVAYLSK | |
| | KLDPVAAGWPPCLRMVAAIAVLTKDAGKLTMGQPLVILAPHAVEALVKQPPDRWLSNARMTHYQALLLDTDRVQFGPVVALNPATLLPLPEEGLQHNCL | |
| | DILAEAHGTRPDLTDQPLPDADHTWYTDGSSLLQEGQRKAGAAVTTETEVIWAKALPAGTSAQRAELIALTQALKMAEGKKLNVYTDSRYAFATAHIHGEIY | |
| | RRRGWLTSEGKEIKNKDEILALLKALFLPKRLSIIHCPGHQKGHSAEARGNRMADQAARKAAITETPDTSTLLKRTADGSEFESPKKKAKVE | |
| PL12002 | MPAAKRVKLDGGDKKYSIGLDIGTNSVGWAVITDEYKVPSKKFKVLGNTDRHSIKKNLIGALLFDSGETAEATRLKRTARRRYTRRKNRICYLQEIFSNEMAKV | 16,062 |
| | DDSFFHRLEESFLVEEDKKHERHPIFGNIVDEVAYHEKYPTIYHLRKKLVDSTDKADLRLIYLALAHMIKFRGHFLIEGDLNPDNSDVDKLFIQLVQTYNQLFEE | |
| | NPINASGVDAKAILSARLSKSRRLENLIAQLPGEKKNGLFGNLIALSLGLTPNFKSNFDLAEDAKLQLSKDTYDDDLDNLLAQIGDQYADLFLAAKNLSDAILLS | |
| | DILRVNTEITKAPLSASMIKRYDEHHQDLTLLKALVRQQLPEKYKEIFFDQSKNGYAGYIDGGASQEEFYKFIKPILEKMDGTEELLVKLNREDLLRKQRTFDNG | |
| | SIPHQIHLGELHAILRRQEDFYPFLKDNREKIEKILTFRIPYYVGPLARGNSRFAWMTRKSEETITPWNFEEVVDKGASAQSFIERMTNFDKNLPNEKVLPKHSL | |
| | LYEYFTVYNELTKVKYVTEGMRKPAFLSGEQKKAIVDLLFKTNRKVTVKQLKEDYFKKIECFDSVEISGVEDRFNASLGTYHDLLKIIKDKDFLDNEENEDILEDIV | |
| | LTLTLFEDREMIEERLKTYAHLFDDKVMKQLKRRRYTGWGRLSRKLINGIRDKQSGKTILDFLKSDGFANRNFMQLIHDDSLTFKEDIQKAQVSGQGDSLHE | |
| | HIANLAGSPAIKKGILQTVKVVDELVKVMGRHKPENIVIEMARENQTTQKGQKNSRERMKRIEEGIKELGSQILKEHPVENTQLQNEKLYLYYLQNGRDMYV | |
| | DQELDINRLSDYDVDHIVPQSFLKDDSIDNKVLTRSDKARGKSDNVPSEEVVKKMKNYWRQLLNAKLITQRKFDNLTKAERGGLSELDKAGFIKRQLVETRQI | |
| | TKHVAQILDSRMNTKYDENDKLIREVKVITLKSKLVSDFRKDFQFYKVREINNYHHAHDAYLNAVVGTALIKKYPKLESEFVYGDYKVYDVRKMIAKSEQEIGK | |
| | ATAKYFFYSNIMNFFKTEITLANGEIRKRPLIETNGETGEIVWDKGRDFATVRKVLSMPQVNIVKKTEVQTGGFSKESILPKRNSDKLIARKKDWDPKKYGGFD | |
| | SPTVAYSVLVVAKVEKGKSKKLKSVKELLGITIMERSSFEKNPIDFLEAKGYKEVKKDLIIKLPKYSLFELENGRKRMLASAGELQKGNELALPSKYVNFLYLASHY | |
| | EKLKGSPEDNEQKQLFVEQHKHYLDEIIEQISEFSKRVILADANLDKVLSAYNKHRDKPIREQAENIIHLFTLTNLGAPAAFKYFDTTIDRKRYTSTKEVLDATLIH | |
| | QSITGLYETRIDLSQLGGDSGGSSGGSSGSETPGTSESATPESSGGSSGGSSMASNFTQFVLVDNGGTGDVTVAPSNFANGIAEWISSNSRSQAYKVTCSVR | |
| | QSSAQNRKYTIKVEVPKGAWRSYLNMELTIPIFATNSDCELIVKAMQGLLKDGNPIPSAIAANSGIYSGGSSGGSSGSETPGTSESATPESSGGSSGGSSTLNIE | |
| | DEHRLHETSKEPDVSLGSTWLSDFPQAWAETGGMGLAVRQAPLIIPLKATSTPVSIKQYPMSQEARLGIKPHIQRLLDQGILVPCQSPWNTPLLPVKKPGTN | |
| | DYRPVQDLREVNKRVEDIHPTVPNPYNLLSGLPPSHQWYTVLDLKDAFFCLRLHPTSQPLFAFEWRDPEMGISGQLTWTRLPQGFKNSPTLFNEALHRDLA | |
| | DFRIQHPDLILLQYVDDLLLAATSELDCQQGTRALLQTLGNLGYRASAKKAQICQKQVKYLGYLLKEGQRWLTEARKETVMGQPTPKTPRQLREFLGKAGFC | |
| | RLFIPGFAEMAAPLYPLTKPGTLFNWGPDQQKAYQEIKQALLTAPALGLPDLTKPFELFVDEKQGYAKGVLTQKLGPWRRPVAYLSKKLDPVAAGWPPCLR | |
| | MVAAIAVLTKDAGKLTMGQPLVILAPHAVEALVKQPPDRWLSNARMTHYQALLLDTDRVQFGPVVALNPATLLPLPEEGLQHNCLDILAEAHGTRPDLTD | |
| | QPLPDADHTWYTDGSSLLQEGQRKAGAAVTTETEVIWAKALPAGTSAQRAELIALTQALKMAEGKKLNVYTDSRYAFATAHIHGEIYRRRGWLTSEGKEIK | |
| | NKDEILALLKALFLPKRLSIIHCPGHQKGHSAEARGNRMADQAARKAAITETPDTSTLLKRTADGSEFESPKKKAKVE | |
| PL12003 | MPAAKRVKLDGGDKKYSIGLDIGTNSVGWAVITDEYKVPSKKFKVLGNTDRHSIKKNLIGALLFDSGETAEATRLKRTARRRYTRRKNRICYLQEIFSNEMAKV | 16,063 |
| | DDSFFHRLEESFLVEEDKKHERHPIFGNIVDEVAYHEKYPTIYHLRKKLVDSTDKADLRLIYLALAHMIKFRGHFLIEGDLNPDNSDVDKLFIQLVQTYNQLFEE | |
| | NPINASGVDAKAILSARLSKSRRLENLIAQLPGEKKNGLFGNLIALSLGLTPNFKSNFDLAEDAKLQLSKDTYDDDLDNLLAQIGDQYADLFLAAKNLSDAILLS | |
| | DILRVNTEITKAPLSASMIKRYDEHHQDLTLLKALVRQQLPEKYKEIFFDQSKNGYAGYIDGGASQEEFYKFIKPILEKMDGTEELLVKLNREDLLRKQRTFDNG | |
| | SIPHQIHLGELHAILRRQEDFYPFLKDNREKIEKILTFRIPYYVGPLARGNSRFAWMTRKSEETITPWNFEEVVDKGASAQSFIERMTNFDKNLPNEKVLPKHSL | |
| | LYEYFTVYNELTKVKYVTEGMRKPAFLSGEQKKAIVDLLFKTNRKVTVKQLKEDYFKKIECFDSVEISGVEDRFNASLGTYHDLLKIIKDKDFLDNEENEDILEDIV | |
| | LTLTLFEDREMIEERLKTYAHLFDDKVMKQLKRRRYTGWGRLSRKLINGIRDKQSGKTILDFLKSDGFANRNFMQLIHDDSLTFKEDIQKAQVSGQGDSLHE | |
| | HIANLAGSPAIKKGILQTVKVVDELVKVMGRHKPENIVIEMARENQTTQKGQKNSRERMKRIEEGIKELGSQILKEHPVENTQLQNEKLYLYYLQNGRDMYV | |
| | DQELDINRLSDYDVDHIVPQSFLKDDSIDNKVLTRSDKARGKSDNVPSEEVVKKMKNYWRQLLNAKLITQRKFDNLTKAERGGLSELDKAGFIKRQLVETRQI | |
| | TKHVAQILDSRMNTKYDENDKLIREVKVITLKSKLVSDFRKDFQFYKVREINNYHHAHDAYLNAVVGTALIKKYPKLESEFVYGDYKVYDVRKMIAKSEQEIGK | |
| | ATAKYFFYSNIMNFFKTEITLANGEIRKRPLIETNGETGEIVWDKGRDFATVRKVLSMPQVNIVKKTEVQTGGFSKESILPKRNSDKLIARKKDWDPKKYGGFD | |
| | SPTVAYSVLVVAKVEKGKSKKLKSVKELLGITIMERSSFEKNPIDFLEAKGYKEVKKDLIIKLPKYSLFELENGRKRMLASAGELQKGNELALPSKYVNFLYLASHY | |
| | EKLKGSPEDNEQKQLFVEQHKHYLDEIIEQISEFSKRVILADANLDKVLSAYNKHRDKPIREQAENIIHLFTLTNLGAPAAFKYFDTTIDRKRYTSTKEVLDATLIH | |
| | QSITGLYETRIDLSQLGGDSGGSSGGSSGSETPGTSESATPESSGGSSGGSSMASNFTQFVLVDNGGTGDVTVAPSNFANGIAEWISSNSRSQAYKVTCSVR | |
| | QSSAQNRKYTIKVEVPKGAWRSYLNMELTIPIFATNSDCELIVKAMQGLLKDGNPIPSAIAANSGIYGSSGSSGSSGSSGSSGSSTLNIEDEHRLHETSKEPDVS | |
| | LGSTWLSDFPQAWAETGGMGLAVRQAPLIIPLKATSTPVSIKQYPMSQEARLGIKPHIQRLLDQGILVPCQSPWNTPLLPVKKPGTNDYRPVQDLREVNKR | |
| | VEDIHPTVPNPYNLLSGLPPSHQWYTVLDLKDAFFCLRLHPTSQPLFAFEWRDPEMGISGQLTWTRLPQGFKNSPTLFNEALHRDLADFRIQHPDLILLQYV | |
| | DDLLLAATSELDCQQGTRALLQTLGNLGYRASAKKAQICQKQVKYLGYLLKEGQRWLTEARKETVMGQPTPKTPRQLREFLGKAGFCRLFIPGFAEMAAPLY | |
| | PLTKPGTLFNWGPDQQKAYQEIKQALLTAPALGLPDLTKPFELFVDEKQGYAKGVLTQKLGPWRRPVAYLSKKLDPVAAGWPPCLRMVAAIAVLTKDAGKL | |
| | TMGQPLVILAPHAVEALVKQPPDRWLSNARMTHYQALLLDTDRVQFGPVVALNPATLLPLPEEGLQHNCLDILAEAHGTRPDLTDQPLPDADHTWYTDG | |
| | SSLLQEGQRKAGAAVTTETEVIWAKALPAGTSAQRAELIALTQALKMAEGKKLNVYTDSRYAFATAHIHGEIYRRRGWLTSEGKEIKNKDEILALLKALFLPKR | |
| | LSIIHCPGHQKGHSAEARGNRMADQAARKAAITETPDTSTLLKRTADGSEFESPKKKAKVE | |
| PL12004 | MPAAKRVKLDGGDKKYSIGLDIGTNSVGWAVITDEYKVPSKKFKVLGNTDRHSIKKNLIGALLFDSGETAEATRLKRTARRRYTRRKNRICYLQEIFSNEMAKV | 16,064 |
| | DDSFFHRLEESFLVEEDKKHERHPIFGNIVDEVAYHEKYPTIYHLRKKLVDSTDKADLRLIYLALAHMIKFRGHFLIEGDLNPDNSDVDKLFIQLVQTYNQLFEE | |
| | NPINASGVDAKAILSARLSKSRRLENLIAQLPGEKKNGLFGNLIALSLGLTPNFKSNFDLAEDAKLQLSKDTYDDDLDNLLAQIGDQYADLFLAAKNLSDAILLS | |
| | DILRVNTEITKAPLSASMIKRYDEHHQDLTLLKALVRQQLPEKYKEIFFDQSKNGYAGYIDGGASQEEFYKFIKPILEKMDGTEELLVKLNREDLLRKQRTFDNG | |
| | SIPHQIHLGELHAILRRQEDFYPFLKDNREKIEKILTFRIPYYVGPLARGNSRFAWMTRKSEETITPWNFEEVVDKGASAQSFIERMTNFDKNLPNEKVLPKHSL | |
| | LYEYFTVYNELTKVKYVTEGMRKPAFLSGEQKKAIVDLLFKTNRKVTVKQLKEDYFKKIECFDSVEISGVEDRFNASLGTYHDLLKIIKDKDFLDNEENEDILEDIV | |
| | LTLTLFEDREMIEERLKTYAHLFDDKVMKQLKRRRYTGWGRLSRKLINGIRDKQSGKTILDFLKSDGFANRNFMQLIHDDSLTFKEDIQKAQVSGQGDSLHE | |
| | HIANLAGSPAIKKGILQTVKVVDELVKVMGRHKPENIVIEMARENQTTQKGQKNSRERMKRIEEGIKELGSQILKEHPVENTQLQNEKLYLYYLQNGRDMYV | |
| | DQELDINRLSDYDVDHIVPQSFLKDDSIDNKVLTRSDKARGKSDNVPSEEVVKKMKNYWRQLLNAKLITQRKFDNLTKAERGGLSELDKAGFIKRQLVETRQI | |
| | TKHVAQILDSRMNTKYDENDKLIREVKVITLKSKLVSDFRKDFQFYKVREINNYHHAHDAYLNAVVGTALIKKYPKLESEFVYGDYKVYDVRKMIAKSEQEIGK | |
| | ATAKYFFYSNIMNFFKTEITLANGEIRKRPLIETNGETGEIVWDKGRDFATVRKVLSMPQVNIVKKTEVQTGGFSKESILPKRNSDKLIARKKDWDPKKYGGFD | |
| | SPTVAYSVLVVAKVEKGKSKKLKSVKELLGITIMERSSFEKNPIDFLEAKGYKEVKKDLIIKLPKYSLFELENGRKRMLASAGELQKGNELALPSKYVNFLYLASHY | |
| | EKLKGSPEDNEQKQLFVEQHKHYLDEIIEQISEFSKRVILADANLDKVLSAYNKHRDKPIREQAENIIHLFTLTNLGAPAAFKYFDTTIDRKRYTSTKEVLDATLIH | |
| | QSITGLYETRIDLSQLGGDSGGSSGGSSGSETPGTSESATPESSGGSSGGSSMASNFTQFVLVDNGGTGDVTVAPSNFANGIAEWISSNSRSQAYKVTCSVR | |
| | QSSAQNRKYTIKVEVPKGAWRSYLNMELTIPIFATNSDCELIVKAMQGLLKDGNPIPSAIAANSGIYGSSGGGEAAAKTLNIEDEHRLHETSKEPDVSLGSTW | |
| | LSDFPQAWAETGGMGLAVRQAPLIIPLKATSTPVSIKQYPMSQEARLGIKPHIQRLLDQGILVPCQSPWNTPLLPVKKPGTNDYRPVQDLREVNKRVEDIHP | |
| | TVPNPYNLLSGLPPSHQWYTVLDLKDAFFCLRLHPTSQPLFAFEWRDPEMGISGQLTWTRLPQGFKNSPTLFNEALHRDLADFRIQHPDLILLQYVDDLLLA | |
| | ATSELDCQQGTRALLQTLGNLGYRASAKKAQICQKQVKYLGYLLKEGQRWLTEARKETVMGQPTPKTPRQLREFLGKAGFCRLFIPGFAEMAAPLYPLTKP | |
| | GTLFNWGPDQQKAYQEIKQALLTAPALGLPDLTKPFELFVDEKQGYAKGVLTQKLGPWRRPVAYLSKKLDPVAAGWPPCLRMVAAIAVLTKDAGKLTMG | |
| | QPLVILAPHAVEALVKQPPDRWLSNARMTHYQALLLDTDRVQFGPVVALNPATLLPLPEEGLQHNCLDILAEAHGTRPDLTDQPLPDADHTWYTDGSSLL | |
| | QEGQRKAGAAVTTETEVIWAKALPAGTSAQRAELIALTQALKMAEGKKLNVYTDSRYAFATAHIHGEIYRRRGWLTSEGKEIKNKDEILALLKALFLPKRLSIIH | |
| | CPGHQKGHSAEARGNRMADQAARKAAITETPDTSTLLKRTADGSEFESPKKKAKVE | |
| PL12005 | MPAAKRVKLDGGDKKYSIGLDIGTNSVGWAVITDEYKVPSKKFKVLGNTDRHSIKKNLIGALLFDSGETAEATRLKRTARRRYTRRKNRICYLQEIFSNEMAKV | 16,065 |
| | DDSFFHRLEESFLVEEDKKHERHPIFGNIVDEVAYHEKYPTIYHLRKKLVDSTDKADLRLIYLALAHMIKFRGHFLIEGDLNPDNSDVDKLFIQLVQTYNQLFEE | |
| | NPINASGVDAKAILSARLSKSRRLENLIAQLPGEKKNGLFGNLIALSLGLTPNFKSNFDLAEDAKLQLSKDTYDDDLDNLLAQIGDQYADLFLAAKNLSDAILLS | |
| | DILRVNTEITKAPLSASMIKRYDEHHQDLTLLKALVRQQLPEKYKEIFFDQSKNGYAGYIDGGASQEEFYKFIKPILEKMDGTEELLVKLNREDLLRKQRTFDNG | |
| | SIPHQIHLGELHAILRRQEDFYPFLKDNREKIEKILTFRIPYYVGPLARGNSRFAWMTRKSEETITPWNFEEVVDKGASAQSFIERMTNFDKNLPNEKVLPKHSL | |
| | LYEYFTVYNELTKVKYVTEGMRKPAFLSGEQKKAIVDLLFKTNRKVTVKQLKEDYFKKIECFDSVEISGVEDRFNASLGTYHDLLKIIKDKDFLDNEENEDILEDIV | |
| | LTLTLFEDREMIEERLKTYAHLFDDKVMKQLKRRRYTGWGRLSRKLINGIRDKQSGKTILDFLKSDGFANRNFMQLIHDDSLTFKEDIQKAQVSGQGDSLHE | |
| | HIANLAGSPAIKKGILQTVKVVDELVKVMGRHKPENIVIEMARENQTTQKGQKNSRERMKRIEEGIKELGSQILKEHPVENTQLQNEKLYLYYLQNGRDMYV | |
| | DQELDINRLSDYDVDHIVPQSFLKDDSIDNKVLTRSDKARGKSDNVPSEEVVKKMKNYWRQLLNAKLITQRKFDNLTKAERGGLSELDKAGFIKRQLVETRQI | |
| | TKHVAQILDSRMNTKYDENDKLIREVKVITLKSKLVSDFRKDFQFYKVREINNYHHAHDAYLNAVVGTALIKKYPKLESEFVYGDYKVYDVRKMIAKSEQEIGK | |
| | ATAKYFFYSNIMNFFKTEITLANGEIRKRPLIETNGETGEIVWDKGRDFATVRKVLSMPQVNIVKKTEVQTGGFSKESILPKRNSDKLIARKKDWDPKKYGGFD | |
| | SPTVAYSVLVVAKVEKGKSKKLKSVKELLGITIMERSSFEKNPIDFLEAKGYKEVKKDLIIKLPKYSLFELENGRKRMLASAGELQKGNELALPSKYVNFLYLASHY | |
| | EKLKGSPEDNEQKQLFVEQHKHYLDEIIEQISEFSKRVILADANLDKVLSAYNKHRDKPIREQAENIIHLFTLTNLGAPAAFKYFDTTIDRKRYTSTKEVLDATLIH | |
| | QSITGLYETRIDLSQLGGDSGGSSGGSSGSETPGTSESATPESSGGSSGGSSMASNFTQFVLVDNGGTGDVTVAPSNFANGIAEWISSNSRSQAYKVTCSVR | |
| | QSSAQNRKYTIKVEVPKGAWRSYLNMELTIPIFATNSDCELIVKAMQGLLKDGNPIPSAIAANSGIYGGSGGSMASNFTQFVLVDNGGTGDVTVAPSNFAN | |
| | GIAEWISSNSRSQAYKVTCSVRQSSAQNRKYTIKVEVPKGAWRSYLNMELTIPIFATNSDCELIVKAMQGLLKDGNPIPSAIAANSGIYAEAAAKEAAAKEAA | |
| | AKEAAAKALEAEAAAKEAAAKEAAAKEAAAKATLNIEDEHRLHETSKEPDVSLGSTWLSDFPQAWAETGGMGLAVRQAPLIIPLKATSTPVSIKQYPMSQE | |
| | ARLGIKPHIQRLLDQGILVPCQSPWNTPLLPVKKPGTNDYRPVQDLREVNKRVEDIHPTVPNPYNLLSGLPPSHQWYTVLDLKDAFFCLRLHPTSQPLFAFE | |
| | WRDPEMGISGQLTWTRLPQGFKNSPTLFNEALHRDLADFRIQHPDLILLQYVDDLLLAATSELDCQQGTRALLQTLGNLGYRASAKKAQICQKQVKYLGYLL | |
| | KEGQRWLTEARKETVMGQPTPKTPRQLREFLGKAGFCRLFIPGFAEMAAPLYPLTKPGTLFNWGPDQQKAYQEIKQALLTAPALGLPDLTKPFELFVDEKQ | |
| | GYAKGVLTQKLGPWRRPVAYLSKKLDPVAAGWPPCLRMVAAIAVLTKDAGKLTMGQPLVILAPHAVEALVKQPPDRWLSNARMTHYQALLLDTDRVQF | |
| | GPVVALNPATLLPLPEEGLQHNCLDILAEAHGTRPDLTDQPLPDADHTWYTDGSSLLQEGQRKAGAAVTTETEVIWAKALPAGTSAQRAELIALTQALKMA | |
| | EGKKLNVYTDSRYAFATAHIHGEIYRRRGWLTSEGKEIKNKDEILALLKALFLPKRLSIIHCPGHQKGHSAEARGNRMADQAARKAAITETPDTSTLLKRTADG | |
| | SEFESPKKKAKVE | |
| PL12006 | MPAAKRVKLDGGDKKYSIGLDIGTNSVGWAVITDEYKVPSKKFKVLGNTDRHSIKKNLIGALLFDSGETAEATRLKRTARRRYTRRKNRICYLQEIFSNEMAKV | 16,066 |
| | DDSFFHRLEESFLVEEDKKHERHPIFGNIVDEVAYHEKYPTIYHLRKKLVDSTDKADLRLIYLALAHMIKFRGHFLIEGDLNPDNSDVDKLFIQLVQTYNQLFEE | |
| | NPINASGVDAKAILSARLSKSRRLENLIAQLPGEKKNGLFGNLIALSLGLTPNFKSNFDLAEDAKLQLSKDTYDDDLDNLLAQIGDQYADLFLAAKNLSDAILLS | |
| | DILRVNTEITKAPLSASMIKRYDEHHQDLTLLKALVRQQLPEKYKEIFFDQSKNGYAGYIDGGASQEEFYKFIKPILEKMDGTEELLVKLNREDLLRKQRTFDNG | |
| | SIPHQIHLGELHAILRRQEDFYPFLKDNREKIEKILTFRIPYYVGPLARGNSRFAWMTRKSEETITPWNFEEVVDKGASAQSFIERMTNFDKNLPNEKVLPKHSL | |
| | LYEYFTVYNELTKVKYVTEGMRKPAFLSGEQKKAIVDLLFKTNRKVTVKQLKEDYFKKIECFDSVEISGVEDRFNASLGTYHDLLKIIKDKDFLDNEENEDILEDIV | |
| | LTLTLFEDREMIEERLKTYAHLFDDKVMKQLKRRRYTGWGRLSRKLINGIRDKQSGKTILDFLKSDGFANRNFMQLIHDDSLTFKEDIQKAQVSGQGDSLHE | |
| | HIANLAGSPAIKKGILQTVKVVDELVKVMGRHKPENIVIEMARENQTTQKGQKNSRERMKRIEEGIKELGSQILKEHPVENTQLQNEKLYLYYLQNGRDMYV | |
| | DQELDINRLSDYDVDHIVPQSFLKDDSIDNKVLTRSDKARGKSDNVPSEEVVKKMKNYWRQLLNAKLITQRKFDNLTKAERGGLSELDKAGFIKRQLVETRQI | |
| | TKHVAQILDSRMNTKYDENDKLIREVKVITLKSKLVSDFRKDFQFYKVREINNYHHAHDAYLNAVVGTALIKKYPKLESEFVYGDYKVYDVRKMIAKSEQEIGK | |
| | ATAKYFFYSNIMNFFKTEITLANGEIRKRPLIETNGETGEIVWDKGRDFATVRKVLSMPQVNIVKKTEVQTGGFSKESILPKRNSDKLIARKKDWDPKKYGGFD | |
| | SPTVAYSVLVVAKVEKGKSKKLKSVKELLGITIMERSSFEKNPIDFLEAKGYKEVKKDLIIKLPKYSLFELENGRKRMLASAGELQKGNELALPSKYVNFLYLASHY | |
| | EKLKGSPEDNEQKQLFVEQHKHYLDEIIEQISEFSKRVILADANLDKVLSAYNKHRDKPIREQAENIIHLFTLTNLGAPAAFKYFDTTIDRKRYTSTKEVLDATLIH | |
| | QSITGLYETRIDLSQLGGDSGGSSGGSSGSETPGTSESATPESSGGSSGGSSMASNFTQFVLVDNGGTGDVTVAPSNFANGIAEWISSNSRSQAYKVTCSVR | |
| | QSSAQNRKYTIKVEVPKGAWRSYLNMELTIPIFATNSDCELIVKAMQGLLKDGNPIPSAIAANSGIYGGSGGSMASNFTQFVLVDNGGTGDVTVAPSNFAN | |
| | GIAEWISSNSRSQAYKVTCSVRQSSAQNRKYTIKVEVPKGAWRSYLNMELTIPIFATNSDCELIVKAMQGLLKDGNPIPSAIAANSGIYSGGSSGGSSGSETPG | |
| | TSESATPESSGGSSGGSSTLNIEDEHRLHETSKEPDVSLGSTWLSDFPQAWAETGGMGLAVRQAPLIIPLKATSTPVSIKQYPMSQEARLGIKPHIQRLLDQGI | |
| | LVPCQSPWNTPLLPVKKPGTNDYRPVQDLREVNKRVEDIHPTVPNPYNLLSGLPPSHQWYTVLDLKDAFFCLRLHPTSQPLFAFEWRDPEMGISGQLTWT | |
| | RLPQGFKNSPTLFNEALHRDLADFRIQHPDLILLQYVDDLLLAATSELDCQQGTRALLQTLGNLGYRASAKKAQICQKQVKYLGYLLKEGQRWLTEARKETV | |
| | MGQPTPKTPRQLREFLGKAGFCRLFIPGFAEMAAPLYPLTKPGTLFNWGPDQQKAYQEIKQALLTAPALGLPDLTKPFELFVDEKQGYAKGVLTQKLGPWR | |
| | RPVAYLSKKLDPVAAGWPPCLRMVAAIAVLTKDAGKLTMGQPLVILAPHAVEALVKQPPDRWLSNARMTHYQALLLDTDRVQFGPVVALNPATLLPLPEE | |
| | GLQHNCLDILAEAHGTRPDLTDQPLPDADHTWYTDGSSLLQEGQRKAGAAVTTETEVIWAKALPAGTSAQRAELIALTQALKMAEGKKLNVYTDSRYAFAT | |
| | AHIHGEIYRRRGWLTSEGKEIKNKDEILALLKALFLPKRLSIIHCPGHQKGHSAEARGNRMADQAARKAAITETPDTSTLLKRTADGSEFESPKKKAKVE | |
| PL12007 | MPAAKRVKLDGGDKKYSIGLDIGTNSVGWAVITDEYKVPSKKFKVLGNTDRHSIKKNLIGALLFDSGETAEATRLKRTARRRYTRRKNRICYLQEIFSNEMAKV | 16,067 |
| | DDSFFHRLEESFLVEEDKKHERHPIFGNIVDEVAYHEKYPTIYHLRKKLVDSTDKADLRLIYLALAHMIKFRGHFLIEGDLNPDNSDVDKLFIQLVQTYNQLFEE | |
| | NPINASGVDAKAILSARLSKSRRLENLIAQLPGEKKNGLFGNLIALSLGLTPNFKSNFDLAEDAKLQLSKDTYDDDLDNLLAQIGDQYADLFLAAKNLSDAILLS | |
| | DILRVNTEITKAPLSASMIKRYDEHHQDLTLLKALVRQQLPEKYKEIFFDQSKNGYAGYIDGGASQEEFYKFIKPILEKMDGTEELLVKLNREDLLRKQRTFDNG | |
| | SIPHQIHLGELHAILRRQEDFYPFLKDNREKIEKILTFRIPYYVGPLARGNSRFAWMTRKSEETITPWNFEEVVDKGASAQSFIERMTNFDKNLPNEKVLPKHSL | |
| | LYEYFTVYNELTKVKYVTEGMRKPAFLSGEQKKAIVDLLFKTNRKVTVKQLKEDYFKKIECFDSVEISGVEDRFNASLGTYHDLLKIIKDKDFLDNEENEDILEDIV | |
| | LTLTLFEDREMIEERLKTYAHLFDDKVMKQLKRRRYTGWGRLSRKLINGIRDKQSGKTILDFLKSDGFANRNFMQLIHDDSLTFKEDIQKAQVSGQGDSLHE | |
| | HIANLAGSPAIKKGILQTVKVVDELVKVMGRHKPENIVIEMARENQTTQKGQKNSRERMKRIEEGIKELGSQILKEHPVENTQLQNEKLYLYYLQNGRDMYV | |
| | DQELDINRLSDYDVDHIVPQSFLKDDSIDNKVLTRSDKARGKSDNVPSEEVVKKMKNYWRQLLNAKLITQRKFDNLTKAERGGLSELDKAGFIKRQLVETRQI | |
| | TKHVAQILDSRMNTKYDENDKLIREVKVITLKSKLVSDFRKDFQFYKVREINNYHHAHDAYLNAVVGTALIKKYPKLESEFVYGDYKVYDVRKMIAKSEQEIGK | |
| | ATAKYFFYSNIMNFFKTEITLANGEIRKRPLIETNGETGEIVWDKGRDFATVRKVLSMPQVNIVKKTEVQTGGFSKESILPKRNSDKLIARKKDWDPKKYGGFD | |
| | SPTVAYSVLVVAKVEKGKSKKLKSVKELLGITIMERSSFEKNPIDFLEAKGYKEVKKDLIIKLPKYSLFELENGRKRMLASAGELQKGNELALPSKYVNFLYLASHY | |
| | EKLKGSPEDNEQKQLFVEQHKHYLDEIIEQISEFSKRVILADANLDKVLSAYNKHRDKPIREQAENIIHLFTLTNLGAPAAFKYFDTTIDRKRYTSTKEVLDATLIH | |
| | QSITGLYETRIDLSQLGGDSGGSSGGSSGSETPGTSESATPESSGGSSGGSSMASNFTQFVLVDNGGTGDVTVAPSNFANGIAEWISSNSRSQAYKVTCSVR | |
| | QSSAQNRKYTIKVEVPKGAWRSYLNMELTIPIFATNSDCELIVKAMQGLLKDGNPIPSAIAANSGIYGGSGGSMASNFTQFVLVDNGGTGDVTVAPSNFAN | |
| | GIAEWISSNSRSQAYKVTCSVRQSSAQNRKYTIKVEVPKGAWRSYLNMELTIPIFATNSDCELIVKAMQGLLKDGNPIPSAIAANSGIYGSSGSSGSSGSSGSS | |
| | GSSTLNIEDEHRLHETSKEPDVSLGSTWLSDFPQAWAETGGMGLAVRQAPLIIPLKATSTPVSIKQYPMSQEARLGIKPHIQRLLDQGILVPCQSPWNTPLLP | |
| | VKKPGTNDYRPVQDLREVNKRVEDIHPTVPNPYNLLSGLPPSHQWYTVLDLKDAFFCLRLHPTSQPLFAFEWRDPEMGISGQLTWTRLPQGFKNSPTLFNE | |
| | ALHRDLADFRIQHPDLILLQYVDDLLLAATSELDCQQGTRALLQTLGNLGYRASAKKAQICQKQVKYLGYLLKEGQRWLTEARKETVMGQPTPKTPRQLREF | |
| | LGKAGFCRLFIPGFAEMAAPLYPLTKPGTLFNWGPDQQKAYQEIKQALLTAPALGLPDLTKPFELFVDEKQGYAKGVLTQKLGPWRRPVAYLSKKLDPVAAG | |
| | WPPCLRMVAAIAVLTKDAGKLTMGQPLVILAPHAVEALVKQPPDRWLSNARMTHYQALLLDTDRVQFGPVVALNPATLLPLPEEGLQHNCLDILAEAHGT | |
| | RPDLTDQPLPDADHTWYTDGSSLLQEGQRKAGAAVTTETEVIWAKALPAGTSAQRAELIALTQALKMAEGKKLNVYTDSRYAFATAHIHGEIYRRRGWLTS | |
| | EGKEIKNKDEILALLKALFLPKRLSIIHCPGHQKGHSAEARGNRMADQAARKAAITETPDTSTLLKRTADGSEFESPKKKAKVE | |
| PL12008 | MPAAKRVKLDGGDKKYSIGLDIGTNSVGWAVITDEYKVPSKKFKVLGNTDRHSIKKNLIGALLFDSGETAEATRLKRTARRRYTRRKNRICYLQEIFSNEMAKV | 16,068 |
| | DDSFFHRLEESFLVEEDKKHERHPIFGNIVDEVAYHEKYPTIYHLRKKLVDSTDKADLRLIYLALAHMIKFRGHFLIEGDLNPDNSDVDKLFIQLVQTYNQLFEE | |
| | NPINASGVDAKAILSARLSKSRRLENLIAQLPGEKKNGLFGNLIALSLGLTPNFKSNFDLAEDAKLQLSKDTYDDDLDNLLAQIGDQYADLFLAAKNLSDAILLS | |
| | DILRVNTEITKAPLSASMIKRYDEHHQDLTLLKALVRQQLPEKYKEIFFDQSKNGYAGYIDGGASQEEFYKFIKPILEKMDGTEELLVKLNREDLLRKQRTFDNG | |
| | SIPHQIHLGELHAILRRQEDFYPFLKDNREKIEKILTFRIPYYVGPLARGNSRFAWMTRKSEETITPWNFEEVVDKGASAQSFIERMTNFDKNLPNEKVLPKHSL | |
| | LYEYFTVYNELTKVKYVTEGMRKPAFLSGEQKKAIVDLLFKTNRKVTVKQLKEDYFKKIECFDSVEISGVEDRFNASLGTYHDLLKIIKDKDFLDNEENEDILEDIV | |
| | LTLTLFEDREMIEERLKTYAHLFDDKVMKQLKRRRYTGWGRLSRKLINGIRDKQSGKTILDFLKSDGFANRNFMQLIHDDSLTFKEDIQKAQVSGQGDSLHE | |
| | HIANLAGSPAIKKGILQTVKVVDELVKVMGRHKPENIVIEMARENQTTQKGQKNSRERMKRIEEGIKELGSQILKEHPVENTQLQNEKLYLYYLQNGRDMYV | |
| | DQELDINRLSDYDVDHIVPQSFLKDDSIDNKVLTRSDKARGKSDNVPSEEVVKKMKNYWRQLLNAKLITQRKFDNLTKAERGGLSELDKAGFIKRQLVETRQI | |
| | TKHVAQILDSRMNTKYDENDKLIREVKVITLKSKLVSDFRKDFQFYKVREINNYHHAHDAYLNAVVGTALIKKYPKLESEFVYGDYKVYDVRKMIAKSEQEIGK | |
| | ATAKYFFYSNIMNFFKTEITLANGEIRKRPLIETNGETGEIVWDKGRDFATVRKVLSMPQVNIVKKTEVQTGGFSKESILPKRNSDKLIARKKDWDPKKYGGFD | |
| | SPTVAYSVLVVAKVEKGKSKKLKSVKELLGITIMERSSFEKNPIDFLEAKGYKEVKKDLIIKLPKYSLFELENGRKRMLASAGELQKGNELALPSKYVNFLYLASHY | |
| | EKLKGSPEDNEQKQLFVEQHKHYLDEIIEQISEFSKRVILADANLDKVLSAYNKHRDKPIREQAENIIHLFTLTNLGAPAAFKYFDTTIDRKRYTSTKEVLDATLIH | |
| | QSITGLYETRIDLSQLGGDSGGSSGGSSGSETPGTSESATPESSGGSSGGSSMASNFTQFVLVDNGGTGDVTVAPSNFANGIAEWISSNSRSQAYKVTCSVR | |
| | QSSAQNRKYTIKVEVPKGAWRSYLNMELTIPIFATNSDCELIVKAMQGLLKDGNPIPSAIAANSGIYGGSGGSMASNFTQFVLVDNGGTGDVTVAPSNFAN | |
| | GIAEWISSNSRSQAYKVTCSVRQSSAQNRKYTIKVEVPKGAWRSYLNMELTIPIFATNSDCELIVKAMQGLLKDGNPIPSAIAANSGIYGSSGGGEAAAKTLNI | |
| | EDEHRLHETSKEPDVSLGSTWLSDFPQAWAETGGMGLAVRQAPLIIPLKATSTPVSIKQYPMSQEARLGIKPHIQRLLDQGILVPCQSPWNTPLLPVKKPGT | |
| | NDYRPVQDLREVNKRVEDIHPTVPNPYNLLSGLPPSHQWYTVLDLKDAFFCLRLHPTSQPLFAFEWRDPEMGISGQLTWTRLPQGFKNSPTLFNEALHRDL | |
| | ADFRIQHPDLILLQYVDDLLLAATSELDCQQGTRALLQTLGNLGYRASAKKAQICQKQVKYLGYLLKEGQRWLTEARKETVMGQPTPKTPRQLREFLGKAGF | |
| | CRLFIPGFAEMAAPLYPLTKPGTLFNWGPDQQKAYQEIKQALLTAPALGLPDLTKPFELFVDEKQGYAKGVLTQKLGPWRRPVAYLSKKLDPVAAGWPPCL | |
| | RMVAAIAVLTKDAGKLTMGQPLVILAPHAVEALVKQPPDRWLSNARMTHYQALLLDTDRVQFGPVVALNPATLLPLPEEGLQHNCLDILAEAHGTRPDLT | |
| | DQPLPDADHTWYTDGSSLLQEGQRKAGAAVTTETEVIWAKALPAGTSAQRAELIALTQALKMAEGKKLNVYTDSRYAFATAHIHGEIYRRRGWLTSEGKEI | |
| | KNKDEILALLKALFLPKRLSIIHCPGHQKGHSAEARGNRMADQAARKAAITETPDTSTLLKRTADGSEFESPKKKAKVE | |
| PL12009 | MPAAKRVKLDGGDKKYSIGLDIGTNSVGWAVITDEYKVPSKKFKVLGNTDRHSIKKNLIGALLFDSGETAEATRLKRTARRRYTRRKNRICYLQEIFSNEMAKV | 16,069 |
| | DDSFFHRLEESFLVEEDKKHERHPIFGNIVDEVAYHEKYPTIYHLRKKLVDSTDKADLRLIYLALAHMIKFRGHFLIEGDLNPDNSDVDKLFIQLVQTYNQLFEE | |
| | NPINASGVDAKAILSARLSKSRRLENLIAQLPGEKKNGLFGNLIALSLGLTPNFKSNFDLAEDAKLQLSKDTYDDDLDNLLAQIGDQYADLFLAAKNLSDAILLS | |
| | DILRVNTEITKAPLSASMIKRYDEHHQDLTLLKALVRQQLPEKYKEIFFDQSKNGYAGYIDGGASQEEFYKFIKPILEKMDGTEELLVKLNREDLLRKQRTFDNG | |
| | SIPHQIHLGELHAILRRQEDFYPFLKDNREKIEKILTFRIPYYVGPLARGNSRFAWMTRKSEETITPWNFEEVVDKGASAQSFIERMTNFDKNLPNEKVLPKHSL | |
| | LYEYFTVYNELTKVKYVTEGMRKPAFLSGEQKKAIVDLLFKTNRKVTVKQLKEDYFKKIECFDSVEISGVEDRFNASLGTYHDLLKIIKDKDFLDNEENEDILEDIV | |
| | LTLTLFEDREMIEERLKTYAHLFDDKVMKQLKRRRYTGWGRLSRKLINGIRDKQSGKTILDFLKSDGFANRNFMQLIHDDSLTFKEDIQKAQVSGQGDSLHE | |
| | HIANLAGSPAIKKGILQTVKVVDELVKVMGRHKPENIVIEMARENQTTQKGQKNSRERMKRIEEGIKELGSQILKEHPVENTQLQNEKLYLYYLQNGRDMYV | |
| | DQELDINRLSDYDVDHIVPQSFLKDDSIDNKVLTRSDKARGKSDNVPSEEVVKKMKNYWRQLLNAKLITQRKFDNLTKAERGGLSELDKAGFIKRQLVETRQI | |
| | TKHVAQILDSRMNTKYDENDKLIREVKVITLKSKLVSDFRKDFQFYKVREINNYHHAHDAYLNAVVGTALIKKYPKLESEFVYGDYKVYDVRKMIAKSEQEIGK | |
| | ATAKYFFYSNIMNFFKTEITLANGEIRKRPLIETNGETGEIVWDKGRDFATVRKVLSMPQVNIVKKTEVQTGGFSKESILPKRNSDKLIARKKDWDPKKYGGFD | |
| | SPTVAYSVLVVAKVEKGKSKKLKSVKELLGITIMERSSFEKNPIDFLEAKGYKEVKKDLIIKLPKYSLFELENGRKRMLASAGELQKGNELALPSKYVNFLYLASHY | |
| | EKLKGSPEDNEQKQLFVEQHKHYLDEIIEQISEFSKRVILADANLDKVLSAYNKHRDKPIREQAENIIHLFTLTNLGAPAAFKYFDTTIDRKRYTSTKEVLDATLIH | |
| | QSITGLYETRIDLSQLGGDSGGSSGGSSGSETPGTSESATPESSGGSSGGSSMASNFTQFVLVDNGGTGDVTVAPSNFANGIAEWISSNSRSQAYKVTCSVR | |
| | QSSAQNRKYTIKVEVPKGAWRSYLNMELTIPIFATNSDCELIVKAMQGLLKDGNPIPSAIAANSGIYGGSGGSMASNFTQFVLVDNGGTGDVTVAPSNFAN | |
| | GIAEWISSNSRSQAYKVTCSVRQSSAQNRKYTIKVEVPKGAWRSYLNMELTIPIFATNSDCELIVKAMQGLLKDGNPIPSAIAANSGIYGGGSGGGSGGGSG | |
| | GGSMASNFTQFVLVDNGGTGDVTVAPSNFANGIAEWISSNSRSQAYKVTCSVRQSSAQNRKYTIKVEVPKGAWRSYLNMELTIPIFATNSDCELIVKAMQ | |
| | GLLKDGNPIPSAIAANSGIYGGSGGSMASNFTQFVLVDNGGTGDVTVAPSNFANGIAEWISSNSRSQAYKVTCSVRQSSAQNRKYTIKVEVPKGAWRSYLN | |
| | MELTIPIFATNSDCELIVKAMQGLLKDGNPIPSAIAANSGIYAEAAAKEAAAKEAAAKEAAAKALEAEAAAKEAAAKEAAAKEAAAKATLNIEDEHRLHETSKE | |
| | PDVSLGSTWLSDFPQAWAETGGMGLAVRQAPLIIPLKATSTPVSIKQYPMSQEARLGIKPHIQRLLDQGILVPCQSPWNTPLLPVKKPGTNDYRPVQDLRE | |
| | VNKRVEDIHPTVPNPYNLLSGLPPSHQWYTVLDLKDAFFCLRLHPTSQPLFAFEWRDPEMGISGQLTWTRLPQGFKNSPTLFNEALHRDLADFRIQHPDLIL | |
| | LQYVDDLLLAATSELDCQQGTRALLQTLGNLGYRASAKKAQICQKQVKYLGYLLKEGQRWLTEARKETVMGQPTPKTPRQLREFLGKAGFCRLFIPGFAEM | |
| | AAPLYPLTKPGTLFNWGPDQQKAYQEIKQALLTAPALGLPDLTKPFELFVDEKQGYAKGVLTQKLGPWRRPVAYLSKKLDPVAAGWPPCLRMVAAIAVLTK | |
| | DAGKLTMGQPLVILAPHAVEALVKQPPDRWLSNARMTHYQALLLDTDRVQFGPVVALNPATLLPLPEEGLQHNCLDILAEAHGTRPDLTDQPLPDADHT | |
| | WYTDGSSLLQEGQRKAGAAVTTETEVIWAKALPAGTSAQRAELIALTQALKMAEGKKLNVYTDSRYAFATAHIHGEIYRRRGWLTSEGKEIKNKDEILALLKA | |
| | LFLPKRLSIIHCPGHQKGHSAEARGNRMADQAARKAAITETPDTSTLLKRTADGSEFESPKKKAKVE | |
| PL12010 | MPAAKRVKLDGGDKKYSIGLDIGTNSVGWAVITDEYKVPSKKFKVLGNTDRHSIKKNLIGALLFDSGETAEATRLKRTARRRYTRRKNRICYLQEIFSNEMAKV | 16,070 |
| | DDSFFHRLEESFLVEEDKKHERHPIFGNIVDEVAYHEKYPTIYHLRKKLVDSTDKADLRLIYLALAHMIKFRGHFLIEGDLNPDNSDVDKLFIQLVQTYNQLFEE | |
| | NPINASGVDAKAILSARLSKSRRLENLIAQLPGEKKNGLFGNLIALSLGLTPNFKSNFDLAEDAKLQLSKDTYDDDLDNLLAQIGDQYADLFLAAKNLSDAILLS | |
| | DILRVNTEITKAPLSASMIKRYDEHHQDLTLLKALVRQQLPEKYKEIFFDQSKNGYAGYIDGGASQEEFYKFIKPILEKMDGTEELLVKLNREDLLRKQRTFDNG | |
| | SIPHQIHLGELHAILRRQEDFYPFLKDNREKIEKILTFRIPYYVGPLARGNSRFAWMTRKSEETITPWNFEEVVDKGASAQSFIERMTNFDKNLPNEKVLPKHSL | |
| | LYEYFTVYNELTKVKYVTEGMRKPAFLSGEQKKAIVDLLFKTNRKVTVKQLKEDYFKKIECFDSVEISGVEDRFNASLGTYHDLLKIIKDKDFLDNEENEDILEDIV | |
| | LTLTLFEDREMIEERLKTYAHLFDDKVMKQLKRRRYTGWGRLSRKLINGIRDKQSGKTILDFLKSDGFANRNFMQLIHDDSLTFKEDIQKAQVSGQGDSLHE | |
| | HIANLAGSPAIKKGILQTVKVVDELVKVMGRHKPENIVIEMARENQTTQKGQKNSRERMKRIEEGIKELGSQILKEHPVENTQLQNEKLYLYYLQNGRDMYV | |
| | DQELDINRLSDYDVDHIVPQSFLKDDSIDNKVLTRSDKARGKSDNVPSEEVVKKMKNYWRQLLNAKLITQRKFDNLTKAERGGLSELDKAGFIKRQLVETRQI | |
| | TKHVAQILDSRMNTKYDENDKLIREVKVITLKSKLVSDFRKDFQFYKVREINNYHHAHDAYLNAVVGTALIKKYPKLESEFVYGDYKVYDVRKMIAKSEQEIGK | |
| | ATAKYFFYSNIMNFFKTEITLANGEIRKRPLIETNGETGEIVWDKGRDFATVRKVLSMPQVNIVKKTEVQTGGFSKESILPKRNSDKLIARKKDWDPKKYGGFD | |
| | SPTVAYSVLVVAKVEKGKSKKLKSVKELLGITIMERSSFEKNPIDFLEAKGYKEVKKDLIIKLPKYSLFELENGRKRMLASAGELQKGNELALPSKYVNFLYLASHY | |
| | EKLKGSPEDNEQKQLFVEQHKHYLDEIIEQISEFSKRVILADANLDKVLSAYNKHRDKPIREQAENIIHLFTLTNLGAPAAFKYFDTTIDRKRYTSTKEVLDATLIH | |
| | QSITGLYETRIDLSQLGGDSGGSSGGSSGSETPGTSESATPESSGGSSGGSSMASNFTQFVLVDNGGTGDVTVAPSNFANGIAEWISSNSRSQAYKVTCSVR | |
| | QSSAQNRKYTIKVEVPKGAWRSYLNMELTIPIFATNSDCELIVKAMQGLLKDGNPIPSAIAANSGIYGGSGGSMASNFTQFVLVDNGGTGDVTVAPSNFAN | |
| | GIAEWISSNSRSQAYKVTCSVRQSSAQNRKYTIKVEVPKGAWRSYLNMELTIPIFATNSDCELIVKAMQGLLKDGNPIPSAIAANSGIYGGGSGGGSGGGSG | |
| | GGSMASNFTQFVLVDNGGTGDVTVAPSNFANGIAEWISSNSRSQAYKVTCSVRQSSAQNRKYTIKVEVPKGAWRSYLNMELTIPIFATNSDCELIVKAMQ | |
| | GLLKDGNPIPSAIAANSGIYGGSGGSMASNFTQFVLVDNGGTGDVTVAPSNFANGIAEWISSNSRSQAYKVTCSVRQSSAQNRKYTIKVEVPKGAWRSYLN | |
| | MELTIPIFATNSDCELIVKAMQGLLKDGNPIPSAIAANSGIYSGGSSGGSSGSETPGTSESATPESSGGSSGGSSTLNIEDEHRLHETSKEPDVSLGSTWLSDFP | |
| | QAWAETGGMGLAVRQAPLIIPLKATSTPVSIKQYPMSQEARLGIKPHIQRLLDQGILVPCQSPWNTPLLPVKKPGTNDYRPVQDLREVNKRVEDIHPTVPNP | |
| | YNLLSGLPPSHQWYTVLDLKDAFFCLRLHPTSQPLFAFEWRDPEMGISGQLTWTRLPQGFKNSPTLFNEALHRDLADFRIQHPDLILLQYVDDLLLAATSELD | |
| | CQQGTRALLQTLGNLGYRASAKKAQICQKQVKYLGYLLKEGQRWLTEARKETVMGQPTPKTPRQLREFLGKAGFCRLFIPGFAEMAAPLYPLTKPGTLFNW | |
| | GPDQQKAYQEIKQALLTAPALGLPDLTKPFELFVDEKQGYAKGVLTQKLGPWRRPVAYLSKKLDPVAAGWPPCLRMVAAIAVLTKDAGKLTMGQPLVILAP | |
| | HAVEALVKQPPDRWLSNARMTHYQALLLDTDRVQFGPVVALNPATLLPLPEEGLQHNCLDILAEAHGTRPDLTDQPLPDADHTWYTDGSSLLQEGQRKA | |
| | GAAVTTETEVIWAKALPAGTSAQRAELIALTQALKMAEGKKLNVYTDSRYAFATAHIHGEIYRRRGWLTSEGKEIKNKDEILALLKALFLPKRLSIIHCPGHQKG | |
| | HSAEARGNRMADQAARKAAITETPDTSTLLKRTADGSEFESPKKKAKVE | |
| PL12011 | MPAAKRVKLDGGDKKYSIGLDIGTNSVGWAVITDEYKVPSKKFKVLGNTDRHSIKKNLIGALLFDSGETAEATRLKRTARRRYTRRKNRICYLQEIFSNEMAKV | 16,071 |
| | DDSFFHRLEESFLVEEDKKHERHPIFGNIVDEVAYHEKYPTIYHLRKKLVDSTDKADLRLIYLALAHMIKFRGHFLIEGDLNPDNSDVDKLFIQLVQTYNQLFEE | |
| | NPINASGVDAKAILSARLSKSRRLENLIAQLPGEKKNGLFGNLIALSLGLTPNFKSNFDLAEDAKLQLSKDTYDDDLDNLLAQIGDQYADLFLAAKNLSDAILLS | |
| | DILRVNTEITKAPLSASMIKRYDEHHQDLTLLKALVRQQLPEKYKEIFFDQSKNGYAGYIDGGASQEEFYKFIKPILEKMDGTEELLVKLNREDLLRKQRTFDNG | |
| | SIPHQIHLGELHAILRRQEDFYPFLKDNREKIEKILTFRIPYYVGPLARGNSRFAWMTRKSEETITPWNFEEVVDKGASAQSFIERMTNFDKNLPNEKVLPKHSL | |
| | LYEYFTVYNELTKVKYVTEGMRKPAFLSGEQKKAIVDLLFKTNRKVTVKQLKEDYFKKIECFDSVEISGVEDRFNASLGTYHDLLKIIKDKDFLDNEENEDILEDIV | |
| | LTLTLFEDREMIEERLKTYAHLFDDKVMKQLKRRRYTGWGRLSRKLINGIRDKQSGKTILDFLKSDGFANRNFMQLIHDDSLTFKEDIQKAQVSGQGDSLHE | |
| | HIANLAGSPAIKKGILQTVKVVDELVKVMGRHKPENIVIEMARENQTTQKGQKNSRERMKRIEEGIKELGSQILKEHPVENTQLQNEKLYLYYLQNGRDMYV | |
| | DQELDINRLSDYDVDHIVPQSFLKDDSIDNKVLTRSDKARGKSDNVPSEEVVKKMKNYWRQLLNAKLITQRKFDNLTKAERGGLSELDKAGFIKRQLVETRQI | |
| | TKHVAQILDSRMNTKYDENDKLIREVKVITLKSKLVSDFRKDFQFYKVREINNYHHAHDAYLNAVVGTALIKKYPKLESEFVYGDYKVYDVRKMIAKSEQEIGK | |
| | ATAKYFFYSNIMNFFKTEITLANGEIRKRPLIETNGETGEIVWDKGRDFATVRKVLSMPQVNIVKKTEVQTGGFSKESILPKRNSDKLIARKKDWDPKKYGGFD | |
| | SPTVAYSVLVVAKVEKGKSKKLKSVKELLGITIMERSSFEKNPIDFLEAKGYKEVKKDLIIKLPKYSLFELENGRKRMLASAGELQKGNELALPSKYVNFLYLASHY | |
| | EKLKGSPEDNEQKQLFVEQHKHYLDEIIEQISEFSKRVILADANLDKVLSAYNKHRDKPIREQAENIIHLFTLTNLGAPAAFKYFDTTIDRKRYTSTKEVLDATLIH | |
| | QSITGLYETRIDLSQLGGDSGGSSGGSSGSETPGTSESATPESSGGSSGGSSMASNFTQFVLVDNGGTGDVTVAPSNFANGIAEWISSNSRSQAYKVTCSVR | |
| | QSSAQNRKYTIKVEVPKGAWRSYLNMELTIPIFATNSDCELIVKAMQGLLKDGNPIPSAIAANSGIYGGSGGSMASNFTQFVLVDNGGTGDVTVAPSNFAN | |
| | GIAEWISSNSRSQAYKVTCSVRQSSAQNRKYTIKVEVPKGAWRSYLNMELTIPIFATNSDCELIVKAMQGLLKDGNPIPSAIAANSGIYGGGSGGGSGGGSG | |
| | GGSMASNFTQFVLVDNGGTGDVTVAPSNFANGIAEWISSNSRSQAYKVTCSVRQSSAQNRKYTIKVEVPKGAWRSYLNMELTIPIFATNSDCELIVKAMQ | |
| | GLLKDGNPIPSAIAANSGIYGGSGGSMASNFTQFVLVDNGGTGDVTVAPSNFANGIAEWISSNSRSQAYKVTCSVRQSSAQNRKYTIKVEVPKGAWRSYLN | |
| | MELTIPIFATNSDCELIVKAMQGLLKDGNPIPSAIAANSGIYGSSGSSGSSGSSGSSGSSTLNIEDEHRLHETSKEPDVSLGSTWLSDFPQAWAETGGMGLAV | |
| | RQAPLIIPLKATSTPVSIKQYPMSQEARLGIKPHIQRLLDQGILVPCQSPWNTPLLPVKKPGTNDYRPVQDLREVNKRVEDIHPTVPNPYNLLSGLPPSHQWY | |
| | TVLDLKDAFFCLRLHPTSQPLFAFEWRDPEMGISGQLTWTRLPQGFKNSPTLFNEALHRDLADFRIQHPDLILLQYVDDLLLAATSELDCQQGTRALLQTLGN | |
| | LGYRASAKKAQICQKQVKYLGYLLKEGQRWLTEARKETVMGQPTPKTPRQLREFLGKAGFCRLFIPGFAEMAAPLYPLTKPGTLFNWGPDQQKAYQEIKQA | |
| | LLTAPALGLPDLTKPFELFVDEKQGYAKGVLTQKLGPWRRPVAYLSKKLDPVAAGWPPCLRMVAAIAVLTKDAGKLTMGQPLVILAPHAVEALVKQPPDR | |
| | WLSNARMTHYQALLLDTDRVQFGPVVALNPATLLPLPEEGLQHNCLDILAEAHGTRPDLTDQPLPDADHTWYTDGSSLLQEGQRKAGAAVTTETEVIWAK | |
| | ALPAGTSAQRAELIALTQALKMAEGKKLNVYTDSRYAFATAHIHGEIYRRRGWLTSEGKEIKNKDEILALLKALFLPKRLSIIHCPGHQKGHSAEARGNRMAD | |
| | QAARKAAITETPDTSTLLKRTADGSEFESPKKKAKVE | |
| PL12012 | MPAAKRVKLDGGDKKYSIGLDIGTNSVGWAVITDEYKVPSKKFKVLGNTDRHSIKKNLIGALLFDSGETAEATRLKRTARRRYTRRKNRICYLQEIFSNEMAKV | 16,072 |
| | DDSFFHRLEESFLVEEDKKHERHPIFGNIVDEVAYHEKYPTIYHLRKKLVDSTDKADLRLIYLALAHMIKFRGHFLIEGDLNPDNSDVDKLFIQLVQTYNQLFEE | |
| | NPINASGVDAKAILSARLSKSRRLENLIAQLPGEKKNGLFGNLIALSLGLTPNFKSNFDLAEDAKLQLSKDTYDDDLDNLLAQIGDQYADLFLAAKNLSDAILLS | |
| | DILRVNTEITKAPLSASMIKRYDEHHQDLTLLKALVRQQLPEKYKEIFFDQSKNGYAGYIDGGASQEEFYKFIKPILEKMDGTEELLVKLNREDLLRKQRTFDNG | |
| | SIPHQIHLGELHAILRRQEDFYPFLKDNREKIEKILTFRIPYYVGPLARGNSRFAWMTRKSEETITPWNFEEVVDKGASAQSFIERMTNFDKNLPNEKVLPKHSL | |
| | LYEYFTVYNELTKVKYVTEGMRKPAFLSGEQKKAIVDLLFKTNRKVTVKQLKEDYFKKIECFDSVEISGVEDRFNASLGTYHDLLKIIKDKDFLDNEENEDILEDIV | |
| | LTLTLFEDREMIEERLKTYAHLFDDKVMKQLKRRRYTGWGRLSRKLINGIRDKQSGKTILDFLKSDGFANRNFMQLIHDDSLTFKEDIQKAQVSGQGDSLHE | |
| | HIANLAGSPAIKKGILQTVKVVDELVKVMGRHKPENIVIEMARENQTTQKGQKNSRERMKRIEEGIKELGSQILKEHPVENTQLQNEKLYLYYLQNGRDMYV | |
| | DQELDINRLSDYDVDHIVPQSFLKDDSIDNKVLTRSDKARGKSDNVPSEEVVKKMKNYWRQLLNAKLITQRKFDNLTKAERGGLSELDKAGFIKRQLVETRQI | |
| | TKHVAQILDSRMNTKYDENDKLIREVKVITLKSKLVSDFRKDFQFYKVREINNYHHAHDAYLNAVVGTALIKKYPKLESEFVYGDYKVYDVRKMIAKSEQEIGK | |
| | ATAKYFFYSNIMNFFKTEITLANGEIRKRPLIETNGETGEIVWDKGRDFATVRKVLSMPQVNIVKKTEVQTGGFSKESILPKRNSDKLIARKKDWDPKKYGGFD | |
| | SPTVAYSVLVVAKVEKGKSKKLKSVKELLGITIMERSSFEKNPIDFLEAKGYKEVKKDLIIKLPKYSLFELENGRKRMLASAGELQKGNELALPSKYVNFLYLASHY | |
| | EKLKGSPEDNEQKQLFVEQHKHYLDEIIEQISEFSKRVILADANLDKVLSAYNKHRDKPIREQAENIIHLFTLTNLGAPAAFKYFDTTIDRKRYTSTKEVLDATLIH | |
| | QSITGLYETRIDLSQLGGDSGGSSGGSSGSETPGTSESATPESSGGSSGGSSMASNFTQFVLVDNGGTGDVTVAPSNFANGIAEWISSNSRSQAYKVTCSVR | |
| | QSSAQNRKYTIKVEVPKGAWRSYLNMELTIPIFATNSDCELIVKAMQGLLKDGNPIPSAIAANSGIYGGSGGSMASNFTQFVLVDNGGTGDVTVAPSNFAN | |
| | GIAEWISSNSRSQAYKVTCSVRQSSAQNRKYTIKVEVPKGAWRSYLNMELTIPIFATNSDCELIVKAMQGLLKDGNPIPSAIAANSGIYGGGGGGSGGGSG | |
| | GGSMASNFTQFVLVDNGGTGDVTVAPSNFANGIAEWISSNSRSQAYKVTCSVRQSSAQNRKYTIKVEVPKGAWRSYLNMELTIPIFATNSDCELIVKAMQ | |
| | GLLKDGNPIPSAIAANSGIYGGSGGSMASNFTQFVLVDNGGTGDVTVAPSNFANGIAEWISSNSRSQAYKVTCSVRQSSAQNRKYTIKVEVPKGAWRSYLN | |
| | MELTIPIFATNSDCELIVKAMQGLLKDGNPIPSAIAANSGIYGSSGGGEAAAKTLNIEDEHRLHETSKEPDVSLGSTWLSDFPQAWAETGGMGLAVRQAPLII | |
| | PLKATSTPVSIKQYPMSQEARLGIKPHIQRLLDQGILVPCQSPWNTPLLPVKKPGTNDYRPVQDLREVNKRVEDIHPTVPNPYNLLSGLPPSHQWYTVLDLK | |
| | DAFFCLRLHPTSQPLFAFEWRDPEMGISGQLTWTRLPQGFKNSPTLFNEALHRDLADFRIQHPDLILLQYVDDLLLAATSELDCQQGTRALLQTLGNLGYRA | |
| | SAKKAQICQKQVKYLGYLLKEGQRWLTEARKETVMGQPTPKTPRQLREFLGKAGFCRLFIPGFAEMAAPLYPLTKPGTLFNWGPDQQKAYQEIKQALLTAP | |
| | ALGLPDLTKPFELFVDEKQGYAKGVLTQKLGPWRRPVAYLSKKLDPVAAGWPPCLRMVAAIAVLTKDAGKLTMGQPLVILAPHAVEALVKQPPDRWLSNA | |
| | RMTHYQALLLDTDRVQFGPVVALNPATLLPLPEEGLQHNCLDILAEAHGTRPDLTDQPLPDADHTWYTDGSSLLQEGQRKAGAAVTTETEVIWAKALPAG | |
| | TSAQRAELIALTQALKMAEGKKLNVYTDSRYAFATAHIHGEIYRRRGWLTSEGKEIKNKDEILALLKALFLPKRLSIIHCPGHQKGHSAEARGNRMADQAARK | |
| | AAITETPDTSTLLKRTADGSEFESPKKKAKVE | |
| PL12013 | MPAAKRVKLDGGDKKYSIGLDIGTNSVGWAVITDEYKVPSKKFKVLGNTDRHSIKKNLIGALLFDSGETAEATRLKRTARRRYTRRKNRICYLQEIFSNEMAKV | 16,073 |
| | DDSFFHRLEESFLVEEDKKHERHPIFGNIVDEVAYHEKYPTIYHLRKKLVDSTDKADLRLIYLALAHMIKFRGHFLIEGDLNPDNSDVDKLFIQLVQTYNQLFEE | |
| | NPINASGVDAKAILSARLSKSRRLENLIAQLPGEKKNGLFGNLIALSLGLTPNFKSNFDLAEDAKLQLSKDTYDDDLDNLLAQIGDQYADLFLAAKNLSDAILLS | |
| | DILRVNTEITKAPLSASMIKRYDEHHQDLTLLKALVRQQLPEKYKEIFFDQSKNGYAGYIDGGASQEEFYKFIKPILEKMDGTEELLVKLNREDLLRKQRTFDNG | |
| | SIPHQIHLGELHAILRRQEDFYPFLKDNREKIEKILTFRIPYYVGPLARGNSRFAWMTRKSEETITPWNFEEVVDKGASAQSFIERMTNFDKNLPNEKVLPKHSL | |
| | LYEYFTVYNELTKVKYVTEGMRKPAFLSGEQKKAIVDLLFKTNRKVTVKQLKEDYFKKIECFDSVEISGVEDRFNASLGTYHDLLKIIKDKDFLDNEENEDILEDIV | |
| | LTLTLFEDREMIEERLKTYAHLFDDKVMKQLKRRRYTGWGRLSRKLINGIRDKQSGKTILDFLKSDGFANRNFMQLIHDDSLTFKEDIQKAQVSGQGDSLHE | |
| | HIANLAGSPAIKKGILQTVKVVDELVKVMGRHKPENIVIEMARENQTTQKGQKNSRERMKRIEEGIKELGSQILKEHPVENTQLQNEKLYLYYLQNGRDMYV | |
| | DQELDINRLSDYDVDHIVPQSFLKDDSIDNKVLTRSDKARGKSDNVPSEEVVKKMKNYWRQLLNAKLITQRKFDNLTKAERGGLSELDKAGFIKRQLVETRQI | |
| | TKHVAQILDSRMNTKYDENDKLIREVKVITLKSKLVSDFRKDFQFYKVREINNYHHAHDAYLNAVVGTALIKKYPKLESEFVYGDYKVYDVRKMIAKSEQEIGK | |
| | ATAKYFFYSNIMNFFKTEITLANGEIRKRPLIETNGETGEIVWDKGRDFATVRKVLSMPQVNIVKKTEVQTGGFSKESILPKRNSDKLIARKKDWDPKKYGGFD | |
| | SPTVAYSVLVVAKVEKGKSKKLKSVKELLGITIMERSSFEKNPIDFLEAKGYKEVKKDLIIKLPKYSLFELENGRKRMLASAGELQKGNELALPSKYVNFLYLASHY | |
| | EKLKGSPEDNEQKQLFVEQHKHYLDEIIEQISEFSKRVILADANLDKVLSAYNKHRDKPIREQAENIIHLFTLTNLGAPAAFKYFDTTIDRKRYTSTKEVLDATLIH | |
| | QSITGLYETRIDLSQLGGDGSSGSSGSSGSSGSSGSSMASNFTQFVLVDNGGTGDVTVAPSNFANGIAEWISSNSRSQAYKVTCSVRQSSAQNRKYTIKVEV | |
| | PKGAWRSYLNMELTIPIFATNSDCELIVKAMQGLLKDGNPIPSAIAANSGIYAEAAAKEAAAKEAAAKEAAAKALEAEAAAKEAAAKEAAAKEAAAKATLNIE | |
| | DEHRLHETSKEPDVSLGSTWLSDFPQAWAETGGMGLAVRQAPLIIPLKATSTPVSIKQYPMSQEARLGIKPHIQRLLDQGILVPCQSPWNTPLLPVKKPGTN | |
| | DYRPVQDLREVNKRVEDIHPTVPNPYNLLSGLPPSHQWYTVLDLKDAFFCLRLHPTSQPLFAFEWRDPEMGISGQLTWTRLPQGFKNSPTLFNEALHRDLA | |
| | DFRIQHPDLILLQYVDDLLLAATSELDCQQGTRALLQTLGNLGYRASAKKAQICQKQVKYLGYLLKEGQRWLTEARKETVMGQPTPKTPRQLREFLGKAGFC | |
| | RLFIPGFAEMAAPLYPLTKPGTLFNWGPDQQKAYQEIKQALLTAPALGLPDLTKPFELFVDEKQGYAKGVLTQKLGPWRRPVAYLSKKLDPVAAGWPPCLR | |
| | MVAAIAVLTKDAGKLTMGQPLVILAPHAVEALVKQPPDRWLSNARMTHYQALLLDTDRVQFGPVVALNPATLLPLPEEGLQHNCLDILAEAHGTRPDLTD | |
| | QPLPDADHTWYTDGSSLLQEGQRKAGAAVTTETEVIWAKALPAGTSAQRAELIALTQALKMAEGKKLNVYTDSRYAFATAHIHGEIYRRRGWLTSEGKEIK | |
| | NKDEILALLKALFLPKRLSIIHCPGHQKGHSAEARGNRMADQAARKAAITETPDTSTLLKRTADGSEFESPKKKAKVE | |
| PL12014 | MPAAKRVKLDGGDKKYSIGLDIGTNSVGWAVITDEYKVPSKKFKVLGNTDRHSIKKNLIGALLFDSGETAEATRLKRTARRRYTRRKNRICYLQEIFSNEMAKV | 16,074 |
| | DDSFFHRLEESFLVEEDKKHERHPIFGNIVDEVAYHEKYPTIYHLRKKLVDSTDKADLRLIYLALAHMIKFRGHFLIEGDLNPDNSDVDKLFIQLVQTYNQLFEE | |
| | NPINASGVDAKAILSARLSKSRRLENLIAQLPGEKKNGLFGNLIALSLGLTPNFKSNFDLAEDAKLQLSKDTYDDDLDNLLAQIGDQYADLFLAAKNLSDAILLS | |
| | DILRVNTEITKAPLSASMIKRYDEHHQDLTLLKALVRQQLPEKYKEIFFDQSKNGYAGYIDGGASQEEFYKFIKPILEKMDGTEELLVKLNREDLLRKQRTFDNG | |
| | SIPHQIHLGELHAILRRQEDFYPFLKDNREKIEKILTFRIPYYVGPLARGNSRFAWMTRKSEETITPWNFEEVVDKGASAQSFIERMTNFDKNLPNEKVLPKHSL | |
| | LYEYFTVYNELTKVKYVTEGMRKPAFLSGEQKKAIVDLLFKTNRKVTVKQLKEDYFKKIECFDSVEISGVEDRFNASLGTYHDLLKIIKDKDFLDNEENEDILEDIV | |
| | LTLTLFEDREMIEERLKTYAHLFDDKVMKQLKRRRYTGWGRLSRKLINGIRDKQSGKTILDFLKSDGFANRNFMQLIHDDSLTFKEDIQKAQVSGQGDSLHE | |
| | HIANLAGSPAIKKGILQTVKVVDELVKVMGRHKPENIVIEMARENQTTQKGQKNSRERMKRIEEGIKELGSQILKEHPVENTQLQNEKLYLYYLQNGRDMYV | |
| | DQELDINRLSDYDVDHIVPQSFLKDDSIDNKVLTRSDKARGKSDNVPSEEVVKKMKNYWRQLLNAKLITQRKFDNLTKAERGGLSELDKAGFIKRQLVETRQI | |
| | TKHVAQILDSRMNTKYDENDKLIREVKVITLKSKLVSDFRKDFQFYKVREINNYHHAHDAYLNAVVGTALIKKYPKLESEFVYGDYKVYDVRKMIAKSEQEIGK | |
| | ATAKYFFYSNIMNFFKTEITLANGEIRKRPLIETNGETGEIVWDKGRDFATVRKVLSMPQVNIVKKTEVQTGGFSKESILPKRNSDKLIARKKDWDPKKYGGFD | |
| | SPTVAYSVLVVAKVEKGKSKKLKSVKELLGITIMERSSFEKNPIDFLEAKGYKEVKKDLIIKLPKYSLFELENGRKRMLASAGELQKGNELALPSKYVNFLYLASHY | |
| | EKLKGSPEDNEQKQLFVEQHKHYLDEIIEQISEFSKRVILADANLDKVLSAYNKHRDKPIREQAENIIHLFTLTNLGAPAAFKYFDTTIDRKRYTSTKEVLDATLIH | |
| | QSITGLYETRIDLSQLGGDGSSGSSGSSGSSGSSGSSMASNFTQFVLVDNGGTGDVTVAPSNFANGIAEWISSNSRSQAYKVTCSVRQSSAQNRKYTIKVEV | |
| | PKGAWRSYLNMELTIPIFATNSDCELIVKAMQGLLKDGNPIPSAIAANSGIYSGGSSGGSSGSETPGTSESATPESSGGSSGGSSTLNIEDEHRLHETSKEPDVS | |
| | LGSTWLSDFPQAWAETGGMGLAVRQAPLIIPLKATSTPVSIKQYPMSQEARLGIKPHIQRLLDQGILVPCQSPWNTPLLPVKKPGTNDYRPVQDLREVNKR | |
| | VEDIHPTVPNPYNLLSGLPPSHQWYTVLDLKDAFFCLRLHPTSQPLFAFEWRDPEMGISGQLTWTRLPQGFKNSPTLFNEALHRDLADFRIQHPDLILLQYV | |
| | DDLLLAATSELDCQQGTRALLQTLGNLGYRASAKKAQICQKQVKYLGYLLKEGQRWLTEARKETVMGQPTPKTPRQLREFLGKAGFCRLFIPGFAEMAAPLY | |
| | PLTKPGTLFNWGPDQQKAYQEIKQALLTAPALGLPDLTKPFELFVDEKQGYAKGVLTQKLGPWRRPVAYLSKKLDPVAAGWPPCLRMVAAIAVLTKDAGKL | |
| | TMGQPLVILAPHAVEALVKQPPDRWLSNARMTHYQALLLDTDRVQFGPVVALNPATLLPLPEEGLQHNCLDILAEAHGTRPDLTDQPLPDADHTWYTDG | |
| | SSLLQEGQRKAGAAVTTETEVIWAKALPAGTSAQRAELIALTQALKMAEGKKLNVYTDSRYAFATAHIHGEIYRRRGWLTSEGKEIKNKDEILALLKALFLPKR | |
| | LSIIHCPGHQKGHSAEARGNRMADQAARKAAITETPDTSTLLKRTADGSEFESPKKKAKVE | |
| PL12015 | MPAAKRVKLDGGDKKYSIGLDIGTNSVGWAVITDEYKVPSKKFKVLGNTDRHSIKKNLIGALLFDSGETAEATRLKRTARRRYTRRKNRICYLQEIFSNEMAKV | 16,075 |
| | DDSFFHRLEESFLVEEDKKHERHPIFGNIVDEVAYHEKYPTIYHLRKKLVDSTDKADLRLIYLALAHMIKFRGHFLIEGDLNPDNSDVDKLFIQLVQTYNQLFEE | |
| | NPINASGVDAKAILSARLSKSRRLENLIAQLPGEKKNGLFGNLIALSLGLTPNFKSNFDLAEDAKLQLSKDTYDDDLDNLLAQIGDQYADLFLAAKNLSDAILLS | |
| | DILRVNTEITKAPLSASMIKRYDEHHQDLTLLKALVRQQLPEKYKEIFFDQSKNGYAGYIDGGASQEEFYKFIKPILEKMDGTEELLVKLNREDLLRKQRTFDNG | |
| | SIPHQIHLGELHAILRRQEDFYPFLKDNREKIEKILTFRIPYYVGPLARGNSRFAWMTRKSEETITPWNFEEVVDKGASAQSFIERMTNFDKNLPNEKVLPKHSL | |
| | LYEYFTVYNELTKVKYVTEGMRKPAFLSGEQKKAIVDLLFKTNRKVTVKQLKEDYFKKIECFDSVEISGVEDRFNASLGTYHDLLKIIKDKDFLDNEENEDILEDIV | |
| | LTLTLFEDREMIEERLKTYAHLFDDKVMKQLKRRRYTGWGRLSRKLINGIRDKQSGKTILDFLKSDGFANRNFMQLIHDDSLTFKEDIQKAQVSGQGDSLHE | |
| | HIANLAGSPAIKKGILQTVKVVDELVKVMGRHKPENIVIEMARENQTTQKGQKNSRERMKRIEEGIKELGSQILKEHPVENTQLQNEKLYLYYLQNGRDMYV | |
| | DQELDINRLSDYDVDHIVPQSFLKDDSIDNKVLTRSDKARGKSDNVPSEEVVKKMKNYWRQLLNAKLITQRKFDNLTKAERGGLSELDKAGFIKRQLVETRQI | |
| | TKHVAQILDSRMNTKYDENDKLIREVKVITLKSKLVSDFRKDFQFYKVREINNYHHAHDAYLNAVVGTALIKKYPKLESEFVYGDYKVYDVRKMIAKSEQEIGK | |
| | ATAKYFFYSNIMNFFKTEITLANGEIRKRPLIETNGETGEIVWDKGRDFATVRKVLSMPQVNIVKKTEVQTGGFSKESILPKRNSDKLIARKKDWDPKKYGGFD | |
| | SPTVAYSVLVVAKVEKGKSKKLKSVKELLGITIMERSSFEKNPIDFLEAKGYKEVKKDLIIKLPKYSLFELENGRKRMLASAGELQKGNELALPSKYVNFLYLASHY | |
| | EKLKGSPEDNEQKQLFVEQHKHYLDEIIEQISEFSKRVILADANLDKVLSAYNKHRDKPIREQAENIIHLFTLTNLGAPAAFKYFDTTIDRKRYTSTKEVLDATLIH | |
| | QSITGLYETRIDLSQLGGDGSSGSSGSSGSSGSSGSSMASNFTQFVLVDNGGTGDVTVAPSNFANGIAEWISSNSRSQAYKVTCSVRQSSAQNRKYTIKVEV | |
| | PKGAWRSYLNMELTIPIFATNSDCELIVKAMQGLLKDGNPIPSAIAANSGIYGSSGSSGSSGSSGSSGSSTLNIEDEHRLHETSKEPDVSLGSTWLSDFPQAW | |
| | AETGGMGLAVRQAPLIIPLKATSTPVSIKQYPMSQEARLGIKPHIQRLLDQGILVPCQSPWNTPLLPVKKPGTNDYRPVQDLREVNKRVEDIHPTVPNPYNLL | |
| | SGLPPSHQWYTVLDLKDAFFCLRLHPTSQPLFAFEWRDPEMGISGQLTWTRLPQGFKNSPTLFNEALHRDLADFRIQHPDLILLQYVDDLLLAATSELDCQQ | |
| | GTRALLQTLGNLGYRASAKKAQICQKQVKYLGYLLKEGQRWLTEARKETVMGQPTPKTPRQLREFLGKAGFCRLFIPGFAEMAAPLYPLTKPGTLFNWGPD | |
| | QQKAYQEIKQALLTAPALGLPDLTKPFELFVDEKQGYAKGVLTQKLGPWRRPVAYLSKKLDPVAAGWPPCLRMVAAIAVLTKDAGKLTMGQPLVILAPHAV | |
| | EALVKQPPDRWLSNARMTHYQALLLDTDRVQFGPVVALNPATLLPLPEEGLQHNCLDILAEAHGTRPDLTDQPLPDADHTWYTDGSSLLQEGQRKAGAA | |
| | VTTETEVIWAKALPAGTSAQRAELIALTQALKMAEGKKLNVYTDSRYAFATAHIHGEIYRRRGWLTSEGKEIKNKDEILALLKALFLPKRLSIIHCPGHQKGHSA | |
| | EARGNRMADQAARKAAITETPDTSTLLKRTADGSEFESPKKKAKVE | |
| PL12016 | MPAAKRVKLDGGDKKYSIGLDIGTNSVGWAVITDEYKVPSKKFKVLGNTDRHSIKKNLIGALLFDSGETAEATRLKRTARRRYTRRKNRICYLQEIFSNEMAKV | 16,076 |
| | DDSFFHRLEESFLVEEDKKHERHPIFGNIVDEVAYHEKYPTIYHLRKKLVDSTDKADLRLIYLALAHMIKFRGHFLIEGDLNPDNSDVDKLFIQLVQTYNQLFEE | |
| | NPINASGVDAKAILSARLSKSRRLENLIAQLPGEKKNGLFGNLIALSLGLTPNFKSNFDLAEDAKLQLSKDTYDDDLDNLLAQIGDQYADLFLAAKNLSDAILLS | |
| | DILRVNTEITKAPLSASMIKRYDEHHQDLTLLKALVRQQLPEKYKEIFFDQSKNGYAGYIDGGASQEEFYKFIKPILEKMDGTEELLVKLNREDLLRKQRTFDNG | |
| | SIPHQIHLGELHAILRRQEDFYPFLKDNREKIEKILTFRIPYYVGPLARGNSRFAWMTRKSEETITPWNFEEVVDKGASAQSFIERMTNFDKNLPNEKVLPKHSL | |
| | LYEYFTVYNELTKVKYVTEGMRKPAFLSGEQKKAIVDLLFKTNRKVTVKQLKEDYFKKIECFDSVEISGVEDRFNASLGTYHDLLKIIKDKDFLDNEENEDILEDIV | |
| | LTLTLFEDREMIEERLKTYAHLFDDKVMKQLKRRRYTGWGRLSRKLINGIRDKQSGKTILDFLKSDGFANRNFMQLIHDDSLTFKEDIQKAQVSGQGDSLHE | |
| | HIANLAGSPAIKKGILQTVKVVDELVKVMGRHKPENIVIEMARENQTTQKGQKNSRERMKRIEEGIKELGSQILKEHPVENTQLQNEKLYLYYLQNGRDMYV | |
| | DQELDINRLSDYDVDHIVPQSFLKDDSIDNKVLTRSDKARGKSDNVPSEEVVKKMKNYWRQLLNAKLITQRKFDNLTKAERGGLSELDKAGFIKRQLVETRQI | |
| | TKHVAQILDSRMNTKYDENDKLIREVKVITLKSKLVSDFRKDFQFYKVREINNYHHAHDAYLNAVVGTALIKKYPKLESEFVYGDYKVYDVRKMIAKSEQEIGK | |
| | ATAKYFFYSNIMNFFKTEITLANGEIRKRPLIETNGETGEIVWDKGRDFATVRKVLSMPQVNIVKKTEVQTGGFSKESILPKRNSDKLIARKKDWDPKKYGGFD | |
| | SPTVAYSVLVVAKVEKGKSKKLKSVKELLGITIMERSSFEKNPIDFLEAKGYKEVKKDLIIKLPKYSLFELENGRKRMLASAGELQKGNELALPSKYVNFLYLASHY | |
| | EKLKGSPEDNEQKQLFVEQHKHYLDEIIEQISEFSKRVILADANLDKVLSAYNKHRDKPIREQAENIIHLFTLTNLGAPAAFKYFDTTIDRKRYTSTKEVLDATLIH | |
| | QSITGLYETRIDLSQLGGDGSSGSSGSSGSSGSSGSSMASNFTQFVLVDNGGTGDVTVAPSNFANGIAEWISSNSRSQAYKVTCSVRQSSAQNRKYTIKVEV | |
| | PKGAWRSYLNMELTIPIFATNSDCELIVKAMQGLLKDGNPIPSAIAANSGIYGSSGGGEAAAKTLNIEDEHRLHETSKEPDVSLGSTWLSDFPQAWAETGGM | |
| | GLAVRQAPLIIPLKATSTPVSIKQYPMSQEARLGIKPHIQRLLDQGILVPCQSPWNTPLLPVKKPGTNDYRPVQDLREVNKRVEDIHPTVPNPYNLLSGLPPSH | |
| | QWYTVLDLKDAFFCLRLHPTSQPLFAFEWRDPEMGISGQLTWTRLPQGFKNSPTLFNEALHRDLADFRIQHPDLILLQYVDDLLLAATSELDCQQGTRALLQ | |
| | TLGNLGYRASAKKAQICQKQVKYLGYLLKEGQRWLTEARKETVMGQPTPKTPRQLREFLGKAGFCRLFIPGFAEMAAPLYPLTKPGTLFNWGPDQQKAYQ | |
| | EIKQALLTAPALGLPDLTKPFELFVDEKQGYAKGVLTQKLGPWRRPVAYLSKKLDPVAAGWPPCLRMVAAIAVLTKDAGKLTMGQPLVILAPHAVEALVKQ | |
| | PPDRWLSNARMTHYQALLLDTDRVQFGPVVALNPATLLPLPEEGLQHNCLDILAEAHGTRPDLTDQPLPDADHTWYTDGSSLLQEGQRKAGAAVTTETEV | |
| | IWAKALPAGTSAQRAELIALTQALKMAEGKKLNVYTDSRYAFATAHIHGEIYRRRGWLTSEGKEIKNKDEILALLKALFLPKRLSIIHCPGHQKGHSAEARGNR | |
| | MADQAARKAAITETPDTSTLLKRTADGSEFESPKKKAKVE | |
| PL12017 | MPAAKRVKLDGGDKKYSIGLDIGTNSVGWAVITDEYKVPSKKFKVLGNTDRHSIKKNLIGALLFDSGETAEATRLKRTARRRYTRRKNRICYLQEIFSNEMAKV | 16,077 |
| | DDSFFHRLEESFLVEEDKKHERHPIFGNIVDEVAYHEKYPTIYHLRKKLVDSTDKADLRLIYLALAHMIKFRGHFLIEGDLNPDNSDVDKLFIQLVQTYNQLFEE | |
| | NPINASGVDAKAILSARLSKSRRLENLIAQLPGEKKNGLFGNLIALSLGLTPNFKSNFDLAEDAKLQLSKDTYDDDLDNLLAQIGDQYADLFLAAKNLSDAILLS | |
| | DILRVNTEITKAPLSASMIKRYDEHHQDLTLLKALVRQQLPEKYKEIFFDQSKNGYAGYIDGGASQEEFYKFIKPILEKMDGTEELLVKLNREDLLRKQRTFDNG | |
| | SIPHQIHLGELHAILRRQEDFYPFLKDNREKIEKILTFRIPYYVGPLARGNSRFAWMTRKSEETITPWNFEEVVDKGASAQSFIERMTNFDKNLPNEKVLPKHSL | |
| | LYEYFTVYNELTKVKYVTEGMRKPAFLSGEQKKAIVDLLFKTNRKVTVKQLKEDYFKKIECFDSVEISGVEDRFNASLGTYHDLLKIIKDKDFLDNEENEDILEDIV | |
| | LTLTLFEDREMIEERLKTYAHLFDDKVMKQLKRRRYTGWGRLSRKLINGIRDKQSGKTILDFLKSDGFANRNFMQLIHDDSLTFKEDIQKAQVSGQGDSLHE | |
| | HIANLAGSPAIKKGILQTVKVVDELVKVMGRHKPENIVIEMARENQTTQKGQKNSRERMKRIEEGIKELGSQILKEHPVENTQLQNEKLYLYYLQNGRDMYV | |
| | DQELDINRLSDYDVDHIVPQSFLKDDSIDNKVLTRSDKARGKSDNVPSEEVVKKMKNYWRQLLNAKLITQRKFDNLTKAERGGLSELDKAGFIKRQLVETRQI | |
| | TKHVAQILDSRMNTKYDENDKLIREVKVITLKSKLVSDFRKDFQFYKVREINNYHHAHDAYLNAVVGTALIKKYPKLESEFVYGDYKVYDVRKMIAKSEQEIGK | |
| | ATAKYFFYSNIMNFFKTEITLANGEIRKRPLIETNGETGEIVWDKGRDFATVRKVLSMPQVNIVKKTEVQTGGFSKESILPKRNSDKLIARKKDWDPKKYGGFD | |
| | SPTVAYSVLVVAKVEKGKSKKLKSVKELLGITIMERSSFEKNPIDFLEAKGYKEVKKDLIIKLPKYSLFELENGRKRMLASAGELQKGNELALPSKYVNFLYLASHY | |
| | EKLKGSPEDNEQKQLFVEQHKHYLDEIIEQISEFSKRVILADANLDKVLSAYNKHRDKPIREQAENIIHLFTLTNLGAPAAFKYFDTTIDRKRYTSTKEVLDATLIH | |
| | QSITGLYETRIDLSQLGGDGSSGSSGSSGSSGSSGSSMASNFTQFVLVDNGGTGDVTVAPSNFANGIAEWISSNSRSQAYKVTCSVRQSSAQNRKYTIKVEV | |
| | PKGAWRSYLNMELTIPIFATNSDCELIVKAMQGLLKDGNPIPSAIAANSGIYGGSGGSMASNFTQFVLVDNGGTGDVTVAPSNFANGIAEWISSNSRSQAY | |
| | KVTCSVRQSSAQNRKYTIKVEVPKGAWRSYLNMELTIPIFATNSDCELIVKAMQGLLKDGNPIPSAIAANSGIYAEAAAKEAAAKEAAAKEAAAKALEAEAAA | |
| | KEAAAKEAAAKEAAAKATLNIEDEHRLHETSKEPDVSLGSTWLSDFPQAWAETGGMGLAVRQAPLIIPLKATSTPVSIKQYPMSQEARLGIKPHIQRLLDQGI | |
| | LVPCQSPWNTPLLPVKKPGTNDYRPVQDLREVNKRVEDIHPTVPNPYNLLSGLPPSHQWYTVLDLKDAFFCLRLHPTSQPLFAFEWRDPEMGISGQLTWT | |
| | RLPQGFKNSPTLFNEALHRDLADFRIQHPDLILLQYVDDLLLAATSELDCQQGTRALLQTLGNLGYRASAKKAQICQKQVKYLGYLLKEGQRWLTEARKETV | |
| | MGQPTPKTPRQLREFLGKAGFCRLFIPGFAEMAAPLYPLTKPGTLFNWGPDQQKAYQEIKQALLTAPALGLPDLTKPFELFVDEKQGYAKGVLTQKLGPWR | |
| | RPVAYLSKKLDPVAAGWPPCLRMVAAIAVLTKDAGKLTMGQPLVILAPHAVEALVKQPPDRWLSNARMTHYQALLLDTDRVQFGPVVALNPATLLPLPEE | |
| | GLQHNCLDILAEAHGTRPDLTDQPLPDADHTWYTDGSSLLQEGQRKAGAAVTTETEVIWAKALPAGTSAQRAELIALTQALKMAEGKKLNVYTDSRYAFAT | |
| | AHIHGEIYRRRGWLTSEGKEIKNKDEILALLKALFLPKRLSIIHCPGHQKGHSAEARGNRMADQAARKAAITETPDTSTLLKRTADGSEFESPKKKAKVE | |
| PL12018 | MPAAKRVKLDGGDKKYSIGLDIGTNSVGWAVITDEYKVPSKKFKVLGNTDRHSIKKNLIGALLFDSGETAEATRLKRTARRRYTRRKNRICYLQEIFSNEMAKV | 16,078 |
| | DDSFFHRLEESFLVEEDKKHERHPIFGNIVDEVAYHEKYPTIYHLRKKLVDSTDKADLRLIYLALAHMIKFRGHFLIEGDLNPDNSDVDKLFIQLVQTYNQLFEE | |
| | NPINASGVDAKAILSARLSKSRRLENLIAQLPGEKKNGLFGNLIALSLGLTPNFKSNFDLAEDAKLQLSKDTYDDDLDNLLAQIGDQYADLFLAAKNLSDAILLS | |
| | DILRVNTEITKAPLSASMIKRYDEHHQDLTLLKALVRQQLPEKYKEIFFDQSKNGYAGYIDGGASQEEFYKFIKPILEKMDGTEELLVKLNREDLLRKQRTFDNG | |
| | SIPHQIHLGELHAILRRQEDFYPFLKDNREKIEKILTFRIPYYVGPLARGNSRFAWMTRKSEETITPWNFEEVVDKGASAQSFIERMTNFDKNLPNEKVLPKHSL | |
| | LYEYFTVYNELTKVKYVTEGMRKPAFLSGEQKKAIVDLLFKTNRKVTVKQLKEDYFKKIECFDSVEISGVEDRFNASLGTYHDLLKIIKDKDFLDNEENEDILEDIV | |
| | LTLTLFEDREMIEERLKTYAHLFDDKVMKQLKRRRYTGWGRLSRKLINGIRDKQSGKTILDFLKSDGFANRNFMQLIHDDSLTFKEDIQKAQVSGQGDSLHE | |
| | HIANLAGSPAIKKGILQTVKVVDELVKVMGRHKPENIVIEMARENQTTQKGQKNSRERMKRIEEGIKELGSQILKEHPVENTQLQNEKLYLYYLQNGRDMYV | |
| | DQELDINRLSDYDVDHIVPQSFLKDDSIDNKVLTRSDKARGKSDNVPSEEVVKKMKNYWRQLLNAKLITQRKFDNLTKAERGGLSELDKAGFIKRQLVETRQI | |
| | TKHVAQILDSRMNTKYDENDKLIREVKVITLKSKLVSDFRKDFQFYKVREINNYHHAHDAYLNAVVGTALIKKYPKLESEFVYGDYKVYDVRKMIAKSEQEIGK | |
| | ATAKYFFYSNIMNFFKTEITLANGEIRKRPLIETNGETGEIVWDKGRDFATVRKVLSMPQVNIVKKTEVQTGGFSKESILPKRNSDKLIARKKDWDPKKYGGFD | |
| | SPTVAYSVLVVAKVEKGKSKKLKSVKELLGITIMERSSFEKNPIDFLEAKGYKEVKKDLIIKLPKYSLFELENGRKRMLASAGELQKGNELALPSKYVNFLYLASHY | |
| | EKLKGSPEDNEQKQLFVEQHKHYLDEIIEQISEFSKRVILADANLDKVLSAYNKHRDKPIREQAENIIHLFTLTNLGAPAAFKYFDTTIDRKRYTSTKEVLDATLIH | |
| | QSITGLYETRIDLSQLGGDGSSGSSGSSGSSGSSGSSMASNFTQFVLVDNGGTGDVTVAPSNFANGIAEWISSNSRSQAYKVTCSVRQSSAQNRKYTIKVEV | |
| | PKGAWRSYLNMELTIPIFATNSDCELIVKAMQGLLKDGNPIPSAIAANSGIYGGSGGSMASNFTQFVLVDNGGTGDVTVAPSNFANGIAEWISSNSRSQAY | |
| | KVTCSVRQSSAQNRKYTIKVEVPKGAWRSYLNMELTIPIFATNSDCELIVKAMQGLLKDGNPIPSAIAANSGIYSGGSSGGSSGSETPGTSESATPESSGGSSG | |
| | GSSTLNIEDEHRLHETSKEPDVSLGSTWLSDFPQAWAETGGMGLAVRQAPLIIPLKATSTPVSIKQYPMSQEARLGIKPHIQRLLDQGILVPCQSPWNTPLLP | |
| | VKKPGTNDYRPVQDLREVNKRVEDIHPTVPNPYNLLSGLPPSHQWYTVLDLKDAFFCLRLHPTSQPLFAFEWRDPEMGISGQLTWTRLPQGFKNSPTLFNE | |
| | ALHRDLADFRIQHPDLILLQYVDDLLLAATSELDCQQGTRALLQTLGNLGYRASAKKAQICQKQVKYLGYLLKEGQRWLTEARKETVMGQPTPKTPRQLREF | |
| | LGKAGFCRLFIPGFAEMAAPLYPLTKPGTLFNWGPDQQKAYQEIKQALLTAPALGLPDLTKPFELFVDEKQGYAKGVLTQKLGPWRRPVAYLSKKLDPVAAG | |
| | WPPCLRMVAAIAVLTKDAGKLTMGQPLVILAPHAVEALVKQPPDRWLSNARMTHYQALLLDTDRVQFGPVVALNPATLLPLPEEGLQHNCLDILAEAHGT | |
| | RPDLTDQPLPDADHTWYTDGSSLLQEGQRKAGAAVTTETEVIWAKALPAGTSAQRAELIALTQALKMAEGKKLNVYTDSRYAFATAHIHGEIYRRRGWLTS | |
| | EGKEIKNKDEILALLKALFLPKRLSIIHCPGHQKGHSAEARGNRMADQAARKAAITETPDTSTLLKRTADGSEFESPKKKAKVE | |
| PL12019 | MPAAKRVKLDGGDKKYSIGLDIGTNSVGWAVITDEYKVPSKKFKVLGNTDRHSIKKNLIGALLFDSGETAEATRLKRTARRRYTRRKNRICYLQEIFSNEMAKV | 16,079 |
| | DDSFFHRLEESFLVEEDKKHERHPIFGNIVDEVAYHEKYPTIYHLRKKLVDSTDKADLRLIYLALAHMIKFRGHFLIEGDLNPDNSDVDKLFIQLVQTYNQLFEE | |
| | NPINASGVDAKAILSARLSKSRRLENLIAQLPGEKKNGLFGNLIALSLGLTPNFKSNFDLAEDAKLQLSKDTYDDDLDNLLAQIGDQYADLFLAAKNLSDAILLS | |
| | DILRVNTEITKAPLSASMIKRYDEHHQDLTLLKALVRQQLPEKYKEIFFDQSKNGYAGYIDGGASQEEFYKFIKPILEKMDGTEELLVKLNREDLLRKQRTFDNG | |
| | SIPHQIHLGELHAILRRQEDFYPFLKDNREKIEKILTFRIPYYVGPLARGNSRFAWMTRKSEETITPWNFEEVVDKGASAQSFIERMTNFDKNLPNEKVLPKHSL | |
| | LYEYFTVYNELTKVKYVTEGMRKPAFLSGEQKKAIVDLLFKTNRKVTVKQLKEDYFKKIECFDSVEISGVEDRFNASLGTYHDLLKIIKDKDFLDNEENEDILEDIV | |
| | LTLTLFEDREMIEERLKTYAHLFDDKVMKQLKRRRYTGWGRLSRKLINGIRDKQSGKTILDFLKSDGFANRNFMQLIHDDSLTFKEDIQKAQVSGQGDSLHE | |
| | HIANLAGSPAIKKGILQTVKVVDELVKVMGRHKPENIVIEMARENQTTQKGQKNSRERMKRIEEGIKELGSQILKEHPVENTQLQNEKLYLYYLQNGRDMYV | |
| | DQELDINRLSDYDVDHIVPQSFLKDDSIDNKVLTRSDKARGKSDNVPSEEVVKKMKNYWRQLLNAKLITQRKFDNLTKAERGGLSELDKAGFIKRQLVETRQI | |
| | TKHVAQILDSRMNTKYDENDKLIREVKVITLKSKLVSDFRKDFQFYKVREINNYHHAHDAYLNAVVGTALIKKYPKLESEFVYGDYKVYDVRKMIAKSEQEIGK | |
| | ATAKYFFYSNIMNFFKTEITLANGEIRKRPLIETNGETGEIVWDKGRDFATVRKVLSMPQVNIVKKTEVQTGGFSKESILPKRNSDKLIARKKDWDPKKYGGFD | |
| | SPTVAYSVLVVAKVEKGKSKKLKSVKELLGITIMERSSFEKNPIDFLEAKGYKEVKKDLIIKLPKYSLFELENGRKRMLASAGELQKGNELALPSKYVNFLYLASHY | |
| | EKLKGSPEDNEQKQLFVEQHKHYLDEIIEQISEFSKRVILADANLDKVLSAYNKHRDKPIREQAENIIHLFTLTNLGAPAAFKYFDTTIDRKRYTSTKEVLDATLIH | |
| | QSITGLYETRIDLSQLGGDGSSGSSGSSGSSGSSGSSMASNFTQFVLVDNGGTGDVTVAPSNFANGIAEWISSNSRSQAYKVTCSVRQSSAQNRKYTIKVEV | |
| | PKGAWRSYLNMELTIPIFATNSDCELIVKAMQGLLKDGNPIPSAIAANSGIYGGSGGSMASNFTQFVLVDNGGTGDVTVAPSNFANGIAEWISSNSRSQAY | |
| | KVTCSVRQSSAQNRKYTIKVEVPKGAWRSYLNMELTIPIFATNSDCELIVKAMQGLLKDGNPIPSAIAANSGIYGSSGSSGSSGSSGSSGSSTLNIEDEHRLHET | |
| | SKEPDVSLGSTWLSDFPQAWAETGGMGLAVRQAPLIIPLKATSTPVSIKQYPMSQEARLGIKPHIQRLLDQGILVPCQSPWNTPLLPVKKPGTNDYRPVQDL | |
| | REVNKRVEDIHPTVPNPYNLLSGLPPSHQWYTVLDLKDAFFCLRLHPTSQPLFAFEWRDPEMGISGQLTWTRLPQGFKNSPTLFNEALHRDLADFRIQHPDL | |
| | ILLQYVDDLLLAATSELDCQQGTRALLQTLGNLGYRASAKKAQICQKQVKYLGYLLKEGQRWLTEARKETVMGQPTPKTPRQLREFLGKAGFCRLFIPGFAE | |
| | MAAPLYPLTKPGTLFNWGPDQQKAYQEIKQALLTAPALGLPDLTKPFELFVDEKQGYAKGVLTQKLGPWRRPVAYLSKKLDPVAAGWPPCLRMVAAIAVL | |
| | TKDAGKLTMGQPLVILAPHAVEALVKQPPDRWLSNARMTHYQALLLDTDRVQFGPVVALNPATLLPLPEEGLQHNCLDILAEAHGTRPDLTDQPLPDADH | |
| | TWYTDGSSLLQEGQRKAGAAVTTETEVIWAKALPAGTSAQRAELIALTQALKMAEGKKLNVYTDSRYAFATAHIHGEIYRRRGWLTSEGKEIKNKDEILALLK | |
| | ALFLPKRLSIIHCPGHQKGHSAEARGNRMADQAARKAAITETPDTSTLLKRTADGSEFESPKKKAKVE | |
| PL12020 | MPAAKRVKLDGGDKKYSIGLDIGTNSVGWAVITDEYKVPSKKFKVLGNTDRHSIKKNLIGALLFDSGETAEATRLKRTARRRYTRRKNRICYLQEIFSNEMAKV | 16,080 |
| | DDSFFHRLEESFLVEEDKKHERHPIFGNIVDEVAYHEKYPTIYHLRKKLVDSTDKADLRLIYLALAHMIKFRGHFLIEGDLNPDNSDVDKLFIQLVQTYNQLFEE | |
| | NPINASGVDAKAILSARLSKSRRLENLIAQLPGEKKNGLFGNLIALSLGLTPNFKSNFDLAEDAKLQLSKDTYDDDLDNLLAQIGDQYADLFLAAKNLSDAILLS | |
| | DILRVNTEITKAPLSASMIKRYDEHHQDLTLLKALVRQQLPEKYKEIFFDQSKNGYAGYIDGGASQEEFYKFIKPILEKMDGTEELLVKLNREDLLRKQRTFDNG | |
| | SIPHQIHLGELHAILRRQEDFYPFLKDNREKIEKILTFRIPYYVGPLARGNSRFAWMTRKSEETITPWNFEEVVDKGASAQSFIERMTNFDKNLPNEKVLPKHSL | |
| | LYEYFTVYNELTKVKYVTEGMRKPAFLSGEQKKAIVDLLFKTNRKVTVKQLKEDYFKKIECFDSVEISGVEDRFNASLGTYHDLLKIIKDKDFLDNEENEDILEDIV | |
| | LTLTLFEDREMIEERLKTYAHLFDDKVMKQLKRRRYTGWGRLSRKLINGIRDKQSGKTILDFLKSDGFANRNFMQLIHDDSLTFKEDIQKAQVSGQGDSLHE | |
| | HIANLAGSPAIKKGILQTVKVVDELVKVMGRHKPENIVIEMARENQTTQKGQKNSRERMKRIEEGIKELGSQILKEHPVENTQLQNEKLYLYYLQNGRDMYV | |
| | DQELDINRLSDYDVDHIVPQSFLKDDSIDNKVLTRSDKARGKSDNVPSEEVVKKMKNYWRQLLNAKLITQRKFDNLTKAERGGLSELDKAGFIKRQLVETRQI | |
| | TKHVAQILDSRMNTKYDENDKLIREVKVITLKSKLVSDFRKDFQFYKVREINNYHHAHDAYLNAVVGTALIKKYPKLESEFVYGDYKVYDVRKMIAKSEQEIGK | |
| | ATAKYFFYSNIMNFFKTEITLANGEIRKRPLIETNGETGEIVWDKGRDFATVRKVLSMPQVNIVKKTEVQTGGFSKESILPKRNSDKLIARKKDWDPKKYGGFD | |
| | SPTVAYSVLVVAKVEKGKSKKLKSVKELLGITIMERSSFEKNPIDFLEAKGYKEVKKDLIIKLPKYSLFELENGRKRMLASAGELQKGNELALPSKYVNFLYLASHY | |
| | EKLKGSPEDNEQKQLFVEQHKHYLDEIIEQISEFSKRVILADANLDKVLSAYNKHRDKPIREQAENIIHLFTLTNLGAPAAFKYFDTTIDRKRYTSTKEVLDATLIH | |
| | QSITGLYETRIDLSQLGGDGSSGSSGSSGSSGSSGSSMASNFTQFVLVDNGGTGDVTVAPSNFANGIAEWISSNSRSQAYKVTCSVRQSSAQNRKYTIKVEV | |
| | PKGAWRSYLNMELTIPIFATNSDCELIVKAMQGLLKDGNPIPSAIAANSGIYGGSGGSMASNFTQFVLVDNGGTGDVTVAPSNFANGIAEWISSNSRSQAY | |
| | KVTCSVRQSSAQNRKYTIKVEVPKGAWRSYLNMELTIPIFATNSDCELIVKAMQGLLKDGNPIPSAIAANSGIYGSSGGGEAAAKTLNIEDEHRLHETSKEPDV | |
| | SLGSTWLSDFPQAWAETGGMGLAVRQAPLIIPLKATSTPVSIKQYPMSQEARLGIKPHIQRLLDQGILVPCQSPWNTPLLPVKKPGTNDYRPVQDLREVNK | |
| | RVEDIHPTVPNPYNLLSGLPPSHQWYTVLDLKDAFFCLRLHPTSQPLFAFEWRDPEMGISGQLTWTRLPQGFKNSPTLFNEALHRDLADFRIQHPDLILLQY | |
| | VDDLLLAATSELDCQQGTRALLQTLGNLGYRASAKKAQICQKQVKYLGYLLKEGQRWLTEARKETVMGQPTPKTPRQLREFLGKAGFCRLFIPGFAEMAAP | |
| | LYPLTKPGTLFNWGPDQQKAYQEIKQALLTAPALGLPDLTKPFELFVDEKQGYAKGVLTQKLGPWRRPVAYLSKKLDPVAAGWPPCLRMVAAIAVLTKDAG | |
| | KLTMGQPLVILAPHAVEALVKQPPDRWLSNARMTHYQALLLDTDRVQFGPVVALNPATLLPLPEEGLQHNCLDILAEAHGTRPDLTDQPLPDADHTWYTD | |
| | GSSLLQEGQRKAGAAVTTETEVIWAKALPAGTSAQRAELIALTQALKMAEGKKLNVYTDSRYAFATAHIHGEIYRRRGWLTSEGKEIKNKDEILALLKALFLPK | |
| | RLSIIHCPGHQKGHSAEARGNRMADQAARKAAITETPDTSTLLKRTADGSEFESPKKKAKVE | |
| PL12021 | MPAAKRVKLDGGDKKYSIGLDIGTNSVGWAVITDEYKVPSKKFKVLGNTDRHSIKKNLIGALLFDSGETAEATRLKRTARRRYTRRKNRICYLQEIFSNEMAKV | 16,081 |
| | DDSFFHRLEESFLVEEDKKHERHPIFGNIVDEVAYHEKYPTIYHLRKKLVDSTDKADLRLIYLALAHMIKFRGHFLIEGDLNPDNSDVDKLFIQLVQTYNQLFEE | |
| | NPINASGVDAKAILSARLSKSRRLENLIAQLPGEKKNGLFGNLIALSLGLTPNFKSNFDLAEDAKLQLSKDTYDDDLDNLLAQIGDQYADLFLAAKNLSDAILLS | |
| | DILRVNTEITKAPLSASMIKRYDEHHQDLTLLKALVRQQLPEKYKEIFFDQSKNGYAGYIDGGASQEEFYKFIKPILEKMDGTEELLVKLNREDLLRKQRTFDNG | |
| | SIPHQIHLGELHAILRRQEDFYPFLKDNREKIEKILTFRIPYYVGPLARGNSRFAWMTRKSEETITPWNFEEVVDKGASAQSFIERMTNFDKNLPNEKVLPKHSL | |
| | LYEYFTVYNELTKVKYVTEGMRKPAFLSGEQKKAIVDLLFKTNRKVTVKQLKEDYFKKIECFDSVEISGVEDRFNASLGTYHDLLKIIKDKDFLDNEENEDILEDIV | |
| | LTLTLFEDREMIEERLKTYAHLFDDKVMKQLKRRRYTGWGRLSRKLINGIRDKQSGKTILDFLKSDGFANRNFMQLIHDDSLTFKEDIQKAQVSGQGDSLHE | |
| | HIANLAGSPAIKKGILQTVKVVDELVKVMGRHKPENIVIEMARENQTTQKGQKNSRERMKRIEEGIKELGSQILKEHPVENTQLQNEKLYLYYLQNGRDMYV | |
| | DQELDINRLSDYDVDHIVPQSFLKDDSIDNKVLTRSDKARGKSDNVPSEEVVKKMKNYWRQLLNAKLITQRKFDNLTKAERGGLSELDKAGFIKRQLVETRQI | |
| | TKHVAQILDSRMNTKYDENDKLIREVKVITLKSKLVSDFRKDFQFYKVREINNYHHAHDAYLNAVVGTALIKKYPKLESEFVYGDYKVYDVRKMIAKSEQEIGK | |
| | ATAKYFFYSNIMNFFKTEITLANGEIRKRPLIETNGETGEIVWDKGRDFATVRKVLSMPQVNIVKKTEVQTGGFSKESILPKRNSDKLIARKKDWDPKKYGGFD | |
| | SPTVAYSVLVVAKVEKGKSKKLKSVKELLGITIMERSSFEKNPIDFLEAKGYKEVKKDLIIKLPKYSLFELENGRKRMLASAGELQKGNELALPSKYVNFLYLASHY | |
| | EKLKGSPEDNEQKQLFVEQHKHYLDEIIEQISEFSKRVILADANLDKVLSAYNKHRDKPIREQAENIIHLFTLTNLGAPAAFKYFDTTIDRKRYTSTKEVLDATLIH | |
| | QSITGLYETRIDLSQLGGDGSSGSSGSSGSSGSSGSSMASNFTQFVLVDNGGTGDVTVAPSNFANGIAEWISSNSRSQAYKVTCSVRQSSAQNRKYTIKVEV | |
| | PKGAWRSYLNMELTIPIFATNSDCELIVKAMQGLLKDGNPIPSAIAANSGIYGGSGGSMASNFTQFVLVDNGGTGDVTVAPSNFANGIAEWISSNSRSQAY | |
| | KVTCSVRQSSAQNRKYTIKVEVPKGAWRSYLNMELTIPIFATNSDCELIVKAMQGLLKDGNPIPSAIAANSGIYGGGSGGGSGGGSGGGSMASNFTQFVLV | |
| | DNGGTGDVTVAPSNFANGIAEWISSNSRSQAYKVTCSVRQSSAQNRKYTIKVEVPKGAWRSYLNMELTIPIFATNSDCELIVKAMQGLLKDGNPIPSAIAAN | |
| | SGIYGGSGGSMASNFTQFVLVDNGGTGDVTVAPSNFANGIAEWISSNSRSQAYKVTCSVRQSSAQNRKYTIKVEVPKGAWRSYLNMELTIPIFATNSDCELI | |
| | VKAMQGLLKDGNPIPSAIAANSGIYAEAAAKEAAAKEAAAKEAAAKALEAEAAAKEAAAKEAAAKEAAAKATLNIEDEHRLHETSKEPDVSLGSTWLSDFPQ | |
| | AWAETGGMGLAVRQAPLIIPLKATSTPVSIKQYPMSQEARLGIKPHIQRLLDQGILVPCQSPWNTPLLPVKKPGTNDYRPVQDLREVNKRVEDIHPTVPNPY | |
| | NLLSGLPPSHQWYTVLDLKDAFFCLRLHPTSQPLFAFEWRDPEMGISGQLTWTRLPQGFKNSPTLFNEALHRDLADFRIQHPDLILLQYVDDLLLAATSELDC | |
| | QQGTRALLQTLGNLGYRASAKKAQICQKQVKYLGYLLKEGQRWLTEARKETVMGQPTPKTPRQLREFLGKAGFCRLFIPGFAEMAAPLYPLTKPGTLFNWG | |
| | PDQQKAYQEIKQALLTAPALGLPDLTKPFELFVDEKQGYAKGVLTQKLGPWRRPVAYLSKKLDPVAAGWPPCLRMVAAIAVLTKDAGKLTMGQPLVILAPH | |
| | AVEALVKQPPDRWLSNARMTHYQALLLDTDRVQFGPVVALNPATLLPLPEEGLQHNCLDILAEAHGTRPDLTDQPLPDADHTWYTDGSSLLQEGQRKAG | |
| | AAVTTETEVIWAKALPAGTSAQRAELIALTQALKMAEGKKLNVYTDSRYAFATAHIHGEIYRRRGWLTSEGKEIKNKDEILALLKALFLPKRLSIIHCPGHQKGH | |
| | SAEARGNRMADQAARKAAITETPDTSTLLKRTADGSEFESPKKKAKVE | |
| PL12022 | MPAAKRVKLDGGDKKYSIGLDIGTNSVGWAVITDEYKVPSKKFKVLGNTDRHSIKKNLIGALLFDSGETAEATRLKRTARRRYTRRKNRICYLQEIFSNEMAKV | 16,082 |
| | DDSFFHRLEESFLVEEDKKHERHPIFGNIVDEVAYHEKYPTIYHLRKKLVDSTDKADLRLIYLALAHMIKFRGHFLIEGDLNPDNSDVDKLFIQLVQTYNQLFEE | |
| | NPINASGVDAKAILSARLSKSRRLENLIAQLPGEKKNGLFGNLIALSLGLTPNFKSNFDLAEDAKLQLSKDTYDDDLDNLLAQIGDQYADLFLAAKNLSDAILLS | |
| | DILRVNTEITKAPLSASMIKRYDEHHQDLTLLKALVRQQLPEKYKEIFFDQSKNGYAGYIDGGASQEEFYKFIKPILEKMDGTEELLVKLNREDLLRKQRTFDNG | |
| | SIPHQIHLGELHAILRRQEDFYPFLKDNREKIEKILTFRIPYYVGPLARGNSRFAWMTRKSEETITPWNFEEVVDKGASAQSFIERMTNFDKNLPNEKVLPKHSL | |
| | LYEYFTVYNELTKVKYVTEGMRKPAFLSGEQKKAIVDLLFKTNRKVTVKQLKEDYFKKIECFDSVEISGVEDRFNASLGTYHDLLKIIKDKDFLDNEENEDILEDIV | |
| | LTLTLFEDREMIEERLKTYAHLFDDKVMKQLKRRRYTGWGRLSRKLINGIRDKQSGKTILDFLKSDGFANRNFMQLIHDDSLTFKEDIQKAQVSGQGDSLHE | |
| | HIANLAGSPAIKKGILQTVKVVDELVKVMGRHKPENIVIEMARENQTTQKGQKNSRERMKRIEEGIKELGSQILKEHPVENTQLQNEKLYLYYLQNGRDMYV | |
| | DQELDINRLSDYDVDHIVPQSFLKDDSIDNKVLTRSDKARGKSDNVPSEEVVKKMKNYWRQLLNAKLITQRKFDNLTKAERGGLSELDKAGFIKRQLVETRQI | |
| | TKHVAQILDSRMNTKYDENDKLIREVKVITLKSKLVSDFRKDFQFYKVREINNYHHAHDAYLNAVVGTALIKKYPKLESEFVYGDYKVYDVRKMIAKSEQEIGK | |
| | ATAKYFFYSNIMNFFKTEITLANGEIRKRPLIETNGETGEIVWDKGRDFATVRKVLSMPQVNIVKKTEVQTGGFSKESILPKRNSDKLIARKKDWDPKKYGGFD | |
| | SPTVAYSVLVVAKVEKGKSKKLKSVKELLGITIMERSSFEKNPIDFLEAKGYKEVKKDLIIKLPKYSLFELENGRKRMLASAGELQKGNELALPSKYVNFLYLASHY | |
| | EKLKGSPEDNEQKQLFVEQHKHYLDEIIEQISEFSKRVILADANLDKVLSAYNKHRDKPIREQAENIIHLFTLTNLGAPAAFKYFDTTIDRKRYTSTKEVLDATLIH | |
| | QSITGLYETRIDLSQLGGDGSSGSSGSSGSSGSSGSSMASNFTQFVLVDNGGTGDVTVAPSNFANGIAEWISSNSRSQAYKVTCSVRQSSAQNRKYTIKVEV | |
| | PKGAWRSYLNMELTIPIFATNSDCELIVKAMQGLLKDGNPIPSAIAANSGIYGGSGGSMASNFTQFVLVDNGGTGDVTVAPSNFANGIAEWISSNSRSQAY | |
| | KVTCSVRQSSAQNRKYTIKVEVPKGAWRSYLNMELTIPIFATNSDCELIVKAMQGLLKDGNPIPSAIAANSGIYGGGSGGGSGGGSGGGSMASNFTQFVLV | |
| | DNGGTGDVTVAPSNFANGIAEWISSNSRSQAYKVTCSVRQSSAQNRKYTIKVEVPKGAWRSYLNMELTIPIFATNSDCELIVKAMQGLLKDGNPIPSAIAAN | |
| | SGIYGGSGGSMASNFTQFVLVDNGGTGDVTVAPSNFANGIAEWISSNSRSQAYKVTCSVRQSSAQNRKYTIKVEVPKGAWRSYLNMELTIPIFATNSDCELI | |
| | VKAMQGLLKDGNPIPSAIAANSGIYSGGSSGGSSGSETPGTSESATPESSGGSSGGSSTLNIEDEHRLHETSKEPDVSLGSTWLSDFPQAWAETGGMGLAVR | |
| | QAPLIIPLKATSTPVSIKQYPMSQEARLGIKPHIQRLLDQGILVPCQSPWNTPLLPVKKPGTNDYRPVQDLREVNKRVEDIHPTVPNPYNLLSGLPPSHQWYT | |
| | VLDLKDAFFCLRLHPTSQPLFAFEWRDPEMGISGQLTWTRLPQGFKNSPTLFNEALHRDLADFRIQHPDLILLQYVDDLLLAATSELDCQQGTRALLQTLGNL | |
| | GYRASAKKAQICQKQVKYLGYLLKEGQRWLTEARKETVMGQPTPKTPRQLREFLGKAGFCRLFIPGFAEMAAPLYPLTKPGTLFNWGPDQQKAYQEIKQAL | |
| | LTAPALGLPDLTKPFELFVDEKQGYAKGVLTQKLGPWRRPVAYLSKKLDPVAAGWPPCLRMVAAIAVLTKDAGKLTMGQPLVILAPHAVEALVKQPPDRW | |
| | LSNARMTHYQALLLDTDRVQFGPVVALNPATLLPLPEEGLQHNCLDILAEAHGTRPDLTDQPLPDADHTWYTDGSSLLQEGQRKAGAAVTTETEVIWAKA | |
| | LPAGTSAQRAELIALTQALKMAEGKKLNVYTDSRYAFATAHIHGEIYRRRGWLTSEGKEIKNKDEILALLKALFLPKRLSIIHCPGHQKGHSAEARGNRMADQ | |
| | AARKAAITETPDTSTLLKRTADGSEFESPKKKAKVE | |
| PL12023 | MPAAKRVKLDGGDKKYSIGLDIGTNSVGWAVITDEYKVPSKKFKVLGNTDRHSIKKNLIGALLFDSGETAEATRLKRTARRRYTRRKNRICYLQEIFSNEMAKV | 16,083 |
| | DDSFFHRLEESFLVEEDKKHERHPIFGNIVDEVAYHEKYPTIYHLRKKLVDSTDKADLRLIYLALAHMIKFRGHFLIEGDLNPDNSDVDKLFIQLVQTYNQLFEE | |
| | NPINASGVDAKAILSARLSKSRRLENLIAQLPGEKKNGLFGNLIALSLGLTPNFKSNFDLAEDAKLQLSKDTYDDDLDNLLAQIGDQYADLFLAAKNLSDAILLS | |
| | DILRVNTEITKAPLSASMIKRYDEHHQDLTLLKALVRQQLPEKYKEIFFDQSKNGYAGYIDGGASQEEFYKFIKPILEKMDGTEELLVKLNREDLLRKQRTFDNG | |
| | SIPHQIHLGELHAILRRQEDFYPFLKDNREKIEKILTFRIPYYVGPLARGNSRFAWMTRKSEETITPWNFEEVVDKGASAQSFIERMTNFDKNLPNEKVLPKHSL | |
| | LYEYFTVYNELTKVKYVTEGMRKPAFLSGEQKKAIVDLLFKTNRKVTVKQLKEDYFKKIECFDSVEISGVEDRFNASLGTYHDLLKIIKDKDFLDNEENEDILEDIV | |
| | LTLTLFEDREMIEERLKTYAHLFDDKVMKQLKRRRYTGWGRLSRKLINGIRDKQSGKTILDFLKSDGFANRNFMQLIHDDSLTFKEDIQKAQVSGQGDSLHE | |
| | HIANLAGSPAIKKGILQTVKVVDELVKVMGRHKPENIVIEMARENQTTQKGQKNSRERMKRIEEGIKELGSQILKEHPVENTQLQNEKLYLYYLQNGRDMYV | |
| | DQELDINRLSDYDVDHIVPQSFLKDDSIDNKVLTRSDKARGKSDNVPSEEVVKKMKNYWRQLLNAKLITQRKFDNLTKAERGGLSELDKAGFIKRQLVETRQI | |
| | TKHVAQILDSRMNTKYDENDKLIREVKVITLKSKLVSDFRKDFQFYKVREINNYHHAHDAYLNAVVGTALIKKYPKLESEFVYGDYKVYDVRKMIAKSEQEIGK | |
| | ATAKYFFYSNIMNFFKTEITLANGEIRKRPLIETNGETGEIVWDKGRDFATVRKVLSMPQVNIVKKTEVQTGGFSKESILPKRNSDKLIARKKDWDPKKYGGFD | |
| | SPTVAYSVLVVAKVEKGKSKKLKSVKELLGITIMERSSFEKNPIDFLEAKGYKEVKKDLIIKLPKYSLFELENGRKRMLASAGELQKGNELALPSKYVNFLYLASHY | |
| | EKLKGSPEDNEQKQLFVEQHKHYLDEIIEQISEFSKRVILADANLDKVLSAYNKHRDKPIREQAENIIHLFTLTNLGAPAAFKYFDTTIDRKRYTSTKEVLDATLIH | |
| | QSITGLYETRIDLSQLGGDGSSGSSGSSGSSGSSGSSMASNFTQFVLVDNGGTGDVTVAPSNFANGIAEWISSNSRSQAYKVTCSVRQSSAQNRKYTIKVEV | |
| | PKGAWRSYLNMELTIPIFATNSDCELIVKAMQGLLKDGNPIPSAIAANSGIYGGSGGSMASNFTQFVLVDNGGTGDVTVAPSNFANGIAEWISSNSRSQAY | |
| | KVTCSVRQSSAQNRKYTIKVEVPKGAWRSYLNMELTIPIFATNSDCELIVKAMQGLLKDGNPIPSAIAANSGIYGGGSGGGSGGGSGGGSMASNFTQFVLV | |
| | DNGGTGDVTVAPSNFANGIAEWISSNSRSQAYKVTCSVRQSSAQNRKYTIKVEVPKGAWRSYLNMELTIPIFATNSDCELIVKAMQGLLKDGNPIPSAIAAN | |
| | SGIYGGSGGSMASNFTQFVLVDNGGTGDVTVAPSNFANGIAEWISSNSRSQAYKVTCSVRQSSAQNRKYTIKVEVPKGAWRSYLNMELTIPIFATNSDCELI | |
| | VKAMQGLLKDGNPIPSAIAANSGIYGSSGSSGSSGSSGSSGSSTLNIEDEHRLHETSKEPDVSLGSTWLSDFPQAWAETGGMGLAVRQAPLIIPLKATSTPVSI | |
| | KQYPMSQEARLGIKPHIQRLLDQGILVPCQSPWNTPLLPVKKPGTNDYRPVQDLREVNKRVEDIHPTVPNPYNLLSGLPPSHQWYTVLDLKDAFFCLRLHPT | |
| | SQPLFAFEWRDPEMGISGQLTWTRLPQGFKNSPTLFNEALHRDLADFRIQHPDLILLQYVDDLLLAATSELDCQQGTRALLQTLGNLGYRASAKKAQICQKQ | |
| | VKYLGYLLKEGQRWLTEARKETVMGQPTPKTPRQLREFLGKAGFCRLFIPGFAEMAAPLYPLTKPGTLFNWGPDQQKAYQEIKQALLTAPALGLPDLTKPFE | |
| | LFVDEKQGYAKGVLTQKLGPWRRPVAYLSKKLDPVAAGWPPCLRMVAAIAVLTKDAGKLTMGQPLVILAPHAVEALVKQPPDRWLSNARMTHYQALLLD | |
| | TDRVQFGPVVALNPATLLPLPEEGLQHNCLDILAEAHGTRPDLTDQPLPDADHTWYTDGSSLLQEGQRKAGAAVTTETEVIWAKALPAGTSAQRAELIALT | |
| | QALKMAEGKKLNVYTDSRYAFATAHIHGEIYRRRGWLTSEGKEIKNKDEILALLKALFLPKRLSIIHCPGHQKGHSAEARGNRMADQAARKAAITETPDTSTLL | |
| | KRTADGSEFESPKKKAKVE | |
| PL12024 | MPAAKRVKLDGGDKKYSIGLDIGTNSVGWAVITDEYKVPSKKFKVLGNTDRHSIKKNLIGALLFDSGETAEATRLKRTARRRYTRRKNRICYLQEIFSNEMAKV | 16,084 |
| | DDSFFHRLEESFLVEEDKKHERHPIFGNIVDEVAYHEKYPTIYHLRKKLVDSTDKADLRLIYLALAHMIKFRGHFLIEGDLNPDNSDVDKLFIQLVQTYNQLFEE | |
| | NPINASGVDAKAILSARLSKSRRLENLIAQLPGEKKNGLFGNLIALSLGLTPNFKSNFDLAEDAKLQLSKDTYDDDLDNLLAQIGDQYADLFLAAKNLSDAILLS | |
| | DILRVNTEITKAPLSASMIKRYDEHHQDLTLLKALVRQQLPEKYKEIFFDQSKNGYAGYIDGGASQEEFYKFIKPILEKMDGTEELLVKLNREDLLRKQRTFDNG | |
| | SIPHQIHLGELHAILRRQEDFYPFLKDNREKIEKILTFRIPYYVGPLARGNSRFAWMTRKSEETITPWNFEEVVDKGASAQSFIERMTNFDKNLPNEKVLPKHSL | |
| | LYEYFTVYNELTKVKYVTEGMRKPAFLSGEQKKAIVDLLFKTNRKVTVKQLKEDYFKKIECFDSVEISGVEDRFNASLGTYHDLLKIIKDKDFLDNEENEDILEDIV | |
| | LTLTLFEDREMIEERLKTYAHLFDDKVMKQLKRRRYTGWGRLSRKLINGIRDKQSGKTILDFLKSDGFANRNFMQLIHDDSLTFKEDIQKAQVSGQGDSLHE | |
| | HIANLAGSPAIKKGILQTVKVVDELVKVMGRHKPENIVIEMARENQTTQKGQKNSRERMKRIEEGIKELGSQILKEHPVENTQLQNEKLYLYYLQNGRDMYV | |
| | DQELDINRLSDYDVDHIVPQSFLKDDSIDNKVLTRSDKARGKSDNVPSEEVVKKMKNYWRQLLNAKLITQRKFDNLTKAERGGLSELDKAGFIKRQLVETRQI | |
| | TKHVAQILDSRMNTKYDENDKLIREVKVITLKSKLVSDFRKDFQFYKVREINNYHHAHDAYLNAVVGTALIKKYPKLESEFVYGDYKVYDVRKMIAKSEQEIGK | |
| | ATAKYFFYSNIMNFFKTEITLANGEIRKRPLIETNGETGEIVWDKGRDFATVRKVLSMPQVNIVKKTEVQTGGFSKESILPKRNSDKLIARKKDWDPKKYGGFD | |
| | SPTVAYSVLVVAKVEKGKSKKLKSVKELLGITIMERSSFEKNPIDFLEAKGYKEVKKDLIIKLPKYSLFELENGRKRMLASAGELQKGNELALPSKYVNFLYLASHY | |
| | EKLKGSPEDNEQKQLFVEQHKHYLDEIIEQISEFSKRVILADANLDKVLSAYNKHRDKPIREQAENIIHLFTLTNLGAPAAFKYFDTTIDRKRYTSTKEVLDATLIH | |
| | QSITGLYETRIDLSQLGGDGSSGSSGSSGSSGSSGSSMASNFTQFVLVDNGGTGDVTVAPSNFANGIAEWISSNSRSQAYKVTCSVRQSSAQNRKYTIKVEV | |
| | PKGAWRSYLNMELTIPIFATNSDCELIVKAMQGLLKDGNPIPSAIAANSGIYGGSGGSMASNFTQFVLVDNGGTGDVTVAPSNFANGIAEWISSNSRSQAY | |
| | KVTCSVRQSSAQNRKYTIKVEVPKGAWRSYLNMELTIPIFATNSDCELIVKAMQGLLKDGNPIPSAIAANSGIYGGGSGGGSGGGSGGGSMASNFTQFVLV | |
| | DNGGTGDVTVAPSNFANGIAEWISSNSRSQAYKVTCSVRQSSAQNRKYTIKVEVPKGAWRSYLNMELTIPIFATNSDCELIVKAMQGLLKDGNPIPSAIAAN | |
| | SGIYGGSGGSMASNFTQFVLVDNGGTGDVTVAPSNFANGIAEWISSNSRSQAYKVTCSVRQSSAQNRKYTIKVEVPKGAWRSYLNMELTIPIFATNSDCELI | |
| | VKAMQGLLKDGNPIPSAIAANSGIYGSSGGGEAAAKTLNIEDEHRLHETSKEPDVSLGSTWLSDFPQAWAETGGMGLAVRQAPLIIPLKATSTPVSIKQYPM | |
| | SQEARLGIKPHIQRLLDQGILVPCQSPWNTPLLPVKKPGTNDYRPVQDLREVNKRVEDIHPTVPNPYNLLSGLPPSHQWYTVLDLKDAFFCLRLHPTSQPLFA | |
| | FEWRDPEMGISGQLTWTRLPQGFKNSPTLFNEALHRDLADFRIQHPDLILLQYVDDLLLAATSELDCQQGTRALLQTLGNLGYRASAKKAQICQKQVKYLGY | |
| | LLKEGQRWLTEARKETVMGQPTPKTPRQLREFLGKAGFCRLFIPGFAEMAAPLYPLTKPGTLFNWGPDQQKAYQEIKQALLTAPALGLPDLTKPFELFVDEK | |
| | QGYAKGVLTQKLGPWRRPVAYLSKKLDPVAAGWPPCLRMVAAIAVLTKDAGKLTMGQPLVILAPHAVEALVKQPPDRWLSNARMTHYQALLLDTDRVQ | |
| | FGPVVALNPATLLPLPEEGLQHNCLDILAEAHGTRPDLTDQPLPDADHTWYTDGSSLLQEGQRKAGAAVTTETEVIWAKALPAGTSAQRAELIALTQALKM | |
| | AEGKKLNVYTDSRYAFATAHIHGEIYRRRGWLTSEGKEIKNKDEILALLKALFLPKRLSIIHCPGHQKGHSAEARGNRMADQAARKAAITETPDTSTLLKRTAD | |
| | GSEFESPKKKAKVE | |
| PL12025 | MPAAKRVKLDGGDKKYSIGLDIGTNSVGWAVITDEYKVPSKKFKVLGNTDRHSIKKNLIGALLFDSGETAEATRLKRTARRRYTRRKNRICYLQEIFSNEMAKV | 16,085 |
| | DDSFFHRLEESFLVEEDKKHERHPIFGNIVDEVAYHEKYPTIYHLRKKLVDSTDKADLRLIYLALAHMIKFRGHFLIEGDLNPDNSDVDKLFIQLVQTYNQLFEE | |
| | NPINASGVDAKAILSARLSKSRRLENLIAQLPGEKKNGLFGNLIALSLGLTPNFKSNFDLAEDAKLQLSKDTYDDDLDNLLAQIGDQYADLFLAAKNLSDAILLS | |
| | DILRVNTEITKAPLSASMIKRYDEHHQDLTLLKALVRQQLPEKYKEIFFDQSKNGYAGYIDGGASQEEFYKFIKPILEKMDGTEELLVKLNREDLLRKQRTFDNG | |
| | SIPHQIHLGELHAILRRQEDFYPFLKDNREKIEKILTFRIPYYVGPLARGNSRFAWMTRKSEETITPWNFEEVVDKGASAQSFIERMTNFDKNLPNEKVLPKHSL | |
| | LYEYFTVYNELTKVKYVTEGMRKPAFLSGEQKKAIVDLLFKTNRKVTVKQLKEDYFKKIECFDSVEISGVEDRFNASLGTYHDLLKIIKDKDFLDNEENEDILEDIV | |
| | LTLTLFEDREMIEERLKTYAHLFDDKVMKQLKRRRYTGWGRLSRKLINGIRDKQSGKTILDFLKSDGFANRNFMQLIHDDSLTFKEDIQKAQVSGQGDSLHE | |
| | HIANLAGSPAIKKGILQTVKVVDELVKVMGRHKPENIVIEMARENQTTQKGQKNSRERMKRIEEGIKELGSQILKEHPVENTQLQNEKLYLYYLQNGRDMYV | |
| | DQELDINRLSDYDVDHIVPQSFLKDDSIDNKVLTRSDKARGKSDNVPSEEVVKKMKNYWRQLLNAKLITQRKFDNLTKAERGGLSELDKAGFIKRQLVETRQI | |
| | TKHVAQILDSRMNTKYDENDKLIREVKVITLKSKLVSDFRKDFQFYKVREINNYHHAHDAYLNAVVGTALIKKYPKLESEFVYGDYKVYDVRKMIAKSEQEIGK | |
| | ATAKYFFYSNIMNFFKTEITLANGEIRKRPLIETNGETGEIVWDKGRDFATVRKVLSMPQVNIVKKTEVQTGGFSKESILPKRNSDKLIARKKDWDPKKYGGFD | |
| | SPTVAYSVLVVAKVEKGKSKKLKSVKELLGITIMERSSFEKNPIDFLEAKGYKEVKKDLIIKLPKYSLFELENGRKRMLASAGELQKGNELALPSKYVNFLYLASHY | |
| | EKLKGSPEDNEQKQLFVEQHKHYLDEIIEQISEFSKRVILADANLDKVLSAYNKHRDKPIREQAENIIHLFTLTNLGAPAAFKYFDTTIDRKRYTSTKEVLDATLIH | |
| | QSITGLYETRIDLSQLGGDGSSGGGEAAAKMASNFTQFVLVDNGGTGDVTVAPSNFANGIAEWISSNSRSQAYKVTCSVRQSSAQNRKYTIKVEVPKGAW | |
| | RSYLNMELTIPIFATNSDCELIVKAMQGLLKDGNPIPSAIAANSGIYAEAAAKEAAAKEAAAKEAAAKALEAEAAAKEAAAKEAAAKEAAAKATLNIEDEHRL | |
| | HETSKEPDVSLGSTWLSDFPQAWAETGGMGLAVRQAPLIIPLKATSTPVSIKQYPMSQEARLGIKPHIQRLLDQGILVPCQSPWNTPLLPVKKPGTNDYRPV | |
| | QDLREVNKRVEDIHPTVPNPYNLLSGLPPSHQWYTVLDLKDAFFCLRLHPTSQPLFAFEWRDPEMGISGQLTWTRLPQGFKNSPTLFNEALHRDLADFRIQ | |
| | HPDLILLQYVDDLLLAATSELDCQQGTRALLQTLGNLGYRASAKKAQICQKQVKYLGYLLKEGQRWLTEARKETVMGQPTPKTPRQLREFLGKAGFCRLFIP | |
| | GFAEMAAPLYPLTKPGTLFNWGPDQQKAYQEIKQALLTAPALGLPDLTKPFELFVDEKQGYAKGVLTQKLGPWRRPVAYLSKKLDPVAAGWPPCLRMVAA | |
| | IAVLTKDAGKLTMGQPLVILAPHAVEALVKQPPDRWLSNARMTHYQALLLDTDRVQFGPVVALNPATLLPLPEEGLQHNCLDILAEAHGTRPDLTDQPLPD | |
| | ADHTWYTDGSSLLQEGQRKAGAAVTTETEVIWAKALPAGTSAQRAELIALTQALKMAEGKKLNVYTDSRYAFATAHIHGEIYRRRGWLTSEGKEIKNKDEIL | |
| | ALLKALFLPKRLSIIHCPGHQKGHSAEARGNRMADQAARKAAITETPDTSTLLKRTADGSEFESPKKKAKVE | |
| PL12026 | MPAAKRVKLDGGDKKYSIGLDIGTNSVGWAVITDEYKVPSKKFKVLGNTDRHSIKKNLIGALLFDSGETAEATRLKRTARRRYTRRKNRICYLQEIFSNEMAKV | 16,086 |
| | DDSFFHRLEESFLVEEDKKHERHPIFGNIVDEVAYHEKYPTIYHLRKKLVDSTDKADLRLIYLALAHMIKFRGHFLIEGDLNPDNSDVDKLFIQLVQTYNQLFEE | |
| | NPINASGVDAKAILSARLSKSRRLENLIAQLPGEKKNGLFGNLIALSLGLTPNFKSNFDLAEDAKLQLSKDTYDDDLDNLLAQIGDQYADLFLAAKNLSDAILLS | |
| | DILRVNTEITKAPLSASMIKRYDEHHQDLTLLKALVRQQLPEKYKEIFFDQSKNGYAGYIDGGASQEEFYKFIKPILEKMDGTEELLVKLNREDLLRKQRTFDNG | |
| | SIPHQIHLGELHAILRRQEDFYPFLKDNREKIEKILTFRIPYYVGPLARGNSRFAWMTRKSEETITPWNFEEVVDKGASAQSFIERMTNFDKNLPNEKVLPKHSL | |
| | LYEYFTVYNELTKVKYVTEGMRKPAFLSGEQKKAIVDLLFKTNRKVTVKQLKEDYFKKIECFDSVEISGVEDRFNASLGTYHDLLKIIKDKDFLDNEENEDILEDIV | |
| | LTLTLFEDREMIEERLKTYAHLFDDKVMKQLKRRRYTGWGRLSRKLINGIRDKQSGKTILDFLKSDGFANRNFMQLIHDDSLTFKEDIQKAQVSGQGDSLHE | |
| | HIANLAGSPAIKKGILQTVKVVDELVKVMGRHKPENIVIEMARENQTTQKGQKNSRERMKRIEEGIKELGSQILKEHPVENTQLQNEKLYLYYLQNGRDMYV | |
| | DQELDINRLSDYDVDHIVPQSFLKDDSIDNKVLTRSDKARGKSDNVPSEEVVKKMKNYWRQLLNAKLITQRKFDNLTKAERGGLSELDKAGFIKRQLVETRQI | |
| | TKHVAQILDSRMNTKYDENDKLIREVKVITLKSKLVSDFRKDFQFYKVREINNYHHAHDAYLNAVVGTALIKKYPKLESEFVYGDYKVYDVRKMIAKSEQEIGK | |
| | ATAKYFFYSNIMNFFKTEITLANGEIRKRPLIETNGETGEIVWDKGRDFATVRKVLSMPQVNIVKKTEVQTGGFSKESILPKRNSDKLIARKKDWDPKKYGGFD | |
| | SPTVAYSVLVVAKVEKGKSKKLKSVKELLGITIMERSSFEKNPIDFLEAKGYKEVKKDLIIKLPKYSLFELENGRKRMLASAGELQKGNELALPSKYVNFLYLASHY | |
| | EKLKGSPEDNEQKQLFVEQHKHYLDEIIEQISEFSKRVILADANLDKVLSAYNKHRDKPIREQAENIIHLFTLTNLGAPAAFKYFDTTIDRKRYTSTKEVLDATLIH | |
| | QSITGLYETRIDLSQLGGDGSSGGGEAAAKMASNFTQFVLVDNGGTGDVTVAPSNFANGIAEWISSNSRSQAYKVTCSVRQSSAQNRKYTIKVEVPKGAW | |
| | RSYLNMELTIPIFATNSDCELIVKAMQGLLKDGNPIPSAIAANSGIYSGGSSGGSSGSETPGTSESATPESSGGSSGGSSTLNIEDEHRLHETSKEPDVSLGSTW | |
| | LSDFPQAWAETGGMGLAVRQAPLIIPLKATSTPVSIKQYPMSQEARLGIKPHIQRLLDQGILVPCQSPWNTPLLPVKKPGTNDYRPVQDLREVNKRVEDIHP | |
| | TVPNPYNLLSGLPPSHQWYTVLDLKDAFFCLRLHPTSQPLFAFEWRDPEMGISGQLTWTRLPQGFKNSPTLFNEALHRDLADFRIQHPDLILLQYVDDLLLA | |
| | ATSELDCQQGTRALLQTLGNLGYRASAKKAQICQKQVKYLGYLLKEGQRWLTEARKETVMGQPTPKTPRQLREFLGKAGFCRLFIPGFAEMAAPLYPLTKP | |
| | GTLFNWGPDQQKAYQEIKQALLTAPALGLPDLTKPFELFVDEKQGYAKGVLTQKLGPWRRPVAYLSKKLDPVAAGWPPCLRMVAAIAVLTKDAGKLTMG | |
| | QPLVILAPHAVEALVKQPPDRWLSNARMTHYQALLLDTDRVQFGPVVALNPATLLPLPEEGLQHNCLDILAEAHGTRPDLTDQPLPDADHTWYTDGSSLL | |
| | QEGQRKAGAAVTTETEVIWAKALPAGTSAQRAELIALTQALKMAEGKKLNVYTDSRYAFATAHIHGEIYRRRGWLTSEGKEIKNKDEILALLKALFLPKRLSIIH | |
| | CPGHQKGHSAEARGNRMADQAARKAAITETPDTSTLLKRTADGSEFESPKKKAKVE | |
| PL12027 | MPAAKRVKLDGGDKKYSIGLDIGTNSVGWAVITDEYKVPSKKFKVLGNTDRHSIKKNLIGALLFDSGETAEATRLKRTARRRYTRRKNRICYLQEIFSNEMAKV | 16,087 |
| | DDSFFHRLEESFLVEEDKKHERHPIFGNIVDEVAYHEKYPTIYHLRKKLVDSTDKADLRLIYLALAHMIKFRGHFLIEGDLNPDNSDVDKLFIQLVQTYNQLFEE | |
| | NPINASGVDAKAILSARLSKSRRLENLIAQLPGEKKNGLFGNLIALSLGLTPNFKSNFDLAEDAKLQLSKDTYDDDLDNLLAQIGDQYADLFLAAKNLSDAILLS | |
| | DILRVNTEITKAPLSASMIKRYDEHHQDLTLLKALVRQQLPEKYKEIFFDQSKNGYAGYIDGGASQEEFYKFIKPILEKMDGTEELLVKLNREDLLRKQRTFDNG | |
| | SIPHQIHLGELHAILRRQEDFYPFLKDNREKIEKILTFRIPYYVGPLARGNSRFAWMTRKSEETITPWNFEEVVDKGASAQSFIERMTNFDKNLPNEKVLPKHSL | |
| | LYEYFTVYNELTKVKYVTEGMRKPAFLSGEQKKAIVDLLFKTNRKVTVKQLKEDYFKKIECFDSVEISGVEDRFNASLGTYHDLLKIIKDKDFLDNEENEDILEDIV | |
| | LTLTLFEDREMIEERLKTYAHLFDDKVMKQLKRRRYTGWGRLSRKLINGIRDKQSGKTILDFLKSDGFANRNFMQLIHDDSLTFKEDIQKAQVSGQGDSLHE | |
| | HIANLAGSPAIKKGILQTVKVVDELVKVMGRHKPENIVIEMARENQTTQKGQKNSRERMKRIEEGIKELGSQILKEHPVENTQLQNEKLYLYYLQNGRDMYV | |
| | DQELDINRLSDYDVDHIVPQSFLKDDSIDNKVLTRSDKARGKSDNVPSEEVVKKMKNYWRQLLNAKLITQRKFDNLTKAERGGLSELDKAGFIKRQLVETRQI | |
| | TKHVAQILDSRMNTKYDENDKLIREVKVITLKSKLVSDFRKDFQFYKVREINNYHHAHDAYLNAVVGTALIKKYPKLESEFVYGDYKVYDVRKMIAKSEQEIGK | |
| | ATAKYFFYSNIMNFFKTEITLANGEIRKRPLIETNGETGEIVWDKGRDFATVRKVLSMPQVNIVKKTEVQTGGFSKESILPKRNSDKLIARKKDWDPKKYGGFD | |
| | SPTVAYSVLVVAKVEKGKSKKLKSVKELLGITIMERSSFEKNPIDFLEAKGYKEVKKDLIIKLPKYSLFELENGRKRMLASAGELQKGNELALPSKYVNFLYLASHY | |
| | EKLKGSPEDNEQKQLFVEQHKHYLDEIIEQISEFSKRVILADANLDKVLSAYNKHRDKPIREQAENIIHLFTLTNLGAPAAFKYFDTTIDRKRYTSTKEVLDATLIH | |
| | QSITGLYETRIDLSQLGGDGSSGGGEAAAKMASNFTQFVLVDNGGTGDVTVAPSNFANGIAEWISSNSRSQAYKVTCSVRQSSAQNRKYTIKVEVPKGAW | |
| | RSYLNMELTIPIFATNSDCELIVKAMQGLLKDGNPIPSAIAANSGIYGSSGSSGSSGSSGSSGSSTLNIEDEHRLHETSKEPDVSLGSTWLSDFPQAWAETGGM | |
| | GLAVRQAPLIIPLKATSTPVSIKQYPMSQEARLGIKPHIQRLLDQGILVPCQSPWNTPLLPVKKPGTNDYRPVQDLREVNKRVEDIHPTVPNPYNLLSGLPPSH | |
| | QWYTVLDLKDAFFCLRLHPTSQPLFAFEWRDPEMGISGQLTWTRLPQGFKNSPTLFNEALHRDLADFRIQHPDLILLQYVDDLLLAATSELDCQQGTRALLQ | |
| | TLGNLGYRASAKKAQICQKQVKYLGYLLKEGQRWLTEARKETVMGQPTPKTPRQLREFLGKAGFCRLFIPGFAEMAAPLYPLTKPGTLFNWGPDQQKAYQ | |
| | EIKQALLTAPALGLPDLTKPFELFVDEKQGYAKGVLTQKLGPWRRPVAYLSKKLDPVAAGWPPCLRMVAAIAVLTKDAGKLTMGQPLVILAPHAVEALVKQ | |
| | PPDRWLSNARMTHYQALLLDTDRVQFGPVVALNPATLLPLPEEGLQHNCLDILAEAHGTRPDLTDQPLPDADHTWYTDGSSLLQEGQRKAGAAVTTETEV | |
| | IWAKALPAGTSAQRAELIALTQALKMAEGKKLNVYTDSRYAFATAHIHGEIYRRRGWLTSEGKEIKNKDEILALLKALFLPKRLSIIHCPGHQKGHSAEARGNR | |
| | MADQAARKAAITETPDTSTLLKRTADGSEFESPKKKAKVE | |
| PL12028 | MPAAKRVKLDGGDKKYSIGLDIGTNSVGWAVITDEYKVPSKKFKVLGNTDRHSIKKNLIGALLFDSGETAEATRLKRTARRRYTRRKNRICYLQEIFSNEMAKV | 16,088 |
| | DDSFFHRLEESFLVEEDKKHERHPIFGNIVDEVAYHEKYPTIYHLRKKLVDSTDKADLRLIYLALAHMIKFRGHFLIEGDLNPDNSDVDKLFIQLVQTYNQLFEE | |
| | NPINASGVDAKAILSARLSKSRRLENLIAQLPGEKKNGLFGNLIALSLGLTPNFKSNFDLAEDAKLQLSKDTYDDDLDNLLAQIGDQYADLFLAAKNLSDAILLS | |
| | DILRVNTEITKAPLSASMIKRYDEHHQDLTLLKALVRQQLPEKYKEIFFDQSKNGYAGYIDGGASQEEFYKFIKPILEKMDGTEELLVKLNREDLLRKQRTFDNG | |
| | SIPHQIHLGELHAILRRQEDFYPFLKDNREKIEKILTFRIPYYVGPLARGNSRFAWMTRKSEETITPWNFEEVVDKGASAQSFIERMTNFDKNLPNEKVLPKHSL | |
| | LYEYFTVYNELTKVKYVTEGMRKPAFLSGEQKKAIVDLLFKTNRKVTVKQLKEDYFKKIECFDSVEISGVEDRFNASLGTYHDLLKIIKDKDFLDNEENEDILEDIV | |
| | LTLTLFEDREMIEERLKTYAHLFDDKVMKQLKRRRYTGWGRLSRKLINGIRDKQSGKTILDFLKSDGFANRNFMQLIHDDSLTFKEDIQKAQVSGQGDSLHE | |
| | HIANLAGSPAIKKGILQTVKVVDELVKVMGRHKPENIVIEMARENQTTQKGQKNSRERMKRIEEGIKELGSQILKEHPVENTQLQNEKLYLYYLQNGRDMYV | |
| | DQELDINRLSDYDVDHIVPQSFLKDDSIDNKVLTRSDKARGKSDNVPSEEVVKKMKNYWRQLLNAKLITQRKFDNLTKAERGGLSELDKAGFIKRQLVETRQI | |
| | TKHVAQILDSRMNTKYDENDKLIREVKVITLKSKLVSDFRKDFQFYKVREINNYHHAHDAYLNAVVGTALIKKYPKLESEFVYGDYKVYDVRKMIAKSEQEIGK | |
| | ATAKYFFYSNIMNFFKTEITLANGEIRKRPLIETNGETGEIVWDKGRDFATVRKVLSMPQVNIVKKTEVQTGGFSKESILPKRNSDKLIARKKDWDPKKYGGFD | |
| | SPTVAYSVLVVAKVEKGKSKKLKSVKELLGITIMERSSFEKNPIDFLEAKGYKEVKKDLIIKLPKYSLFELENGRKRMLASAGELQKGNELALPSKYVNFLYLASHY | |
| | EKLKGSPEDNEQKQLFVEQHKHYLDEIIEQISEFSKRVILADANLDKVLSAYNKHRDKPIREQAENIIHLFTLTNLGAPAAFKYFDTTIDRKRYTSTKEVLDATLIH | |
| | QSITGLYETRIDLSQLGGDGSSGGGEAAAKMASNFTQFVLVDNGGTGDVTVAPSNFANGIAEWISSNSRSQAYKVTCSVRQSSAQNRKYTIKVEVPKGAW | |
| | RSYLNMELTIPIFATNSDCELIVKAMQGLLKDGNPIPSAIAANSGIYGSSGGGEAAAKTLNIEDEHRLHETSKEPDVSLGSTWLSDFPQAWAETGGMGLAVR | |
| | QAPLIIPLKATSTPVSIKQYPMSQEARLGIKPHIQRLLDQGILVPCQSPWNTPLLPVKKPGTNDYRPVQDLREVNKRVEDIHPTVPNPYNLLSGLPPSHQWYT | |
| | VLDLKDAFFCLRLHPTSQPLFAFEWRDPEMGISGQLTWTRLPQGFKNSPTLFNEALHRDLADFRIQHPDLILLQYVDDLLLAATSELDCQQGTRALLQTLGNL | |
| | GYRASAKKAQICQKQVKYLGYLLKEGQRWLTEARKETVMGQPTPKTPRQLREFLGKAGFCRLFIPGFAEMAAPLYPLTKPGTLFNWGPDQQKAYQEIKQAL | |
| | LTAPALGLPDLTKPFELFVDEKQGYAKGVLTQKLGPWRRPVAYLSKKLDPVAAGWPPCLRMVAAIAVLTKDAGKLTMGQPLVILAPHAVEALVKQPPDRW | |
| | LSNARMTHYQALLLDTDRVQFGPVVALNPATLLPLPEEGLQHNCLDILAEAHGTRPDLTDQPLPDADHTWYTDGSSLLQEGQRKAGAAVTTETEVIWAKA | |
| | LPAGTSAQRAELIALTQALKMAEGKKLNVYTDSRYAFATAHIHGEIYRRRGWLTSEGKEIKNKDEILALLKALFLPKRLSIIHCPGHQKGHSAEARGNRMADQ | |
| | AARKAAITETPDTSTLLKRTADGSEFESPKKKAKVE | |
| PL12029 | MPAAKRVKLDGGDKKYSIGLDIGTNSVGWAVITDEYKVPSKKFKVLGNTDRHSIKKNLIGALLFDSGETAEATRLKRTARRRYTRRKNRICYLQEIFSNEMAKV | 16,089 |
| | DDSFFHRLEESFLVEEDKKHERHPIFGNIVDEVAYHEKYPTIYHLRKKLVDSTDKADLRLIYLALAHMIKFRGHFLIEGDLNPDNSDVDKLFIQLVQTYNQLFEE | |
| | NPINASGVDAKAILSARLSKSRRLENLIAQLPGEKKNGLFGNLIALSLGLTPNFKSNFDLAEDAKLQLSKDTYDDDLDNLLAQIGDQYADLFLAAKNLSDAILLS | |
| | DILRVNTEITKAPLSASMIKRYDEHHQDLTLLKALVRQQLPEKYKEIFFDQSKNGYAGYIDGGASQEEFYKFIKPILEKMDGTEELLVKLNREDLLRKQRTFDNG | |
| | SIPHQIHLGELHAILRRQEDFYPFLKDNREKIEKILTFRIPYYVGPLARGNSRFAWMTRKSEETITPWNFEEVVDKGASAQSFIERMTNFDKNLPNEKVLPKHSL | |
| | LYEYFTVYNELTKVKYVTEGMRKPAFLSGEQKKAIVDLLFKTNRKVTVKQLKEDYFKKIECFDSVEISGVEDRFNASLGTYHDLLKIIKDKDFLDNEENEDILEDIV | |
| | LTLTLFEDREMIEERLKTYAHLFDDKVMKQLKRRRYTGWGRLSRKLINGIRDKQSGKTILDFLKSDGFANRNFMQLIHDDSLTFKEDIQKAQVSGQGDSLHE | |
| | HIANLAGSPAIKKGILQTVKVVDELVKVMGRHKPENIVIEMARENQTTQKGQKNSRERMKRIEEGIKELGSQILKEHPVENTQLQNEKLYLYYLQNGRDMYV | |
| | DQELDINRLSDYDVDHIVPQSFLKDDSIDNKVLTRSDKARGKSDNVPSEEVVKKMKNYWRQLLNAKLITQRKFDNLTKAERGGLSELDKAGFIKRQLVETRQI | |
| | TKHVAQILDSRMNTKYDENDKLIREVKVITLKSKLVSDFRKDFQFYKVREINNYHHAHDAYLNAVVGTALIKKYPKLESEFVYGDYKVYDVRKMIAKSEQEIGK | |
| | ATAKYFFYSNIMNFFKTEITLANGEIRKRPLIETNGETGEIVWDKGRDFATVRKVLSMPQVNIVKKTEVQTGGFSKESILPKRNSDKLIARKKDWDPKKYGGFD | |
| | SPTVAYSVLVVAKVEKGKSKKLKSVKELLGITIMERSSFEKNPIDFLEAKGYKEVKKDLIIKLPKYSLFELENGRKRMLASAGELQKGNELALPSKYVNFLYLASHY | |
| | EKLKGSPEDNEQKQLFVEQHKHYLDEIIEQISEFSKRVILADANLDKVLSAYNKHRDKPIREQAENIIHLFTLTNLGAPAAFKYFDTTIDRKRYTSTKEVLDATLIH | |
| | QSITGLYETRIDLSQLGGDGSSGGGEAAAKMASNFTQFVLVDNGGTGDVTVAPSNFANGIAEWISSNSRSQAYKVTCSVRQSSAQNRKYTIKVEVPKGAW | |
| | RSYLNMELTIPIFATNSDCELIVKAMQGLLKDGNPIPSAIAANSGIYGGSGGSMASNFTQFVLVDNGGTGDVTVAPSNFANGIAEWISSNSRSQAYKVTCSV | |
| | RQSSAQNRKYTIKVEVPKGAWRSYLNMELTIPIFATNSDCELIVKAMQGLLKDGNPIPSAIAANSGIYAEAAAKEAAAKEAAAKEAAAKALEAEAAAKEAAAK | |
| | EAAAKEAAAKATLNIEDEHRLHETSKEPDVSLGSTWLSDFPQAWAETGGMGLAVRQAPLIIPLKATSTPVSIKQYPMSQEARLGIKPHIQRLLDQGILVPCQS | |
| | PWNTPLLPVKKPGTNDYRPVQDLREVNKRVEDIHPTVPNPYNLLSGLPPSHQWYTVLDLKDAFFCLRLHPTSQPLFAFEWRDPEMGISGQLTWTRLPQGF | |
| | KNSPTLFNEALHRDLADFRIQHPDLILLQYVDDLLLAATSELDCQQGTRALLQTLGNLGYRASAKKAQICQKQVKYLGYLLKEGQRWLTEARKETVMGQPTP | |
| | KTPRQLREFLGKAGFCRLFIPGFAEMAAPLYPLTKPGTLFNWGPDQQKAYQEIKQALLTAPALGLPDLTKPFELFVDEKQGYAKGVLTQKLGPWRRPVAYLS | |
| | KKLDPVAAGWPPCLRMVAAIAVLTKDAGKLTMGQPLVILAPHAVEALVKQPPDRWLSNARMTHYQALLLDTDRVQFGPVVALNPATLLPLPEEGLQHNC | |
| | LDILAEAHGTRPDLTDQPLPDADHTWYTDGSSLLQEGQRKAGAAVTTETEVIWAKALPAGTSAQRAELIALTQALKMAEGKKLNVYTDSRYAFATAHIHGEI | |
| | YRRRGWLTSEGKEIKNKDEILALLKALFLPKRLSIIHCPGHQKGHSAEARGNRMADQAARKAAITETPDTSTLLKRTADGSEFESPKKKAKVE | |
| PL12030 | MPAAKRVKLDGGDKKYSIGLDIGTNSVGWAVITDEYKVPSKKFKVLGNTDRHSIKKNLIGALLFDSGETAEATRLKRTARRRYTRRKNRICYLQEIFSNEMAKV | 16,090 |
| | DDSFFHRLEESFLVEEDKKHERHPIFGNIVDEVAYHEKYPTIYHLRKKLVDSTDKADLRLIYLALAHMIKFRGHFLIEGDLNPDNSDVDKLFIQLVQTYNQLFEE | |
| | NPINASGVDAKAILSARLSKSRRLENLIAQLPGEKKNGLFGNLIALSLGLTPNFKSNFDLAEDAKLQLSKDTYDDDLDNLLAQIGDQYADLFLAAKNLSDAILLS | |
| | DILRVNTEITKAPLSASMIKRYDEHHQDLTLLKALVRQQLPEKYKEIFFDQSKNGYAGYIDGGASQEEFYKFIKPILEKMDGTEELLVKLNREDLLRKQRTFDNG | |
| | SIPHQIHLGELHAILRRQEDFYPFLKDNREKIEKILTFRIPYYVGPLARGNSRFAWMTRKSEETITPWNFEEVVDKGASAQSFIERMTNFDKNLPNEKVLPKHSL | |
| | LYEYFTVYNELTKVKYVTEGMRKPAFLSGEQKKAIVDLLFKTNRKVTVKQLKEDYFKKIECFDSVEISGVEDRFNASLGTYHDLLKIIKDKDFLDNEENEDILEDIV | |
| | LTLTLFEDREMIEERLKTYAHLFDDKVMKQLKRRRYTGWGRLSRKLINGIRDKQSGKTILDFLKSDGFANRNFMQLIHDDSLTFKEDIQKAQVSGQGDSLHE | |
| | HIANLAGSPAIKKGILQTVKVVDELVKVMGRHKPENIVIEMARENQTTQKGQKNSRERMKRIEEGIKELGSQILKEHPVENTQLQNEKLYLYYLQNGRDMYV | |
| | DQELDINRLSDYDVDHIVPQSFLKDDSIDNKVLTRSDKARGKSDNVPSEEVVKKMKNYWRQLLNAKLITQRKFDNLTKAERGGLSELDKAGFIKRQLVETRQI | |
| | TKHVAQILDSRMNTKYDENDKLIREVKVITLKSKLVSDFRKDFQFYKVREINNYHHAHDAYLNAVVGTALIKKYPKLESEFVYGDYKVYDVRKMIAKSEQEIGK | |
| | ATAKYFFYSNIMNFFKTEITLANGEIRKRPLIETNGETGEIVWDKGRDFATVRKVLSMPQVNIVKKTEVQTGGFSKESILPKRNSDKLIARKKDWDPKKYGGFD | |
| | SPTVAYSVLVVAKVEKGKSKKLKSVKELLGITIMERSSFEKNPIDFLEAKGYKEVKKDLIIKLPKYSLFELENGRKRMLASAGELQKGNELALPSKYVNFLYLASHY | |
| | EKLKGSPEDNEQKQLFVEQHKHYLDEIIEQISEFSKRVILADANLDKVLSAYNKHRDKPIREQAENIIHLFTLTNLGAPAAFKYFDTTIDRKRYTSTKEVLDATLIH | |
| | QSITGLYETRIDLSQLGGDGSSGGGEAAAKMASNFTQFVLVDNGGTGDVTVAPSNFANGIAEWISSNSRSQAYKVTCSVRQSSAQNRKYTIKVEVPKGAW | |
| | RSYLNMELTIPIFATNSDCELIVKAMQGLLKDGNPIPSAIAANSGIYGGSGGSMASNFTQFVLVDNGGTGDVTVAPSNFANGIAEWISSNSRSQAYKVTCSV | |
| | RQSSAQNRKYTIKVEVPKGAWRSYLNMELTIPIFATNSDCELIVKAMQGLLKDGNPIPSAIAANSGIYSGGSSGGSSGSETPGTSESATPESSGGSSGGSSTLNI | |
| | EDEHRLHETSKEPDVSLGSTWLSDFPQAWAETGGMGLAVRQAPLIIPLKATSTPVSIKQYPMSQEARLGIKPHIQRLLDQGILVPCQSPWNTPLLPVKKPGT | |
| | NDYRPVQDLREVNKRVEDIHPTVPNPYNLLSGLPPSHQWYTVLDLKDAFFCLRLHPTSQPLFAFEWRDPEMGISGQLTWTRLPQGFKNSPTLFNEALHRDL | |
| | ADFRIQHPDLILLQYVDDLLLAATSELDCQQGTRALLQTLGNLGYRASAKKAQICQKQVKYLGYLLKEGQRWLTEARKETVMGQPTPKTPRQLREFLGKAGF | |
| | CRLFIPGFAEMAAPLYPLTKPGTLFNWGPDQQKAYQEIKQALLTAPALGLPDLTKPFELFVDEKQGYAKGVLTQKLGPWRRPVAYLSKKLDPVAAGWPPCL | |
| | RMVAAIAVLTKDAGKLTMGQPLVILAPHAVEALVKQPPDRWLSNARMTHYQALLLDTDRVQFGPVVALNPATLLPLPEEGLQHNCLDILAEAHGTRPDLT | |
| | DQPLPDADHTWYTDGSSLLQEGQRKAGAAVTTETEVIWAKALPAGTSAQRAELIALTQALKMAEGKKLNVYTDSRYAFATAHIHGEIYRRRGWLTSEGKEI | |
| | KNKDEILALLKALFLPKRLSIIHCPGHQKGHSAEARGNRMADQAARKAAITETPDTSTLLKRTADGSEFESPKKKAKVE | |
| PL12031 | MPAAKRVKLDGGDKKYSIGLDIGTNSVGWAVITDEYKVPSKKFKVLGNTDRHSIKKNLIGALLFDSGETAEATRLKRTARRRYTRRKNRICYLQEIFSNEMAKV | 16,091 |
| | DDSFFHRLEESFLVEEDKKHERHPIFGNIVDEVAYHEKYPTIYHLRKKLVDSTDKADLRLIYLALAHMIKFRGHFLIEGDLNPDNSDVDKLFIQLVQTYNQLFEE | |
| | NPINASGVDAKAILSARLSKSRRLENLIAQLPGEKKNGLFGNLIALSLGLTPNFKSNFDLAEDAKLQLSKDTYDDDLDNLLAQIGDQYADLFLAAKNLSDAILLS | |
| | DILRVNTEITKAPLSASMIKRYDEHHQDLTLLKALVRQQLPEKYKEIFFDQSKNGYAGYIDGGASQEEFYKFIKPILEKMDGTEELLVKLNREDLLRKQRTFDNG | |
| | SIPHQIHLGELHAILRRQEDFYPFLKDNREKIEKILTFRIPYYVGPLARGNSRFAWMTRKSEETITPWNFEEVVDKGASAQSFIERMTNFDKNLPNEKVLPKHSL | |
| | LYEYFTVYNELTKVKYVTEGMRKPAFLSGEQKKAIVDLLFKTNRKVTVKQLKEDYFKKIECFDSVEISGVEDRFNASLGTYHDLLKIIKDKDFLDNEENEDILEDIV | |
| | LTLTLFEDREMIEERLKTYAHLFDDKVMKQLKRRRYTGWGRLSRKLINGIRDKQSGKTILDFLKSDGFANRNFMQLIHDDSLTFKEDIQKAQVSGQGDSLHE | |
| | HIANLAGSPAIKKGILQTVKVVDELVKVMGRHKPENIVIEMARENQTTQKGQKNSRERMKRIEEGIKELGSQILKEHPVENTQLQNEKLYLYYLQNGRDMYV | |
| | DQELDINRLSDYDVDHIVPQSFLKDDSIDNKVLTRSDKARGKSDNVPSEEVVKKMKNYWRQLLNAKLITQRKFDNLTKAERGGLSELDKAGFIKRQLVETRQI | |
| | TKHVAQILDSRMNTKYDENDKLIREVKVITLKSKLVSDFRKDFQFYKVREINNYHHAHDAYLNAVVGTALIKKYPKLESEFVYGDYKVYDVRKMIAKSEQEIGK | |
| | ATAKYFFYSNIMNFFKTEITLANGEIRKRPLIETNGETGEIVWDKGRDFATVRKVLSMPQVNIVKKTEVQTGGFSKESILPKRNSDKLIARKKDWDPKKYGGFD | |
| | SPTVAYSVLVVAKVEKGKSKKLKSVKELLGITIMERSSFEKNPIDFLEAKGYKEVKKDLIIKLPKYSLFELENGRKRMLASAGELQKGNELALPSKYVNFLYLASHY | |
| | EKLKGSPEDNEQKQLFVEQHKHYLDEIIEQISEFSKRVILADANLDKVLSAYNKHRDKPIREQAENIIHLFTLTNLGAPAAFKYFDTTIDRKRYTSTKEVLDATLIH | |
| | QSITGLYETRIDLSQLGGDGSSGGGEAAAKMASNFTQFVLVDNGGTGDVTVAPSNFANGIAEWISSNSRSQAYKVTCSVRQSSAQNRKYTIKVEVPKGAW | |
| | RSYLNMELTIPIFATNSDCELIVKAMQGLLKDGNPIPSAIAANSGIYGGSGGSMASNFTQFVLVDNGGTGDVTVAPSNFANGIAEWISSNSRSQAYKVTCSV | |
| | RQSSAQNRKYTIKVEVPKGAWRSYLNMELTIPIFATNSDCELIVKAMQGLLKDGNPIPSAIAANSGIYGSSGSSGSSGSSGSSGSSTLNIEDEHRLHETSKEPDV | |
| | SLGSTWLSDFPQAWAETGGMGLAVRQAPLIIPLKATSTPVSIKQYPMSQEARLGIKPHIQRLLDQGILVPCQSPWNTPLLPVKKPGTNDYRPVQDLREVNK | |
| | RVEDIHPTVPNPYNLLSGLPPSHQWYTVLDLKDAFFCLRLHPTSQPLFAFEWRDPEMGISGQLTWTRLPQGFKNSPTLFNEALHRDLADFRIQHPDLILLQY | |
| | VDDLLLAATSELDCQQGTRALLQTLGNLGYRASAKKAQICQKQVKYLGYLLKEGQRWLTEARKETVMGQPTPKTPRQLREFLGKAGFCRLFIPGFAEMAAP | |
| | LYPLTKPGTLFNWGPDQQKAYQEIKQALLTAPALGLPDLTKPFELFVDEKQGYAKGVLTQKLGPWRRPVAYLSKKLDPVAAGWPPCLRMVAAIAVLTKDAG | |
| | KLTMGQPLVILAPHAVEALVKQPPDRWLSNARMTHYQALLLDTDRVQFGPVVALNPATLLPLPEEGLQHNCLDILAEAHGTRPDLTDQPLPDADHTWYTD | |
| | GSSLLQEGQRKAGAAVTTETEVIWAKALPAGTSAQRAELIALTQALKMAEGKKLNVYTDSRYAFATAHIHGEIYRRRGWLTSEGKEIKNKDEILALLKALFLPK | |
| | RLSIIHCPGHQKGHSAEARGNRMADQAARKAAITETPDTSTLLKRTADGSEFESPKKKAKVE | |
| PL12032 | MPAAKRVKLDGGDKKYSIGLDIGTNSVGWAVITDEYKVPSKKFKVLGNTDRHSIKKNLIGALLFDSGETAEATRLKRTARRRYTRRKNRICYLQEIFSNEMAKV | 16,092 |
| | DDSFFHRLEESFLVEEDKKHERHPIFGNIVDEVAYHEKYPTIYHLRKKLVDSTDKADLRLIYLALAHMIKFRGHFLIEGDLNPDNSDVDKLFIQLVQTYNQLFEE | |
| | NPINASGVDAKAILSARLSKSRRLENLIAQLPGEKKNGLFGNLIALSLGLTPNFKSNFDLAEDAKLQLSKDTYDDDLDNLLAQIGDQYADLFLAAKNLSDAILLS | |
| | DILRVNTEITKAPLSASMIKRYDEHHQDLTLLKALVRQQLPEKYKEIFFDQSKNGYAGYIDGGASQEEFYKFIKPILEKMDGTEELLVKLNREDLLRKQRTFDNG | |
| | SIPHQIHLGELHAILRRQEDFYPFLKDNREKIEKILTFRIPYYVGPLARGNSRFAWMTRKSEETITPWNFEEVVDKGASAQSFIERMTNFDKNLPNEKVLPKHSL | |
| | LYEYFTVYNELTKVKYVTEGMRKPAFLSGEQKKAIVDLLFKTNRKVTVKQLKEDYFKKIECFDSVEISGVEDRFNASLGTYHDLLKIIKDKDFLDNEENEDILEDIV | |
| | LTLTLFEDREMIEERLKTYAHLFDDKVMKQLKRRRYTGWGRLSRKLINGIRDKQSGKTILDFLKSDGFANRNFMQLIHDDSLTFKEDIQKAQVSGQGDSLHE | |
| | HIANLAGSPAIKKGILQTVKVVDELVKVMGRHKPENIVIEMARENQTTQKGQKNSRERMKRIEEGIKELGSQILKEHPVENTQLQNEKLYLYYLQNGRDMYV | |
| | DQELDINRLSDYDVDHIVPQSFLKDDSIDNKVLTRSDKARGKSDNVPSEEVVKKMKNYWRQLLNAKLITQRKFDNLTKAERGGLSELDKAGFIKRQLVETRQI | |
| | TKHVAQILDSRMNTKYDENDKLIREVKVITLKSKLVSDFRKDFQFYKVREINNYHHAHDAYLNAVVGTALIKKYPKLESEFVYGDYKVYDVRKMIAKSEQEIGK | |
| | ATAKYFFYSNIMNFFKTEITLANGEIRKRPLIETNGETGEIVWDKGRDFATVRKVLSMPQVNIVKKTEVQTGGFSKESILPKRNSDKLIARKKDWDPKKYGGFD | |
| | SPTVAYSVLVVAKVEKGKSKKLKSVKELLGITIMERSSFEKNPIDFLEAKGYKEVKKDLIIKLPKYSLFELENGRKRMLASAGELQKGNELALPSKYVNFLYLASHY | |
| | EKLKGSPEDNEQKQLFVEQHKHYLDEIIEQISEFSKRVILADANLDKVLSAYNKHRDKPIREQAENIIHLFTLTNLGAPAAFKYFDTTIDRKRYTSTKEVLDATLIH | |
| | QSITGLYETRIDLSQLGGDGSSGGGEAAAKMASNFTQFVLVDNGGTGDVTVAPSNFANGIAEWISSNSRSQAYKVTCSVRQSSAQNRKYTIKVEVPKGAW | |
| | RSYLNMELTIPIFATNSDCELIVKAMQGLLKDGNPIPSAIAANSGIYGGSGGSMASNFTQFVLVDNGGTGDVTVAPSNFANGIAEWISSNSRSQAYKVTCSV | |
| | RQSSAQNRKYTIKVEVPKGAWRSYLNMELTIPIFATNSDCELIVKAMQGLLKDGNPIPSAIAANSGIYGSSGGGEAAAKTLNIEDEHRLHETSKEPDVSLGST | |
| | WLSDFPQAWAETGGMGLAVRQAPLIIPLKATSTPVSIKQYPMSQEARLGIKPHIQRLLDQGILVPCQSPWNTPLLPVKKPGTNDYRPVQDLREVNKRVEDI | |
| | HPTVPNPYNLLSGLPPSHQWYTVLDLKDAFFCLRLHPTSQPLFAFEWRDPEMGISGQLTWTRLPQGFKNSPTLFNEALHRDLADFRIQHPDLILLQYVDDLL | |
| | LAATSELDCQQGTRALLQTLGNLGYRASAKKAQICQKQVKYLGYLLKEGQRWLTEARKETVMGQPTPKTPRQLREFLGKAGFCRLFIPGFAEMAAPLYPLTK | |
| | PGTLFNWGPDQQKAYQEIKQALLTAPALGLPDLTKPFELFVDEKQGYAKGVLTQKLGPWRRPVAYLSKKLDPVAAGWPPCLRMVAAIAVLTKDAGKLTM | |
| | GQPLVILAPHAVEALVKQPPDRWLSNARMTHYQALLLDTDRVQFGPVVALNPATLLPLPEEGLQHNCLDILAEAHGTRPDLTDQPLPDADHTWYTDGSSL | |
| | LQEGQRKAGAAVTTETEVIWAKALPAGTSAQRAELIALTQALKMAEGKKLNVYTDSRYAFATAHIHGEIYRRRGWLTSEGKEIKNKDEILALLKALFLPKRLSII | |
| | HCPGHQKGHSAEARGNRMADQAARKAAITETPDTSTLLKRTADGSEFESPKKKAKVE | |
| PL12033 | MPAAKRVKLDGGDKKYSIGLDIGTNSVGWAVITDEYKVPSKKFKVLGNTDRHSIKKNLIGALLFDSGETAEATRLKRTARRRYTRRKNRICYLQEIFSNEMAKV | 16,093 |
| | DDSFFHRLEESFLVEEDKKHERHPIFGNIVDEVAYHEKYPTIYHLRKKLVDSTDKADLRLIYLALAHMIKFRGHFLIEGDLNPDNSDVDKLFIQLVQTYNQLFEE | |
| | NPINASGVDAKAILSARLSKSRRLENLIAQLPGEKKNGLFGNLIALSLGLTPNFKSNFDLAEDAKLQLSKDTYDDDLDNLLAQIGDQYADLFLAAKNLSDAILLS | |
| | DILRVNTEITKAPLSASMIKRYDEHHQDLTLLKALVRQQLPEKYKEIFFDQSKNGYAGYIDGGASQEEFYKFIKPILEKMDGTEELLVKLNREDLLRKQRTFDNG | |
| | SIPHQIHLGELHAILRRQEDFYPFLKDNREKIEKILTFRIPYYVGPLARGNSRFAWMTRKSEETITPWNFEEVVDKGASAQSFIERMTNFDKNLPNEKVLPKHSL | |
| | LYEYFTVYNELTKVKYVTEGMRKPAFLSGEQKKAIVDLLFKTNRKVTVKQLKEDYFKKIECFDSVEISGVEDRFNASLGTYHDLLKIIKDKDFLDNEENEDILEDIV | |
| | LTLTLFEDREMIEERLKTYAHLFDDKVMKQLKRRRYTGWGRLSRKLINGIRDKQSGKTILDFLKSDGFANRNFMQLIHDDSLTFKEDIQKAQVSGQGDSLHE | |
| | HIANLAGSPAIKKGILQTVKVVDELVKVMGRHKPENIVIEMARENQTTQKGQKNSRERMKRIEEGIKELGSQILKEHPVENTQLQNEKLYLYYLQNGRDMYV | |
| | DQELDINRLSDYDVDHIVPQSFLKDDSIDNKVLTRSDKARGKSDNVPSEEVVKKMKNYWRQLLNAKLITQRKFDNLTKAERGGLSELDKAGFIKRQLVETRQI | |
| | TKHVAQILDSRMNTKYDENDKLIREVKVITLKSKLVSDFRKDFQFYKVREINNYHHAHDAYLNAVVGTALIKKYPKLESEFVYGDYKVYDVRKMIAKSEQEIGK | |
| | ATAKYFFYSNIMNFFKTEITLANGEIRKRPLIETNGETGEIVWDKGRDFATVRKVLSMPQVNIVKKTEVQTGGFSKESILPKRNSDKLIARKKDWDPKKYGGFD | |
| | SPTVAYSVLVVAKVEKGKSKKLKSVKELLGITIMERSSFEKNPIDFLEAKGYKEVKKDLIIKLPKYSLFELENGRKRMLASAGELQKGNELALPSKYVNFLYLASHY | |
| | EKLKGSPEDNEQKQLFVEQHKHYLDEIIEQISEFSKRVILADANLDKVLSAYNKHRDKPIREQAENIIHLFTLTNLGAPAAFKYFDTTIDRKRYTSTKEVLDATLIH | |
| | QSITGLYETRIDLSQLGGDGSSGGGEAAAKMASNFTQFVLVDNGGTGDVTVAPSNFANGIAEWISSNSRSQAYKVTCSVRQSSAQNRKYTIKVEVPKGAW | |
| | RSYLNMELTIPIFATNSDCELIVKAMQGLLKDGNPIPSAIAANSGIYGGSGGSMASNFTQFVLVDNGGTGDVTVAPSNFANGIAEWISSNSRSQAYKVTCSV | |
| | RQSSAQNRKYTIKVEVPKGAWRSYLNMELTIPIFATNSDCELIVKAMQGLLKDGNPIPSAIAANSGIYGGGSGGGSGGGSGGGSMASNFTQFVLVDNGGT | |
| | GDVTVAPSNFANGIAEWISSNSRSQAYKVTCSVRQSSAQNRKYTIKVEVPKGAWRSYLNMELTIPIFATNSDCELIVKAMQGLLKDGNPIPSAIAANSGIYGG | |
| | SGGSMASNFTQFVLVDNGGTGDVTVAPSNFANGIAEWISSNSRSQAYKVTCSVRQSSAQNRKYTIKVEVPKGAWRSYLNMELTIPIFATNSDCELIVKAMQ | |
| | GLLKDGNPIPSAIAANSGIYAEAAAKEAAAKEAAAKEAAAKALEAEAAAKEAAAKEAAAKEAAAKATLNIEDEHRLHETSKEPDVSLGSTWLSDFPQAWAET | |
| | GGMGLAVRQAPLIIPLKATSTPVSIKQYPMSQEARLGIKPHIQRLLDQGILVPCQSPWNTPLLPVKKPGTNDYRPVQDLREVNKRVEDIHPTVPNPYNLLSGL | |
| | PPSHQWYTVLDLKDAFFCLRLHPTSQPLFAFEWRDPEMGISGQLTWTRLPQGFKNSPTLFNEALHRDLADFRIQHPDLILLQYVDDLLLAATSELDCQQGTR | |
| | ALLQTLGNLGYRASAKKAQICQKQVKYLGYLLKEGQRWLTEARKETVMGQPTPKTPRQLREFLGKAGFCRLFIPGFAEMAAPLYPLTKPGTLFNWGPDQQK | |
| | AYQEIKQALLTAPALGLPDLTKPFELFVDEKQGYAKGVLTQKLGPWRRPVAYLSKKLDPVAAGWPPCLRMVAAIAVLTKDAGKLTMGQPLVILAPHAVEAL | |
| | VKQPPDRWLSNARMTHYQALLLDTDRVQFGPVVALNPATLLPLPEEGLQHNCLDILAEAHGTRPDLTDQPLPDADHTWYTDGSSLLQEGQRKAGAAVTT | |
| | ETEVIWAKALPAGTSAQRAELIALTQALKMAEGKKLNVYTDSRYAFATAHIHGEIYRRRGWLTSEGKEIKNKDEILALLKALFLPKRLSIIHCPGHQKGHSAEAR | |
| | GNRMADQAARKAAITETPDTSTLLKRTADGSEFESPKKKAKVE | |
| PL12034 | MPAAKRVKLDGGDKKYSIGLDIGTNSVGWAVITDEYKVPSKKFKVLGNTDRHSIKKNLIGALLFDSGETAEATRLKRTARRRYTRRKNRICYLQEIFSNEMAKV | 16,094 |
| | DDSFFHRLEESFLVEEDKKHERHPIFGNIVDEVAYHEKYPTIYHLRKKLVDSTDKADLRLIYLALAHMIKFRGHFLIEGDLNPDNSDVDKLFIQLVQTYNQLFEE | |
| | NPINASGVDAKAILSARLSKSRRLENLIAQLPGEKKNGLFGNLIALSLGLTPNFKSNFDLAEDAKLQLSKDTYDDDLDNLLAQIGDQYADLFLAAKNLSDAILLS | |
| | DILRVNTEITKAPLSASMIKRYDEHHQDLTLLKALVRQQLPEKYKEIFFDQSKNGYAGYIDGGASQEEFYKFIKPILEKMDGTEELLVKLNREDLLRKQRTFDNG | |
| | SIPHQIHLGELHAILRRQEDFYPFLKDNREKIEKILTFRIPYYVGPLARGNSRFAWMTRKSEETITPWNFEEVVDKGASAQSFIERMTNFDKNLPNEKVLPKHSL | |
| | LYEYFTVYNELTKVKYVTEGMRKPAFLSGEQKKAIVDLLFKTNRKVTVKQLKEDYFKKIECFDSVEISGVEDRFNASLGTYHDLLKIIKDKDFLDNEENEDILEDIV | |
| | LTLTLFEDREMIEERLKTYAHLFDDKVMKQLKRRRYTGWGRLSRKLINGIRDKQSGKTILDFLKSDGFANRNFMQLIHDDSLTFKEDIQKAQVSGQGDSLHE | |
| | HIANLAGSPAIKKGILQTVKVVDELVKVMGRHKPENIVIEMARENQTTQKGQKNSRERMKRIEEGIKELGSQILKEHPVENTQLQNEKLYLYYLQNGRDMYV | |
| | DQELDINRLSDYDVDHIVPQSFLKDDSIDNKVLTRSDKARGKSDNVPSEEVVKKMKNYWRQLLNAKLITQRKFDNLTKAERGGLSELDKAGFIKRQLVETRQI | |
| | TKHVAQILDSRMNTKYDENDKLIREVKVITLKSKLVSDFRKDFQFYKVREINNYHHAHDAYLNAVVGTALIKKYPKLESEFVYGDYKVYDVRKMIAKSEQEIGK | |
| | ATAKYFFYSNIMNFFKTEITLANGEIRKRPLIETNGETGEIVWDKGRDFATVRKVLSMPQVNIVKKTEVQTGGFSKESILPKRNSDKLIARKKDWDPKKYGGFD | |
| | SPTVAYSVLVVAKVEKGKSKKLKSVKELLGITIMERSSFEKNPIDFLEAKGYKEVKKDLIIKLPKYSLFELENGRKRMLASAGELQKGNELALPSKYVNFLYLASHY | |
| | EKLKGSPEDNEQKQLFVEQHKHYLDEIIEQISEFSKRVILADANLDKVLSAYNKHRDKPIREQAENIIHLFTLTNLGAPAAFKYFDTTIDRKRYTSTKEVLDATLIH | |
| | QSITGLYETRIDLSQLGGDGSSGGGEAAAKMASNFTQFVLVDNGGTGDVTVAPSNFANGIAEWISSNSRSQAYKVTCSVRQSSAQNRKYTIKVEVPKGAW | |
| | RSYLNMELTIPIFATNSDCELIVKAMQGLLKDGNPIPSAIAANSGIYGGSGGSMASNFTQFVLVDNGGTGDVTVAPSNFANGIAEWISSNSRSQAYKVTCSV | |
| | RQSSAQNRKYTIKVEVPKGAWRSYLNMELTIPIFATNSDCELIVKAMQGLLKDGNPIPSAIAANSGIYGGGSGGGSGGGSGGGSMASNFTQFVLVDNGGT | |
| | GDVTVAPSNFANGIAEWISSNSRSQAYKVTCSVRQSSAQNRKYTIKVEVPKGAWRSYLNMELTIPIFATNSDCELIVKAMQGLLKDGNPIPSAIAANSGIYGG | |
| | SGGSMASNFTQFVLVDNGGTGDVTVAPSNFANGIAEWISSNSRSQAYKVTCSVRQSSAQNRKYTIKVEVPKGAWRSYLNMELTIPIFATNSDCELIVKAMQ | |
| | GLLKDGNPIPSAIAANSGIYSGGSSGGSSGSETPGTSESATPESSGGSSGGSSTLNIEDEHRLHETSKEPDVSLGSTWLSDFPQAWAETGGMGLAVRQAPLIIP | |
| | LKATSTPVSIKQYPMSQEARLGIKPHIQRLLDQGILVPCQSPWNTPLLPVKKPGTNDYRPVQDLREVNKRVEDIHPTVPNPYNLLSGLPPSHQWYTVLDLKD | |
| | AFFCLRLHPTSQPLFAFEWRDPEMGISGQLTWTRLPQGFKNSPTLFNEALHRDLADFRIQHPDLILLQYVDDLLLAATSELDCQQGTRALLQTLGNLGYRAS | |
| | AKKAQICQKQVKYLGYLLKEGQRWLTEARKETVMGQPTPKTPRQLREFLGKAGFCRLFIPGFAEMAAPLYPLTKPGTLFNWGPDQQKAYQEIKQALLTAPA | |
| | LGLPDLTKPFELFVDEKQGYAKGVLTQKLGPWRRPVAYLSKKLDPVAAGWPPCLRMVAAIAVLTKDAGKLTMGQPLVILAPHAVEALVKQPPDRWLSNAR | |
| | MTHYQALLLDTDRVQFGPVVALNPATLLPLPEEGLQHNCLDILAEAHGTRPDLTDQPLPDADHTWYTDGSSLLQEGQRKAGAAVTTETEVIWAKALPAGT | |
| | SAQRAELIALTQALKMAEGKKLNVYTDSRYAFATAHIHGEIYRRRGWLTSEGKEIKNKDEILALLKALFLPKRLSIIHCPGHQKGHSAEARGNRMADQAARKA | |
| | AITETPDTSTLLKRTADGSEFESPKKKAKVE | |
| PL12035 | MPAAKRVKLDGGDKKYSIGLDIGTNSVGWAVITDEYKVPSKKFKVLGNTDRHSIKKNLIGALLFDSGETAEATRLKRTARRRYTRRKNRICYLQEIFSNEMAKV | 16,095 |
| | DDSFFHRLEESFLVEEDKKHERHPIFGNIVDEVAYHEKYPTIYHLRKKLVDSTDKADLRLIYLALAHMIKFRGHFLIEGDLNPDNSDVDKLFIQLVQTYNQLFEE | |
| | NPINASGVDAKAILSARLSKSRRLENLIAQLPGEKKNGLFGNLIALSLGLTPNFKSNFDLAEDAKLQLSKDTYDDDLDNLLAQIGDQYADLFLAAKNLSDAILLS | |
| | DILRVNTEITKAPLSASMIKRYDEHHQDLTLLKALVRQQLPEKYKEIFFDQSKNGYAGYIDGGASQEEFYKFIKPILEKMDGTEELLVKLNREDLLRKQRTFDNG | |
| | SIPHQIHLGELHAILRRQEDFYPFLKDNREKIEKILTFRIPYYVGPLARGNSRFAWMTRKSEETITPWNFEEVVDKGASAQSFIERMTNFDKNLPNEKVLPKHSL | |
| | LYEYFTVYNELTKVKYVTEGMRKPAFLSGEQKKAIVDLLFKTNRKVTVKQLKEDYFKKIECFDSVEISGVEDRFNASLGTYHDLLKIIKDKDFLDNEENEDILEDIV | |
| | LTLTLFEDREMIEERLKTYAHLFDDKVMKQLKRRRYTGWGRLSRKLINGIRDKQSGKTILDFLKSDGFANRNFMQLIHDDSLTFKEDIQKAQVSGQGDSLHE | |
| | HIANLAGSPAIKKGILQTVKVVDELVKVMGRHKPENIVIEMARENQTTQKGQKNSRERMKRIEEGIKELGSQILKEHPVENTQLQNEKLYLYYLQNGRDMYV | |
| | DQELDINRLSDYDVDHIVPQSFLKDDSIDNKVLTRSDKARGKSDNVPSEEVVKKMKNYWRQLLNAKLITQRKFDNLTKAERGGLSELDKAGFIKRQLVETRQI | |
| | TKHVAQILDSRMNTKYDENDKLIREVKVITLKSKLVSDFRKDFQFYKVREINNYHHAHDAYLNAVVGTALIKKYPKLESEFVYGDYKVYDVRKMIAKSEQEIGK | |
| | ATAKYFFYSNIMNFFKTEITLANGEIRKRPLIETNGETGEIVWDKGRDFATVRKVLSMPQVNIVKKTEVQTGGFSKESILPKRNSDKLIARKKDWDPKKYGGFD | |
| | SPTVAYSVLVVAKVEKGKSKKLKSVKELLGITIMERSSFEKNPIDFLEAKGYKEVKKDLIIKLPKYSLFELENGRKRMLASAGELQKGNELALPSKYVNFLYLASHY | |
| | EKLKGSPEDNEQKQLFVEQHKHYLDEIIEQISEFSKRVILADANLDKVLSAYNKHRDKPIREQAENIIHLFTLTNLGAPAAFKYFDTTIDRKRYTSTKEVLDATLIH | |
| | QSITGLYETRIDLSQLGGDGSSGGGEAAAKMASNFTQFVLVDNGGTGDVTVAPSNFANGIAEWISSNSRSQAYKVTCSVRQSSAQNRKYTIKVEVPKGAW | |
| | RSYLNMELTIPIFATNSDCELIVKAMQGLLKDGNPIPSAIAANSGIYGGSGGSMASNFTQFVLVDNGGTGDVTVAPSNFANGIAEWISSNSRSQAYKVTCSV | |
| | RQSSAQNRKYTIKVEVPKGAWRSYLNMELTIPIFATNSDCELIVKAMQGLLKDGNPIPSAIAANSGIYGGGSGGGSGGGSGGGSMASNFTQFVLVDNGGT | |
| | GDVTVAPSNFANGIAEWISSNSRSQAYKVTCSVRQSSAQNRKYTIKVEVPKGAWRSYLNMELTIPIFATNSDCELIVKAMQGLLKDGNPIPSAIAANSGIYGG | |
| | SGGSMASNFTQFVLVDNGGTGDVTVAPSNFANGIAEWISSNSRSQAYKVTCSVRQSSAQNRKYTIKVEVPKGAWRSYLNMELTIPIFATNSDCELIVKAMQ | |
| | GLLKDGNPIPSAIAANSGIYGSSGSSGSSGSSGSSGSSTLNIEDEHRLHETSKEPDVSLGSTWLSDFPQAWAETGGMGLAVRQAPLIIPLKATSTPVSIKQYPM | |
| | SQEARLGIKPHIQRLLDQGILVPCQSPWNTPLLPVKKPGTNDYRPVQDLREVNKRVEDIHPTVPNPYNLLSGLPPSHQWYTVLDLKDAFFCLRLHPTSQPLFA | |
| | FEWRDPEMGISGQLTWTRLPQGFKNSPTLFNEALHRDLADFRIQHPDLILLQYVDDLLLAATSELDCQQGTRALLQTLGNLGYRASAKKAQICQKQVKYLGY | |
| | LLKEGQRWLTEARKETVMGQPTPKTPRQLREFLGKAGFCRLFIPGFAEMAAPLYPLTKPGTLFNWGPDQQKAYQEIKQALLTAPALGLPDLTKPFELFVDEK | |
| | QGYAKGVLTQKLGPWRRPVAYLSKKLDPVAAGWPPCLRMVAAIAVLTKDAGKLTMGQPLVILAPHAVEALVKQPPDRWLSNARMTHYQALLLDTDRVQ | |
| | FGPVVALNPATLLPLPEEGLQHNCLDILAEAHGTRPDLTDQPLPDADHTWYTDGSSLLQEGQRKAGAAVTTETEVIWAKALPAGTSAQRAELIALTQALKM | |
| | AEGKKLNVYTDSRYAFATAHIHGEIYRRRGWLTSEGKEIKNKDEILALLKALFLPKRLSIIHCPGHQKGHSAEARGNRMADQAARKAAITETPDTSTLLKRTAD | |
| | GSEFESPKKKAKVE | |
| PL12036 | MPAAKRVKLDGGDKKYSIGLDIGTNSVGWAVITDEYKVPSKKFKVLGNTDRHSIKKNLIGALLFDSGETAEATRLKRTARRRYTRRKNRICYLQEIFSNEMAKV | 16,096 |
| | DDSFFHRLEESFLVEEDKKHERHPIFGNIVDEVAYHEKYPTIYHLRKKLVDSTDKADLRLIYLALAHMIKFRGHFLIEGDLNPDNSDVDKLFIQLVQTYNQLFEE | |
| | NPINASGVDAKAILSARLSKSRRLENLIAQLPGEKKNGLFGNLIALSLGLTPNFKSNFDLAEDAKLQLSKDTYDDDLDNLLAQIGDQYADLFLAAKNLSDAILLS | |
| | DILRVNTEITKAPLSASMIKRYDEHHQDLTLLKALVRQQLPEKYKEIFFDQSKNGYAGYIDGGASQEEFYKFIKPILEKMDGTEELLVKLNREDLLRKQRTFDNG | |
| | SIPHQIHLGELHAILRRQEDFYPFLKDNREKIEKILTFRIPYYVGPLARGNSRFAWMTRKSEETITPWNFEEVVDKGASAQSFIERMTNFDKNLPNEKVLPKHSL | |
| | LYEYFTVYNELTKVKYVTEGMRKPAFLSGEQKKAIVDLLFKTNRKVTVKQLKEDYFKKIECFDSVEISGVEDRFNASLGTYHDLLKIIKDKDFLDNEENEDILEDIV | |
| | LTLTLFEDREMIEERLKTYAHLFDDKVMKQLKRRRYTGWGRLSRKLINGIRDKQSGKTILDFLKSDGFANRNFMQLIHDDSLTFKEDIQKAQVSGQGDSLHE | |
| | HIANLAGSPAIKKGILQTVKVVDELVKVMGRHKPENIVIEMARENQTTQKGQKNSRERMKRIEEGIKELGSQILKEHPVENTQLQNEKLYLYYLQNGRDMYV | |
| | DQELDINRLSDYDVDHIVPQSFLKDDSIDNKVLTRSDKARGKSDNVPSEEVVKKMKNYWRQLLNAKLITQRKFDNLTKAERGGLSELDKAGFIKRQLVETRQI | |
| | TKHVAQILDSRMNTKYDENDKLIREVKVITLKSKLVSDFRKDFQFYKVREINNYHHAHDAYLNAVVGTALIKKYPKLESEFVYGDYKVYDVRKMIAKSEQEIGK | |
| | ATAKYFFYSNIMNFFKTEITLANGEIRKRPLIETNGETGEIVWDKGRDFATVRKVLSMPQVNIVKKTEVQTGGFSKESILPKRNSDKLIARKKDWDPKKYGGFD | |
| | SPTVAYSVLVVAKVEKGKSKKLKSVKELLGITIMERSSFEKNPIDFLEAKGYKEVKKDLIIKLPKYSLFELENGRKRMLASAGELQKGNELALPSKYVNFLYLASHY | |
| | EKLKGSPEDNEQKQLFVEQHKHYLDEIIEQISEFSKRVILADANLDKVLSAYNKHRDKPIREQAENIIHLFTLTNLGAPAAFKYFDTTIDRKRYTSTKEVLDATLIH | |
| | QSITGLYETRIDLSQLGGDGSSGGGEAAAKMASNFTQFVLVDNGGTGDVTVAPSNFANGIAEWISSNSRSQAYKVTCSVRQSSAQNRKYTIKVEVPKGAW | |
| | RSYLNMELTIPIFATNSDCELIVKAMQGLLKDGNPIPSAIAANSGIYGGSGGSMASNFTQFVLVDNGGTGDVTVAPSNFANGIAEWISSNSRSQAYKVTCSV | |
| | RQSSAQNRKYTIKVEVPKGAWRSYLNMELTIPIFATNSDCELIVKAMQGLLKDGNPIPSAIAANSGIYGGGSGGGSGGGSGGGSMASNFTQFVLVDNGGT | |
| | GDVTVAPSNFANGIAEWISSNSRSQAYKVTCSVRQSSAQNRKYTIKVEVPKGAWRSYLNMELTIPIFATNSDCELIVKAMQGLLKDGNPIPSAIAANSGIYGG | |
| | SGGSMASNFTQFVLVDNGGTGDVTVAPSNFANGIAEWISSNSRSQAYKVTCSVRQSSAQNRKYTIKVEVPKGAWRSYLNMELTIPIFATNSDCELIVKAMQ | |
| | GLLKDGNPIPSAIAANSGIYGSSGGGEAAAKTLNIEDEHRLHETSKEPDVSLGSTWLSDFPQAWAETGGMGLAVRQAPLIIPLKATSTPVSIKQYPMSQEARL | |
| | GIKPHIQRLLDQGILVPCQSPWNTPLLPVKKPGTNDYRPVQDLREVNKRVEDIHPTVPNPYNLLSGLPPSHQWYTVLDLKDAFFCLRLHPTSQPLFAFEWRD | |
| | PEMGISGQLTWTRLPQGFKNSPTLFNEALHRDLADFRIQHPDLILLQYVDDLLLAATSELDCQQGTRALLQTLGNLGYRASAKKAQICQKQVKYLGYLLKEG | |
| | QRWLTEARKETVMGQPTPKTPRQLREFLGKAGFCRLFIPGFAEMAAPLYPLTKPGTLFNWGPDQQKAYQEIKQALLTAPALGLPDLTKPFELFVDEKQGYA | |
| | KGVLTQKLGPWRRPVAYLSKKLDPVAAGWPPCLRMVAAIAVLTKDAGKLTMGQPLVILAPHAVEALVKQPPDRWLSNARMTHYQALLLDTDRVQFGPV | |
| | VALNPATLLPLPEEGLQHNCLDILAEAHGTRPDLTDQPLPDADHTWYTDGSSLLQEGQRKAGAAVTTETEVIWAKALPAGTSAQRAELIALTQALKMAEGK | |
| | KLNVYTDSRYAFATAHIHGEIYRRRGWLTSEGKEIKNKDEILALLKALFLPKRLSIIHCPGHQKGHSAEARGNRMADQAARKAAITETPDTSTLLKRTADGSEFE | |
| | SPKKKAKVE | |

TABLE S2
Exemplary gene modifying sequences for Configuration 2
(i.e., RT - linker - (RBP repeat)n - linker - Cas9)

| Identi- | | SEQ ID |
|---|---|---|
| fier | Full Amino Acid Sequence | NO: |
| PL12037 | MPAAKRVKLDGGTLNIEDEHRLHETSKEPDVSLGSTWLSDFPQAWAETGGMGLAVRQAPLIIPLKATST | 16,100 |
| | PVSIKQYPMSQEARLGIKPHIQRLLDQGILVPCQSPWNTPLLPVKKPGTNDYRPVQDLREVNKRVEDIH | |
| | PTVPNPYNLLSGLPPSHQWYTVLDLKDAFFCLRLHPTSQPLFAFEWRDPEMGISGQLTWTRLPQGFKNS | |
| | PTLFNEALHRDLADFRIQHPDLILLQYVDDLLLAATSELDCQQGTRALLQTLGNLGYRASAKKAQICQK | |
| | QVKYLGYLLKEGQRWLTEARKETVMGQPTPKTPRQLREFLGKAGFCRLFIPGFAEMAAPLYPLTKPGTL | |
| | FNWGPDQQKAYQEIKQALLTAPALGLPDLTKPFELFVDEKQGYAKGVLTQKLGPWRRPVAYLSKKLDPV | |
| | AAGWPPCLRMVAAIAVLTKDAGKLTMGQPLVILAPHAVEALVKQPPDRWLSNARMTHYQALLLDTDRVQ | |
| | FGPVVALNPATLLPLPEEGLQHNCLDILAEAHGTRPDLTDQPLPDADHTWYTDGSSLLQEGQRKAGAAV | |
| | TTETEVIWAKALPAGTSAQRAELIALTQALKMAEGKKLNVYTDSRYAFATAHIHGEIYRRRGWLTSEGK | |
| | EIKNKDEILALLKALFLPKRLSIIHCPGHQKGHSAEARGNRMADQAARKAAITETPDTSTLLAEAAAKE | |
| | AAAKEAAAKEAAAKALEAEAAAKEAAAKEAAAKEAAAKAMASNFTQFVLVDNGGTGDVTVAPSNFANGI | |
| | AEWISSNSRSQAYKVTCSVRQSSAQNRKYTIKVEVPKGAWRSYLNMELTIPIFATNSDCELIVKAMQGL | |
| | LKDGNPIPSAIAANSGIYAEAAAKEAAAKEAAAKEAAAKALEAEAAAKEAAAKEAAAKEAAAKADKKYS | |
| | IGLDIGTNSVGWAVITDEYKVPSKKFKVLGNTDRHSIKKNLIGALLFDSGETAEATRLKRTARRRYTRR | |
| | KNRICYLQEIFSNEMAKVDDSFFHRLEESFLVEEDKKHERHPIFGNIVDEVAYHEKYPTIYHLRKKLVD | |
| | STDKADLRLIYLALAHMIKFRGHFLIEGDLNPDNSDVDKLFIQLVQTYNQLFEENPINASGVDAKAILS | |
| | ARLSKSRRLENLIAQLPGEKKNGLFGNLIALSLGLTPNFKSNFDLAEDAKLQLSKDTYDDDLDNLLAQI | |
| | GDQYADLFLAAKNLSDAILLSDILRVNTEITKAPLSASMIKRYDEHHQDLTLLKALVRQQLPEKYKEIF | |
| | FDQSKNGYAGYIDGGASQEEFYKFIKPILEKMDGTEELLVKLNREDLLRKQRTFDNGSIPHQIHLGELH | |
| | AILRRQEDFYPFLKDNREKIEKILTFRIPYYVGPLARGNSRFAWMTRKSEETITPWNFEEVVDKGASAQ | |
| | SFIERMTNFDKNLPNEKVLPKHSLLYEYFTVYNELTKVKYVTEGMRKPAFLSGEQKKAIVDLLFKTNRK | |
| | VTVKQLKEDYFKKIECFDSVEISGVEDRFNASLGTYHDLLKIIKDKDFLDNEENEDILEDIVLTLTLFE | |
| | DREMIEERLKTYAHLFDDKVMKQLKRRRYTGWGRLSRKLINGIRDKQSGKTILDFLKSDGFANRNFMQL | |
| | IHDDSLTFKEDIQKAQVSGQGDSLHEHIANLAGSPAIKKGILQTVKVVDELVKVMGRHKPENIVIEMAR | |
| | ENQTTQKGQKNSRERMKRIEEGIKELGSQILKEHPVENTQLQNEKLYLYYLQNGRDMYVDQELDINRLS | |
| | DYDVDHIVPQSFLKDDSIDNKVLTRSDKARGKSDNVPSEEVVKKMKNYWRQLLNAKLITQRKFDNLTKA | |
| | ERGGLSELDKAGFIKRQLVETRQITKHVAQILDSRMNTKYDENDKLIREVKVITLKSKLVSDFRKDFQF | |
| | YKVREINNYHHAHDAYLNAVVGTALIKKYPKLESEFVYGDYKVYDVRKMIAKSEQEIGKATAKYFFYSN | |
| | IMNFFKTEITLANGEIRKRPLIETNGETGEIVWDKGRDFATVRKVLSMPQVNIVKKTEVQTGGFSKESI | |
| | LPKRNSDKLIARKKDWDPKKYGGFDSPTVAYSVLVVAKVEKGKSKKLKSVKELLGITIMERSSFEKNPI | |
| | DFLEAKGYKEVKKDLIIKLPKYSLFELENGRKRMLASAGELQKGNELALPSKYVNFLYLASHYEKLKGS | |
| | PEDNEQKQLFVEQHKHYLDEIIEQISEFSKRVILADANLDKVLSAYNKHRDKPIREQAENIIHLFTLTN | |
| | LGAPAAFKYFDTTIDRKRYTSTKEVLDATLIHQSITGLYETRIDLSQLGGDKRTADGSEFESPKKKAKV | |
| | E | |
| PL12038 | MPAAKRVKLDGGTLNIEDEHRLHETSKEPDVSLGSTWLSDFPQAWAETGGMGLAVRQAPLIIPLKATST | 16,101 |
| | PVSIKQYPMSQEARLGIKPHIQRLLDQGILVPCQSPWNTPLLPVKKPGTNDYRPVQDLREVNKRVEDIH | |
| | PTVPNPYNLLSGLPPSHQWYTVLDLKDAFFCLRLHPTSQPLFAFEWRDPEMGISGQLTWTRLPQGFKNS | |
| | PTLFNEALHRDLADFRIQHPDLILLQYVDDLLLAATSELDCQQGTRALLQTLGNLGYRASAKKAQICQK | |
| | QVKYLGYLLKEGQRWLTEARKETVMGQPTPKTPRQLREFLGKAGFCRLFIPGFAEMAAPLYPLTKPGTL | |
| | FNWGPDQQKAYQEIKQALLTAPALGLPDLTKPFELFVDEKQGYAKGVLTQKLGPWRRPVAYLSKKLDPV | |
| | AAGWPPCLRMVAAIAVLTKDAGKLTMGQPLVILAPHAVEALVKQPPDRWLSNARMTHYQALLLDTDRVQ | |
| | FGPVVALNPATLLPLPEEGLQHNCLDILAEAHGTRPDLTDQPLPDADHTWYTDGSSLLQEGQRKAGAAV | |
| | TTETEVIWAKALPAGTSAQRAELIALTQALKMAEGKKLNVYTDSRYAFATAHIHGEIYRRRGWLTSEGK | |
| | EIKNKDEILALLKALFLPKRLSIIHCPGHQKGHSAEARGNRMADQAARKAAITETPDTSTLLAEAAAKE | |
| | AAAKEAAAKEAAAKALEAEAAAKEAAAKEAAAKEAAAKAMASNFTQFVLVDNGGTGDVTVAPSNFANGI | |
| | AEWISSNSRSQAYKVTCSVRQSSAQNRKYTIKVEVPKGAWRSYLNMELTIPIFATNSDCELIVKAMQGL | |
| | LKDGNPIPSAIAANSGIYSGGSSGGSSGSETPGTSESATPESSGGSSGGSSDKKYSIGLDIGTNSVGWA | |
| | VITDEYKVPSKKFKVLGNTDRHSIKKNLIGALLFDSGETAEATRLKRTARRRYTRRKNRICYLQEIFSN | |
| | EMAKVDDSFFHRLEESFLVEEDKKHERHPIFGNIVDEVAYHEKYPTIYHLRKKLVDSTDKADLRLIYLA | |
| | LAHMIKFRGHFLIEGDLNPDNSDVDKLFIQLVQTYNQLFEENPINASGVDAKAILSARLSKSRRLENLI | |
| | AQLPGEKKNGLFGNLIALSLGLTPNFKSNFDLAEDAKLQLSKDTYDDDLDNLLAQIGDQYADLFLAAKN | |
| | LSDAILLSDILRVNTEITKAPLSASMIKRYDEHHQDLTLLKALVRQQLPEKYKEIFFDQSKNGYAGYID | |
| | GGASQEEFYKFIKPILEKMDGTEELLVKLNREDLLRKQRTFDNGSIPHQIHLGELHAILRRQEDFYPFL | |
| | KDNREKIEKILTFRIPYYVGPLARGNSRFAWMTRKSEETITPWNFEEVVDKGASAQSFIERMTNFDKNL | |
| | PNEKVLPKHSLLYEYFTVYNELTKVKYVTEGMRKPAFLSGEQKKAIVDLLFKTNRKVTVKQLKEDYFKK | |
| | IECFDSVEISGVEDRFNASLGTYHDLLKIIKDKDFLDNEENEDILEDIVLTLTLFEDREMIEERLKTYA | |
| | HLFDDKVMKQLKRRRYTGWGRLSRKLINGIRDKQSGKTILDFLKSDGFANRNFMQLIHDDSLTFKEDIQ | |
| | KAQVSGQGDSLHEHIANLAGSPAIKKGILQTVKVVDELVKVMGRHKPENIVIEMARENQTTQKGQKNSR | |
| | ERMKRIEEGIKELGSQILKEHPVENTQLQNEKLYLYYLQNGRDMYVDQELDINRLSDYDVDHIVPQSFL | |
| | KDDSIDNKVLTRSDKARGKSDNVPSEEVVKKMKNYWRQLLNAKLITQRKFDNLTKAERGGLSELDKAGF | |
| | IKRQLVETRQITKHVAQILDSRMNTKYDENDKLIREVKVITLKSKLVSDFRKDFQFYKVREINNYHHAH | |
| | DAYLNAVVGTALIKKYPKLESEFVYGDYKVYDVRKMIAKSEQEIGKATAKYFFYSNIMNFFKTEITLAN | |
| | GEIRKRPLIETNGETGEIVWDKGRDFATVRKVLSMPQVNIVKKTEVQTGGFSKESILPKRNSDKLIARK | |
| | KDWDPKKYGGFDSPTVAYSVLVVAKVEKGKSKKLKSVKELLGITIMERSSFEKNPIDFLEAKGYKEVKK | |
| | DLIIKLPKYSLFELENGRKRMLASAGELQKGNELALPSKYVNFLYLASHYEKLKGSPEDNEQKQLFVEQ | |
| | HKHYLDEIIEQISEFSKRVILADANLDKVLSAYNKHRDKPIREQAENIIHLFTLTNLGAPAAFKYFDTT | |
| | IDRKRYTSTKEVLDATLIHQSITGLYETRIDLSQLGGDKRTADGSEFESPKKKAKVE | |
| PL12039 | MPAAKRVKLDGGTLNIEDEHRLHETSKEPDVSLGSTWLSDFPQAWAETGGMGLAVRQAPLIIPLKATST | 16,102 |
| | PVSIKQYPMSQEARLGIKPHIQRLLDQGILVPCQSPWNTPLLPVKKPGTNDYRPVQDLREVNKRVEDIH | |
| | PTVPNPYNLLSGLPPSHQWYTVLDLKDAFFCLRLHPTSQPLFAFEWRDPEMGISGQLTWTRLPQGFKNS | |
| | PTLFNEALHRDLADFRIQHPDLILLQYVDDLLLAATSELDCQQGTRALLQTLGNLGYRASAKKAQICQK | |
| | QVKYLGYLLKEGQRWLTEARKETVMGQPTPKTPRQLREFLGKAGFCRLFIPGFAEMAAPLYPLTKPGTL | |
| | FNWGPDQQKAYQEIKQALLTAPALGLPDLTKPFELFVDEKQGYAKGVLTQKLGPWRRPVAYLSKKLDPV | |
| | AAGWPPCLRMVAAIAVLTKDAGKLTMGQPLVILAPHAVEALVKQPPDRWLSNARMTHYQALLLDTDRVQ | |
| | FGPVVALNPATLLPLPEEGLQHNCLDILAEAHGTRPDLTDQPLPDADHTWYTDGSSLLQEGQRKAGAAV | |
| | TTETEVIWAKALPAGTSAQRAELIALTQALKMAEGKKLNVYTDSRYAFATAHIHGEIYRRRGWLTSEGK | |
| | EIKNKDEILALLKALFLPKRLSIIHCPGHQKGHSAEARGNRMADQAARKAAITETPDTSTLLAEAAAKE | |
| | AAAKEAAAKEAAAKALEAEAAAKEAAAKEAAAKEAAAKAMASNFTQFVLVDNGGTGDVTVAPSNFANGI | |
| | AEWISSNSRSQAYKVTCSVRQSSAQNRKYTIKVEVPKGAWRSYLNMELTIPIFATNSDCELIVKAMQGL | |
| | LKDGNPIPSAIAANSGIYGSSGSSGSSGSSGSSGSSDKKYSIGLDIGTNSVGWAVITDEYKVPSKKFKV | |
| | LGNTDRHSIKKNLIGALLFDSGETAEATRLKRTARRRYTRRKNRICYLQEIFSNEMAKVDDSFFHRLEE | |
| | SFLVEEDKKHERHPIFGNIVDEVAYHEKYPTIYHLRKKLVDSTDKADLRLIYLALAHMIKFRGHFLIEG | |
| | DLNPDNSDVDKLFIQLVQTYNQLFEENPINASGVDAKAILSARLSKSRRLENLIAQLPGEKKNGLFGNL | |
| | IALSLGLTPNFKSNFDLAEDAKLQLSKDTYDDDLDNLLAQIGDQYADLFLAAKNLSDAILLSDILRVNT | |
| | EITKAPLSASMIKRYDEHHQDLTLLKALVRQQLPEKYKEIFFDQSKNGYAGYIDGGASQEEFYKFIKPI | |
| | LEKMDGTEELLVKLNREDLLRKQRTFDNGSIPHQIHLGELHAILRRQEDFYPFLKDNREKIEKILTFRI | |
| | PYYVGPLARGNSRFAWMTRKSEETITPWNFEEVVDKGASAQSFIERMTNFDKNLPNEKVLPKHSLLYEY | |
| | FTVYNELTKVKYVTEGMRKPAFLSGEQKKAIVDLLFKTNRKVTVKQLKEDYFKKIECFDSVEISGVEDR | |
| | FNASLGTYHDLLKIIKDKDFLDNEENEDILEDIVLTLTLFEDREMIEERLKTYAHLFDDKVMKQLKRRR | |
| | YTGWGRLSRKLINGIRDKQSGKTILDFLKSDGFANRNFMQLIHDDSLTFKEDIQKAQVSGQGDSLHEHI | |
| | ANLAGSPAIKKGILQTVKVVDELVKVMGRHKPENIVIEMARENQTTQKGQKNSRERMKRIEEGIKELGS | |
| | QILKEHPVENTQLQNEKLYLYYLQNGRDMYVDQELDINRLSDYDVDHIVPQSFLKDDSIDNKVLTRSDK | |
| | ARGKSDNVPSEEVVKKMKNYWRQLLNAKLITQRKFDNLTKAERGGLSELDKAGFIKRQLVETRQITKHV | |
| | AQILDSRMNTKYDENDKLIREVKVITLKSKLVSDFRKDFQFYKVREINNYHHAHDAYLNAVVGTALIKK | |
| | YPKLESEFVYGDYKVYDVRKMIAKSEQEIGKATAKYFFYSNIMNFFKTEITLANGEIRKRPLIETNGET | |
| | GEIVWDKGRDFATVRKVLSMPQVNIVKKTEVQTGGFSKESILPKRNSDKLIARKKDWDPKKYGGFDSPT | |
| | VAYSVLVVAKVEKGKSKKLKSVKELLGITIMERSSFEKNPIDFLEAKGYKEVKKDLIIKLPKYSLFELE | |
| | NGRKRMLASAGELQKGNELALPSKYVNFLYLASHYEKLKGSPEDNEQKQLFVEQHKHYLDEIIEQISEF | |
| | SKRVILADANLDKVLSAYNKHRDKPIREQAENIIHLFTLTNLGAPAAFKYFDTTIDRKRYTSTKEVLDA | |
| | TLIHQSITGLYETRIDLSQLGGDKRTADGSEFESPKKKAKVE | |
| PL12040 | MPAAKRVKLDGGTLNIEDEHRLHETSKEPDVSLGSTWLSDFPQAWAETGGMGLAVRQAPLIIPLKATST | 16,103 |
| | PVSIKQYPMSQEARLGIKPHIQRLLDQGILVPCQSPWNTPLLPVKKPGTNDYRPVQDLREVNKRVEDIH | |
| | PTVPNPYNLLSGLPPSHQWYTVLDLKDAFFCLRLHPTSQPLFAFEWRDPEMGISGQLTWTRLPQGFKNS | |
| | PTLFNEALHRDLADFRIQHPDLILLQYVDDLLLAATSELDCQQGTRALLQTLGNLGYRASAKKAQICQK | |
| | QVKYLGYLLKEGQRWLTEARKETVMGQPTPKTPRQLREFLGKAGFCRLFIPGFAEMAAPLYPLTKPGTL | |
| | FNWGPDQQKAYQEIKQALLTAPALGLPDLTKPFELFVDEKQGYAKGVLTQKLGPWRRPVAYLSKKLDPV | |
| | AAGWPPCLRMVAAIAVLTKDAGKLTMGQPLVILAPHAVEALVKQPPDRWLSNARMTHYQALLLDTDRVQ | |
| | FGPVVALNPATLLPLPEEGLQHNCLDILAEAHGTRPDLTDQPLPDADHTWYTDGSSLLQEGQRKAGAAV | |
| | TTETEVIWAKALPAGTSAQRAELIALTQALKMAEGKKLNVYTDSRYAFATAHIHGEIYRRRGWLTSEGK | |
| | EIKNKDEILALLKALFLPKRLSIIHCPGHQKGHSAEARGNRMADQAARKAAITETPDTSTLLAEAAAKE | |
| | AAAKEAAAKEAAAKALEAEAAAKEAAAKEAAAKEAAAKAMASNFTQFVLVDNGGTGDVTVAPSNFANGI | |
| | AEWISSNSRSQAYKVTCSVRQSSAQNRKYTIKVEVPKGAWRSYLNMELTIPIFATNSDCELIVKAMQGL | |
| | LKDGNPIPSAIAANSGIYGSSGGGEAAAKDKKYSIGLDIGTNSVGWAVITDEYKVPSKKFKVLGNTDRH | |
| | SIKKNLIGALLFDSGETAEATRLKRTARRRYTRRKNRICYLQEIFSNEMAKVDDSFFHRLEESFLVEED | |
| | KKHERHPIFGNIVDEVAYHEKYPTIYHLRKKLVDSTDKADLRLIYLALAHMIKFRGHFLIEGDLNPDNS | |
| | DVDKLFIQLVQTYNQLFEENPINASGVDAKAILSARLSKSRRLENLIAQLPGEKKNGLFGNLIALSLGL | |
| | TPNFKSNFDLAEDAKLQLSKDTYDDDLDNLLAQIGDQYADLFLAAKNLSDAILLSDILRVNTEITKAPL | |
| | SASMIKRYDEHHQDLTLLKALVRQQLPEKYKEIFFDQSKNGYAGYIDGGASQEEFYKFIKPILEKMDGT | |
| | EELLVKLNREDLLRKQRTFDNGSIPHQIHLGELHAILRRQEDFYPFLKDNREKIEKILTFRIPYYVGPL | |
| | ARGNSRFAWMTRKSEETITPWNFEEVVDKGASAQSFIERMTNFDKNLPNEKVLPKHSLLYEYFTVYNEL | |
| | TKVKYVTEGMRKPAFLSGEQKKAIVDLLFKTNRKVTVKQLKEDYFKKIECFDSVEISGVEDRFNASLGT | |
| | YHDLLKIIKDKDFLDNEENEDILEDIVLTLTLFEDREMIEERLKTYAHLFDDKVMKQLKRRRYTGWGRL | |
| | SRKLINGIRDKQSGKTILDFLKSDGFANRNFMQLIHDDSLTFKEDIQKAQVSGQGDSLHEHIANLAGSP | |
| | AIKKGILQTVKVVDELVKVMGRHKPENIVIEMARENQTTQKGQKNSRERMKRIEEGIKELGSQILKEHP | |
| | VENTQLQNEKLYLYYLQNGRDMYVDQELDINRLSDYDVDHIVPQSFLKDDSIDNKVLTRSDKARGKSDN | |
| | VPSEEVVKKMKNYWRQLLNAKLITQRKFDNLTKAERGGLSELDKAGFIKRQLVETRQITKHVAQILDSR | |
| | MNTKYDENDKLIREVKVITLKSKLVSDFRKDFQFYKVREINNYHHAHDAYLNAVVGTALIKKYPKLESE | |
| | FVYGDYKVYDVRKMIAKSEQEIGKATAKYFFYSNIMNFFKTEITLANGEIRKRPLIETNGETGEIVWDK | |
| | GRDFATVRKVLSMPQVNIVKKTEVQTGGFSKESILPKRNSDKLIARKKDWDPKKYGGFDSPTVAYSVLV | |
| | VAKVEKGKSKKLKSVKELLGITIMERSSFEKNPIDFLEAKGYKEVKKDLIIKLPKYSLFELENGRKRML | |
| | ASAGELQKGNELALPSKYVNFLYLASHYEKLKGSPEDNEQKQLFVEQHKHYLDEIIEQISEFSKRVILA | |
| | DANLDKVLSAYNKHRDKPIREQAENIIHLFTLTNLGAPAAFKYFDTTIDRKRYTSTKEVLDATLIHQSI | |
| | TGLYETRIDLSQLGGDKRTADGSEFESPKKKAKVE | |
| PL12041 | MPAAKRVKLDGGTLNIEDEHRLHETSKEPDVSLGSTWLSDFPQAWAETGGMGLAVRQAPLIIPLKATST | 16,104 |
| | PVSIKQYPMSQEARLGIKPHIQRLLDQGILVPCQSPWNTPLLPVKKPGTNDYRPVQDLREVNKRVEDIH | |
| | PTVPNPYNLLSGLPPSHQWYTVLDLKDAFFCLRLHPTSQPLFAFEWRDPEMGISGQLTWTRLPQGFKNS | |
| | PTLFNEALHRDLADFRIQHPDLILLQYVDDLLLAATSELDCQQGTRALLQTLGNLGYRASAKKAQICQK | |
| | QVKYLGYLLKEGQRWLTEARKETVMGQPTPKTPRQLREFLGKAGFCRLFIPGFAEMAAPLYPLTKPGTL | |
| | FNWGPDQQKAYQEIKQALLTAPALGLPDLTKPFELFVDEKQGYAKGVLTQKLGPWRRPVAYLSKKLDPV | |
| | AAGWPPCLRMVAAIAVLTKDAGKLTMGQPLVILAPHAVEALVKQPPDRWLSNARMTHYQALLLDTDRVQ | |
| | FGPVVALNPATLLPLPEEGLQHNCLDILAEAHGTRPDLTDQPLPDADHTWYTDGSSLLQEGQRKAGAAV | |
| | TTETEVIWAKALPAGTSAQRAELIALTQALKMAEGKKLNVYTDSRYAFATAHIHGEIYRRRGWLTSEGK | |
| | EIKNKDEILALLKALFLPKRLSIIHCPGHQKGHSAEARGNRMADQAARKAAITETPDTSTLLAEAAAKE | |
| | AAAKEAAAKEAAAKALEAEAAAKEAAAKEAAAKEAAAKAMASNFTQFVLVDNGGTGDVTVAPSNFANGI | |
| | AEWISSNSRSQAYKVTCSVRQSSAQNRKYTIKVEVPKGAWRSYLNMELTIPIFATNSDCELIVKAMQGL | |
| | LKDGNPIPSAIAANSGIYGGSGGSMASNFTQFVLVDNGGTGDVTVAPSNFANGIAEWISSNSRSQAYKV | |
| | TCSVRQSSAQNRKYTIKVEVPKGAWRSYLNMELTIPIFATNSDCELIVKAMQGLLKDGNPIPSAIAANS | |
| | GIYAEAAAKEAAAKEAAAKEAAAKALEAEAAAKEAAAKEAAAKEAAAKADKKYSIGLDIGTNSVGWAVI | |
| | TDEYKVPSKKFKVLGNTDRHSIKKNLIGALLFDSGETAEATRLKRTARRRYTRRKNRICYLQEIFSNEM | |
| | AKVDDSFFHRLEESFLVEEDKKHERHPIFGNIVDEVAYHEKYPTIYHLRKKLVDSTDKADLRLIYLALA | |
| | HMIKFRGHFLIEGDLNPDNSDVDKLFIQLVQTYNQLFEENPINASGVDAKAILSARLSKSRRLENLIAQ | |
| | LPGEKKNGLFGNLIALSLGLTPNFKSNFDLAEDAKLQLSKDTYDDDLDNLLAQIGDQYADLFLAAKNLS | |
| | DAILLSDILRVNTEITKAPLSASMIKRYDEHHQDLTLLKALVRQQLPEKYKEIFFDQSKNGYAGYIDGG | |
| | ASQEEFYKFIKPILEKMDGTEELLVKLNREDLLRKQRTFDNGSIPHQIHLGELHAILRRQEDFYPFLKD | |
| | NREKIEKILTFRIPYYVGPLARGNSRFAWMTRKSEETITPWNFEEVVDKGASAQSFIERMTNFDKNLPN | |
| | EKVLPKHSLLYEYFTVYNELTKVKYVTEGMRKPAFLSGEQKKAIVDLLFKTNRKVTVKQLKEDYFKKIE | |
| | CFDSVEISGVEDRFNASLGTYHDLLKIIKDKDFLDNEENEDILEDIVLTLTLFEDREMIEERLKTYAHL | |
| | FDDKVMKQLKRRRYTGWGRLSRKLINGIRDKQSGKTILDFLKSDGFANRNFMQLIHDDSLTFKEDIQKA | |
| | QVSGQGDSLHEHIANLAGSPAIKKGILQTVKVVDELVKVMGRHKPENIVIEMARENQTTQKGQKNSRER | |
| | MKRIEEGIKELGSQILKEHPVENTQLQNEKLYLYYLQNGRDMYVDQELDINRLSDYDVDHIVPQSFLKD | |
| | DSIDNKVLTRSDKARGKSDNVPSEEVVKKMKNYWRQLLNAKLITQRKFDNLTKAERGGLSELDKAGFIK | |
| | RQLVETRQITKHVAQILDSRMNTKYDENDKLIREVKVITLKSKLVSDFRKDFQFYKVREINNYHHAHDA | |
| | YLNAVVGTALIKKYPKLESEFVYGDYKVYDVRKMIAKSEQEIGKATAKYFFYSNIMNFFKTEITLANGE | |
| | IRKRPLIETNGETGEIVWDKGRDFATVRKVLSMPQVNIVKKTEVQTGGFSKESILPKRNSDKLIARKKD | |
| | WDPKKYGGFDSPTVAYSVLVVAKVEKGKSKKLKSVKELLGITIMERSSFEKNPIDFLEAKGYKEVKKDL | |
| | IIKLPKYSLFELENGRKRMLASAGELQKGNELALPSKYVNFLYLASHYEKLKGSPEDNEQKQLFVEQHK | |
| | HYLDEIIEQISEFSKRVILADANLDKVLSAYNKHRDKPIREQAENIIHLFTLTNLGAPAAFKYFDTTID | |
| | RKRYTSTKEVLDATLIHQSITGLYETRIDLSQLGGDKRTADGSEFESPKKKAKVE | |
| PL12042 | MPAAKRVKLDGGTLNIEDEHRLHETSKEPDVSLGSTWLSDFPQAWAETGGMGLAVRQAPLIIPLKATST | 16,105 |
| | PVSIKQYPMSQEARLGIKPHIQRLLDQGILVPCQSPWNTPLLPVKKPGTNDYRPVQDLREVNKRVEDIH | |
| | PTVPNPYNLLSGLPPSHQWYTVLDLKDAFFCLRLHPTSQPLFAFEWRDPEMGISGQLTWTRLPQGFKNS | |
| | PTLFNEALHRDLADFRIQHPDLILLQYVDDLLLAATSELDCQQGTRALLQTLGNLGYRASAKKAQICQK | |
| | QVKYLGYLLKEGQRWLTEARKETVMGQPTPKTPRQLREFLGKAGFCRLFIPGFAEMAAPLYPLTKPGTL | |
| | FNWGPDQQKAYQEIKQALLTAPALGLPDLTKPFELFVDEKQGYAKGVLTQKLGPWRRPVAYLSKKLDPV | |
| | AAGWPPCLRMVAAIAVLTKDAGKLTMGQPLVILAPHAVEALVKQPPDRWLSNARMTHYQALLLDTDRVQ | |
| | FGPVVALNPATLLPLPEEGLQHNCLDILAEAHGTRPDLTDQPLPDADHTWYTDGSSLLQEGQRKAGAAV | |
| | TTETEVIWAKALPAGTSAQRAELIALTQALKMAEGKKLNVYTDSRYAFATAHIHGEIYRRRGWLTSEGK | |
| | EIKNKDEILALLKALFLPKRLSIIHCPGHQKGHSAEARGNRMADQAARKAAITETPDTSTLLAEAAAKE | |
| | AAAKEAAAKEAAAKALEAEAAAKEAAAKEAAAKEAAAKAMASNFTQFVLVDNGGTGDVTVAPSNFANGI | |
| | AEWISSNSRSQAYKVTCSVRQSSAQNRKYTIKVEVPKGAWRSYLNMELTIPIFATNSDCELIVKAMQGL | |
| | LKDGNPIPSAIAANSGIYGGSGGSMASNFTQFVLVDNGGTGDVTVAPSNFANGIAEWISSNSRSQAYKV | |
| | TCSVRQSSAQNRKYTIKVEVPKGAWRSYLNMELTIPIFATNSDCELIVKAMQGLLKDGNPIPSAIAANS | |
| | GIYSGGSSGGSSGSETPGTSESATPESSGGSSGGSSDKKYSIGLDIGTNSVGWAVITDEYKVPSKKFKV | |
| | LGNTDRHSIKKNLIGALLFDSGETAEATRLKRTARRRYTRRKNRICYLQEIFSNEMAKVDDSFFHRLEE | |
| | SFLVEEDKKHERHPIFGNIVDEVAYHEKYPTIYHLRKKLVDSTDKADLRLIYLALAHMIKFRGHFLIEG | |
| | DLNPDNSDVDKLFIQLVQTYNQLFEENPINASGVDAKAILSARLSKSRRLENLIAQLPGEKKNGLFGNL | |
| | IALSLGLTPNFKSNFDLAEDAKLQLSKDTYDDDLDNLLAQIGDQYADLFLAAKNLSDAILLSDILRVNT | |
| | EITKAPLSASMIKRYDEHHQDLTLLKALVRQQLPEKYKEIFFDQSKNGYAGYIDGGASQEEFYKFIKPI | |
| | LEKMDGTEELLVKLNREDLLRKQRTFDNGSIPHQIHLGELHAILRRQEDFYPFLKDNREKIEKILTFRI | |
| | PYYVGPLARGNSRFAWMTRKSEETITPWNFEEVVDKGASAQSFIERMTNFDKNLPNEKVLPKHSLLYEY | |
| | FTVYNELTKVKYVTEGMRKPAFLSGEQKKAIVDLLFKTNRKVTVKQLKEDYFKKIECFDSVEISGVEDR | |
| | FNASLGTYHDLLKIIKDKDFLDNEENEDILEDIVLTLTLFEDREMIEERLKTYAHLFDDKVMKQLKRRR | |
| | YTGWGRLSRKLINGIRDKQSGKTILDFLKSDGFANRNFMQLIHDDSLTFKEDIQKAQVSGQGDSLHEHI | |
| | ANLAGSPAIKKGILQTVKVVDELVKVMGRHKPENIVIEMARENQTTQKGQKNSRERMKRIEEGIKELGS | |
| | QILKEHPVENTQLQNEKLYLYYLQNGRDMYVDQELDINRLSDYDVDHIVPQSFLKDDSIDNKVLTRSDK | |
| | ARGKSDNVPSEEVVKKMKNYWRQLLNAKLITQRKFDNLTKAERGGLSELDKAGFIKRQLVETRQITKHV | |
| | AQILDSRMNTKYDENDKLIREVKVITLKSKLVSDFRKDFQFYKVREINNYHHAHDAYLNAVVGTALIKK | |
| | YPKLESEFVYGDYKVYDVRKMIAKSEQEIGKATAKYFFYSNIMNFFKTEITLANGEIRKRPLIETNGET | |
| | GEIVWDKGRDFATVRKVLSMPQVNIVKKTEVQTGGFSKESILPKRNSDKLIARKKDWDPKKYGGFDSPT | |
| | VAYSVLVVAKVEKGKSKKLKSVKELLGITIMERSSFEKNPIDFLEAKGYKEVKKDLIIKLPKYSLFELE | |
| | NGRKRMLASAGELQKGNELALPSKYVNFLYLASHYEKLKGSPEDNEQKQLFVEQHKHYLDEIIEQISEF | |
| | SKRVILADANLDKVLSAYNKHRDKPIREQAENIIHLFTLTNLGAPAAFKYFDTTIDRKRYTSTKEVLDA | |
| | TLIHQSITGLYETRIDLSQLGGDKRTADGSEFESPKKKAKVE | |
| PL12043 | MPAAKRVKLDGGTLNIEDEHRLHETSKEPDVSLGSTWLSDFPQAWAETGGMGLAVRQAPLIIPLKATST | 16,106 |
| | PVSIKQYPMSQEARLGIKPHIQRLLDQGILVPCQSPWNTPLLPVKKPGTNDYRPVQDLREVNKRVEDIH | |
| | PTVPNPYNLLSGLPPSHQWYTVLDLKDAFFCLRLHPTSQPLFAFEWRDPEMGISGQLTWTRLPQGFKNS | |
| | PTLFNEALHRDLADFRIQHPDLILLQYVDDLLLAATSELDCQQGTRALLQTLGNLGYRASAKKAQICQK | |
| | QVKYLGYLLKEGQRWLTEARKETVMGQPTPKTPRQLREFLGKAGFCRLFIPGFAEMAAPLYPLTKPGTL | |
| | FNWGPDQQKAYQEIKQALLTAPALGLPDLTKPFELFVDEKQGYAKGVLTQKLGPWRRPVAYLSKKLDPV | |
| | AAGWPPCLRMVAAIAVLTKDAGKLTMGQPLVILAPHAVEALVKQPPDRWLSNARMTHYQALLLDTDRVQ | |
| | FGPVVALNPATLLPLPEEGLQHNCLDILAEAHGTRPDLTDQPLPDADHTWYTDGSSLLQEGQRKAGAAV | |
| | TTETEVIWAKALPAGTSAQRAELIALTQALKMAEGKKLNVYTDSRYAFATAHIHGEIYRRRGWLTSEGK | |
| | EIKNKDEILALLKALFLPKRLSIIHCPGHQKGHSAEARGNRMADQAARKAAITETPDTSTLLAEAAAKE | |
| | AAAKEAAAKEAAAKALEAEAAAKEAAAKEAAAKEAAAKAMASNFTQFVLVDNGGTGDVTVAPSNFANGI | |
| | AEWISSNSRSQAYKVTCSVRQSSAQNRKYTIKVEVPKGAWRSYLNMELTIPIFATNSDCELIVKAMQGL | |
| | LKDGNPIPSAIAANSGIYGGSGGSMASNFTQFVLVDNGGTGDVTVAPSNFANGIAEWISSNSRSQAYKV | |
| | TCSVRQSSAQNRKYTIKVEVPKGAWRSYLNMELTIPIFATNSDCELIVKAMQGLLKDGNPIPSAIAANS | |
| | GIYGSSGSSGSSGSSGSSGSSDKKYSIGLDIGTNSVGWAVITDEYKVPSKKFKVLGNTDRHSIKKNLIG | |
| | ALLFDSGETAEATRLKRTARRRYTRRKNRICYLQEIFSNEMAKVDDSFFHRLEESFLVEEDKKHERHPI | |
| | FGNIVDEVAYHEKYPTIYHLRKKLVDSTDKADLRLIYLALAHMIKFRGHFLIEGDLNPDNSDVDKLFIQ | |
| | LVQTYNQLFEENPINASGVDAKAILSARLSKSRRLENLIAQLPGEKKNGLFGNLIALSLGLTPNFKSNF | |
| | DLAEDAKLQLSKDTYDDDLDNLLAQIGDQYADLFLAAKNLSDAILLSDILRVNTEITKAPLSASMIKRY | |
| | DEHHQDLTLLKALVRQQLPEKYKEIFFDQSKNGYAGYIDGGASQEEFYKFIKPILEKMDGTEELLVKLN | |
| | REDLLRKQRTFDNGSIPHQIHLGELHAILRRQEDFYPFLKDNREKIEKILTFRIPYYVGPLARGNSRFA | |
| | WMTRKSEETITPWNFEEVVDKGASAQSFIERMTNFDKNLPNEKVLPKHSLLYEYFTVYNELTKVKYVTE | |
| | GMRKPAFLSGEQKKAIVDLLFKTNRKVTVKQLKEDYFKKIECFDSVEISGVEDRFNASLGTYHDLLKII | |
| | KDKDFLDNEENEDILEDIVLTLTLFEDREMIEERLKTYAHLFDDKVMKQLKRRRYTGWGRLSRKLINGI | |
| | RDKQSGKTILDFLKSDGFANRNFMQLIHDDSLTFKEDIQKAQVSGQGDSLHEHIANLAGSPAIKKGILQ | |
| | TVKVVDELVKVMGRHKPENIVIEMARENQTTQKGQKNSRERMKRIEEGIKELGSQILKEHPVENTQLQN | |
| | EKLYLYYLQNGRDMYVDQELDINRLSDYDVDHIVPQSFLKDDSIDNKVLTRSDKARGKSDNVPSEEVVK | |
| | KMKNYWRQLLNAKLITQRKFDNLTKAERGGLSELDKAGFIKRQLVETRQITKHVAQILDSRMNTKYDEN | |
| | DKLIREVKVITLKSKLVSDFRKDFQFYKVREINNYHHAHDAYLNAVVGTALIKKYPKLESEFVYGDYKV | |
| | YDVRKMIAKSEQEIGKATAKYFFYSNIMNFFKTEITLANGEIRKRPLIETNGETGEIVWDKGRDFATVR | |
| | KVLSMPQVNIVKKTEVQTGGFSKESILPKRNSDKLIARKKDWDPKKYGGFDSPTVAYSVLVVAKVEKGK | |
| | SKKLKSVKELLGITIMERSSFEKNPIDFLEAKGYKEVKKDLIIKLPKYSLFELENGRKRMLASAGELQK | |
| | GNELALPSKYVNFLYLASHYEKLKGSPEDNEQKQLFVEQHKHYLDEIIEQISEFSKRVILADANLDKVL | |
| | SAYNKHRDKPIREQAENIIHLFTLTNLGAPAAFKYFDTTIDRKRYTSTKEVLDATLIHQSITGLYETRI | |
| | DLSQLGGDKRTADGSEFESPKKKAKVE | |
| PL12044 | MPAAKRVKLDGGTLNIEDEHRLHETSKEPDVSLGSTWLSDFPQAWAETGGMGLAVRQAPLIIPLKATST | 16,107 |
| | PVSIKQYPMSQEARLGIKPHIQRLLDQGILVPCQSPWNTPLLPVKKPGTNDYRPVQDLREVNKRVEDIH | |
| | PTVPNPYNLLSGLPPSHQWYTVLDLKDAFFCLRLHPTSQPLFAFEWRDPEMGISGQLTWTRLPQGFKNS | |
| | PTLFNEALHRDLADFRIQHPDLILLQYVDDLLLAATSELDCQQGTRALLQTLGNLGYRASAKKAQICQK | |
| | QVKYLGYLLKEGQRWLTEARKETVMGQPTPKTPRQLREFLGKAGFCRLFIPGFAEMAAPLYPLTKPGTL | |
| | FNWGPDQQKAYQEIKQALLTAPALGLPDLTKPFELFVDEKQGYAKGVLTQKLGPWRRPVAYLSKKLDPV | |
| | AAGWPPCLRMVAAIAVLTKDAGKLTMGQPLVILAPHAVEALVKQPPDRWLSNARMTHYQALLLDTDRVQ | |
| | FGPVVALNPATLLPLPEEGLQHNCLDILAEAHGTRPDLTDQPLPDADHTWYTDGSSLLQEGQRKAGAAV | |
| | TTETEVIWAKALPAGTSAQRAELIALTQALKMAEGKKLNVYTDSRYAFATAHIHGEIYRRRGWLTSEGK | |
| | EIKNKDEILALLKALFLPKRLSIIHCPGHQKGHSAEARGNRMADQAARKAAITETPDTSTLLAEAAAKE | |
| | AAAKEAAAKEAAAKALEAEAAAKEAAAKEAAAKEAAAKAMASNFTQFVLVDNGGTGDVTVAPSNFANGI | |
| | AEWISSNSRSQAYKVTCSVRQSSAQNRKYTIKVEVPKGAWRSYLNMELTIPIFATNSDCELIVKAMQGL | |
| | LKDGNPIPSAIAANSGIYGGSGGSMASNFTQFVLVDNGGTGDVTVAPSNFANGIAEWISSNSRSQAYKV | |
| | TCSVRQSSAQNRKYTIKVEVPKGAWRSYLNMELTIPIFATNSDCELIVKAMQGLLKDGNPIPSAIAANS | |
| | GIYGSSGGGEAAAKDKKYSIGLDIGTNSVGWAVITDEYKVPSKKFKVLGNTDRHSIKKNLIGALLFDSG | |
| | ETAEATRLKRTARRRYTRRKNRICYLQEIFSNEMAKVDDSFFHRLEESFLVEEDKKHERHPIFGNIVDE | |
| | VAYHEKYPTIYHLRKKLVDSTDKADLRLIYLALAHMIKFRGHFLIEGDLNPDNSDVDKLFIQLVQTYNQ | |
| | LFEENPINASGVDAKAILSARLSKSRRLENLIAQLPGEKKNGLFGNLIALSLGLTPNFKSNFDLAEDAK | |
| | LQLSKDTYDDDLDNLLAQIGDQYADLFLAAKNLSDAILLSDILRVNTEITKAPLSASMIKRYDEHHQDL | |
| | TLLKALVRQQLPEKYKEIFFDQSKNGYAGYIDGGASQEEFYKFIKPILEKMDGTEELLVKLNREDLLRK | |
| | QRTFDNGSIPHQIHLGELHAILRRQEDFYPFLKDNREKIEKILTFRIPYYVGPLARGNSRFAWMTRKSE | |
| | ETITPWNFEEVVDKGASAQSFIERMTNFDKNLPNEKVLPKHSLLYEYFTVYNELTKVKYVTEGMRKPAF | |
| | LSGEQKKAIVDLLFKTNRKVTVKQLKEDYFKKIECFDSVEISGVEDRFNASLGTYHDLLKIIKDKDFLD | |
| | NEENEDILEDIVLTLTLFEDREMIEERLKTYAHLFDDKVMKQLKRRRYTGWGRLSRKLINGIRDKQSGK | |
| | TILDFLKSDGFANRNFMQLIHDDSLTFKEDIQKAQVSGQGDSLHEHIANLAGSPAIKKGILQTVKVVDE | |
| | LVKVMGRHKPENIVIEMARENQTTQKGQKNSRERMKRIEEGIKELGSQILKEHPVENTQLQNEKLYLYY | |
| | LQNGRDMYVDQELDINRLSDYDVDHIVPQSFLKDDSIDNKVLTRSDKARGKSDNVPSEEVVKKMKNYWR | |
| | QLLNAKLITQRKFDNLTKAERGGLSELDKAGFIKRQLVETRQITKHVAQILDSRMNTKYDENDKLIREV | |
| | KVITLKSKLVSDFRKDFQFYKVREINNYHHAHDAYLNAVVGTALIKKYPKLESEFVYGDYKVYDVRKMI | |
| | AKSEQEIGKATAKYFFYSNIMNFFKTEITLANGEIRKRPLIETNGETGEIVWDKGRDFATVRKVLSMPQ | |
| | VNIVKKTEVQTGGFSKESILPKRNSDKLIARKKDWDPKKYGGFDSPTVAYSVLVVAKVEKGKSKKLKSV | |
| | KELLGITIMERSSFEKNPIDFLEAKGYKEVKKDLIIKLPKYSLFELENGRKRMLASAGELQKGNELALP | |
| | SKYVNFLYLASHYEKLKGSPEDNEQKQLFVEQHKHYLDEIIEQISEFSKRVILADANLDKVLSAYNKHR | |
| | DKPIREQAENIIHLFTLTNLGAPAAFKYFDTTIDRKRYTSTKEVLDATLIHQSITGLYETRIDLSQLGG | |
| | DKRTADGSEFESPKKKAKVE | |
| PL12045 | MPAAKRVKLDGGTLNIEDEHRLHETSKEPDVSLGSTWLSDFPQAWAETGGMGLAVRQAPLIIPLKATST | 16,108 |
| | PVSIKQYPMSQEARLGIKPHIQRLLDQGILVPCQSPWNTPLLPVKKPGTNDYRPVQDLREVNKRVEDIH | |
| | PTVPNPYNLLSGLPPSHQWYTVLDLKDAFFCLRLHPTSQPLFAFEWRDPEMGISGQLTWTRLPQGFKNS | |
| | PTLFNEALHRDLADFRIQHPDLILLQYVDDLLLAATSELDCQQGTRALLQTLGNLGYRASAKKAQICQK | |
| | QVKYLGYLLKEGQRWLTEARKETVMGQPTPKTPRQLREFLGKAGFCRLFIPGFAEMAAPLYPLTKPGTL | |
| | FNWGPDQQKAYQEIKQALLTAPALGLPDLTKPFELFVDEKQGYAKGVLTQKLGPWRRPVAYLSKKLDPV | |
| | AAGWPPCLRMVAAIAVLTKDAGKLTMGQPLVILAPHAVEALVKQPPDRWLSNARMTHYQALLLDTDRVQ | |
| | FGPVVALNPATLLPLPEEGLQHNCLDILAEAHGTRPDLTDQPLPDADHTWYTDGSSLLQEGQRKAGAAV | |
| | TTETEVIWAKALPAGTSAQRAELIALTQALKMAEGKKLNVYTDSRYAFATAHIHGEIYRRRGWLTSEGK | |
| | EIKNKDEILALLKALFLPKRLSIIHCPGHQKGHSAEARGNRMADQAARKAAITETPDTSTLLAEAAAKE | |
| | AAAKEAAAKEAAAKALEAEAAAKEAAAKEAAAKEAAAKAMASNFTQFVLVDNGGTGDVTVAPSNFANGI | |
| | AEWISSNSRSQAYKVTCSVRQSSAQNRKYTIKVEVPKGAWRSYLNMELTIPIFATNSDCELIVKAMQGL | |
| | LKDGNPIPSAIAANSGIYGGSGGSMASNFTQFVLVDNGGTGDVTVAPSNFANGIAEWISSNSRSQAYKV | |
| | TCSVRQSSAQNRKYTIKVEVPKGAWRSYLNMELTIPIFATNSDCELIVKAMQGLLKDGNPIPSAIAANS | |
| | GIYGGGSGGGSGGGSGGGSMASNFTQFVLVDNGGTGDVTVAPSNFANGIAEWISSNSRSQAYKVTCSVR | |
| | QSSAQNRKYTIKVEVPKGAWRSYLNMELTIPIFATNSDCELIVKAMQGLLKDGNPIPSAIAANSGIYGG | |
| | SGGSMASNFTQFVLVDNGGTGDVTVAPSNFANGIAEWISSNSRSQAYKVTCSVRQSSAQNRKYTIKVEV | |
| | PKGAWRSYLNMELTIPIFATNSDCELIVKAMQGLLKDGNPIPSAIAANSGIYAEAAAKEAAAKEAAAKE | |
| | AAAKALEAEAAAKEAAAKEAAAKEAAAKADKKYSIGLDIGTNSVGWAVITDEYKVPSKKFKVLGNTDRH | |
| | SIKKNLIGALLFDSGETAEATRLKRTARRRYTRRKNRICYLQEIFSNEMAKVDDSFFHRLEESFLVEED | |
| | KKHERHPIFGNIVDEVAYHEKYPTIYHLRKKLVDSTDKADLRLIYLALAHMIKFRGHFLIEGDLNPDNS | |
| | DVDKLFIQLVQTYNQLFEENPINASGVDAKAILSARLSKSRRLENLIAQLPGEKKNGLFGNLIALSLGL | |
| | TPNFKSNFDLAEDAKLQLSKDTYDDDLDNLLAQIGDQYADLFLAAKNLSDAILLSDILRVNTEITKAPL | |
| | SASMIKRYDEHHQDLTLLKALVRQQLPEKYKEIFFDQSKNGYAGYIDGGASQEEFYKFIKPILEKMDGT | |
| | EELLVKLNREDLLRKQRTFDNGSIPHQIHLGELHAILRRQEDFYPFLKDNREKIEKILTFRIPYYVGPL | |
| | ARGNSRFAWMTRKSEETITPWNFEEVVDKGASAQSFIERMTNFDKNLPNEKVLPKHSLLYEYFTVYNEL | |
| | TKVKYVTEGMRKPAFLSGEQKKAIVDLLFKTNRKVTVKQLKEDYFKKIECFDSVEISGVEDRFNASLGT | |
| | YHDLLKIIKDKDFLDNEENEDILEDIVLTLTLFEDREMIEERLKTYAHLFDDKVMKQLKRRRYTGWGRL | |
| | SRKLINGIRDKQSGKTILDFLKSDGFANRNFMQLIHDDSLTFKEDIQKAQVSGQGDSLHEHIANLAGSP | |
| | AIKKGILQTVKVVDELVKVMGRHKPENIVIEMARENQTTQKGQKNSRERMKRIEEGIKELGSQILKEHP | |
| | VENTQLQNEKLYLYYLQNGRDMYVDQELDINRLSDYDVDHIVPQSFLKDDSIDNKVLTRSDKARGKSDN | |
| | VPSEEVVKKMKNYWRQLLNAKLITQRKFDNLTKAERGGLSELDKAGFIKRQLVETRQITKHVAQILDSR | |
| | MNTKYDENDKLIREVKVITLKSKLVSDFRKDFQFYKVREINNYHHAHDAYLNAVVGTALIKKYPKLESE | |
| | FVYGDYKVYDVRKMIAKSEQEIGKATAKYFFYSNIMNFFKTEITLANGEIRKRPLIETNGETGEIVWDK | |
| | GRDFATVRKVLSMPQVNIVKKTEVQTGGFSKESILPKRNSDKLIARKKDWDPKKYGGFDSPTVAYSVLV | |
| | VAKVEKGKSKKLKSVKELLGITIMERSSFEKNPIDFLEAKGYKEVKKDLIIKLPKYSLFELENGRKRML | |
| | ASAGELQKGNELALPSKYVNFLYLASHYEKLKGSPEDNEQKQLFVEQHKHYLDEIIEQISEFSKRVILA | |
| | DANLDKVLSAYNKHRDKPIREQAENIIHLFTLTNLGAPAAFKYFDTTIDRKRYTSTKEVLDATLIHQSI | |
| | TGLYETRIDLSQLGGDKRTADGSEFESPKKKAKVE | |
| PL12046 | MPAAKRVKLDGGTLNIEDEHRLHETSKEPDVSLGSTWLSDFPQAWAETGGMGLAVRQAPLIIPLKATST | 16,109 |
| | PVSIKQYPMSQEARLGIKPHIQRLLDQGILVPCQSPWNTPLLPVKKPGTNDYRPVQDLREVNKRVEDIH | |
| | PTVPNPYNLLSGLPPSHQWYTVLDLKDAFFCLRLHPTSQPLFAFEWRDPEMGISGQLTWTRLPQGFKNS | |
| | PTLFNEALHRDLADFRIQHPDLILLQYVDDLLLAATSELDCQQGTRALLQTLGNLGYRASAKKAQICQK | |
| | QVKYLGYLLKEGQRWLTEARKETVMGQPTPKTPRQLREFLGKAGFCRLFIPGFAEMAAPLYPLTKPGTL | |
| | FNWGPDQQKAYQEIKQALLTAPALGLPDLTKPFELFVDEKQGYAKGVLTQKLGPWRRPVAYLSKKLDPV | |
| | AAGWPPCLRMVAAIAVLTKDAGKLTMGQPLVILAPHAVEALVKQPPDRWLSNARMTHYQALLLDTDRVQ | |
| | FGPVVALNPATLLPLPEEGLQHNCLDILAEAHGTRPDLTDQPLPDADHTWYTDGSSLLQEGQRKAGAAV | |
| | TTETEVIWAKALPAGTSAQRAELIALTQALKMAEGKKLNVYTDSRYAFATAHIHGEIYRRRGWLTSEGK | |
| | EIKNKDEILALLKALFLPKRLSIIHCPGHQKGHSAEARGNRMADQAARKAAITETPDTSTLLAEAAAKE | |
| | AAAKEAAAKEAAAKALEAEAAAKEAAAKEAAAKEAAAKAMASNFTQFVLVDNGGTGDVTVAPSNFANGI | |
| | AEWISSNSRSQAYKVTCSVRQSSAQNRKYTIKVEVPKGAWRSYLNMELTIPIFATNSDCELIVKAMQGL | |
| | LKDGNPIPSAIAANSGIYGGSGGSMASNFTQFVLVDNGGTGDVTVAPSNFANGIAEWISSNSRSQAYKV | |
| | TCSVRQSSAQNRKYTIKVEVPKGAWRSYLNMELTIPIFATNSDCELIVKAMQGLLKDGNPIPSAIAANS | |
| | GIYGGGSGGGSGGGSGGGSMASNFTQFVLVDNGGTGDVTVAPSNFANGIAEWISSNSRSQAYKVTCSVR | |
| | QSSAQNRKYTIKVEVPKGAWRSYLNMELTIPIFATNSDCELIVKAMQGLLKDGNPIPSAIAANSGIYGG | |
| | SGGSMASNFTQFVLVDNGGTGDVTVAPSNFANGIAEWISSNSRSQAYKVTCSVRQSSAQNRKYTIKVEV | |
| | PKGAWRSYLNMELTIPIFATNSDCELIVKAMQGLLKDGNPIPSAIAANSGIYSGGSSGGSSGSETPGTS | |
| | ESATPESSGGSSGGSSDKKYSIGLDIGTNSVGWAVITDEYKVPSKKFKVLGNTDRHSIKKNLIGALLFD | |
| | SGETAEATRLKRTARRRYTRRKNRICYLQEIFSNEMAKVDDSFFHRLEESFLVEEDKKHERHPIFGNIV | |
| | DEVAYHEKYPTIYHLRKKLVDSTDKADLRLIYLALAHMIKFRGHFLIEGDLNPDNSDVDKLFIQLVQTY | |
| | NQLFEENPINASGVDAKAILSARLSKSRRLENLIAQLPGEKKNGLFGNLIALSLGLTPNFKSNFDLAED | |
| | AKLQLSKDTYDDDLDNLLAQIGDQYADLFLAAKNLSDAILLSDILRVNTEITKAPLSASMIKRYDEHHQ | |
| | DLTLLKALVRQQLPEKYKEIFFDQSKNGYAGYIDGGASQEEFYKFIKPILEKMDGTEELLVKLNREDLL | |
| | RKQRTFDNGSIPHQIHLGELHAILRRQEDFYPFLKDNREKIEKILTFRIPYYVGPLARGNSRFAWMTRK | |
| | SEETITPWNFEEVVDKGASAQSFIERMTNFDKNLPNEKVLPKHSLLYEYFTVYNELTKVKYVTEGMRKP | |
| | AFLSGEQKKAIVDLLFKTNRKVTVKQLKEDYFKKIECFDSVEISGVEDRFNASLGTYHDLLKIIKDKDF | |
| | LDNEENEDILEDIVLTLTLFEDREMIEERLKTYAHLFDDKVMKQLKRRRYTGWGRLSRKLINGIRDKQS | |
| | GKTILDFLKSDGFANRNFMQLIHDDSLTFKEDIQKAQVSGQGDSLHEHIANLAGSPAIKKGILQTVKVV | |
| | DELVKVMGRHKPENIVIEMARENQTTQKGQKNSRERMKRIEEGIKELGSQILKEHPVENTQLQNEKLYL | |
| | YYLQNGRDMYVDQELDINRLSDYDVDHIVPQSFLKDDSIDNKVLTRSDKARGKSDNVPSEEVVKKMKNY | |
| | WRQLLNAKLITQRKFDNLTKAERGGLSELDKAGFIKRQLVETRQITKHVAQILDSRMNTKYDENDKLIR | |
| | EVKVITLKSKLVSDFRKDFQFYKVREINNYHHAHDAYLNAVVGTALIKKYPKLESEFVYGDYKVYDVRK | |
| | MIAKSEQEIGKATAKYFFYSNIMNFFKTEITLANGEIRKRPLIETNGETGEIVWDKGRDFATVRKVLSM | |
| | PQVNIVKKTEVQTGGFSKESILPKRNSDKLIARKKDWDPKKYGGFDSPTVAYSVLVVAKVEKGKSKKLK | |
| | SVKELLGITIMERSSFEKNPIDFLEAKGYKEVKKDLIIKLPKYSLFELENGRKRMLASAGELQKGNELA | |
| | LPSKYVNFLYLASHYEKLKGSPEDNEQKQLFVEQHKHYLDEIIEQISEFSKRVILADANLDKVLSAYNK | |
| | HRDKPIREQAENIIHLFTLTNLGAPAAFKYFDTTIDRKRYTSTKEVLDATLIHQSITGLYETRIDLSQL | |
| | GGDKRTADGSEFESPKKKAKVE | |
| PL12047 | MPAAKRVKLDGGTLNIEDEHRLHETSKEPDVSLGSTWLSDFPQAWAETGGMGLAVRQAPLIIPLKATST | 16,110 |
| | PVSIKQYPMSQEARLGIKPHIQRLLDQGILVPCQSPWNTPLLPVKKPGTNDYRPVQDLREVNKRVEDIH | |
| | PTVPNPYNLLSGLPPSHQWYTVLDLKDAFFCLRLHPTSQPLFAFEWRDPEMGISGQLTWTRLPQGFKNS | |
| | PTLFNEALHRDLADFRIQHPDLILLQYVDDLLLAATSELDCQQGTRALLQTLGNLGYRASAKKAQICQK | |
| | QVKYLGYLLKEGQRWLTEARKETVMGQPTPKTPRQLREFLGKAGFCRLFIPGFAEMAAPLYPLTKPGTL | |
| | FNWGPDQQKAYQEIKQALLTAPALGLPDLTKPFELFVDEKQGYAKGVLTQKLGPWRRPVAYLSKKLDPV | |
| | AAGWPPCLRMVAAIAVLTKDAGKLTMGQPLVILAPHAVEALVKQPPDRWLSNARMTHYQALLLDTDRVQ | |
| | FGPVVALNPATLLPLPEEGLQHNCLDILAEAHGTRPDLTDQPLPDADHTWYTDGSSLLQEGQRKAGAAV | |
| | TTETEVIWAKALPAGTSAQRAELIALTQALKMAEGKKLNVYTDSRYAFATAHIHGEIYRRRGWLTSEGK | |
| | EIKNKDEILALLKALFLPKRLSIIHCPGHQKGHSAEARGNRMADQAARKAAITETPDTSTLLAEAAAKE | |
| | AAAKEAAAKEAAAKALEAEAAAKEAAAKEAAAKEAAAKAMASNFTQFVLVDNGGTGDVTVAPSNFANGI | |
| | AEWISSNSRSQAYKVTCSVRQSSAQNRKYTIKVEVPKGAWRSYLNMELTIPIFATNSDCELIVKAMQGL | |
| | LKDGNPIPSAIAANSGIYGGSGGSMASNFTQFVLVDNGGTGDVTVAPSNFANGIAEWISSNSRSQAYKV | |
| | TCSVRQSSAQNRKYTIKVEVPKGAWRSYLNMELTIPIFATNSDCELIVKAMQGLLKDGNPIPSAIAANS | |
| | GIYGGGSGGGSGGGSGGGSMASNFTQFVLVDNGGTGDVTVAPSNFANGIAEWISSNSRSQAYKVTCSVR | |
| | QSSAQNRKYTIKVEVPKGAWRSYLNMELTIPIFATNSDCELIVKAMQGLLKDGNPIPSAIAANSGIYGG | |
| | SGGSMASNFTQFVLVDNGGTGDVTVAPSNFANGIAEWISSNSRSQAYKVTCSVRQSSAQNRKYTIKVEV | |
| | PKGAWRSYLNMELTIPIFATNSDCELIVKAMQGLLKDGNPIPSAIAANSGIYGSSGSSGSSGSSGSSGS | |
| | SDKKYSIGLDIGTNSVGWAVITDEYKVPSKKFKVLGNTDRHSIKKNLIGALLFDSGETAEATRLKRTAR | |
| | RRYTRRKNRICYLQEIFSNEMAKVDDSFFHRLEESFLVEEDKKHERHPIFGNIVDEVAYHEKYPTIYHL | |
| | RKKLVDSTDKADLRLIYLALAHMIKFRGHFLIEGDLNPDNSDVDKLFIQLVQTYNQLFEENPINASGVD | |
| | AKAILSARLSKSRRLENLIAQLPGEKKNGLFGNLIALSLGLTPNFKSNFDLAEDAKLQLSKDTYDDDLD | |
| | NLLAQIGDQYADLFLAAKNLSDAILLSDILRVNTEITKAPLSASMIKRYDEHHQDLTLLKALVRQQLPE | |
| | KYKEIFFDQSKNGYAGYIDGGASQEEFYKFIKPILEKMDGTEELLVKLNREDLLRKQRTFDNGSIPHQI | |
| | HLGELHAILRRQEDFYPFLKDNREKIEKILTFRIPYYVGPLARGNSRFAWMTRKSEETITPWNFEEVVD | |
| | KGASAQSFIERMTNFDKNLPNEKVLPKHSLLYEYFTVYNELTKVKYVTEGMRKPAFLSGEQKKAIVDLL | |
| | FKTNRKVTVKQLKEDYFKKIECFDSVEISGVEDRFNASLGTYHDLLKIIKDKDFLDNEENEDILEDIVL | |
| | TLTLFEDREMIEERLKTYAHLFDDKVMKQLKRRRYTGWGRLSRKLINGIRDKQSGKTILDFLKSDGFAN | |
| | RNFMQLIHDDSLTFKEDIQKAQVSGQGDSLHEHIANLAGSPAIKKGILQTVKVVDELVKVMGRHKPENI | |
| | VIEMARENQTTQKGQKNSRERMKRIEEGIKELGSQILKEHPVENTQLQNEKLYLYYLQNGRDMYVDQEL | |
| | DINRLSDYDVDHIVPQSFLKDDSIDNKVLTRSDKARGKSDNVPSEEVVKKMKNYWRQLLNAKLITQRKF | |
| | DNLTKAERGGLSELDKAGFIKRQLVETRQITKHVAQILDSRMNTKYDENDKLIREVKVITLKSKLVSDF | |
| | RKDFQFYKVREINNYHHAHDAYLNAVVGTALIKKYPKLESEFVYGDYKVYDVRKMIAKSEQEIGKATAK | |
| | YFFYSNIMNFFKTEITLANGEIRKRPLIETNGETGEIVWDKGRDFATVRKVLSMPQVNIVKKTEVQTGG | |
| | FSKESILPKRNSDKLIARKKDWDPKKYGGFDSPTVAYSVLVVAKVEKGKSKKLKSVKELLGITIMERSS | |
| | FEKNPIDFLEAKGYKEVKKDLIIKLPKYSLFELENGRKRMLASAGELQKGNELALPSKYVNFLYLASHY | |
| | EKLKGSPEDNEQKQLFVEQHKHYLDEIIEQISEFSKRVILADANLDKVLSAYNKHRDKPIREQAENIIH | |
| | LFTLTNLGAPAAFKYFDTTIDRKRYTSTKEVLDATLIHQSITGLYETRIDLSQLGGDKRTADGSEFESP | |
| | KKKAKVE | |
| PL12048 | MPAAKRVKLDGGTLNIEDEHRLHETSKEPDVSLGSTWLSDFPQAWAETGGMGLAVRQAPLIIPLKATST | 16,111 |
| | PVSIKQYPMSQEARLGIKPHIQRLLDQGILVPCQSPWNTPLLPVKKPGTNDYRPVQDLREVNKRVEDIH | |
| | PTVPNPYNLLSGLPPSHQWYTVLDLKDAFFCLRLHPTSQPLFAFEWRDPEMGISGQLTWTRLPQGFKNS | |
| | PTLFNEALHRDLADFRIQHPDLILLQYVDDLLLAATSELDCQQGTRALLQTLGNLGYRASAKKAQICQK | |
| | QVKYLGYLLKEGQRWLTEARKETVMGQPTPKTPRQLREFLGKAGFCRLFIPGFAEMAAPLYPLTKPGTL | |
| | FNWGPDQQKAYQEIKQALLTAPALGLPDLTKPFELFVDEKQGYAKGVLTQKLGPWRRPVAYLSKKLDPV | |
| | AAGWPPCLRMVAAIAVLTKDAGKLTMGQPLVILAPHAVEALVKQPPDRWLSNARMTHYQALLLDTDRVQ | |
| | FGPVVALNPATLLPLPEEGLQHNCLDILAEAHGTRPDLTDQPLPDADHTWYTDGSSLLQEGQRKAGAAV | |
| | TTETEVIWAKALPAGTSAQRAELIALTQALKMAEGKKLNVYTDSRYAFATAHIHGEIYRRRGWLTSEGK | |
| | EIKNKDEILALLKALFLPKRLSIIHCPGHQKGHSAEARGNRMADQAARKAAITETPDTSTLLAEAAAKE | |
| | AAAKEAAAKEAAAKALEAEAAAKEAAAKEAAAKEAAAKAMASNFTQFVLVDNGGTGDVTVAPSNFANGI | |
| | AEWISSNSRSQAYKVTCSVRQSSAQNRKYTIKVEVPKGAWRSYLNMELTIPIFATNSDCELIVKAMQGL | |
| | LKDGNPIPSAIAANSGIYGGSGGSMASNFTQFVLVDNGGTGDVTVAPSNFANGIAEWISSNSRSQAYKV | |
| | TCSVRQSSAQNRKYTIKVEVPKGAWRSYLNMELTIPIFATNSDCELIVKAMQGLLKDGNPIPSAIAANS | |
| | GIYGGGSGGGSGGGSGGGSMASNFTQFVLVDNGGTGDVTVAPSNFANGIAEWISSNSRSQAYKVTCSVR | |
| | QSSAQNRKYTIKVEVPKGAWRSYLNMELTIPIFATNSDCELIVKAMQGLLKDGNPIPSAIAANSGIYGG | |
| | SGGSMASNFTQFVLVDNGGTGDVTVAPSNFANGIAEWISSNSRSQAYKVTCSVRQSSAQNRKYTIKVEV | |
| | PKGAWRSYLNMELTIPIFATNSDCELIVKAMQGLLKDGNPIPSAIAANSGIYGSSGGGEAAAKDKKYSI | |
| | GLDIGTNSVGWAVITDEYKVPSKKFKVLGNTDRHSIKKNLIGALLFDSGETAEATRLKRTARRRYTRRK | |
| | NRICYLQEIFSNEMAKVDDSFFHRLEESFLVEEDKKHERHPIFGNIVDEVAYHEKYPTIYHLRKKLVDS | |
| | TDKADLRLIYLALAHMIKFRGHFLIEGDLNPDNSDVDKLFIQLVQTYNQLFEENPINASGVDAKAILSA | |
| | RLSKSRRLENLIAQLPGEKKNGLFGNLIALSLGLTPNFKSNFDLAEDAKLQLSKDTYDDDLDNLLAQIG | |
| | DQYADLFLAAKNLSDAILLSDILRVNTEITKAPLSASMIKRYDEHHQDLTLLKALVRQQLPEKYKEIFF | |
| | DQSKNGYAGYIDGGASQEEFYKFIKPILEKMDGTEELLVKLNREDLLRKQRTFDNGSIPHQIHLGELHA | |
| | ILRRQEDFYPFLKDNREKIEKILTFRIPYYVGPLARGNSRFAWMTRKSEETITPWNFEEVVDKGASAQS | |
| | FIERMTNFDKNLPNEKVLPKHSLLYEYFTVYNELTKVKYVTEGMRKPAFLSGEQKKAIVDLLFKTNRKV | |
| | TVKQLKEDYFKKIECFDSVEISGVEDRFNASLGTYHDLLKIIKDKDFLDNEENEDILEDIVLTLTLFED | |
| | REMIEERLKTYAHLFDDKVMKQLKRRRYTGWGRLSRKLINGIRDKQSGKTILDFLKSDGFANRNFMQLI | |
| | HDDSLTFKEDIQKAQVSGQGDSLHEHIANLAGSPAIKKGILQTVKVVDELVKVMGRHKPENIVIEMARE | |
| | NQTTQKGQKNSRERMKRIEEGIKELGSQILKEHPVENTQLQNEKLYLYYLQNGRDMYVDQELDINRLSD | |
| | YDVDHIVPQSFLKDDSIDNKVLTRSDKARGKSDNVPSEEVVKKMKNYWRQLLNAKLITQRKFDNLTKAE | |
| | RGGLSELDKAGFIKRQLVETRQITKHVAQILDSRMNTKYDENDKLIREVKVITLKSKLVSDFRKDFQFY | |
| | KVREINNYHHAHDAYLNAVVGTALIKKYPKLESEFVYGDYKVYDVRKMIAKSEQEIGKATAKYFFYSNI | |
| | MNFFKTEITLANGEIRKRPLIETNGETGEIVWDKGRDFATVRKVLSMPQVNIVKKTEVQTGGFSKESIL | |
| | PKRNSDKLIARKKDWDPKKYGGFDSPTVAYSVLVVAKVEKGKSKKLKSVKELLGITIMERSSFEKNPID | |
| | FLEAKGYKEVKKDLIIKLPKYSLFELENGRKRMLASAGELQKGNELALPSKYVNFLYLASHYEKLKGSP | |
| | EDNEQKQLFVEQHKHYLDEIIEQISEFSKRVILADANLDKVLSAYNKHRDKPIREQAENIIHLFTLTNL | |
| | GAPAAFKYFDTTIDRKRYTSTKEVLDATLIHQSITGLYETRIDLSQLGGDKRTADGSEFESPKKKAKVE | |
| PL12049 | MPAAKRVKLDGGTLNIEDEHRLHETSKEPDVSLGSTWLSDFPQAWAETGGMGLAVRQAPLIIPLKATST | 16,112 |
| | PVSIKQYPMSQEARLGIKPHIQRLLDQGILVPCQSPWNTPLLPVKKPGTNDYRPVQDLREVNKRVEDIH | |
| | PTVPNPYNLLSGLPPSHQWYTVLDLKDAFFCLRLHPTSQPLFAFEWRDPEMGISGQLTWTRLPQGFKNS | |
| | PTLFNEALHRDLADFRIQHPDLILLQYVDDLLLAATSELDCQQGTRALLQTLGNLGYRASAKKAQICQK | |
| | QVKYLGYLLKEGQRWLTEARKETVMGQPTPKTPRQLREFLGKAGFCRLFIPGFAEMAAPLYPLTKPGTL | |
| | FNWGPDQQKAYQEIKQALLTAPALGLPDLTKPFELFVDEKQGYAKGVLTQKLGPWRRPVAYLSKKLDPV | |
| | AAGWPPCLRMVAAIAVLTKDAGKLTMGQPLVILAPHAVEALVKQPPDRWLSNARMTHYQALLLDTDRVQ | |
| | FGPVVALNPATLLPLPEEGLQHNCLDILAEAHGTRPDLTDQPLPDADHTWYTDGSSLLQEGQRKAGAAV | |
| | TTETEVIWAKALPAGTSAQRAELIALTQALKMAEGKKLNVYTDSRYAFATAHIHGEIYRRRGWLTSEGK | |
| | EIKNKDEILALLKALFLPKRLSIIHCPGHQKGHSAEARGNRMADQAARKAAITETPDTSTLLSGGSSGG | |
| | SSGSETPGTSESATPESSGGSSGGSSMASNFTQFVLVDNGGTGDVTVAPSNFANGIAEWISSNSRSQAY | |
| | KVTCSVRQSSAQNRKYTIKVEVPKGAWRSYLNMELTIPIFATNSDCELIVKAMQGLLKDGNPIPSAIAA | |
| | NSGIYAEAAAKEAAAKEAAAKEAAAKALEAEAAAKEAAAKEAAAKEAAAKADKKYSIGLDIGTNSVGWA | |
| | VITDEYKVPSKKFKVLGNTDRHSIKKNLIGALLFDSGETAEATRLKRTARRRYTRRKNRICYLQEIFSN | |
| | EMAKVDDSFFHRLEESFLVEEDKKHERHPIFGNIVDEVAYHEKYPTIYHLRKKLVDSTDKADLRLIYLA | |
| | LAHMIKFRGHFLIEGDLNPDNSDVDKLFIQLVQTYNQLFEENPINASGVDAKAILSARLSKSRRLENLI | |
| | AQLPGEKKNGLFGNLIALSLGLTPNFKSNFDLAEDAKLQLSKDTYDDDLDNLLAQIGDQYADLFLAAKN | |
| | LSDAILLSDILRVNTEITKAPLSASMIKRYDEHHQDLTLLKALVRQQLPEKYKEIFFDQSKNGYAGYID | |
| | GGASQEEFYKFIKPILEKMDGTEELLVKLNREDLLRKQRTFDNGSIPHQIHLGELHAILRRQEDFYPFL | |
| | KDNREKIEKILTFRIPYYVGPLARGNSRFAWMTRKSEETITPWNFEEVVDKGASAQSFIERMTNFDKNL | |
| | PNEKVLPKHSLLYEYFTVYNELTKVKYVTEGMRKPAFLSGEQKKAIVDLLFKTNRKVTVKQLKEDYFKK | |
| | IECFDSVEISGVEDRFNASLGTYHDLLKIIKDKDFLDNEENEDILEDIVLTLTLFEDREMIEERLKTYA | |
| | HLFDDKVMKQLKRRRYTGWGRLSRKLINGIRDKQSGKTILDFLKSDGFANRNFMQLIHDDSLTFKEDIQ | |
| | KAQVSGQGDSLHEHIANLAGSPAIKKGILQTVKVVDELVKVMGRHKPENIVIEMARENQTTQKGQKNSR | |
| | ERMKRIEEGIKELGSQILKEHPVENTQLQNEKLYLYYLQNGRDMYVDQELDINRLSDYDVDHIVPQSFL | |
| | KDDSIDNKVLTRSDKARGKSDNVPSEEVVKKMKNYWRQLLNAKLITQRKFDNLTKAERGGLSELDKAGF | |
| | IKRQLVETRQITKHVAQILDSRMNTKYDENDKLIREVKVITLKSKLVSDFRKDFQFYKVREINNYHHAH | |
| | DAYLNAVVGTALIKKYPKLESEFVYGDYKVYDVRKMIAKSEQEIGKATAKYFFYSNIMNFFKTEITLAN | |
| | GEIRKRPLIETNGETGEIVWDKGRDFATVRKVLSMPQVNIVKKTEVQTGGFSKESILPKRNSDKLIARK | |
| | KDWDPKKYGGFDSPTVAYSVLVVAKVEKGKSKKLKSVKELLGITIMERSSFEKNPIDFLEAKGYKEVKK | |
| | DLIIKLPKYSLFELENGRKRMLASAGELQKGNELALPSKYVNFLYLASHYEKLKGSPEDNEQKQLFVEQ | |
| | HKHYLDEIIEQISEFSKRVILADANLDKVLSAYNKHRDKPIREQAENIIHLFTLTNLGAPAAFKYFDTT | |
| | IDRKRYTSTKEVLDATLIHQSITGLYETRIDLSQLGGDKRTADGSEFESPKKKAKVE | |
| PL12050 | MPAAKRVKLDGGTLNIEDEHRLHETSKEPDVSLGSTWLSDFPQAWAETGGMGLAVRQAPLIIPLKATST | 16,113 |
| | PVSIKQYPMSQEARLGIKPHIQRLLDQGILVPCQSPWNTPLLPVKKPGTNDYRPVQDLREVNKRVEDIH | |
| | PTVPNPYNLLSGLPPSHQWYTVLDLKDAFFCLRLHPTSQPLFAFEWRDPEMGISGQLTWTRLPQGFKNS | |
| | PTLFNEALHRDLADFRIQHPDLILLQYVDDLLLAATSELDCQQGTRALLQTLGNLGYRASAKKAQICQK | |
| | QVKYLGYLLKEGQRWLTEARKETVMGQPTPKTPRQLREFLGKAGFCRLFIPGFAEMAAPLYPLTKPGTL | |
| | FNWGPDQQKAYQEIKQALLTAPALGLPDLTKPFELFVDEKQGYAKGVLTQKLGPWRRPVAYLSKKLDPV | |
| | AAGWPPCLRMVAAIAVLTKDAGKLTMGQPLVILAPHAVEALVKQPPDRWLSNARMTHYQALLLDTDRVQ | |
| | FGPVVALNPATLLPLPEEGLQHNCLDILAEAHGTRPDLTDQPLPDADHTWYTDGSSLLQEGQRKAGAAV | |
| | TTETEVIWAKALPAGTSAQRAELIALTQALKMAEGKKLNVYTDSRYAFATAHIHGEIYRRRGWLTSEGK | |
| | EIKNKDEILALLKALFLPKRLSIIHCPGHQKGHSAEARGNRMADQAARKAAITETPDTSTLLSGGSSGG | |
| | SSGSETPGTSESATPESSGGSSGGSSMASNFTQFVLVDNGGTGDVTVAPSNFANGIAEWISSNSRSQAY | |
| | KVTCSVRQSSAQNRKYTIKVEVPKGAWRSYLNMELTIPIFATNSDCELIVKAMQGLLKDGNPIPSAIAA | |
| | NSGIYSGGSSGGSSGSETPGTSESATPESSGGSSGGSSDKKYSIGLDIGTNSVGWAVITDEYKVPSKKF | |
| | KVLGNTDRHSIKKNLIGALLFDSGETAEATRLKRTARRRYTRRKNRICYLQEIFSNEMAKVDDSFFHRL | |
| | EESFLVEEDKKHERHPIFGNIVDEVAYHEKYPTIYHLRKKLVDSTDKADLRLIYLALAHMIKFRGHFLI | |
| | EGDLNPDNSDVDKLFIQLVQTYNQLFEENPINASGVDAKAILSARLSKSRRLENLIAQLPGEKKNGLFG | |
| | NLIALSLGLTPNFKSNFDLAEDAKLQLSKDTYDDDLDNLLAQIGDQYADLFLAAKNLSDAILLSDILRV | |
| | NTEITKAPLSASMIKRYDEHHQDLTLLKALVRQQLPEKYKEIFFDQSKNGYAGYIDGGASQEEFYKFIK | |
| | PILEKMDGTEELLVKLNREDLLRKQRTFDNGSIPHQIHLGELHAILRRQEDFYPFLKDNREKIEKILTF | |
| | RIPYYVGPLARGNSRFAWMTRKSEETITPWNFEEVVDKGASAQSFIERMTNFDKNLPNEKVLPKHSLLY | |
| | EYFTVYNELTKVKYVTEGMRKPAFLSGEQKKAIVDLLFKTNRKVTVKQLKEDYFKKIECFDSVEISGVE | |
| | DRFNASLGTYHDLLKIIKDKDFLDNEENEDILEDIVLTLTLFEDREMIEERLKTYAHLFDDKVMKQLKR | |
| | RRYTGWGRLSRKLINGIRDKQSGKTILDFLKSDGFANRNFMQLIHDDSLTFKEDIQKAQVSGQGDSLHE | |
| | HIANLAGSPAIKKGILQTVKVVDELVKVMGRHKPENIVIEMARENQTTQKGQKNSRERMKRIEEGIKEL | |
| | GSQILKEHPVENTQLQNEKLYLYYLQNGRDMYVDQELDINRLSDYDVDHIVPQSFLKDDSIDNKVLTRS | |
| | DKARGKSDNVPSEEVVKKMKNYWRQLLNAKLITQRKFDNLTKAERGGLSELDKAGFIKRQLVETRQITK | |
| | HVAQILDSRMNTKYDENDKLIREVKVITLKSKLVSDFRKDFQFYKVREINNYHHAHDAYLNAVVGTALI | |
| | KKYPKLESEFVYGDYKVYDVRKMIAKSEQEIGKATAKYFFYSNIMNFFKTEITLANGEIRKRPLIETNG | |
| | ETGEIVWDKGRDFATVRKVLSMPQVNIVKKTEVQTGGFSKESILPKRNSDKLIARKKDWDPKKYGGFDS | |
| | PTVAYSVLVVAKVEKGKSKKLKSVKELLGITIMERSSFEKNPIDFLEAKGYKEVKKDLIIKLPKYSLFE | |
| | LENGRKRMLASAGELQKGNELALPSKYVNFLYLASHYEKLKGSPEDNEQKQLFVEQHKHYLDEIIEQIS | |
| | EFSKRVILADANLDKVLSAYNKHRDKPIREQAENIIHLFTLTNLGAPAAFKYFDTTIDRKRYTSTKEVL | |
| | DATLIHQSITGLYETRIDLSQLGGDKRTADGSEFESPKKKAKVE | |
| PL12051 | MPAAKRVKLDGGTLNIEDEHRLHETSKEPDVSLGSTWLSDFPQAWAETGGMGLAVRQAPLIIPLKATST | 16,114 |
| | PVSIKQYPMSQEARLGIKPHIQRLLDQGILVPCQSPWNTPLLPVKKPGTNDYRPVQDLREVNKRVEDIH | |
| | PTVPNPYNLLSGLPPSHQWYTVLDLKDAFFCLRLHPTSQPLFAFEWRDPEMGISGQLTWTRLPQGFKNS | |
| | PTLFNEALHRDLADFRIQHPDLILLQYVDDLLLAATSELDCQQGTRALLQTLGNLGYRASAKKAQICQK | |
| | QVKYLGYLLKEGQRWLTEARKETVMGQPTPKTPRQLREFLGKAGFCRLFIPGFAEMAAPLYPLTKPGTL | |
| | FNWGPDQQKAYQEIKQALLTAPALGLPDLTKPFELFVDEKQGYAKGVLTQKLGPWRRPVAYLSKKLDPV | |
| | AAGWPPCLRMVAAIAVLTKDAGKLTMGQPLVILAPHAVEALVKQPPDRWLSNARMTHYQALLLDTDRVQ | |
| | FGPVVALNPATLLPLPEEGLQHNCLDILAEAHGTRPDLTDQPLPDADHTWYTDGSSLLQEGQRKAGAAV | |
| | TTETEVIWAKALPAGTSAQRAELIALTQALKMAEGKKLNVYTDSRYAFATAHIHGEIYRRRGWLTSEGK | |
| | EIKNKDEILALLKALFLPKRLSIIHCPGHQKGHSAEARGNRMADQAARKAAITETPDTSTLLSGGSSGG | |
| | SSGSETPGTSESATPESSGGSSGGSSMASNFTQFVLVDNGGTGDVTVAPSNFANGIAEWISSNSRSQAY | |
| | KVTCSVRQSSAQNRKYTIKVEVPKGAWRSYLNMELTIPIFATNSDCELIVKAMQGLLKDGNPIPSAIAA | |
| | NSGIYGSSGSSGSSGSSGSSGSSDKKYSIGLDIGTNSVGWAVITDEYKVPSKKFKVLGNTDRHSIKKNL | |
| | IGALLFDSGETAEATRLKRTARRRYTRRKNRICYLQEIFSNEMAKVDDSFFHRLEESFLVEEDKKHERH | |
| | PIFGNIVDEVAYHEKYPTIYHLRKKLVDSTDKADLRLIYLALAHMIKFRGHFLIEGDLNPDNSDVDKLF | |
| | IQLVQTYNQLFEENPINASGVDAKAILSARLSKSRRLENLIAQLPGEKKNGLFGNLIALSLGLTPNFKS | |
| | NFDLAEDAKLQLSKDTYDDDLDNLLAQIGDQYADLFLAAKNLSDAILLSDILRVNTEITKAPLSASMIK | |
| | RYDEHHQDLTLLKALVRQQLPEKYKEIFFDQSKNGYAGYIDGGASQEEFYKFIKPILEKMDGTEELLVK | |
| | LNREDLLRKQRTFDNGSIPHQIHLGELHAILRRQEDFYPFLKDNREKIEKILTFRIPYYVGPLARGNSR | |
| | FAWMTRKSEETITPWNFEEVVDKGASAQSFIERMTNFDKNLPNEKVLPKHSLLYEYFTVYNELTKVKYV | |
| | TEGMRKPAFLSGEQKKAIVDLLFKTNRKVTVKQLKEDYFKKIECFDSVEISGVEDRFNASLGTYHDLLK | |
| | IIKDKDFLDNEENEDILEDIVLTLTLFEDREMIEERLKTYAHLFDDKVMKQLKRRRYTGWGRLSRKLIN | |
| | GIRDKQSGKTILDFLKSDGFANRNFMQLIHDDSLTFKEDIQKAQVSGQGDSLHEHIANLAGSPAIKKGI | |
| | LQTVKVVDELVKVMGRHKPENIVIEMARENQTTQKGQKNSRERMKRIEEGIKELGSQILKEHPVENTQL | |
| | QNEKLYLYYLQNGRDMYVDQELDINRLSDYDVDHIVPQSFLKDDSIDNKVLTRSDKARGKSDNVPSEEV | |
| | VKKMKNYWRQLLNAKLITQRKFDNLTKAERGGLSELDKAGFIKRQLVETRQITKHVAQILDSRMNTKYD | |
| | ENDKLIREVKVITLKSKLVSDFRKDFQFYKVREINNYHHAHDAYLNAVVGTALIKKYPKLESEFVYGDY | |
| | KVYDVRKMIAKSEQEIGKATAKYFFYSNIMNFFKTEITLANGEIRKRPLIETNGETGEIVWDKGRDFAT | |
| | VRKVLSMPQVNIVKKTEVQTGGFSKESILPKRNSDKLIARKKDWDPKKYGGFDSPTVAYSVLVVAKVEK | |
| | GKSKKLKSVKELLGITIMERSSFEKNPIDFLEAKGYKEVKKDLIIKLPKYSLFELENGRKRMLASAGEL | |
| | QKGNELALPSKYVNFLYLASHYEKLKGSPEDNEQKQLFVEQHKHYLDEIIEQISEFSKRVILADANLDK | |
| | VLSAYNKHRDKPIREQAENIIHLFTLTNLGAPAAFKYFDTTIDRKRYTSTKEVLDATLIHQSITGLYET | |
| | RIDLSQLGGDKRTADGSEFESPKKKAKVE | |
| PL12052 | MPAAKRVKLDGGTLNIEDEHRLHETSKEPDVSLGSTWLSDFPQAWAETGGMGLAVRQAPLIIPLKATST | 16,115 |
| | PVSIKQYPMSQEARLGIKPHIQRLLDQGILVPCQSPWNTPLLPVKKPGTNDYRPVQDLREVNKRVEDIH | |
| | PTVPNPYNLLSGLPPSHQWYTVLDLKDAFFCLRLHPTSQPLFAFEWRDPEMGISGQLTWTRLPQGFKNS | |
| | PTLFNEALHRDLADFRIQHPDLILLQYVDDLLLAATSELDCQQGTRALLQTLGNLGYRASAKKAQICQK | |
| | QVKYLGYLLKEGQRWLTEARKETVMGQPTPKTPRQLREFLGKAGFCRLFIPGFAEMAAPLYPLTKPGTL | |
| | FNWGPDQQKAYQEIKQALLTAPALGLPDLTKPFELFVDEKQGYAKGVLTQKLGPWRRPVAYLSKKLDPV | |
| | AAGWPPCLRMVAAIAVLTKDAGKLTMGQPLVILAPHAVEALVKQPPDRWLSNARMTHYQALLLDTDRVQ | |
| | FGPVVALNPATLLPLPEEGLQHNCLDILAEAHGTRPDLTDQPLPDADHTWYTDGSSLLQEGQRKAGAAV | |
| | TTETEVIWAKALPAGTSAQRAELIALTQALKMAEGKKLNVYTDSRYAFATAHIHGEIYRRRGWLTSEGK | |
| | EIKNKDEILALLKALFLPKRLSIIHCPGHQKGHSAEARGNRMADQAARKAAITETPDTSTLLSGGSSGG | |
| | SSGSETPGTSESATPESSGGSSGGSSMASNFTQFVLVDNGGTGDVTVAPSNFANGIAEWISSNSRSQAY | |
| | KVTCSVRQSSAQNRKYTIKVEVPKGAWRSYLNMELTIPIFATNSDCELIVKAMQGLLKDGNPIPSAIAA | |
| | NSGIYGSSGGGEAAAKDKKYSIGLDIGTNSVGWAVITDEYKVPSKKFKVLGNTDRHSIKKNLIGALLFD | |
| | SGETAEATRLKRTARRRYTRRKNRICYLQEIFSNEMAKVDDSFFHRLEESFLVEEDKKHERHPIFGNIV | |
| | DEVAYHEKYPTIYHLRKKLVDSTDKADLRLIYLALAHMIKFRGHFLIEGDLNPDNSDVDKLFIQLVQTY | |
| | NQLFEENPINASGVDAKAILSARLSKSRRLENLIAQLPGEKKNGLFGNLIALSLGLTPNFKSNFDLAED | |
| | AKLQLSKDTYDDDLDNLLAQIGDQYADLFLAAKNLSDAILLSDILRVNTEITKAPLSASMIKRYDEHHQ | |
| | DLTLLKALVRQQLPEKYKEIFFDQSKNGYAGYIDGGASQEEFYKFIKPILEKMDGTEELLVKLNREDLL | |
| | RKQRTFDNGSIPHQIHLGELHAILRRQEDFYPFLKDNREKIEKILTFRIPYYVGPLARGNSRFAWMTRK | |
| | SEETITPWNFEEVVDKGASAQSFIERMTNFDKNLPNEKVLPKHSLLYEYFTVYNELTKVKYVTEGMRKP | |
| | AFLSGEQKKAIVDLLFKTNRKVTVKQLKEDYFKKIECFDSVEISGVEDRFNASLGTYHDLLKIIKDKDF | |
| | LDNEENEDILEDIVLTLTLFEDREMIEERLKTYAHLFDDKVMKQLKRRRYTGWGRLSRKLINGIRDKQS | |
| | GKTILDFLKSDGFANRNFMQLIHDDSLTFKEDIQKAQVSGQGDSLHEHIANLAGSPAIKKGILQTVKVV | |
| | DELVKVMGRHKPENIVIEMARENQTTQKGQKNSRERMKRIEEGIKELGSQILKEHPVENTQLQNEKLYL | |
| | YYLQNGRDMYVDQELDINRLSDYDVDHIVPQSFLKDDSIDNKVLTRSDKARGKSDNVPSEEVVKKMKNY | |
| | WRQLLNAKLITQRKFDNLTKAERGGLSELDKAGFIKRQLVETRQITKHVAQILDSRMNTKYDENDKLIR | |
| | EVKVITLKSKLVSDFRKDFQFYKVREINNYHHAHDAYLNAVVGTALIKKYPKLESEFVYGDYKVYDVRK | |
| | MIAKSEQEIGKATAKYFFYSNIMNFFKTEITLANGEIRKRPLIETNGETGEIVWDKGRDFATVRKVLSM | |
| | PQVNIVKKTEVQTGGFSKESILPKRNSDKLIARKKDWDPKKYGGFDSPTVAYSVLVVAKVEKGKSKKLK | |
| | SVKELLGITIMERSSFEKNPIDFLEAKGYKEVKKDLIIKLPKYSLFELENGRKRMLASAGELQKGNELA | |
| | LPSKYVNFLYLASHYEKLKGSPEDNEQKQLFVEQHKHYLDEIIEQISEFSKRVILADANLDKVLSAYNK | |
| | HRDKPIREQAENIIHLFTLTNLGAPAAFKYFDTTIDRKRYTSTKEVLDATLIHQSITGLYETRIDLSQL | |
| | GGDKRTADGSEFESPKKKAKVE | |
| PL12053 | MPAAKRVKLDGGTLNIEDEHRLHETSKEPDVSLGSTWLSDFPQAWAETGGMGLAVRQAPLIIPLKATST | 16,116 |
| | PVSIKQYPMSQEARLGIKPHIQRLLDQGILVPCQSPWNTPLLPVKKPGTNDYRPVQDLREVNKRVEDIH | |
| | PTVPNPYNLLSGLPPSHQWYTVLDLKDAFFCLRLHPTSQPLFAFEWRDPEMGISGQLTWTRLPQGFKNS | |
| | PTLFNEALHRDLADFRIQHPDLILLQYVDDLLLAATSELDCQQGTRALLQTLGNLGYRASAKKAQICQK | |
| | QVKYLGYLLKEGQRWLTEARKETVMGQPTPKTPRQLREFLGKAGFCRLFIPGFAEMAAPLYPLTKPGTL | |
| | FNWGPDQQKAYQEIKQALLTAPALGLPDLTKPFELFVDEKQGYAKGVLTQKLGPWRRPVAYLSKKLDPV | |
| | AAGWPPCLRMVAAIAVLTKDAGKLTMGQPLVILAPHAVEALVKQPPDRWLSNARMTHYQALLLDTDRVQ | |
| | FGPVVALNPATLLPLPEEGLQHNCLDILAEAHGTRPDLTDQPLPDADHTWYTDGSSLLQEGQRKAGAAV | |
| | TTETEVIWAKALPAGTSAQRAELIALTQALKMAEGKKLNVYTDSRYAFATAHIHGEIYRRRGWLTSEGK | |
| | EIKNKDEILALLKALFLPKRLSIIHCPGHQKGHSAEARGNRMADQAARKAAITETPDTSTLLSGGSSGG | |
| | SSGSETPGTSESATPESSGGSSGGSSMASNFTQFVLVDNGGTGDVTVAPSNFANGIAEWISSNSRSQAY | |
| | KVTCSVRQSSAQNRKYTIKVEVPKGAWRSYLNMELTIPIFATNSDCELIVKAMQGLLKDGNPIPSAIAA | |
| | NSGIYGGSGGSMASNFTQFVLVDNGGTGDVTVAPSNFANGIAEWISSNSRSQAYKVTCSVRQSSAQNRK | |
| | YTIKVEVPKGAWRSYLNMELTIPIFATNSDCELIVKAMQGLLKDGNPIPSAIAANSGIYAEAAAKEAAA | |
| | KEAAAKEAAAKALEAEAAAKEAAAKEAAAKEAAAKADKKYSIGLDIGTNSVGWAVITDEYKVPSKKFKV | |
| | LGNTDRHSIKKNLIGALLFDSGETAEATRLKRTARRRYTRRKNRICYLQEIFSNEMAKVDDSFFHRLEE | |
| | SFLVEEDKKHERHPIFGNIVDEVAYHEKYPTIYHLRKKLVDSTDKADLRLIYLALAHMIKFRGHFLIEG | |
| | DLNPDNSDVDKLFIQLVQTYNQLFEENPINASGVDAKAILSARLSKSRRLENLIAQLPGEKKNGLFGNL | |
| | IALSLGLTPNFKSNFDLAEDAKLQLSKDTYDDDLDNLLAQIGDQYADLFLAAKNLSDAILLSDILRVNT | |
| | EITKAPLSASMIKRYDEHHQDLTLLKALVRQQLPEKYKEIFFDQSKNGYAGYIDGGASQEEFYKFIKPI | |
| | LEKMDGTEELLVKLNREDLLRKQRTFDNGSIPHQIHLGELHAILRRQEDFYPFLKDNREKIEKILTFRI | |
| | PYYVGPLARGNSRFAWMTRKSEETITPWNFEEVVDKGASAQSFIERMTNFDKNLPNEKVLPKHSLLYEY | |
| | FTVYNELTKVKYVTEGMRKPAFLSGEQKKAIVDLLFKTNRKVTVKQLKEDYFKKIECFDSVEISGVEDR | |
| | FNASLGTYHDLLKIIKDKDFLDNEENEDILEDIVLTLTLFEDREMIEERLKTYAHLFDDKVMKQLKRRR | |
| | YTGWGRLSRKLINGIRDKQSGKTILDFLKSDGFANRNFMQLIHDDSLTFKEDIQKAQVSGQGDSLHEHI | |
| | ANLAGSPAIKKGILQTVKVVDELVKVMGRHKPENIVIEMARENQTTQKGQKNSRERMKRIEEGIKELGS | |
| | QILKEHPVENTQLQNEKLYLYYLQNGRDMYVDQELDINRLSDYDVDHIVPQSFLKDDSIDNKVLTRSDK | |
| | ARGKSDNVPSEEVVKKMKNYWRQLLNAKLITQRKFDNLTKAERGGLSELDKAGFIKRQLVETRQITKHV | |
| | AQILDSRMNTKYDENDKLIREVKVITLKSKLVSDFRKDFQFYKVREINNYHHAHDAYLNAVVGTALIKK | |
| | YPKLESEFVYGDYKVYDVRKMIAKSEQEIGKATAKYFFYSNIMNFFKTEITLANGEIRKRPLIETNGET | |
| | GEIVWDKGRDFATVRKVLSMPQVNIVKKTEVQTGGFSKESILPKRNSDKLIARKKDWDPKKYGGFDSPT | |
| | VAYSVLVVAKVEKGKSKKLKSVKELLGITIMERSSFEKNPIDFLEAKGYKEVKKDLIIKLPKYSLFELE | |
| | NGRKRMLASAGELQKGNELALPSKYVNFLYLASHYEKLKGSPEDNEQKQLFVEQHKHYLDEIIEQISEF | |
| | SKRVILADANLDKVLSAYNKHRDKPIREQAENIIHLFTLTNLGAPAAFKYFDTTIDRKRYTSTKEVLDA | |
| | TLIHQSITGLYETRIDLSQLGGDKRTADGSEFESPKKKAKVE | |
| PL12054 | MPAAKRVKLDGGTLNIEDEHRLHETSKEPDVSLGSTWLSDFPQAWAETGGMGLAVRQAPLIIPLKATST | 16,117 |
| | PVSIKQYPMSQEARLGIKPHIQRLLDQGILVPCQSPWNTPLLPVKKPGTNDYRPVQDLREVNKRVEDIH | |
| | PTVPNPYNLLSGLPPSHQWYTVLDLKDAFFCLRLHPTSQPLFAFEWRDPEMGISGQLTWTRLPQGFKNS | |
| | PTLFNEALHRDLADFRIQHPDLILLQYVDDLLLAATSELDCQQGTRALLQTLGNLGYRASAKKAQICQK | |
| | QVKYLGYLLKEGQRWLTEARKETVMGQPTPKTPRQLREFLGKAGFCRLFIPGFAEMAAPLYPLTKPGTL | |
| | FNWGPDQQKAYQEIKQALLTAPALGLPDLTKPFELFVDEKQGYAKGVLTQKLGPWRRPVAYLSKKLDPV | |
| | AAGWPPCLRMVAAIAVLTKDAGKLTMGQPLVILAPHAVEALVKQPPDRWLSNARMTHYQALLLDTDRVQ | |
| | FGPVVALNPATLLPLPEEGLQHNCLDILAEAHGTRPDLTDQPLPDADHTWYTDGSSLLQEGQRKAGAAV | |
| | TTETEVIWAKALPAGTSAQRAELIALTQALKMAEGKKLNVYTDSRYAFATAHIHGEIYRRRGWLTSEGK | |
| | EIKNKDEILALLKALFLPKRLSIIHCPGHQKGHSAEARGNRMADQAARKAAITETPDTSTLLSGGSSGG | |
| | SSGSETPGTSESATPESSGGSSGGSSMASNFTQFVLVDNGGTGDVTVAPSNFANGIAEWISSNSRSQAY | |
| | KVTCSVRQSSAQNRKYTIKVEVPKGAWRSYLNMELTIPIFATNSDCELIVKAMQGLLKDGNPIPSAIAA | |
| | NSGIYGGSGGSMASNFTQFVLVDNGGTGDVTVAPSNFANGIAEWISSNSRSQAYKVTCSVRQSSAQNRK | |
| | YTIKVEVPKGAWRSYLNMELTIPIFATNSDCELIVKAMQGLLKDGNPIPSAIAANSGIYSGGSSGGSSG | |
| | SETPGTSESATPESSGGSSGGSSDKKYSIGLDIGTNSVGWAVITDEYKVPSKKFKVLGNTDRHSIKKNL | |
| | IGALLFDSGETAEATRLKRTARRRYTRRKNRICYLQEIFSNEMAKVDDSFFHRLEESFLVEEDKKHERH | |
| | PIFGNIVDEVAYHEKYPTIYHLRKKLVDSTDKADLRLIYLALAHMIKFRGHFLIEGDLNPDNSDVDKLF | |
| | IQLVQTYNQLFEENPINASGVDAKAILSARLSKSRRLENLIAQLPGEKKNGLFGNLIALSLGLTPNFKS | |
| | NFDLAEDAKLQLSKDTYDDDLDNLLAQIGDQYADLFLAAKNLSDAILLSDILRVNTEITKAPLSASMIK | |
| | RYDEHHQDLTLLKALVRQQLPEKYKEIFFDQSKNGYAGYIDGGASQEEFYKFIKPILEKMDGTEELLVK | |
| | LNREDLLRKQRTFDNGSIPHQIHLGELHAILRRQEDFYPFLKDNREKIEKILTFRIPYYVGPLARGNSR | |
| | FAWMTRKSEETITPWNFEEVVDKGASAQSFIERMTNFDKNLPNEKVLPKHSLLYEYFTVYNELTKVKYV | |
| | TEGMRKPAFLSGEQKKAIVDLLFKTNRKVTVKQLKEDYFKKIECFDSVEISGVEDRFNASLGTYHDLLK | |
| | IIKDKDFLDNEENEDILEDIVLTLTLFEDREMIEERLKTYAHLFDDKVMKQLKRRRYTGWGRLSRKLIN | |
| | GIRDKQSGKTILDFLKSDGFANRNFMQLIHDDSLTFKEDIQKAQVSGQGDSLHEHIANLAGSPAIKKGI | |
| | LQTVKVVDELVKVMGRHKPENIVIEMARENQTTQKGQKNSRERMKRIEEGIKELGSQILKEHPVENTQL | |
| | QNEKLYLYYLQNGRDMYVDQELDINRLSDYDVDHIVPQSFLKDDSIDNKVLTRSDKARGKSDNVPSEEV | |
| | VKKMKNYWRQLLNAKLITQRKFDNLTKAERGGLSELDKAGFIKRQLVETRQITKHVAQILDSRMNTKYD | |
| | ENDKLIREVKVITLKSKLVSDFRKDFQFYKVREINNYHHAHDAYLNAVVGTALIKKYPKLESEFVYGDY | |
| | KVYDVRKMIAKSEQEIGKATAKYFFYSNIMNFFKTEITLANGEIRKRPLIETNGETGEIVWDKGRDFAT | |
| | VRKVLSMPQVNIVKKTEVQTGGFSKESILPKRNSDKLIARKKDWDPKKYGGFDSPTVAYSVLVVAKVEK | |
| | GKSKKLKSVKELLGITIMERSSFEKNPIDFLEAKGYKEVKKDLIIKLPKYSLFELENGRKRMLASAGEL | |
| | QKGNELALPSKYVNFLYLASHYEKLKGSPEDNEQKQLFVEQHKHYLDEIIEQISEFSKRVILADANLDK | |
| | VLSAYNKHRDKPIREQAENIIHLFTLTNLGAPAAFKYFDTTIDRKRYTSTKEVLDATLIHQSITGLYET | |
| | RIDLSQLGGDKRTADGSEFESPKKKAKVE | |
| PL12055 | MPAAKRVKLDGGTLNIEDEHRLHETSKEPDVSLGSTWLSDFPQAWAETGGMGLAVRQAPLIIPLKATST | 16,118 |
| | PVSIKQYPMSQEARLGIKPHIQRLLDQGILVPCQSPWNTPLLPVKKPGTNDYRPVQDLREVNKRVEDIH | |
| | PTVPNPYNLLSGLPPSHQWYTVLDLKDAFFCLRLHPTSQPLFAFEWRDPEMGISGQLTWTRLPQGFKNS | |
| | PTLFNEALHRDLADFRIQHPDLILLQYVDDLLLAATSELDCQQGTRALLQTLGNLGYRASAKKAQICQK | |
| | QVKYLGYLLKEGQRWLTEARKETVMGQPTPKTPRQLREFLGKAGFCRLFIPGFAEMAAPLYPLTKPGTL | |
| | FNWGPDQQKAYQEIKQALLTAPALGLPDLTKPFELFVDEKQGYAKGVLTQKLGPWRRPVAYLSKKLDPV | |
| | AAGWPPCLRMVAAIAVLTKDAGKLTMGQPLVILAPHAVEALVKQPPDRWLSNARMTHYQALLLDTDRVQ | |
| | FGPVVALNPATLLPLPEEGLQHNCLDILAEAHGTRPDLTDQPLPDADHTWYTDGSSLLQEGQRKAGAAV | |
| | TTETEVIWAKALPAGTSAQRAELIALTQALKMAEGKKLNVYTDSRYAFATAHIHGEIYRRRGWLTSEGK | |
| | EIKNKDEILALLKALFLPKRLSIIHCPGHQKGHSAEARGNRMADQAARKAAITETPDTSTLLSGGSSGG | |
| | SSGSETPGTSESATPESSGGSSGGSSMASNFTQFVLVDNGGTGDVTVAPSNFANGIAEWISSNSRSQAY | |
| | KVTCSVRQSSAQNRKYTIKVEVPKGAWRSYLNMELTIPIFATNSDCELIVKAMQGLLKDGNPIPSAIAA | |
| | NSGIYGGSGGSMASNFTQFVLVDNGGTGDVTVAPSNFANGIAEWISSNSRSQAYKVTCSVRQSSAQNRK | |
| | YTIKVEVPKGAWRSYLNMELTIPIFATNSDCELIVKAMQGLLKDGNPIPSAIAANSGIYGSSGSSGSSG | |
| | SSGSSGSSDKKYSIGLDIGTNSVGWAVITDEYKVPSKKFKVLGNTDRHSIKKNLIGALLFDSGETAEAT | |
| | RLKRTARRRYTRRKNRICYLQEIFSNEMAKVDDSFFHRLEESFLVEEDKKHERHPIFGNIVDEVAYHEK | |
| | YPTIYHLRKKLVDSTDKADLRLIYLALAHMIKFRGHFLIEGDLNPDNSDVDKLFIQLVQTYNQLFEENP | |
| | INASGVDAKAILSARLSKSRRLENLIAQLPGEKKNGLFGNLIALSLGLTPNFKSNFDLAEDAKLQLSKD | |
| | TYDDDLDNLLAQIGDQYADLFLAAKNLSDAILLSDILRVNTEITKAPLSASMIKRYDEHHQDLTLLKAL | |
| | VRQQLPEKYKEIFFDQSKNGYAGYIDGGASQEEFYKFIKPILEKMDGTEELLVKLNREDLLRKQRTFDN | |
| | GSIPHQIHLGELHAILRRQEDFYPFLKDNREKIEKILTFRIPYYVGPLARGNSRFAWMTRKSEETITPW | |
| | NFEEVVDKGASAQSFIERMTNFDKNLPNEKVLPKHSLLYEYFTVYNELTKVKYVTEGMRKPAFLSGEQK | |
| | KAIVDLLFKTNRKVTVKQLKEDYFKKIECFDSVEISGVEDRFNASLGTYHDLLKIIKDKDFLDNEENED | |
| | ILEDIVLTLTLFEDREMIEERLKTYAHLFDDKVMKQLKRRRYTGWGRLSRKLINGIRDKQSGKTILDFL | |
| | KSDGFANRNFMQLIHDDSLTFKEDIQKAQVSGQGDSLHEHIANLAGSPAIKKGILQTVKVVDELVKVMG | |
| | RHKPENIVIEMARENQTTQKGQKNSRERMKRIEEGIKELGSQILKEHPVENTQLQNEKLYLYYLQNGRD | |
| | MYVDQELDINRLSDYDVDHIVPQSFLKDDSIDNKVLTRSDKARGKSDNVPSEEVVKKMKNYWRQLLNAK | |
| | LITQRKFDNLTKAERGGLSELDKAGFIKRQLVETRQITKHVAQILDSRMNTKYDENDKLIREVKVITLK | |
| | SKLVSDFRKDFQFYKVREINNYHHAHDAYLNAVVGTALIKKYPKLESEFVYGDYKVYDVRKMIAKSEQE | |
| | IGKATAKYFFYSNIMNFFKTEITLANGEIRKRPLIETNGETGEIVWDKGRDFATVRKVLSMPQVNIVKK | |
| | TEVQTGGFSKESILPKRNSDKLIARKKDWDPKKYGGFDSPTVAYSVLVVAKVEKGKSKKLKSVKELLGI | |
| | TIMERSSFEKNPIDFLEAKGYKEVKKDLIIKLPKYSLFELENGRKRMLASAGELQKGNELALPSKYVNF | |
| | LYLASHYEKLKGSPEDNEQKQLFVEQHKHYLDEIIEQISEFSKRVILADANLDKVLSAYNKHRDKPIRE | |
| | QAENIIHLFTLTNLGAPAAFKYFDTTIDRKRYTSTKEVLDATLIHQSITGLYETRIDLSQLGGDKRTAD | |
| | GSEFESPKKKAKVE | |
| PL12056 | MPAAKRVKLDGGTLNIEDEHRLHETSKEPDVSLGSTWLSDFPQAWAETGGMGLAVRQAPLIIPLKATST | 16,119 |
| | PVSIKQYPMSQEARLGIKPHIQRLLDQGILVPCQSPWNTPLLPVKKPGTNDYRPVQDLREVNKRVEDIH | |
| | PTVPNPYNLLSGLPPSHQWYTVLDLKDAFFCLRLHPTSQPLFAFEWRDPEMGISGQLTWTRLPQGFKNS | |
| | PTLFNEALHRDLADFRIQHPDLILLQYVDDLLLAATSELDCQQGTRALLQTLGNLGYRASAKKAQICQK | |
| | QVKYLGYLLKEGQRWLTEARKETVMGQPTPKTPRQLREFLGKAGFCRLFIPGFAEMAAPLYPLTKPGTL | |
| | FNWGPDQQKAYQEIKQALLTAPALGLPDLTKPFELFVDEKQGYAKGVLTQKLGPWRRPVAYLSKKLDPV | |
| | AAGWPPCLRMVAAIAVLTKDAGKLTMGQPLVILAPHAVEALVKQPPDRWLSNARMTHYQALLLDTDRVQ | |
| | FGPVVALNPATLLPLPEEGLQHNCLDILAEAHGTRPDLTDQPLPDADHTWYTDGSSLLQEGQRKAGAAV | |
| | TTETEVIWAKALPAGTSAQRAELIALTQALKMAEGKKLNVYTDSRYAFATAHIHGEIYRRRGWLTSEGK | |
| | EIKNKDEILALLKALFLPKRLSIIHCPGHQKGHSAEARGNRMADQAARKAAITETPDTSTLLSGGSSGG | |
| | SSGSETPGTSESATPESSGGSSGGSSMASNFTQFVLVDNGGTGDVTVAPSNFANGIAEWISSNSRSQAY | |
| | KVTCSVRQSSAQNRKYTIKVEVPKGAWRSYLNMELTIPIFATNSDCELIVKAMQGLLKDGNPIPSAIAA | |
| | NSGIYGGSGGSMASNFTQFVLVDNGGTGDVTVAPSNFANGIAEWISSNSRSQAYKVTCSVRQSSAQNRK | |
| | YTIKVEVPKGAWRSYLNMELTIPIFATNSDCELIVKAMQGLLKDGNPIPSAIAANSGIYGSSGGGEAAA | |
| | KDKKYSIGLDIGTNSVGWAVITDEYKVPSKKFKVLGNTDRHSIKKNLIGALLFDSGETAEATRLKRTAR | |
| | RRYTRRKNRICYLQEIFSNEMAKVDDSFFHRLEESFLVEEDKKHERHPIFGNIVDEVAYHEKYPTIYHL | |
| | RKKLVDSTDKADLRLIYLALAHMIKFRGHFLIEGDLNPDNSDVDKLFIQLVQTYNQLFEENPINASGVD | |
| | AKAILSARLSKSRRLENLIAQLPGEKKNGLFGNLIALSLGLTPNFKSNFDLAEDAKLQLSKDTYDDDLD | |
| | NLLAQIGDQYADLFLAAKNLSDAILLSDILRVNTEITKAPLSASMIKRYDEHHQDLTLLKALVRQQLPE | |
| | KYKEIFFDQSKNGYAGYIDGGASQEEFYKFIKPILEKMDGTEELLVKLNREDLLRKQRTFDNGSIPHQI | |
| | HLGELHAILRRQEDFYPFLKDNREKIEKILTFRIPYYVGPLARGNSRFAWMTRKSEETITPWNFEEVVD | |
| | KGASAQSFIERMTNFDKNLPNEKVLPKHSLLYEYFTVYNELTKVKYVTEGMRKPAFLSGEQKKAIVDLL | |
| | FKTNRKVTVKQLKEDYFKKIECFDSVEISGVEDRFNASLGTYHDLLKIIKDKDFLDNEENEDILEDIVL | |
| | TLTLFEDREMIEERLKTYAHLFDDKVMKQLKRRRYTGWGRLSRKLINGIRDKQSGKTILDFLKSDGFAN | |
| | RNFMQLIHDDSLTFKEDIQKAQVSGQGDSLHEHIANLAGSPAIKKGILQTVKVVDELVKVMGRHKPENI | |
| | VIEMARENQTTQKGQKNSRERMKRIEEGIKELGSQILKEHPVENTQLQNEKLYLYYLQNGRDMYVDQEL | |
| | DINRLSDYDVDHIVPQSFLKDDSIDNKVLTRSDKARGKSDNVPSEEVVKKMKNYWRQLLNAKLITQRKF | |
| | DNLTKAERGGLSELDKAGFIKRQLVETRQITKHVAQILDSRMNTKYDENDKLIREVKVITLKSKLVSDF | |
| | RKDFQFYKVREINNYHHAHDAYLNAVVGTALIKKYPKLESEFVYGDYKVYDVRKMIAKSEQEIGKATAK | |
| | YFFYSNIMNFFKTEITLANGEIRKRPLIETNGETGEIVWDKGRDFATVRKVLSMPQVNIVKKTEVQTGG | |
| | FSKESILPKRNSDKLIARKKDWDPKKYGGFDSPTVAYSVLVVAKVEKGKSKKLKSVKELLGITIMERSS | |
| | FEKNPIDFLEAKGYKEVKKDLIIKLPKYSLFELENGRKRMLASAGELQKGNELALPSKYVNFLYLASHY | |
| | EKLKGSPEDNEQKQLFVEQHKHYLDEIIEQISEFSKRVILADANLDKVLSAYNKHRDKPIREQAENIIH | |
| | LFTLTNLGAPAAFKYFDTTIDRKRYTSTKEVLDATLIHQSITGLYETRIDLSQLGGDKRTADGSEFESP | |
| | KKKAKVE | |
| PL12057 | MPAAKRVKLDGGTLNIEDEHRLHETSKEPDVSLGSTWLSDFPQAWAETGGMGLAVRQAPLIIPLKATST | 16,120 |
| | PVSIKQYPMSQEARLGIKPHIQRLLDQGILVPCQSPWNTPLLPVKKPGTNDYRPVQDLREVNKRVEDIH | |
| | PTVPNPYNLLSGLPPSHQWYTVLDLKDAFFCLRLHPTSQPLFAFEWRDPEMGISGQLTWTRLPQGFKNS | |
| | PTLFNEALHRDLADFRIQHPDLILLQYVDDLLLAATSELDCQQGTRALLQTLGNLGYRASAKKAQICQK | |
| | QVKYLGYLLKEGQRWLTEARKETVMGQPTPKTPRQLREFLGKAGFCRLFIPGFAEMAAPLYPLTKPGTL | |
| | FNWGPDQQKAYQEIKQALLTAPALGLPDLTKPFELFVDEKQGYAKGVLTQKLGPWRRPVAYLSKKLDPV | |
| | AAGWPPCLRMVAAIAVLTKDAGKLTMGQPLVILAPHAVEALVKQPPDRWLSNARMTHYQALLLDTDRVQ | |
| | FGPVVALNPATLLPLPEEGLQHNCLDILAEAHGTRPDLTDQPLPDADHTWYTDGSSLLQEGQRKAGAAV | |
| | TTETEVIWAKALPAGTSAQRAELIALTQALKMAEGKKLNVYTDSRYAFATAHIHGEIYRRRGWLTSEGK | |
| | EIKNKDEILALLKALFLPKRLSIIHCPGHQKGHSAEARGNRMADQAARKAAITETPDTSTLLSGGSSGG | |
| | SSGSETPGTSESATPESSGGSSGGSSMASNFTQFVLVDNGGTGDVTVAPSNFANGIAEWISSNSRSQAY | |
| | KVTCSVRQSSAQNRKYTIKVEVPKGAWRSYLNMELTIPIFATNSDCELIVKAMQGLLKDGNPIPSAIAA | |
| | NSGIYGGSGGSMASNFTQFVLVDNGGTGDVTVAPSNFANGIAEWISSNSRSQAYKVTCSVRQSSAQNRK | |
| | YTIKVEVPKGAWRSYLNMELTIPIFATNSDCELIVKAMQGLLKDGNPIPSAIAANSGIYGGGSGGGSGG | |
| | GSGGGSMASNFTQFVLVDNGGTGDVTVAPSNFANGIAEWISSNSRSQAYKVTCSVRQSSAQNRKYTIKV | |
| | EVPKGAWRSYLNMELTIPIFATNSDCELIVKAMQGLLKDGNPIPSAIAANSGIYGGSGGSMASNFTQFV | |
| | LVDNGGTGDVTVAPSNFANGIAEWISSNSRSQAYKVTCSVRQSSAQNRKYTIKVEVPKGAWRSYLNMEL | |
| | TIPIFATNSDCELIVKAMQGLLKDGNPIPSAIAANSGIYAEAAAKEAAAKEAAAKEAAAKALEAEAAAK | |
| | EAAAKEAAAKEAAAKADKKYSIGLDIGTNSVGWAVITDEYKVPSKKFKVLGNTDRHSIKKNLIGALLFD | |
| | SGETAEATRLKRTARRRYTRRKNRICYLQEIFSNEMAKVDDSFFHRLEESFLVEEDKKHERHPIFGNIV | |
| | DEVAYHEKYPTIYHLRKKLVDSTDKADLRLIYLALAHMIKFRGHFLIEGDLNPDNSDVDKLFIQLVQTY | |
| | NQLFEENPINASGVDAKAILSARLSKSRRLENLIAQLPGEKKNGLFGNLIALSLGLTPNFKSNFDLAED | |
| | AKLQLSKDTYDDDLDNLLAQIGDQYADLFLAAKNLSDAILLSDILRVNTEITKAPLSASMIKRYDEHHQ | |
| | DLTLLKALVRQQLPEKYKEIFFDQSKNGYAGYIDGGASQEEFYKFIKPILEKMDGTEELLVKLNREDLL | |
| | RKQRTFDNGSIPHQIHLGELHAILRRQEDFYPFLKDNREKIEKILTFRIPYYVGPLARGNSRFAWMTRK | |
| | SEETITPWNFEEVVDKGASAQSFIERMTNFDKNLPNEKVLPKHSLLYEYFTVYNELTKVKYVTEGMRKP | |
| | AFLSGEQKKAIVDLLFKTNRKVTVKQLKEDYFKKIECFDSVEISGVEDRFNASLGTYHDLLKIIKDKDF | |
| | LDNEENEDILEDIVLTLTLFEDREMIEERLKTYAHLFDDKVMKQLKRRRYTGWGRLSRKLINGIRDKQS | |
| | GKTILDFLKSDGFANRNFMQLIHDDSLTFKEDIQKAQVSGQGDSLHEHIANLAGSPAIKKGILQTVKVV | |
| | DELVKVMGRHKPENIVIEMARENQTTQKGQKNSRERMKRIEEGIKELGSQILKEHPVENTQLQNEKLYL | |
| | YYLQNGRDMYVDQELDINRLSDYDVDHIVPQSFLKDDSIDNKVLTRSDKARGKSDNVPSEEVVKKMKNY | |
| | WRQLLNAKLITQRKFDNLTKAERGGLSELDKAGFIKRQLVETRQITKHVAQILDSRMNTKYDENDKLIR | |
| | EVKVITLKSKLVSDFRKDFQFYKVREINNYHHAHDAYLNAVVGTALIKKYPKLESEFVYGDYKVYDVRK | |
| | MIAKSEQEIGKATAKYFFYSNIMNFFKTEITLANGEIRKRPLIETNGETGEIVWDKGRDFATVRKVLSM | |
| | PQVNIVKKTEVQTGGFSKESILPKRNSDKLIARKKDWDPKKYGGFDSPTVAYSVLVVAKVEKGKSKKLK | |
| | SVKELLGITIMERSSFEKNPIDFLEAKGYKEVKKDLIIKLPKYSLFELENGRKRMLASAGELQKGNELA | |
| | LPSKYVNFLYLASHYEKLKGSPEDNEQKQLFVEQHKHYLDEIIEQISEFSKRVILADANLDKVLSAYNK | |
| | HRDKPIREQAENIIHLFTLTNLGAPAAFKYFDTTIDRKRYTSTKEVLDATLIHQSITGLYETRIDLSQL | |
| | GGDKRTADGSEFESPKKKAKVE | |
| PL12058 | MPAAKRVKLDGGTLNIEDEHRLHETSKEPDVSLGSTWLSDFPQAWAETGGMGLAVRQAPLIIPLKATST | 16,121 |
| | PVSIKQYPMSQEARLGIKPHIQRLLDQGILVPCQSPWNTPLLPVKKPGTNDYRPVQDLREVNKRVEDIH | |
| | PTVPNPYNLLSGLPPSHQWYTVLDLKDAFFCLRLHPTSQPLFAFEWRDPEMGISGQLTWTRLPQGFKNS | |
| | PTLFNEALHRDLADFRIQHPDLILLQYVDDLLLAATSELDCQQGTRALLQTLGNLGYRASAKKAQICQK | |
| | QVKYLGYLLKEGQRWLTEARKETVMGQPTPKTPRQLREFLGKAGFCRLFIPGFAEMAAPLYPLTKPGTL | |
| | FNWGPDQQKAYQEIKQALLTAPALGLPDLTKPFELFVDEKQGYAKGVLTQKLGPWRRPVAYLSKKLDPV | |
| | AAGWPPCLRMVAAIAVLTKDAGKLTMGQPLVILAPHAVEALVKQPPDRWLSNARMTHYQALLLDTDRVQ | |
| | FGPVVALNPATLLPLPEEGLQHNCLDILAEAHGTRPDLTDQPLPDADHTWYTDGSSLLQEGQRKAGAAV | |
| | TTETEVIWAKALPAGTSAQRAELIALTQALKMAEGKKLNVYTDSRYAFATAHIHGEIYRRRGWLTSEGK | |
| | EIKNKDEILALLKALFLPKRLSIIHCPGHQKGHSAEARGNRMADQAARKAAITETPDTSTLLSGGSSGG | |
| | SSGSETPGTSESATPESSGGSSGGSSMASNFTQFVLVDNGGTGDVTVAPSNFANGIAEWISSNSRSQAY | |
| | KVTCSVRQSSAQNRKYTIKVEVPKGAWRSYLNMELTIPIFATNSDCELIVKAMQGLLKDGNPIPSAIAA | |
| | NSGIYGGSGGSMASNFTQFVLVDNGGTGDVTVAPSNFANGIAEWISSNSRSQAYKVTCSVRQSSAQNRK | |
| | YTIKVEVPKGAWRSYLNMELTIPIFATNSDCELIVKAMQGLLKDGNPIPSAIAANSGIYGGGSGGGSGG | |
| | GSGGGSMASNFTQFVLVDNGGTGDVTVAPSNFANGIAEWISSNSRSQAYKVTCSVRQSSAQNRKYTIKV | |
| | EVPKGAWRSYLNMELTIPIFATNSDCELIVKAMQGLLKDGNPIPSAIAANSGIYGGSGGSMASNFTQFV | |
| | LVDNGGTGDVTVAPSNFANGIAEWISSNSRSQAYKVTCSVRQSSAQNRKYTIKVEVPKGAWRSYLNMEL | |
| | TIPIFATNSDCELIVKAMQGLLKDGNPIPSAIAANSGIYSGGSSGGSSGSETPGTSESATPESSGGSSG | |
| | GSSDKKYSIGLDIGTNSVGWAVITDEYKVPSKKFKVLGNTDRHSIKKNLIGALLFDSGETAEATRLKRT | |
| | ARRRYTRRKNRICYLQEIFSNEMAKVDDSFFHRLEESFLVEEDKKHERHPIFGNIVDEVAYHEKYPTIY | |
| | HLRKKLVDSTDKADLRLIYLALAHMIKFRGHFLIEGDLNPDNSDVDKLFIQLVQTYNQLFEENPINASG | |
| | VDAKAILSARLSKSRRLENLIAQLPGEKKNGLFGNLIALSLGLTPNFKSNFDLAEDAKLQLSKDTYDDD | |
| | LDNLLAQIGDQYADLFLAAKNLSDAILLSDILRVNTEITKAPLSASMIKRYDEHHQDLTLLKALVRQQL | |
| | PEKYKEIFFDQSKNGYAGYIDGGASQEEFYKFIKPILEKMDGTEELLVKLNREDLLRKQRTFDNGSIPH | |
| | QIHLGELHAILRRQEDFYPFLKDNREKIEKILTFRIPYYVGPLARGNSRFAWMTRKSEETITPWNFEEV | |
| | VDKGASAQSFIERMTNFDKNLPNEKVLPKHSLLYEYFTVYNELTKVKYVTEGMRKPAFLSGEQKKAIVD | |
| | LLFKTNRKVTVKQLKEDYFKKIECFDSVEISGVEDRFNASLGTYHDLLKIIKDKDFLDNEENEDILEDI | |
| | VLTLTLFEDREMIEERLKTYAHLFDDKVMKQLKRRRYTGWGRLSRKLINGIRDKQSGKTILDFLKSDGF | |
| | ANRNFMQLIHDDSLTFKEDIQKAQVSGQGDSLHEHIANLAGSPAIKKGILQTVKVVDELVKVMGRHKPE | |
| | NIVIEMARENQTTQKGQKNSRERMKRIEEGIKELGSQILKEHPVENTQLQNEKLYLYYLQNGRDMYVDQ | |
| | ELDINRLSDYDVDHIVPQSFLKDDSIDNKVLTRSDKARGKSDNVPSEEVVKKMKNYWRQLLNAKLITQR | |
| | KFDNLTKAERGGLSELDKAGFIKRQLVETRQITKHVAQILDSRMNTKYDENDKLIREVKVITLKSKLVS | |
| | DFRKDFQFYKVREINNYHHAHDAYLNAVVGTALIKKYPKLESEFVYGDYKVYDVRKMIAKSEQEIGKAT | |
| | AKYFFYSNIMNFFKTEITLANGEIRKRPLIETNGETGEIVWDKGRDFATVRKVLSMPQVNIVKKTEVQT | |
| | GGFSKESILPKRNSDKLIARKKDWDPKKYGGFDSPTVAYSVLVVAKVEKGKSKKLKSVKELLGITIMER | |
| | SSFEKNPIDFLEAKGYKEVKKDLIIKLPKYSLFELENGRKRMLASAGELQKGNELALPSKYVNFLYLAS | |
| | HYEKLKGSPEDNEQKQLFVEQHKHYLDEIIEQISEFSKRVILADANLDKVLSAYNKHRDKPIREQAENI | |
| | IHLFTLTNLGAPAAFKYFDTTIDRKRYTSTKEVLDATLIHQSITGLYETRIDLSQLGGDKRTADGSEFE | |
| | SPKKKAKVE | |
| PL12059 | MPAAKRVKLDGGTLNIEDEHRLHETSKEPDVSLGSTWLSDFPQAWAETGGMGLAVRQAPLIIPLKATST | 16,122 |
| | PVSIKQYPMSQEARLGIKPHIQRLLDQGILVPCQSPWNTPLLPVKKPGTNDYRPVQDLREVNKRVEDIH | |
| | PTVPNPYNLLSGLPPSHQWYTVLDLKDAFFCLRLHPTSQPLFAFEWRDPEMGISGQLTWTRLPQGFKNS | |
| | PTLFNEALHRDLADFRIQHPDLILLQYVDDLLLAATSELDCQQGTRALLQTLGNLGYRASAKKAQICQK | |
| | QVKYLGYLLKEGQRWLTEARKETVMGQPTPKTPRQLREFLGKAGFCRLFIPGFAEMAAPLYPLTKPGTL | |
| | FNWGPDQQKAYQEIKQALLTAPALGLPDLTKPFELFVDEKQGYAKGVLTQKLGPWRRPVAYLSKKLDPV | |
| | AAGWPPCLRMVAAIAVLTKDAGKLTMGQPLVILAPHAVEALVKQPPDRWLSNARMTHYQALLLDTDRVQ | |
| | FGPVVALNPATLLPLPEEGLQHNCLDILAEAHGTRPDLTDQPLPDADHTWYTDGSSLLQEGQRKAGAAV | |
| | TTETEVIWAKALPAGTSAQRAELIALTQALKMAEGKKLNVYTDSRYAFATAHIHGEIYRRRGWLTSEGK | |
| | EIKNKDEILALLKALFLPKRLSIIHCPGHQKGHSAEARGNRMADQAARKAAITETPDTSTLLSGGSSGG | |
| | SSGSETPGTSESATPESSGGSSGGSSMASNFTQFVLVDNGGTGDVTVAPSNFANGIAEWISSNSRSQAY | |
| | KVTCSVRQSSAQNRKYTIKVEVPKGAWRSYLNMELTIPIFATNSDCELIVKAMQGLLKDGNPIPSAIAA | |
| | NSGIYGGSGGSMASNFTQFVLVDNGGTGDVTVAPSNFANGIAEWISSNSRSQAYKVTCSVRQSSAQNRK | |
| | YTIKVEVPKGAWRSYLNMELTIPIFATNSDCELIVKAMQGLLKDGNPIPSAIAANSGIYGGGSGGGSGG | |
| | GSGGGSMASNFTQFVLVDNGGTGDVTVAPSNFANGIAEWISSNSRSQAYKVTCSVRQSSAQNRKYTIKV | |
| | EVPKGAWRSYLNMELTIPIFATNSDCELIVKAMQGLLKDGNPIPSAIAANSGIYGGSGGSMASNFTQFV | |
| | LVDNGGTGDVTVAPSNFANGIAEWISSNSRSQAYKVTCSVRQSSAQNRKYTIKVEVPKGAWRSYLNMEL | |
| | TIPIFATNSDCELIVKAMQGLLKDGNPIPSAIAANSGIYGSSGSSGSSGSSGSSGSSDKKYSIGLDIGT | |
| | NSVGWAVITDEYKVPSKKFKVLGNTDRHSIKKNLIGALLFDSGETAEATRLKRTARRRYTRRKNRICYL | |
| | QEIFSNEMAKVDDSFFHRLEESFLVEEDKKHERHPIFGNIVDEVAYHEKYPTIYHLRKKLVDSTDKADL | |
| | RLIYLALAHMIKFRGHFLIEGDLNPDNSDVDKLFIQLVQTYNQLFEENPINASGVDAKAILSARLSKSR | |
| | RLENLIAQLPGEKKNGLFGNLIALSLGLTPNFKSNFDLAEDAKLQLSKDTYDDDLDNLLAQIGDQYADL | |
| | FLAAKNLSDAILLSDILRVNTEITKAPLSASMIKRYDEHHQDLTLLKALVRQQLPEKYKEIFFDQSKNG | |
| | YAGYIDGGASQEEFYKFIKPILEKMDGTEELLVKLNREDLLRKQRTFDNGSIPHQIHLGELHAILRRQE | |
| | DFYPFLKDNREKIEKILTFRIPYYVGPLARGNSRFAWMTRKSEETITPWNFEEVVDKGASAQSFIERMT | |
| | NFDKNLPNEKVLPKHSLLYEYFTVYNELTKVKYVTEGMRKPAFLSGEQKKAIVDLLFKTNRKVTVKQLK | |
| | EDYFKKIECFDSVEISGVEDRFNASLGTYHDLLKIIKDKDFLDNEENEDILEDIVLTLTLFEDREMIEE | |
| | RLKTYAHLFDDKVMKQLKRRRYTGWGRLSRKLINGIRDKQSGKTILDFLKSDGFANRNFMQLIHDDSLT | |
| | FKEDIQKAQVSGQGDSLHEHIANLAGSPAIKKGILQTVKVVDELVKVMGRHKPENIVIEMARENQTTQK | |
| | GQKNSRERMKRIEEGIKELGSQILKEHPVENTQLQNEKLYLYYLQNGRDMYVDQELDINRLSDYDVDHI | |
| | VPQSFLKDDSIDNKVLTRSDKARGKSDNVPSEEVVKKMKNYWRQLLNAKLITQRKFDNLTKAERGGLSE | |
| | LDKAGFIKRQLVETRQITKHVAQILDSRMNTKYDENDKLIREVKVITLKSKLVSDFRKDFQFYKVREIN | |
| | NYHHAHDAYLNAVVGTALIKKYPKLESEFVYGDYKVYDVRKMIAKSEQEIGKATAKYFFYSNIMNFFKT | |
| | EITLANGEIRKRPLIETNGETGEIVWDKGRDFATVRKVLSMPQVNIVKKTEVQTGGFSKESILPKRNSD | |
| | KLIARKKDWDPKKYGGFDSPTVAYSVLVVAKVEKGKSKKLKSVKELLGITIMERSSFEKNPIDFLEAKG | |
| | YKEVKKDLIIKLPKYSLFELENGRKRMLASAGELQKGNELALPSKYVNFLYLASHYEKLKGSPEDNEQK | |
| | QLFVEQHKHYLDEIIEQISEFSKRVILADANLDKVLSAYNKHRDKPIREQAENIIHLFTLTNLGAPAAF | |
| | KYFDTTIDRKRYTSTKEVLDATLIHQSITGLYETRIDLSQLGGDKRTADGSEFESPKKKAKVE | |
| PL12060 | MPAAKRVKLDGGTLNIEDEHRLHETSKEPDVSLGSTWLSDFPQAWAETGGMGLAVRQAPLIIPLKATST | 16,123 |
| | PVSIKQYPMSQEARLGIKPHIQRLLDQGILVPCQSPWNTPLLPVKKPGTNDYRPVQDLREVNKRVEDIH | |
| | PTVPNPYNLLSGLPPSHQWYTVLDLKDAFFCLRLHPTSQPLFAFEWRDPEMGISGQLTWTRLPQGFKNS | |
| | PTLFNEALHRDLADFRIQHPDLILLQYVDDLLLAATSELDCQQGTRALLQTLGNLGYRASAKKAQICQK | |
| | QVKYLGYLLKEGQRWLTEARKETVMGQPTPKTPRQLREFLGKAGFCRLFIPGFAEMAAPLYPLTKPGTL | |
| | FNWGPDQQKAYQEIKQALLTAPALGLPDLTKPFELFVDEKQGYAKGVLTQKLGPWRRPVAYLSKKLDPV | |
| | AAGWPPCLRMVAAIAVLTKDAGKLTMGQPLVILAPHAVEALVKQPPDRWLSNARMTHYQALLLDTDRVQ | |
| | FGPVVALNPATLLPLPEEGLQHNCLDILAEAHGTRPDLTDQPLPDADHTWYTDGSSLLQEGQRKAGAAV | |
| | TTETEVIWAKALPAGTSAQRAELIALTQALKMAEGKKLNVYTDSRYAFATAHIHGEIYRRRGWLTSEGK | |
| | EIKNKDEILALLKALFLPKRLSIIHCPGHQKGHSAEARGNRMADQAARKAAITETPDTSTLLSGGSSGG | |
| | SSGSETPGTSESATPESSGGSSGGSSMASNFTQFVLVDNGGTGDVTVAPSNFANGIAEWISSNSRSQAY | |
| | KVTCSVRQSSAQNRKYTIKVEVPKGAWRSYLNMELTIPIFATNSDCELIVKAMQGLLKDGNPIPSAIAA | |
| | NSGIYGGSGGSMASNFTQFVLVDNGGTGDVTVAPSNFANGIAEWISSNSRSQAYKVTCSVRQSSAQNRK | |
| | YTIKVEVPKGAWRSYLNMELTIPIFATNSDCELIVKAMQGLLKDGNPIPSAIAANSGIYGGGSGGGSGG | |
| | GSGGGSMASNFTQFVLVDNGGTGDVTVAPSNFANGIAEWISSNSRSQAYKVTCSVRQSSAQNRKYTIKV | |
| | EVPKGAWRSYLNMELTIPIFATNSDCELIVKAMQGLLKDGNPIPSAIAANSGIYGGSGGSMASNFTQFV | |
| | LVDNGGTGDVTVAPSNFANGIAEWISSNSRSQAYKVTCSVRQSSAQNRKYTIKVEVPKGAWRSYLNMEL | |
| | TIPIFATNSDCELIVKAMQGLLKDGNPIPSAIAANSGIYGSSGGGEAAAKDKKYSIGLDIGTNSVGWAV | |
| | ITDEYKVPSKKFKVLGNTDRHSIKKNLIGALLFDSGETAEATRLKRTARRRYTRRKNRICYLQEIFSNE | |
| | MAKVDDSFFHRLEESFLVEEDKKHERHPIFGNIVDEVAYHEKYPTIYHLRKKLVDSTDKADLRLIYLAL | |
| | AHMIKFRGHFLIEGDLNPDNSDVDKLFIQLVQTYNQLFEENPINASGVDAKAILSARLSKSRRLENLIA | |
| | QLPGEKKNGLFGNLIALSLGLTPNFKSNFDLAEDAKLQLSKDTYDDDLDNLLAQIGDQYADLFLAAKNL | |
| | SDAILLSDILRVNTEITKAPLSASMIKRYDEHHQDLTLLKALVRQQLPEKYKEIFFDQSKNGYAGYIDG | |
| | GASQEEFYKFIKPILEKMDGTEELLVKLNREDLLRKQRTFDNGSIPHQIHLGELHAILRRQEDFYPFLK | |
| | DNREKIEKILTFRIPYYVGPLARGNSRFAWMTRKSEETITPWNFEEVVDKGASAQSFIERMTNFDKNLP | |
| | NEKVLPKHSLLYEYFTVYNELTKVKYVTEGMRKPAFLSGEQKKAIVDLLFKTNRKVTVKQLKEDYFKKI | |
| | ECFDSVEISGVEDRFNASLGTYHDLLKIIKDKDFLDNEENEDILEDIVLTLTLFEDREMIEERLKTYAH | |
| | LFDDKVMKQLKRRRYTGWGRLSRKLINGIRDKQSGKTILDFLKSDGFANRNFMQLIHDDSLTFKEDIQK | |
| | AQVSGQGDSLHEHIANLAGSPAIKKGILQTVKVVDELVKVMGRHKPENIVIEMARENQTTQKGQKNSRE | |
| | RMKRIEEGIKELGSQILKEHPVENTQLQNEKLYLYYLQNGRDMYVDQELDINRLSDYDVDHIVPQSFLK | |
| | DDSIDNKVLTRSDKARGKSDNVPSEEVVKKMKNYWRQLLNAKLITQRKFDNLTKAERGGLSELDKAGFI | |
| | KRQLVETRQITKHVAQILDSRMNTKYDENDKLIREVKVITLKSKLVSDFRKDFQFYKVREINNYHHAHD | |
| | AYLNAVVGTALIKKYPKLESEFVYGDYKVYDVRKMIAKSEQEIGKATAKYFFYSNIMNFFKTEITLANG | |
| | EIRKRPLIETNGETGEIVWDKGRDFATVRKVLSMPQVNIVKKTEVQTGGFSKESILPKRNSDKLIARKK | |
| | DWDPKKYGGFDSPTVAYSVLVVAKVEKGKSKKLKSVKELLGITIMERSSFEKNPIDFLEAKGYKEVKKD | |
| | LIIKLPKYSLFELENGRKRMLASAGELQKGNELALPSKYVNFLYLASHYEKLKGSPEDNEQKQLFVEQH | |
| | KHYLDEIIEQISEFSKRVILADANLDKVLSAYNKHRDKPIREQAENIIHLFTLTNLGAPAAFKYFDTTI | |
| | DRKRYTSTKEVLDATLIHQSITGLYETRIDLSQLGGDKRTADGSEFESPKKKAKVE | |
| PL12061 | MPAAKRVKLDGGTLNIEDEHRLHETSKEPDVSLGSTWLSDFPQAWAETGGMGLAVRQAPLIIPLKATST | 16,124 |
| | PVSIKQYPMSQEARLGIKPHIQRLLDQGILVPCQSPWNTPLLPVKKPGTNDYRPVQDLREVNKRVEDIH | |
| | PTVPNPYNLLSGLPPSHQWYTVLDLKDAFFCLRLHPTSQPLFAFEWRDPEMGISGQLTWTRLPQGFKNS | |
| | PTLFNEALHRDLADFRIQHPDLILLQYVDDLLLAATSELDCQQGTRALLQTLGNLGYRASAKKAQICQK | |
| | QVKYLGYLLKEGQRWLTEARKETVMGQPTPKTPRQLREFLGKAGFCRLFIPGFAEMAAPLYPLTKPGTL | |
| | FNWGPDQQKAYQEIKQALLTAPALGLPDLTKPFELFVDEKQGYAKGVLTQKLGPWRRPVAYLSKKLDPV | |
| | AAGWPPCLRMVAAIAVLTKDAGKLTMGQPLVILAPHAVEALVKQPPDRWLSNARMTHYQALLLDTDRVQ | |
| | FGPVVALNPATLLPLPEEGLQHNCLDILAEAHGTRPDLTDQPLPDADHTWYTDGSSLLQEGQRKAGAAV | |
| | TTETEVIWAKALPAGTSAQRAELIALTQALKMAEGKKLNVYTDSRYAFATAHIHGEIYRRRGWLTSEGK | |
| | EIKNKDEILALLKALFLPKRLSIIHCPGHQKGHSAEARGNRMADQAARKAAITETPDTSTLLGSSGSSG | |
| | SSGSSGSSGSSMASNFTQFVLVDNGGTGDVTVAPSNFANGIAEWISSNSRSQAYKVTCSVRQSSAQNRK | |
| | YTIKVEVPKGAWRSYLNMELTIPIFATNSDCELIVKAMQGLLKDGNPIPSAIAANSGIYAEAAAKEAAA | |
| | KEAAAKEAAAKALEAEAAAKEAAAKEAAAKEAAAKADKKYSIGLDIGTNSVGWAVITDEYKVPSKKFKV | |
| | LGNTDRHSIKKNLIGALLFDSGETAEATRLKRTARRRYTRRKNRICYLQEIFSNEMAKVDDSFFHRLEE | |
| | SFLVEEDKKHERHPIFGNIVDEVAYHEKYPTIYHLRKKLVDSTDKADLRLIYLALAHMIKFRGHFLIEG | |
| | DLNPDNSDVDKLFIQLVQTYNQLFEENPINASGVDAKAILSARLSKSRRLENLIAQLPGEKKNGLFGNL | |
| | IALSLGLTPNFKSNFDLAEDAKLQLSKDTYDDDLDNLLAQIGDQYADLFLAAKNLSDAILLSDILRVNT | |
| | EITKAPLSASMIKRYDEHHQDLTLLKALVRQQLPEKYKEIFFDQSKNGYAGYIDGGASQEEFYKFIKPI | |
| | LEKMDGTEELLVKLNREDLLRKQRTFDNGSIPHQIHLGELHAILRRQEDFYPFLKDNREKIEKILTFRI | |
| | PYYVGPLARGNSRFAWMTRKSEETITPWNFEEVVDKGASAQSFIERMTNFDKNLPNEKVLPKHSLLYEY | |
| | FTVYNELTKVKYVTEGMRKPAFLSGEQKKAIVDLLFKTNRKVTVKQLKEDYFKKIECFDSVEISGVEDR | |
| | FNASLGTYHDLLKIIKDKDFLDNEENEDILEDIVLTLTLFEDREMIEERLKTYAHLFDDKVMKQLKRRR | |
| | YTGWGRLSRKLINGIRDKQSGKTILDFLKSDGFANRNFMQLIHDDSLTFKEDIQKAQVSGQGDSLHEHI | |
| | ANLAGSPAIKKGILQTVKVVDELVKVMGRHKPENIVIEMARENQTTQKGQKNSRERMKRIEEGIKELGS | |
| | QILKEHPVENTQLQNEKLYLYYLQNGRDMYVDQELDINRLSDYDVDHIVPQSFLKDDSIDNKVLTRSDK | |
| | ARGKSDNVPSEEVVKKMKNYWRQLLNAKLITQRKFDNLTKAERGGLSELDKAGFIKRQLVETRQITKHV | |
| | AQILDSRMNTKYDENDKLIREVKVITLKSKLVSDFRKDFQFYKVREINNYHHAHDAYLNAVVGTALIKK | |
| | YPKLESEFVYGDYKVYDVRKMIAKSEQEIGKATAKYFFYSNIMNFFKTEITLANGEIRKRPLIETNGET | |
| | GEIVWDKGRDFATVRKVLSMPQVNIVKKTEVQTGGFSKESILPKRNSDKLIARKKDWDPKKYGGFDSPT | |
| | VAYSVLVVAKVEKGKSKKLKSVKELLGITIMERSSFEKNPIDFLEAKGYKEVKKDLIIKLPKYSLFELE | |
| | NGRKRMLASAGELQKGNELALPSKYVNFLYLASHYEKLKGSPEDNEQKQLFVEQHKHYLDEIIEQISEF | |
| | SKRVILADANLDKVLSAYNKHRDKPIREQAENIIHLFTLTNLGAPAAFKYFDTTIDRKRYTSTKEVLDA | |
| | TLIHQSITGLYETRIDLSQLGGDKRTADGSEFESPKKKAKVE | |
| PL12062 | MPAAKRVKLDGGTLNIEDEHRLHETSKEPDVSLGSTWLSDFPQAWAETGGMGLAVRQAPLIIPLKATST | 16,125 |
| | PVSIKQYPMSQEARLGIKPHIQRLLDQGILVPCQSPWNTPLLPVKKPGTNDYRPVQDLREVNKRVEDIH | |
| | PTVPNPYNLLSGLPPSHQWYTVLDLKDAFFCLRLHPTSQPLFAFEWRDPEMGISGQLTWTRLPQGFKNS | |
| | PTLFNEALHRDLADFRIQHPDLILLQYVDDLLLAATSELDCQQGTRALLQTLGNLGYRASAKKAQICQK | |
| | QVKYLGYLLKEGQRWLTEARKETVMGQPTPKTPRQLREFLGKAGFCRLFIPGFAEMAAPLYPLTKPGTL | |
| | FNWGPDQQKAYQEIKQALLTAPALGLPDLTKPFELFVDEKQGYAKGVLTQKLGPWRRPVAYLSKKLDPV | |
| | AAGWPPCLRMVAAIAVLTKDAGKLTMGQPLVILAPHAVEALVKQPPDRWLSNARMTHYQALLLDTDRVQ | |
| | FGPVVALNPATLLPLPEEGLQHNCLDILAEAHGTRPDLTDQPLPDADHTWYTDGSSLLQEGQRKAGAAV | |
| | TTETEVIWAKALPAGTSAQRAELIALTQALKMAEGKKLNVYTDSRYAFATAHIHGEIYRRRGWLTSEGK | |
| | EIKNKDEILALLKALFLPKRLSIIHCPGHQKGHSAEARGNRMADQAARKAAITETPDTSTLLGSSGSSG | |
| | SSGSSGSSGSSMASNFTQFVLVDNGGTGDVTVAPSNFANGIAEWISSNSRSQAYKVTCSVRQSSAQNRK | |
| | YTIKVEVPKGAWRSYLNMELTIPIFATNSDCELIVKAMQGLLKDGNPIPSAIAANSGIYSGGSSGGSSG | |
| | SETPGTSESATPESSGGSSGGSSDKKYSIGLDIGTNSVGWAVITDEYKVPSKKFKVLGNTDRHSIKKNL | |
| | IGALLFDSGETAEATRLKRTARRRYTRRKNRICYLQEIFSNEMAKVDDSFFHRLEESFLVEEDKKHERH | |
| | PIFGNIVDEVAYHEKYPTIYHLRKKLVDSTDKADLRLIYLALAHMIKFRGHFLIEGDLNPDNSDVDKLF | |
| | IQLVQTYNQLFEENPINASGVDAKAILSARLSKSRRLENLIAQLPGEKKNGLFGNLIALSLGLTPNFKS | |
| | NFDLAEDAKLQLSKDTYDDDLDNLLAQIGDQYADLFLAAKNLSDAILLSDILRVNTEITKAPLSASMIK | |
| | RYDEHHQDLTLLKALVRQQLPEKYKEIFFDQSKNGYAGYIDGGASQEEFYKFIKPILEKMDGTEELLVK | |
| | LNREDLLRKQRTFDNGSIPHQIHLGELHAILRRQEDFYPFLKDNREKIEKILTFRIPYYVGPLARGNSR | |
| | FAWMTRKSEETITPWNFEEVVDKGASAQSFIERMTNFDKNLPNEKVLPKHSLLYEYFTVYNELTKVKYV | |
| | TEGMRKPAFLSGEQKKAIVDLLFKTNRKVTVKQLKEDYFKKIECFDSVEISGVEDRFNASLGTYHDLLK | |
| | IIKDKDFLDNEENEDILEDIVLTLTLFEDREMIEERLKTYAHLFDDKVMKQLKRRRYTGWGRLSRKLIN | |
| | GIRDKQSGKTILDFLKSDGFANRNFMQLIHDDSLTFKEDIQKAQVSGQGDSLHEHIANLAGSPAIKKGI | |
| | LQTVKVVDELVKVMGRHKPENIVIEMARENQTTQKGQKNSRERMKRIEEGIKELGSQILKEHPVENTQL | |
| | QNEKLYLYYLQNGRDMYVDQELDINRLSDYDVDHIVPQSFLKDDSIDNKVLTRSDKARGKSDNVPSEEV | |
| | VKKMKNYWRQLLNAKLITQRKFDNLTKAERGGLSELDKAGFIKRQLVETRQITKHVAQILDSRMNTKYD | |
| | ENDKLIREVKVITLKSKLVSDFRKDFQFYKVREINNYHHAHDAYLNAVVGTALIKKYPKLESEFVYGDY | |
| | KVYDVRKMIAKSEQEIGKATAKYFFYSNIMNFFKTEITLANGEIRKRPLIETNGETGEIVWDKGRDFAT | |
| | VRKVLSMPQVNIVKKTEVQTGGFSKESILPKRNSDKLIARKKDWDPKKYGGFDSPTVAYSVLVVAKVEK | |
| | GKSKKLKSVKELLGITIMERSSFEKNPIDFLEAKGYKEVKKDLIIKLPKYSLFELENGRKRMLASAGEL | |
| | QKGNELALPSKYVNFLYLASHYEKLKGSPEDNEQKQLFVEQHKHYLDEIIEQISEFSKRVILADANLDK | |
| | VLSAYNKHRDKPIREQAENIIHLFTLTNLGAPAAFKYFDTTIDRKRYTSTKEVLDATLIHQSITGLYET | |
| | RIDLSQLGGDKRTADGSEFESPKKKAKVE | |
| PL12063 | MPAAKRVKLDGGTLNIEDEHRLHETSKEPDVSLGSTWLSDFPQAWAETGGMGLAVRQAPLIIPLKATST | 16,126 |
| | PVSIKQYPMSQEARLGIKPHIQRLLDQGILVPCQSPWNTPLLPVKKPGTNDYRPVQDLREVNKRVEDIH | |
| | PTVPNPYNLLSGLPPSHQWYTVLDLKDAFFCLRLHPTSQPLFAFEWRDPEMGISGQLTWTRLPQGFKNS | |
| | PTLFNEALHRDLADFRIQHPDLILLQYVDDLLLAATSELDCQQGTRALLQTLGNLGYRASAKKAQICQK | |
| | QVKYLGYLLKEGQRWLTEARKETVMGQPTPKTPRQLREFLGKAGFCRLFIPGFAEMAAPLYPLTKPGTL | |
| | FNWGPDQQKAYQEIKQALLTAPALGLPDLTKPFELFVDEKQGYAKGVLTQKLGPWRRPVAYLSKKLDPV | |
| | AAGWPPCLRMVAAIAVLTKDAGKLTMGQPLVILAPHAVEALVKQPPDRWLSNARMTHYQALLLDTDRVQ | |
| | FGPVVALNPATLLPLPEEGLQHNCLDILAEAHGTRPDLTDQPLPDADHTWYTDGSSLLQEGQRKAGAAV | |
| | TTETEVIWAKALPAGTSAQRAELIALTQALKMAEGKKLNVYTDSRYAFATAHIHGEIYRRRGWLTSEGK | |
| | EIKNKDEILALLKALFLPKRLSIIHCPGHQKGHSAEARGNRMADQAARKAAITETPDTSTLLGSSGSSG | |
| | SSGSSGSSGSSMASNFTQFVLVDNGGTGDVTVAPSNFANGIAEWISSNSRSQAYKVTCSVRQSSAQNRK | |
| | YTIKVEVPKGAWRSYLNMELTIPIFATNSDCELIVKAMQGLLKDGNPIPSAIAANSGIYGSSGSSGSSG | |
| | SSGSSGSSDKKYSIGLDIGTNSVGWAVITDEYKVPSKKFKVLGNTDRHSIKKNLIGALLFDSGETAEAT | |
| | RLKRTARRRYTRRKNRICYLQEIFSNEMAKVDDSFFHRLEESFLVEEDKKHERHPIFGNIVDEVAYHEK | |
| | YPTIYHLRKKLVDSTDKADLRLIYLALAHMIKFRGHFLIEGDLNPDNSDVDKLFIQLVQTYNQLFEENP | |
| | INASGVDAKAILSARLSKSRRLENLIAQLPGEKKNGLFGNLIALSLGLTPNFKSNFDLAEDAKLQLSKD | |
| | TYDDDLDNLLAQIGDQYADLFLAAKNLSDAILLSDILRVNTEITKAPLSASMIKRYDEHHQDLTLLKAL | |
| | VRQQLPEKYKEIFFDQSKNGYAGYIDGGASQEEFYKFIKPILEKMDGTEELLVKLNREDLLRKQRTFDN | |
| | GSIPHQIHLGELHAILRRQEDFYPFLKDNREKIEKILTFRIPYYVGPLARGNSRFAWMTRKSEETITPW | |
| | NFEEVVDKGASAQSFIERMTNFDKNLPNEKVLPKHSLLYEYFTVYNELTKVKYVTEGMRKPAFLSGEQK | |
| | KAIVDLLFKTNRKVTVKQLKEDYFKKIECFDSVEISGVEDRFNASLGTYHDLLKIIKDKDFLDNEENED | |
| | ILEDIVLTLTLFEDREMIEERLKTYAHLFDDKVMKQLKRRRYTGWGRLSRKLINGIRDKQSGKTILDFL | |
| | KSDGFANRNFMQLIHDDSLTFKEDIQKAQVSGQGDSLHEHIANLAGSPAIKKGILQTVKVVDELVKVMG | |
| | RHKPENIVIEMARENQTTQKGQKNSRERMKRIEEGIKELGSQILKEHPVENTQLQNEKLYLYYLQNGRD | |
| | MYVDQELDINRLSDYDVDHIVPQSFLKDDSIDNKVLTRSDKARGKSDNVPSEEVVKKMKNYWRQLLNAK | |
| | LITQRKFDNLTKAERGGLSELDKAGFIKRQLVETRQITKHVAQILDSRMNTKYDENDKLIREVKVITLK | |
| | SKLVSDFRKDFQFYKVREINNYHHAHDAYLNAVVGTALIKKYPKLESEFVYGDYKVYDVRKMIAKSEQE | |
| | IGKATAKYFFYSNIMNFFKTEITLANGEIRKRPLIETNGETGEIVWDKGRDFATVRKVLSMPQVNIVKK | |
| | TEVQTGGFSKESILPKRNSDKLIARKKDWDPKKYGGFDSPTVAYSVLVVAKVEKGKSKKLKSVKELLGI | |
| | TIMERSSFEKNPIDFLEAKGYKEVKKDLIIKLPKYSLFELENGRKRMLASAGELQKGNELALPSKYVNF | |
| | LYLASHYEKLKGSPEDNEQKQLFVEQHKHYLDEIIEQISEFSKRVILADANLDKVLSAYNKHRDKPIRE | |
| | QAENIIHLFTLTNLGAPAAFKYFDTTIDRKRYTSTKEVLDATLIHQSITGLYETRIDLSQLGGDKRTAD | |
| | GSEFESPKKKAKVE | |
| PL12064 | MPAAKRVKLDGGTLNIEDEHRLHETSKEPDVSLGSTWLSDFPQAWAETGGMGLAVRQAPLIIPLKATST | 16,127 |
| | PVSIKQYPMSQEARLGIKPHIQRLLDQGILVPCQSPWNTPLLPVKKPGTNDYRPVQDLREVNKRVEDIH | |
| | PTVPNPYNLLSGLPPSHQWYTVLDLKDAFFCLRLHPTSQPLFAFEWRDPEMGISGQLTWTRLPQGFKNS | |
| | PTLFNEALHRDLADFRIQHPDLILLQYVDDLLLAATSELDCQQGTRALLQTLGNLGYRASAKKAQICQK | |
| | QVKYLGYLLKEGQRWLTEARKETVMGQPTPKTPRQLREFLGKAGFCRLFIPGFAEMAAPLYPLTKPGTL | |
| | FNWGPDQQKAYQEIKQALLTAPALGLPDLTKPFELFVDEKQGYAKGVLTQKLGPWRRPVAYLSKKLDPV | |
| | AAGWPPCLRMVAAIAVLTKDAGKLTMGQPLVILAPHAVEALVKQPPDRWLSNARMTHYQALLLDTDRVQ | |
| | FGPVVALNPATLLPLPEEGLQHNCLDILAEAHGTRPDLTDQPLPDADHTWYTDGSSLLQEGQRKAGAAV | |
| | TTETEVIWAKALPAGTSAQRAELIALTQALKMAEGKKLNVYTDSRYAFATAHIHGEIYRRRGWLTSEGK | |
| | EIKNKDEILALLKALFLPKRLSIIHCPGHQKGHSAEARGNRMADQAARKAAITETPDTSTLLGSSGSSG | |
| | SSGSSGSSGSSMASNFTQFVLVDNGGTGDVTVAPSNFANGIAEWISSNSRSQAYKVTCSVRQSSAQNRK | |
| | YTIKVEVPKGAWRSYLNMELTIPIFATNSDCELIVKAMQGLLKDGNPIPSAIAANSGIYGSSGGGEAAA | |
| | KDKKYSIGLDIGTNSVGWAVITDEYKVPSKKFKVLGNTDRHSIKKNLIGALLFDSGETAEATRLKRTAR | |
| | RRYTRRKNRICYLQEIFSNEMAKVDDSFFHRLEESFLVEEDKKHERHPIFGNIVDEVAYHEKYPTIYHL | |
| | RKKLVDSTDKADLRLIYLALAHMIKFRGHFLIEGDLNPDNSDVDKLFIQLVQTYNQLFEENPINASGVD | |
| | AKAILSARLSKSRRLENLIAQLPGEKKNGLFGNLIALSLGLTPNFKSNFDLAEDAKLQLSKDTYDDDLD | |
| | NLLAQIGDQYADLFLAAKNLSDAILLSDILRVNTEITKAPLSASMIKRYDEHHQDLTLLKALVRQQLPE | |
| | KYKEIFFDQSKNGYAGYIDGGASQEEFYKFIKPILEKMDGTEELLVKLNREDLLRKQRTFDNGSIPHQI | |
| | HLGELHAILRRQEDFYPFLKDNREKIEKILTFRIPYYVGPLARGNSRFAWMTRKSEETITPWNFEEVVD | |
| | KGASAQSFIERMTNFDKNLPNEKVLPKHSLLYEYFTVYNELTKVKYVTEGMRKPAFLSGEQKKAIVDLL | |
| | FKTNRKVTVKQLKEDYFKKIECFDSVEISGVEDRFNASLGTYHDLLKIIKDKDFLDNEENEDILEDIVL | |
| | TLTLFEDREMIEERLKTYAHLFDDKVMKQLKRRRYTGWGRLSRKLINGIRDKQSGKTILDFLKSDGFAN | |
| | RNFMQLIHDDSLTFKEDIQKAQVSGQGDSLHEHIANLAGSPAIKKGILQTVKVVDELVKVMGRHKPENI | |
| | VIEMARENQTTQKGQKNSRERMKRIEEGIKELGSQILKEHPVENTQLQNEKLYLYYLQNGRDMYVDQEL | |
| | DINRLSDYDVDHIVPQSFLKDDSIDNKVLTRSDKARGKSDNVPSEEVVKKMKNYWRQLLNAKLITQRKF | |
| | DNLTKAERGGLSELDKAGFIKRQLVETRQITKHVAQILDSRMNTKYDENDKLIREVKVITLKSKLVSDF | |
| | RKDFQFYKVREINNYHHAHDAYLNAVVGTALIKKYPKLESEFVYGDYKVYDVRKMIAKSEQEIGKATAK | |
| | YFFYSNIMNFFKTEITLANGEIRKRPLIETNGETGEIVWDKGRDFATVRKVLSMPQVNIVKKTEVQTGG | |
| | FSKESILPKRNSDKLIARKKDWDPKKYGGFDSPTVAYSVLVVAKVEKGKSKKLKSVKELLGITIMERSS | |
| | FEKNPIDFLEAKGYKEVKKDLIIKLPKYSLFELENGRKRMLASAGELQKGNELALPSKYVNFLYLASHY | |
| | EKLKGSPEDNEQKQLFVEQHKHYLDEIIEQISEFSKRVILADANLDKVLSAYNKHRDKPIREQAENIIH | |
| | LFTLTNLGAPAAFKYFDTTIDRKRYTSTKEVLDATLIHQSITGLYETRIDLSQLGGDKRTADGSEFESP | |
| | KKKAKVE | |
| PL12065 | MPAAKRVKLDGGTLNIEDEHRLHETSKEPDVSLGSTWLSDFPQAWAETGGMGLAVRQAPLIIPLKATST | 16,128 |
| | PVSIKQYPMSQEARLGIKPHIQRLLDQGILVPCQSPWNTPLLPVKKPGTNDYRPVQDLREVNKRVEDIH | |
| | PTVPNPYNLLSGLPPSHQWYTVLDLKDAFFCLRLHPTSQPLFAFEWRDPEMGISGQLTWTRLPQGFKNS | |
| | PTLFNEALHRDLADFRIQHPDLILLQYVDDLLLAATSELDCQQGTRALLQTLGNLGYRASAKKAQICQK | |
| | QVKYLGYLLKEGQRWLTEARKETVMGQPTPKTPRQLREFLGKAGFCRLFIPGFAEMAAPLYPLTKPGTL | |
| | FNWGPDQQKAYQEIKQALLTAPALGLPDLTKPFELFVDEKQGYAKGVLTQKLGPWRRPVAYLSKKLDPV | |
| | AAGWPPCLRMVAAIAVLTKDAGKLTMGQPLVILAPHAVEALVKQPPDRWLSNARMTHYQALLLDTDRVQ | |
| | FGPVVALNPATLLPLPEEGLQHNCLDILAEAHGTRPDLTDQPLPDADHTWYTDGSSLLQEGQRKAGAAV | |
| | TTETEVIWAKALPAGTSAQRAELIALTQALKMAEGKKLNVYTDSRYAFATAHIHGEIYRRRGWLTSEGK | |
| | EIKNKDEILALLKALFLPKRLSIIHCPGHQKGHSAEARGNRMADQAARKAAITETPDTSTLLGSSGSSG | |
| | SSGSSGSSGSSMASNFTQFVLVDNGGTGDVTVAPSNFANGIAEWISSNSRSQAYKVTCSVRQSSAQNRK | |
| | YTIKVEVPKGAWRSYLNMELTIPIFATNSDCELIVKAMQGLLKDGNPIPSAIAANSGIYGGSGGSMASN | |
| | FTQFVLVDNGGTGDVTVAPSNFANGIAEWISSNSRSQAYKVTCSVRQSSAQNRKYTIKVEVPKGAWRSY | |
| | LNMELTIPIFATNSDCELIVKAMQGLLKDGNPIPSAIAANSGIYAEAAAKEAAAKEAAAKEAAAKALEA | |
| | EAAAKEAAAKEAAAKEAAAKADKKYSIGLDIGTNSVGWAVITDEYKVPSKKFKVLGNTDRHSIKKNLIG | |
| | ALLFDSGETAEATRLKRTARRRYTRRKNRICYLQEIFSNEMAKVDDSFFHRLEESFLVEEDKKHERHPI | |
| | FGNIVDEVAYHEKYPTIYHLRKKLVDSTDKADLRLIYLALAHMIKFRGHFLIEGDLNPDNSDVDKLFIQ | |
| | LVQTYNQLFEENPINASGVDAKAILSARLSKSRRLENLIAQLPGEKKNGLFGNLIALSLGLTPNFKSNF | |
| | DLAEDAKLQLSKDTYDDDLDNLLAQIGDQYADLFLAAKNLSDAILLSDILRVNTEITKAPLSASMIKRY | |
| | DEHHQDLTLLKALVRQQLPEKYKEIFFDQSKNGYAGYIDGGASQEEFYKFIKPILEKMDGTEELLVKLN | |
| | REDLLRKQRTFDNGSIPHQIHLGELHAILRRQEDFYPFLKDNREKIEKILTFRIPYYVGPLARGNSRFA | |
| | WMTRKSEETITPWNFEEVVDKGASAQSFIERMTNFDKNLPNEKVLPKHSLLYEYFTVYNELTKVKYVTE | |
| | GMRKPAFLSGEQKKAIVDLLFKTNRKVTVKQLKEDYFKKIECFDSVEISGVEDRFNASLGTYHDLLKII | |
| | KDKDFLDNEENEDILEDIVLTLTLFEDREMIEERLKTYAHLFDDKVMKQLKRRRYTGWGRLSRKLINGI | |
| | RDKQSGKTILDFLKSDGFANRNFMQLIHDDSLTFKEDIQKAQVSGQGDSLHEHIANLAGSPAIKKGILQ | |
| | TVKVVDELVKVMGRHKPENIVIEMARENQTTQKGQKNSRERMKRIEEGIKELGSQILKEHPVENTQLQN | |
| | EKLYLYYLQNGRDMYVDQELDINRLSDYDVDHIVPQSFLKDDSIDNKVLTRSDKARGKSDNVPSEEVVK | |
| | KMKNYWRQLLNAKLITQRKFDNLTKAERGGLSELDKAGFIKRQLVETRQITKHVAQILDSRMNTKYDEN | |
| | DKLIREVKVITLKSKLVSDFRKDFQFYKVREINNYHHAHDAYLNAVVGTALIKKYPKLESEFVYGDYKV | |
| | YDVRKMIAKSEQEIGKATAKYFFYSNIMNFFKTEITLANGEIRKRPLIETNGETGEIVWDKGRDFATVR | |
| | KVLSMPQVNIVKKTEVQTGGFSKESILPKRNSDKLIARKKDWDPKKYGGFDSPTVAYSVLVVAKVEKGK | |
| | SKKLKSVKELLGITIMERSSFEKNPIDFLEAKGYKEVKKDLIIKLPKYSLFELENGRKRMLASAGELQK | |
| | GNELALPSKYVNFLYLASHYEKLKGSPEDNEQKQLFVEQHKHYLDEIIEQISEFSKRVILADANLDKVL | |
| | SAYNKHRDKPIREQAENIIHLFTLTNLGAPAAFKYFDTTIDRKRYTSTKEVLDATLIHQSITGLYETRI | |
| | DLSQLGGDKRTADGSEFESPKKKAKVE | |
| PL12067 | MPAAKRVKLDGGTLNIEDEHRLHETSKEPDVSLGSTWLSDFPQAWAETGGMGLAVRQAPLIIPLKATST | 16,130 |
| | PVSIKQYPMSQEARLGIKPHIQRLLDQGILVPCQSPWNTPLLPVKKPGTNDYRPVQDLREVNKRVEDIH | |
| | PTVPNPYNLLSGLPPSHQWYTVLDLKDAFFCLRLHPTSQPLFAFEWRDPEMGISGQLTWTRLPQGFKNS | |
| | PTLFNEALHRDLADFRIQHPDLILLQYVDDLLLAATSELDCQQGTRALLQTLGNLGYRASAKKAQICQK | |
| | QVKYLGYLLKEGQRWLTEARKETVMGQPTPKTPRQLREFLGKAGFCRLFIPGFAEMAAPLYPLTKPGTL | |
| | FNWGPDQQKAYQEIKQALLTAPALGLPDLTKPFELFVDEKQGYAKGVLTQKLGPWRRPVAYLSKKLDPV | |
| | AAGWPPCLRMVAAIAVLTKDAGKLTMGQPLVILAPHAVEALVKQPPDRWLSNARMTHYQALLLDTDRVQ | |
| | FGPVVALNPATLLPLPEEGLQHNCLDILAEAHGTRPDLTDQPLPDADHTWYTDGSSLLQEGQRKAGAAV | |
| | TTETEVIWAKALPAGTSAQRAELIALTQALKMAEGKKLNVYTDSRYAFATAHIHGEIYRRRGWLTSEGK | |
| | EIKNKDEILALLKALFLPKRLSIIHCPGHQKGHSAEARGNRMADQAARKAAITETPDTSTLLGSSGSSG | |
| | SSGSSGSSGSSMASNFTQFVLVDNGGTGDVTVAPSNFANGIAEWISSNSRSQAYKVTCSVRQSSAQNRK | |
| | YTIKVEVPKGAWRSYLNMELTIPIFATNSDCELIVKAMQGLLKDGNPIPSAIAANSGIYGGSGGSMASN | |
| | FTQFVLVDNGGTGDVTVAPSNFANGIAEWISSNSRSQAYKVTCSVRQSSAQNRKYTIKVEVPKGAWRSY | |
| | LNMELTIPIFATNSDCELIVKAMQGLLKDGNPIPSAIAANSGIYGSSGSSGSSGSSGSSGSSDKKYSIG | |
| | LDIGTNSVGWAVITDEYKVPSKKFKVLGNTDRHSIKKNLIGALLFDSGETAEATRLKRTARRRYTRRKN | |
| | RICYLQEIFSNEMAKVDDSFFHRLEESFLVEEDKKHERHPIFGNIVDEVAYHEKYPTIYHLRKKLVDST | |
| | DKADLRLIYLALAHMIKFRGHFLIEGDLNPDNSDVDKLFIQLVQTYNQLFEENPINASGVDAKAILSAR | |
| | LSKSRRLENLIAQLPGEKKNGLFGNLIALSLGLTPNFKSNFDLAEDAKLQLSKDTYDDDLDNLLAQIGD | |
| | QYADLFLAAKNLSDAILLSDILRVNTEITKAPLSASMIKRYDEHHQDLTLLKALVRQQLPEKYKEIFFD | |
| | QSKNGYAGYIDGGASQEEFYKFIKPILEKMDGTEELLVKLNREDLLRKQRTFDNGSIPHQIHLGELHAI | |
| | LRRQEDFYPFLKDNREKIEKILTFRIPYYVGPLARGNSRFAWMTRKSEETITPWNFEEVVDKGASAQSF | |
| | IERMTNFDKNLPNEKVLPKHSLLYEYFTVYNELTKVKYVTEGMRKPAFLSGEQKKAIVDLLFKTNRKVT | |
| | VKQLKEDYFKKIECFDSVEISGVEDRFNASLGTYHDLLKIIKDKDFLDNEENEDILEDIVLTLTLFEDR | |
| | EMIEERLKTYAHLFDDKVMKQLKRRRYTGWGRLSRKLINGIRDKQSGKTILDFLKSDGFANRNFMQLIH | |
| | DDSLTFKEDIQKAQVSGQGDSLHEHIANLAGSPAIKKGILQTVKVVDELVKVMGRHKPENIVIEMAREN | |
| | QTTQKGQKNSRERMKRIEEGIKELGSQILKEHPVENTQLQNEKLYLYYLQNGRDMYVDQELDINRLSDY | |
| | DVDHIVPQSFLKDDSIDNKVLTRSDKARGKSDNVPSEEVVKKMKNYWRQLLNAKLITQRKFDNLTKAER | |
| | GGLSELDKAGFIKRQLVETRQITKHVAQILDSRMNTKYDENDKLIREVKVITLKSKLVSDFRKDFQFYK | |
| | VREINNYHHAHDAYLNAVVGTALIKKYPKLESEFVYGDYKVYDVRKMIAKSEQEIGKATAKYFFYSNIM | |
| | NFFKTEITLANGEIRKRPLIETNGETGEIVWDKGRDFATVRKVLSMPQVNIVKKTEVQTGGFSKESILP | |
| | KRNSDKLIARKKDWDPKKYGGFDSPTVAYSVLVVAKVEKGKSKKLKSVKELLGITIMERSSFEKNPIDF | |
| | LEAKGYKEVKKDLIIKLPKYSLFELENGRKRMLASAGELQKGNELALPSKYVNFLYLASHYEKLKGSPE | |
| | DNEQKQLFVEQHKHYLDEIIEQISEFSKRVILADANLDKVLSAYNKHRDKPIREQAENIIHLFTLTNLG | |
| | APAAFKYFDTTIDRKRYTSTKEVLDATLIHQSITGLYETRIDLSQLGGDKRTADGSEFESPKKKAKVE | |
| PL12068 | MPAAKRVKLDGGTLNIEDEHRLHETSKEPDVSLGSTWLSDFPQAWAETGGMGLAVRQAPLIIPLKATST | 16,131 |
| | PVSIKQYPMSQEARLGIKPHIQRLLDQGILVPCQSPWNTPLLPVKKPGTNDYRPVQDLREVNKRVEDIH | |
| | PTVPNPYNLLSGLPPSHQWYTVLDLKDAFFCLRLHPTSQPLFAFEWRDPEMGISGQLTWTRLPQGFKNS | |
| | PTLFNEALHRDLADFRIQHPDLILLQYVDDLLLAATSELDCQQGTRALLQTLGNLGYRASAKKAQICQK | |
| | QVKYLGYLLKEGQRWLTEARKETVMGQPTPKTPRQLREFLGKAGFCRLFIPGFAEMAAPLYPLTKPGTL | |
| | FNWGPDQQKAYQEIKQALLTAPALGLPDLTKPFELFVDEKQGYAKGVLTQKLGPWRRPVAYLSKKLDPV | |
| | AAGWPPCLRMVAAIAVLTKDAGKLTMGQPLVILAPHAVEALVKQPPDRWLSNARMTHYQALLLDTDRVQ | |
| | FGPVVALNPATLLPLPEEGLQHNCLDILAEAHGTRPDLTDQPLPDADHTWYTDGSSLLQEGQRKAGAAV | |
| | TTETEVIWAKALPAGTSAQRAELIALTQALKMAEGKKLNVYTDSRYAFATAHIHGEIYRRRGWLTSEGK | |
| | EIKNKDEILALLKALFLPKRLSIIHCPGHQKGHSAEARGNRMADQAARKAAITETPDTSTLLGSSGSSG | |
| | SSGSSGSSGSSMASNFTQFVLVDNGGTGDVTVAPSNFANGIAEWISSNSRSQAYKVTCSVRQSSAQNRK | |
| | YTIKVEVPKGAWRSYLNMELTIPIFATNSDCELIVKAMQGLLKDGNPIPSAIAANSGIYGGSGGSMASN | |
| | FTQFVLVDNGGTGDVTVAPSNFANGIAEWISSNSRSQAYKVTCSVRQSSAQNRKYTIKVEVPKGAWRSY | |
| | LNMELTIPIFATNSDCELIVKAMQGLLKDGNPIPSAIAANSGIYGSSGGGEAAAKDKKYSIGLDIGTNS | |
| | VGWAVITDEYKVPSKKFKVLGNTDRHSIKKNLIGALLFDSGETAEATRLKRTARRRYTRRKNRICYLQE | |
| | IFSNEMAKVDDSFFHRLEESFLVEEDKKHERHPIFGNIVDEVAYHEKYPTIYHLRKKLVDSTDKADLRL | |
| | IYLALAHMIKFRGHFLIEGDLNPDNSDVDKLFIQLVQTYNQLFEENPINASGVDAKAILSARLSKSRRL | |
| | ENLIAQLPGEKKNGLFGNLIALSLGLTPNFKSNFDLAEDAKLQLSKDTYDDDLDNLLAQIGDQYADLFL | |
| | AAKNLSDAILLSDILRVNTEITKAPLSASMIKRYDEHHQDLTLLKALVRQQLPEKYKEIFFDQSKNGYA | |
| | GYIDGGASQEEFYKFIKPILEKMDGTEELLVKLNREDLLRKQRTFDNGSIPHQIHLGELHAILRRQEDF | |
| | YPFLKDNREKIEKILTFRIPYYVGPLARGNSRFAWMTRKSEETITPWNFEEVVDKGASAQSFIERMTNF | |
| | DKNLPNEKVLPKHSLLYEYFTVYNELTKVKYVTEGMRKPAFLSGEQKKAIVDLLFKTNRKVTVKQLKED | |
| | YFKKIECFDSVEISGVEDRFNASLGTYHDLLKIIKDKDFLDNEENEDILEDIVLTLTLFEDREMIEERL | |
| | KTYAHLFDDKVMKQLKRRRYTGWGRLSRKLINGIRDKQSGKTILDFLKSDGFANRNFMQLIHDDSLTFK | |
| | EDIQKAQVSGQGDSLHEHIANLAGSPAIKKGILQTVKVVDELVKVMGRHKPENIVIEMARENQTTQKGQ | |
| | KNSRERMKRIEEGIKELGSQILKEHPVENTQLQNEKLYLYYLQNGRDMYVDQELDINRLSDYDVDHIVP | |
| | QSFLKDDSIDNKVLTRSDKARGKSDNVPSEEVVKKMKNYWRQLLNAKLITQRKFDNLTKAERGGLSELD | |
| | KAGFIKRQLVETRQITKHVAQILDSRMNTKYDENDKLIREVKVITLKSKLVSDFRKDFQFYKVREINNY | |
| | HHAHDAYLNAVVGTALIKKYPKLESEFVYGDYKVYDVRKMIAKSEQEIGKATAKYFFYSNIMNFFKTEI | |
| | TLANGEIRKRPLIETNGETGEIVWDKGRDFATVRKVLSMPQVNIVKKTEVQTGGFSKESILPKRNSDKL | |
| | IARKKDWDPKKYGGFDSPTVAYSVLVVAKVEKGKSKKLKSVKELLGITIMERSSFEKNPIDFLEAKGYK | |
| | EVKKDLIIKLPKYSLFELENGRKRMLASAGELQKGNELALPSKYVNFLYLASHYEKLKGSPEDNEQKQL | |
| | FVEQHKHYLDEIIEQISEFSKRVILADANLDKVLSAYNKHRDKPIREQAENIIHLFTLTNLGAPAAFKY | |
| | FDTTIDRKRYTSTKEVLDATLIHQSITGLYETRIDLSQLGGDKRTADGSEFESPKKKAKVE | |
| PL12069 | MPAAKRVKLDGGTLNIEDEHRLHETSKEPDVSLGSTWLSDFPQAWAETGGMGLAVRQAPLIIPLKATST | 16,132 |
| | PVSIKQYPMSQEARLGIKPHIQRLLDQGILVPCQSPWNTPLLPVKKPGTNDYRPVQDLREVNKRVEDIH | |
| | PTVPNPYNLLSGLPPSHQWYTVLDLKDAFFCLRLHPTSQPLFAFEWRDPEMGISGQLTWTRLPQGFKNS | |
| | PTLFNEALHRDLADFRIQHPDLILLQYVDDLLLAATSELDCQQGTRALLQTLGNLGYRASAKKAQICQK | |
| | QVKYLGYLLKEGQRWLTEARKETVMGQPTPKTPRQLREFLGKAGFCRLFIPGFAEMAAPLYPLTKPGTL | |
| | FNWGPDQQKAYQEIKQALLTAPALGLPDLTKPFELFVDEKQGYAKGVLTQKLGPWRRPVAYLSKKLDPV | |
| | AAGWPPCLRMVAAIAVLTKDAGKLTMGQPLVILAPHAVEALVKQPPDRWLSNARMTHYQALLLDTDRVQ | |
| | FGPVVALNPATLLPLPEEGLQHNCLDILAEAHGTRPDLTDQPLPDADHTWYTDGSSLLQEGQRKAGAAV | |
| | TTETEVIWAKALPAGTSAQRAELIALTQALKMAEGKKLNVYTDSRYAFATAHIHGEIYRRRGWLTSEGK | |
| | EIKNKDEILALLKALFLPKRLSIIHCPGHQKGHSAEARGNRMADQAARKAAITETPDTSTLLGSSGSSG | |
| | SSGSSGSSGSSMASNFTQFVLVDNGGTGDVTVAPSNFANGIAEWISSNSRSQAYKVTCSVRQSSAQNRK | |
| | YTIKVEVPKGAWRSYLNMELTIPIFATNSDCELIVKAMQGLLKDGNPIPSAIAANSGIYGGSGGSMASN | |
| | FTQFVLVDNGGTGDVTVAPSNFANGIAEWISSNSRSQAYKVTCSVRQSSAQNRKYTIKVEVPKGAWRSY | |
| | LNMELTIPIFATNSDCELIVKAMQGLLKDGNPIPSAIAANSGIYGGGSGGGSGGGSGGGSMASNFTQFV | |
| | LVDNGGTGDVTVAPSNFANGIAEWISSNSRSQAYKVTCSVRQSSAQNRKYTIKVEVPKGAWRSYLNMEL | |
| | TIPIFATNSDCELIVKAMQGLLKDGNPIPSAIAANSGIYGGSGGSMASNFTQFVLVDNGGTGDVTVAPS | |
| | NFANGIAEWISSNSRSQAYKVTCSVRQSSAQNRKYTIKVEVPKGAWRSYLNMELTIPIFATNSDCELIV | |
| | KAMQGLLKDGNPIPSAIAANSGIYAEAAAKEAAAKEAAAKEAAAKALEAEAAAKEAAAKEAAAKEAAAK | |
| | ADKKYSIGLDIGTNSVGWAVITDEYKVPSKKFKVLGNTDRHSIKKNLIGALLFDSGETAEATRLKRTAR | |
| | RRYTRRKNRICYLQEIFSNEMAKVDDSFFHRLEESFLVEEDKKHERHPIFGNIVDEVAYHEKYPTIYHL | |
| | RKKLVDSTDKADLRLIYLALAHMIKFRGHFLIEGDLNPDNSDVDKLFIQLVQTYNQLFEENPINASGVD | |
| | AKAILSARLSKSRRLENLIAQLPGEKKNGLFGNLIALSLGLTPNFKSNFDLAEDAKLQLSKDTYDDDLD | |
| | NLLAQIGDQYADLFLAAKNLSDAILLSDILRVNTEITKAPLSASMIKRYDEHHQDLTLLKALVRQQLPE | |
| | KYKEIFFDQSKNGYAGYIDGGASQEEFYKFIKPILEKMDGTEELLVKLNREDLLRKQRTFDNGSIPHQI | |
| | HLGELHAILRRQEDFYPFLKDNREKIEKILTFRIPYYVGPLARGNSRFAWMTRKSEETITPWNFEEVVD | |
| | KGASAQSFIERMTNFDKNLPNEKVLPKHSLLYEYFTVYNELTKVKYVTEGMRKPAFLSGEQKKAIVDLL | |
| | FKTNRKVTVKQLKEDYFKKIECFDSVEISGVEDRFNASLGTYHDLLKIIKDKDFLDNEENEDILEDIVL | |
| | TLTLFEDREMIEERLKTYAHLFDDKVMKQLKRRRYTGWGRLSRKLINGIRDKQSGKTILDFLKSDGFAN | |
| | RNFMQLIHDDSLTFKEDIQKAQVSGQGDSLHEHIANLAGSPAIKKGILQTVKVVDELVKVMGRHKPENI | |
| | VIEMARENQTTQKGQKNSRERMKRIEEGIKELGSQILKEHPVENTQLQNEKLYLYYLQNGRDMYVDQEL | |
| | DINRLSDYDVDHIVPQSFLKDDSIDNKVLTRSDKARGKSDNVPSEEVVKKMKNYWRQLLNAKLITQRKF | |
| | DNLTKAERGGLSELDKAGFIKRQLVETRQITKHVAQILDSRMNTKYDENDKLIREVKVITLKSKLVSDF | |
| | RKDFQFYKVREINNYHHAHDAYLNAVVGTALIKKYPKLESEFVYGDYKVYDVRKMIAKSEQEIGKATAK | |
| | YFFYSNIMNFFKTEITLANGEIRKRPLIETNGETGEIVWDKGRDFATVRKVLSMPQVNIVKKTEVQTGG | |
| | FSKESILPKRNSDKLIARKKDWDPKKYGGFDSPTVAYSVLVVAKVEKGKSKKLKSVKELLGITIMERSS | |
| | FEKNPIDFLEAKGYKEVKKDLIIKLPKYSLFELENGRKRMLASAGELQKGNELALPSKYVNFLYLASHY | |
| | EKLKGSPEDNEQKQLFVEQHKHYLDEIIEQISEFSKRVILADANLDKVLSAYNKHRDKPIREQAENIIH | |
| | LFTLTNLGAPAAFKYFDTTIDRKRYTSTKEVLDATLIHQSITGLYETRIDLSQLGGDKRTADGSEFESP | |
| | KKKAKVE | |
| PL12070 | MPAAKRVKLDGGTLNIEDEHRLHETSKEPDVSLGSTWLSDFPQAWAETGGMGLAVRQAPLIIPLKATST | 16,133 |
| | PVSIKQYPMSQEARLGIKPHIQRLLDQGILVPCQSPWNTPLLPVKKPGTNDYRPVQDLREVNKRVEDIH | |
| | PTVPNPYNLLSGLPPSHQWYTVLDLKDAFFCLRLHPTSQPLFAFEWRDPEMGISGQLTWTRLPQGFKNS | |
| | PTLFNEALHRDLADFRIQHPDLILLQYVDDLLLAATSELDCQQGTRALLQTLGNLGYRASAKKAQICQK | |
| | QVKYLGYLLKEGQRWLTEARKETVMGQPTPKTPRQLREFLGKAGFCRLFIPGFAEMAAPLYPLTKPGTL | |
| | FNWGPDQQKAYQEIKQALLTAPALGLPDLTKPFELFVDEKQGYAKGVLTQKLGPWRRPVAYLSKKLDPV | |
| | AAGWPPCLRMVAAIAVLTKDAGKLTMGQPLVILAPHAVEALVKQPPDRWLSNARMTHYQALLLDTDRVQ | |
| | FGPVVALNPATLLPLPEEGLQHNCLDILAEAHGTRPDLTDQPLPDADHTWYTDGSSLLQEGQRKAGAAV | |
| | TTETEVIWAKALPAGTSAQRAELIALTQALKMAEGKKLNVYTDSRYAFATAHIHGEIYRRRGWLTSEGK | |
| | EIKNKDEILALLKALFLPKRLSIIHCPGHQKGHSAEARGNRMADQAARKAAITETPDTSTLLGSSGSSG | |
| | SSGSSGSSGSSMASNFTQFVLVDNGGTGDVTVAPSNFANGIAEWISSNSRSQAYKVTCSVRQSSAQNRK | |
| | YTIKVEVPKGAWRSYLNMELTIPIFATNSDCELIVKAMQGLLKDGNPIPSAIAANSGIYGGSGGSMASN | |
| | FTQFVLVDNGGTGDVTVAPSNFANGIAEWISSNSRSQAYKVTCSVRQSSAQNRKYTIKVEVPKGAWRSY | |
| | LNMELTIPIFATNSDCELIVKAMQGLLKDGNPIPSAIAANSGIYGGGSGGGSGGGSGGGSMASNFTQFV | |
| | LVDNGGTGDVTVAPSNFANGIAEWISSNSRSQAYKVTCSVRQSSAQNRKYTIKVEVPKGAWRSYLNMEL | |
| | TIPIFATNSDCELIVKAMQGLLKDGNPIPSAIAANSGIYGGSGGSMASNFTQFVLVDNGGTGDVTVAPS | |
| | NFANGIAEWISSNSRSQAYKVTCSVRQSSAQNRKYTIKVEVPKGAWRSYLNMELTIPIFATNSDCELIV | |
| | KAMQGLLKDGNPIPSAIAANSGIYSGGSSGGSSGSETPGTSESATPESSGGSSGGSSDKKYSIGLDIGT | |
| | NSVGWAVITDEYKVPSKKFKVLGNTDRHSIKKNLIGALLFDSGETAEATRLKRTARRRYTRRKNRICYL | |
| | QEIFSNEMAKVDDSFFHRLEESFLVEEDKKHERHPIFGNIVDEVAYHEKYPTIYHLRKKLVDSTDKADL | |
| | RLIYLALAHMIKFRGHFLIEGDLNPDNSDVDKLFIQLVQTYNQLFEENPINASGVDAKAILSARLSKSR | |
| | RLENLIAQLPGEKKNGLFGNLIALSLGLTPNFKSNFDLAEDAKLQLSKDTYDDDLDNLLAQIGDQYADL | |
| | FLAAKNLSDAILLSDILRVNTEITKAPLSASMIKRYDEHHQDLTLLKALVRQQLPEKYKEIFFDQSKNG | |
| | YAGYIDGGASQEEFYKFIKPILEKMDGTEELLVKLNREDLLRKQRTFDNGSIPHQIHLGELHAILRRQE | |
| | DFYPFLKDNREKIEKILTFRIPYYVGPLARGNSRFAWMTRKSEETITPWNFEEVVDKGASAQSFIERMT | |
| | NFDKNLPNEKVLPKHSLLYEYFTVYNELTKVKYVTEGMRKPAFLSGEQKKAIVDLLFKTNRKVTVKQLK | |
| | EDYFKKIECFDSVEISGVEDRFNASLGTYHDLLKIIKDKDFLDNEENEDILEDIVLTLTLFEDREMIEE | |
| | RLKTYAHLFDDKVMKQLKRRRYTGWGRLSRKLINGIRDKQSGKTILDFLKSDGFANRNFMQLIHDDSLT | |
| | FKEDIQKAQVSGQGDSLHEHIANLAGSPAIKKGILQTVKVVDELVKVMGRHKPENIVIEMARENQTTQK | |
| | GQKNSRERMKRIEEGIKELGSQILKEHPVENTQLQNEKLYLYYLQNGRDMYVDQELDINRLSDYDVDHI | |
| | VPQSFLKDDSIDNKVLTRSDKARGKSDNVPSEEVVKKMKNYWRQLLNAKLITQRKFDNLTKAERGGLSE | |
| | LDKAGFIKRQLVETRQITKHVAQILDSRMNTKYDENDKLIREVKVITLKSKLVSDFRKDFQFYKVREIN | |
| | NYHHAHDAYLNAVVGTALIKKYPKLESEFVYGDYKVYDVRKMIAKSEQEIGKATAKYFFYSNIMNFFKT | |
| | EITLANGEIRKRPLIETNGETGEIVWDKGRDFATVRKVLSMPQVNIVKKTEVQTGGFSKESILPKRNSD | |
| | KLIARKKDWDPKKYGGFDSPTVAYSVLVVAKVEKGKSKKLKSVKELLGITIMERSSFEKNPIDFLEAKG | |
| | YKEVKKDLIIKLPKYSLFELENGRKRMLASAGELQKGNELALPSKYVNFLYLASHYEKLKGSPEDNEQK | |
| | QLFVEQHKHYLDEIIEQISEFSKRVILADANLDKVLSAYNKHRDKPIREQAENIIHLFTLTNLGAPAAF | |
| | KYFDTTIDRKRYTSTKEVLDATLIHQSITGLYETRIDLSQLGGDKRTADGSEFESPKKKAKVE | |
| PL12071 | MPAAKRVKLDGGTLNIEDEHRLHETSKEPDVSLGSTWLSDFPQAWAETGGMGLAVRQAPLIIPLKATST | 16,134 |
| | PVSIKQYPMSQEARLGIKPHIQRLLDQGILVPCQSPWNTPLLPVKKPGTNDYRPVQDLREVNKRVEDIH | |
| | PTVPNPYNLLSGLPPSHQWYTVLDLKDAFFCLRLHPTSQPLFAFEWRDPEMGISGQLTWTRLPQGFKNS | |
| | PTLFNEALHRDLADFRIQHPDLILLQYVDDLLLAATSELDCQQGTRALLQTLGNLGYRASAKKAQICQK | |
| | QVKYLGYLLKEGQRWLTEARKETVMGQPTPKTPRQLREFLGKAGFCRLFIPGFAEMAAPLYPLTKPGTL | |
| | FNWGPDQQKAYQEIKQALLTAPALGLPDLTKPFELFVDEKQGYAKGVLTQKLGPWRRPVAYLSKKLDPV | |
| | AAGWPPCLRMVAAIAVLTKDAGKLTMGQPLVILAPHAVEALVKQPPDRWLSNARMTHYQALLLDTDRVQ | |
| | FGPVVALNPATLLPLPEEGLQHNCLDILAEAHGTRPDLTDQPLPDADHTWYTDGSSLLQEGQRKAGAAV | |
| | TTETEVIWAKALPAGTSAQRAELIALTQALKMAEGKKLNVYTDSRYAFATAHIHGEIYRRRGWLTSEGK | |
| | EIKNKDEILALLKALFLPKRLSIIHCPGHQKGHSAEARGNRMADQAARKAAITETPDTSTLLGSSGSSG | |
| | SSGSSGSSGSSMASNFTQFVLVDNGGTGDVTVAPSNFANGIAEWISSNSRSQAYKVTCSVRQSSAQNRK | |
| | YTIKVEVPKGAWRSYLNMELTIPIFATNSDCELIVKAMQGLLKDGNPIPSAIAANSGIYGGSGGSMASN | |
| | FTQFVLVDNGGTGDVTVAPSNFANGIAEWISSNSRSQAYKVTCSVRQSSAQNRKYTIKVEVPKGAWRSY | |
| | LNMELTIPIFATNSDCELIVKAMQGLLKDGNPIPSAIAANSGIYGGGSGGGSGGGSGGGSMASNFTQFV | |
| | LVDNGGTGDVTVAPSNFANGIAEWISSNSRSQAYKVTCSVRQSSAQNRKYTIKVEVPKGAWRSYLNMEL | |
| | TIPIFATNSDCELIVKAMQGLLKDGNPIPSAIAANSGIYGGSGGSMASNFTQFVLVDNGGTGDVTVAPS | |
| | NFANGIAEWISSNSRSQAYKVTCSVRQSSAQNRKYTIKVEVPKGAWRSYLNMELTIPIFATNSDCELIV | |
| | KAMQGLLKDGNPIPSAIAANSGIYGSSGSSGSSGSSGSSGSSDKKYSIGLDIGTNSVGWAVITDEYKVP | |
| | SKKFKVLGNTDRHSIKKNLIGALLFDSGETAEATRLKRTARRRYTRRKNRICYLQEIFSNEMAKVDDSF | |
| | FHRLEESFLVEEDKKHERHPIFGNIVDEVAYHEKYPTIYHLRKKLVDSTDKADLRLIYLALAHMIKFRG | |
| | HFLIEGDLNPDNSDVDKLFIQLVQTYNQLFEENPINASGVDAKAILSARLSKSRRLENLIAQLPGEKKN | |
| | GLFGNLIALSLGLTPNFKSNFDLAEDAKLQLSKDTYDDDLDNLLAQIGDQYADLFLAAKNLSDAILLSD | |
| | ILRVNTEITKAPLSASMIKRYDEHHQDLTLLKALVRQQLPEKYKEIFFDQSKNGYAGYIDGGASQEEFY | |
| | KFIKPILEKMDGTEELLVKLNREDLLRKQRTFDNGSIPHQIHLGELHAILRRQEDFYPFLKDNREKIEK | |
| | ILTFRIPYYVGPLARGNSRFAWMTRKSEETITPWNFEEVVDKGASAQSFIERMTNFDKNLPNEKVLPKH | |
| | SLLYEYFTVYNELTKVKYVTEGMRKPAFLSGEQKKAIVDLLFKTNRKVTVKQLKEDYFKKIECFDSVEI | |
| | SGVEDRFNASLGTYHDLLKIIKDKDFLDNEENEDILEDIVLTLTLFEDREMIEERLKTYAHLFDDKVMK | |
| | QLKRRRYTGWGRLSRKLINGIRDKQSGKTILDFLKSDGFANRNFMQLIHDDSLTFKEDIQKAQVSGQGD | |
| | SLHEHIANLAGSPAIKKGILQTVKVVDELVKVMGRHKPENIVIEMARENQTTQKGQKNSRERMKRIEEG | |
| | IKELGSQILKEHPVENTQLQNEKLYLYYLQNGRDMYVDQELDINRLSDYDVDHIVPQSFLKDDSIDNKV | |
| | LTRSDKARGKSDNVPSEEVVKKMKNYWRQLLNAKLITQRKFDNLTKAERGGLSELDKAGFIKRQLVETR | |
| | QITKHVAQILDSRMNTKYDENDKLIREVKVITLKSKLVSDFRKDFQFYKVREINNYHHAHDAYLNAVVG | |
| | TALIKKYPKLESEFVYGDYKVYDVRKMIAKSEQEIGKATAKYFFYSNIMNFFKTEITLANGEIRKRPLI | |
| | ETNGETGEIVWDKGRDFATVRKVLSMPQVNIVKKTEVQTGGFSKESILPKRNSDKLIARKKDWDPKKYG | |
| | GFDSPTVAYSVLVVAKVEKGKSKKLKSVKELLGITIMERSSFEKNPIDFLEAKGYKEVKKDLIIKLPKY | |
| | SLFELENGRKRMLASAGELQKGNELALPSKYVNFLYLASHYEKLKGSPEDNEQKQLFVEQHKHYLDEII | |
| | EQISEFSKRVILADANLDKVLSAYNKHRDKPIREQAENIIHLFTLTNLGAPAAFKYFDTTIDRKRYTST | |
| | KEVLDATLIHQSITGLYETRIDLSQLGGDKRTADGSEFESPKKKAKVE | |
| PL12072 | MPAAKRVKLDGGTLNIEDEHRLHETSKEPDVSLGSTWLSDFPQAWAETGGMGLAVRQAPLIIPLKATST | 16,135 |
| | PVSIKQYPMSQEARLGIKPHIQRLLDQGILVPCQSPWNTPLLPVKKPGTNDYRPVQDLREVNKRVEDIH | |
| | PTVPNPYNLLSGLPPSHQWYTVLDLKDAFFCLRLHPTSQPLFAFEWRDPEMGISGQLTWTRLPQGFKNS | |
| | PTLFNEALHRDLADFRIQHPDLILLQYVDDLLLAATSELDCQQGTRALLQTLGNLGYRASAKKAQICQK | |
| | QVKYLGYLLKEGQRWLTEARKETVMGQPTPKTPRQLREFLGKAGFCRLFIPGFAEMAAPLYPLTKPGTL | |
| | FNWGPDQQKAYQEIKQALLTAPALGLPDLTKPFELFVDEKQGYAKGVLTQKLGPWRRPVAYLSKKLDPV | |
| | AAGWPPCLRMVAAIAVLTKDAGKLTMGQPLVILAPHAVEALVKQPPDRWLSNARMTHYQALLLDTDRVQ | |
| | FGPVVALNPATLLPLPEEGLQHNCLDILAEAHGTRPDLTDQPLPDADHTWYTDGSSLLQEGQRKAGAAV | |
| | TTETEVIWAKALPAGTSAQRAELIALTQALKMAEGKKLNVYTDSRYAFATAHIHGEIYRRRGWLTSEGK | |
| | EIKNKDEILALLKALFLPKRLSIIHCPGHQKGHSAEARGNRMADQAARKAAITETPDTSTLLGSSGSSG | |
| | SSGSSGSSGSSMASNFTQFVLVDNGGTGDVTVAPSNFANGIAEWISSNSRSQAYKVTCSVRQSSAQNRK | |
| | YTIKVEVPKGAWRSYLNMELTIPIFATNSDCELIVKAMQGLLKDGNPIPSAIAANSGIYGGSGGSMASN | |
| | FTQFVLVDNGGTGDVTVAPSNFANGIAEWISSNSRSQAYKVTCSVRQSSAQNRKYTIKVEVPKGAWRSY | |
| | LNMELTIPIFATNSDCELIVKAMQGLLKDGNPIPSAIAANSGIYGGGSGGGSGGGSGGGSMASNFTQFV | |
| | LVDNGGTGDVTVAPSNFANGIAEWISSNSRSQAYKVTCSVRQSSAQNRKYTIKVEVPKGAWRSYLNMEL | |
| | TIPIFATNSDCELIVKAMQGLLKDGNPIPSAIAANSGIYGGSGGSMASNFTQFVLVDNGGTGDVTVAPS | |
| | NFANGIAEWISSNSRSQAYKVTCSVRQSSAQNRKYTIKVEVPKGAWRSYLNMELTIPIFATNSDCELIV | |
| | KAMQGLLKDGNPIPSAIAANSGIYGSSGGGEAAAKDKKYSIGLDIGTNSVGWAVITDEYKVPSKKFKVL | |
| | GNTDRHSIKKNLIGALLFDSGETAEATRLKRTARRRYTRRKNRICYLQEIFSNEMAKVDDSFFHRLEES | |
| | FLVEEDKKHERHPIFGNIVDEVAYHEKYPTIYHLRKKLVDSTDKADLRLIYLALAHMIKFRGHFLIEGD | |
| | LNPDNSDVDKLFIQLVQTYNQLFEENPINASGVDAKAILSARLSKSRRLENLIAQLPGEKKNGLFGNLI | |
| | ALSLGLTPNFKSNFDLAEDAKLQLSKDTYDDDLDNLLAQIGDQYADLFLAAKNLSDAILLSDILRVNTE | |
| | ITKAPLSASMIKRYDEHHQDLTLLKALVRQQLPEKYKEIFFDQSKNGYAGYIDGGASQEEFYKFIKPIL | |
| | EKMDGTEELLVKLNREDLLRKQRTFDNGSIPHQIHLGELHAILRRQEDFYPFLKDNREKIEKILTFRIP | |
| | YYVGPLARGNSRFAWMTRKSEETITPWNFEEVVDKGASAQSFIERMTNFDKNLPNEKVLPKHSLLYEYF | |
| | TVYNELTKVKYVTEGMRKPAFLSGEQKKAIVDLLFKTNRKVTVKQLKEDYFKKIECFDSVEISGVEDRF | |
| | NASLGTYHDLLKIIKDKDFLDNEENEDILEDIVLTLTLFEDREMIEERLKTYAHLFDDKVMKQLKRRRY | |
| | TGWGRLSRKLINGIRDKQSGKTILDFLKSDGFANRNFMQLIHDDSLTFKEDIQKAQVSGQGDSLHEHIA | |
| | NLAGSPAIKKGILQTVKVVDELVKVMGRHKPENIVIEMARENQTTQKGQKNSRERMKRIEEGIKELGSQ | |
| | ILKEHPVENTQLQNEKLYLYYLQNGRDMYVDQELDINRLSDYDVDHIVPQSFLKDDSIDNKVLTRSDKA | |
| | RGKSDNVPSEEVVKKMKNYWRQLLNAKLITQRKFDNLTKAERGGLSELDKAGFIKRQLVETRQITKHVA | |
| | QILDSRMNTKYDENDKLIREVKVITLKSKLVSDFRKDFQFYKVREINNYHHAHDAYLNAVVGTALIKKY | |
| | PKLESEFVYGDYKVYDVRKMIAKSEQEIGKATAKYFFYSNIMNFFKTEITLANGEIRKRPLIETNGETG | |
| | EIVWDKGRDFATVRKVLSMPQVNIVKKTEVQTGGFSKESILPKRNSDKLIARKKDWDPKKYGGFDSPTV | |
| | AYSVLVVAKVEKGKSKKLKSVKELLGITIMERSSFEKNPIDFLEAKGYKEVKKDLIIKLPKYSLFELEN | |
| | GRKRMLASAGELQKGNELALPSKYVNFLYLASHYEKLKGSPEDNEQKQLFVEQHKHYLDEIIEQISEFS | |
| | KRVILADANLDKVLSAYNKHRDKPIREQAENIIHLFTLTNLGAPAAFKYFDTTIDRKRYTSTKEVLDAT | |
| | LIHQSITGLYETRIDLSQLGGDKRTADGSEFESPKKKAKVE | |
| PL12073 | MPAAKRVKLDGGTLNIEDEHRLHETSKEPDVSLGSTWLSDFPQAWAETGGMGLAVRQAPLIIPLKATST | 16,136 |
| | PVSIKQYPMSQEARLGIKPHIQRLLDQGILVPCQSPWNTPLLPVKKPGTNDYRPVQDLREVNKRVEDIH | |
| | PTVPNPYNLLSGLPPSHQWYTVLDLKDAFFCLRLHPTSQPLFAFEWRDPEMGISGQLTWTRLPQGFKNS | |
| | PTLFNEALHRDLADFRIQHPDLILLQYVDDLLLAATSELDCQQGTRALLQTLGNLGYRASAKKAQICQK | |
| | QVKYLGYLLKEGQRWLTEARKETVMGQPTPKTPRQLREFLGKAGFCRLFIPGFAEMAAPLYPLTKPGTL | |
| | FNWGPDQQKAYQEIKQALLTAPALGLPDLTKPFELFVDEKQGYAKGVLTQKLGPWRRPVAYLSKKLDPV | |
| | AAGWPPCLRMVAAIAVLTKDAGKLTMGQPLVILAPHAVEALVKQPPDRWLSNARMTHYQALLLDTDRVQ | |
| | FGPVVALNPATLLPLPEEGLQHNCLDILAEAHGTRPDLTDQPLPDADHTWYTDGSSLLQEGQRKAGAAV | |
| | TTETEVIWAKALPAGTSAQRAELIALTQALKMAEGKKLNVYTDSRYAFATAHIHGEIYRRRGWLTSEGK | |
| | EIKNKDEILALLKALFLPKRLSIIHCPGHQKGHSAEARGNRMADQAARKAAITETPDTSTLLGSSGGGE | |
| | AAAKMASNFTQFVLVDNGGTGDVTVAPSNFANGIAEWISSNSRSQAYKVTCSVRQSSAQNRKYTIKVEV | |
| | PKGAWRSYLNMELTIPIFATNSDCELIVKAMQGLLKDGNPIPSAIAANSGIYAEAAAKEAAAKEAAAKE | |
| | AAAKALEAEAAAKEAAAKEAAAKEAAAKADKKYSIGLDIGTNSVGWAVITDEYKVPSKKFKVLGNTDRH | |
| | SIKKNLIGALLFDSGETAEATRLKRTARRRYTRRKNRICYLQEIFSNEMAKVDDSFFHRLEESFLVEED | |
| | KKHERHPIFGNIVDEVAYHEKYPTIYHLRKKLVDSTDKADLRLIYLALAHMIKFRGHFLIEGDLNPDNS | |
| | DVDKLFIQLVQTYNQLFEENPINASGVDAKAILSARLSKSRRLENLIAQLPGEKKNGLFGNLIALSLGL | |
| | TPNFKSNFDLAEDAKLQLSKDTYDDDLDNLLAQIGDQYADLFLAAKNLSDAILLSDILRVNTEITKAPL | |
| | SASMIKRYDEHHQDLTLLKALVRQQLPEKYKEIFFDQSKNGYAGYIDGGASQEEFYKFIKPILEKMDGT | |
| | EELLVKLNREDLLRKQRTFDNGSIPHQIHLGELHAILRRQEDFYPFLKDNREKIEKILTFRIPYYVGPL | |
| | ARGNSRFAWMTRKSEETITPWNFEEVVDKGASAQSFIERMTNFDKNLPNEKVLPKHSLLYEYFTVYNEL | |
| | TKVKYVTEGMRKPAFLSGEQKKAIVDLLFKTNRKVTVKQLKEDYFKKIECFDSVEISGVEDRFNASLGT | |
| | YHDLLKIIKDKDFLDNEENEDILEDIVLTLTLFEDREMIEERLKTYAHLFDDKVMKQLKRRRYTGWGRL | |
| | SRKLINGIRDKQSGKTILDFLKSDGFANRNFMQLIHDDSLTFKEDIQKAQVSGQGDSLHEHIANLAGSP | |
| | AIKKGILQTVKVVDELVKVMGRHKPENIVIEMARENQTTQKGQKNSRERMKRIEEGIKELGSQILKEHP | |
| | VENTQLQNEKLYLYYLQNGRDMYVDQELDINRLSDYDVDHIVPQSFLKDDSIDNKVLTRSDKARGKSDN | |
| | VPSEEVVKKMKNYWRQLLNAKLITQRKFDNLTKAERGGLSELDKAGFIKRQLVETRQITKHVAQILDSR | |
| | MNTKYDENDKLIREVKVITLKSKLVSDFRKDFQFYKVREINNYHHAHDAYLNAVVGTALIKKYPKLESE | |
| | FVYGDYKVYDVRKMIAKSEQEIGKATAKYFFYSNIMNFFKTEITLANGEIRKRPLIETNGETGEIVWDK | |
| | GRDFATVRKVLSMPQVNIVKKTEVQTGGFSKESILPKRNSDKLIARKKDWDPKKYGGFDSPTVAYSVLV | |
| | VAKVEKGKSKKLKSVKELLGITIMERSSFEKNPIDFLEAKGYKEVKKDLIIKLPKYSLFELENGRKRML | |
| | ASAGELQKGNELALPSKYVNFLYLASHYEKLKGSPEDNEQKQLFVEQHKHYLDEIIEQISEFSKRVILA | |
| | DANLDKVLSAYNKHRDKPIREQAENIIHLFTLTNLGAPAAFKYFDTTIDRKRYTSTKEVLDATLIHQSI | |
| | TGLYETRIDLSQLGGDKRTADGSEFESPKKKAKVE | |
| PL12074 | MPAAKRVKLDGGTLNIEDEHRLHETSKEPDVSLGSTWLSDFPQAWAETGGMGLAVRQAPLIIPLKATST | 16,137 |
| | PVSIKQYPMSQEARLGIKPHIQRLLDQGILVPCQSPWNTPLLPVKKPGTNDYRPVQDLREVNKRVEDIH | |
| | PTVPNPYNLLSGLPPSHQWYTVLDLKDAFFCLRLHPTSQPLFAFEWRDPEMGISGQLTWTRLPQGFKNS | |
| | PTLFNEALHRDLADFRIQHPDLILLQYVDDLLLAATSELDCQQGTRALLQTLGNLGYRASAKKAQICQK | |
| | QVKYLGYLLKEGQRWLTEARKETVMGQPTPKTPRQLREFLGKAGFCRLFIPGFAEMAAPLYPLTKPGTL | |
| | FNWGPDQQKAYQEIKQALLTAPALGLPDLTKPFELFVDEKQGYAKGVLTQKLGPWRRPVAYLSKKLDPV | |
| | AAGWPPCLRMVAAIAVLTKDAGKLTMGQPLVILAPHAVEALVKQPPDRWLSNARMTHYQALLLDTDRVQ | |
| | FGPVVALNPATLLPLPEEGLQHNCLDILAEAHGTRPDLTDQPLPDADHTWYTDGSSLLQEGQRKAGAAV | |
| | TTETEVIWAKALPAGTSAQRAELIALTQALKMAEGKKLNVYTDSRYAFATAHIHGEIYRRRGWLTSEGK | |
| | EIKNKDEILALLKALFLPKRLSIIHCPGHQKGHSAEARGNRMADQAARKAAITETPDTSTLLGSSGGGE | |
| | AAAKMASNFTQFVLVDNGGTGDVTVAPSNFANGIAEWISSNSRSQAYKVTCSVRQSSAQNRKYTIKVEV | |
| | PKGAWRSYLNMELTIPIFATNSDCELIVKAMQGLLKDGNPIPSAIAANSGIYSGGSSGGSSGSETPGTS | |
| | SATPESSGGSSGGSSDKKYSIGLDIGTNSVGWAVITDEYKVPSKKFKVLGNTDRHSIKKNLIGALLFDS | |
| | GETAEATRLKRTARRRYTRRKNRICYELQEIFSNEMAKVDDSFFHRLEESFLVEEDKKHERHPIFGNIV | |
| | DEVAYHEKYPTIYHLRKKLVDSTDKADLRLIYLALAHMIKFRGHFLIEGDLNPDNSDVDKLFIQLVQTY | |
| | NQLFEENPINASGVDAKAILSARLSKSRRLENLIAQLPGEKKNGLFGNLIALSLGLTPNFKSNFDLAED | |
| | AKLQLSKDTYDDDLDNLLAQIGDQYADLFLAAKNLSDAILLSDILRVNTEITKAPLSASMIKRYDEHHQ | |
| | DLTLLKALVRQQLPEKYKEIFFDQSKNGYAGYIDGGASQEEFYKFIKPILEKMDGTEELLVKLNREDLL | |
| | RKQRTFDNGSIPHQIHLGELHAILRRQEDFYPFLKDNREKIEKILTFRIPYYVGPLARGNSRFAWMTRK | |
| | SEETITPWNFEEVVDKGASAQSFIERMTNFDKNLPNEKVLPKHSLLYEYFTVYNELTKVKYVTEGMRKP | |
| | AFLSGEQKKAIVDLLFKTNRKVTVKQLKEDYFKKIECFDSVEISGVEDRFNASLGTYHDLLKIIKDKDF | |
| | LDNEENEDILEDIVLTLTLFEDREMIEERLKTYAHLFDDKVMKQLKRRRYTGWGRLSRKLINGIRDKQS | |
| | GKTILDFLKSDGFANRNFMQLIHDDSLTFKEDIQKAQVSGQGDSLHEHIANLAGSPAIKKGILQTVKVV | |
| | DELVKVMGRHKPENIVIEMARENQTTQKGQKNSRERMKRIEEGIKELGSQILKEHPVENTQLQNEKLYL | |
| | YYLQNGRDMYVDQELDINRLSDYDVDHIVPQSFLKDDSIDNKVLTRSDKARGKSDNVPSEEVVKKMKNY | |
| | WRQLLNAKLITQRKFDNLTKAERGGLSELDKAGFIKRQLVETRQITKHVAQILDSRMNTKYDENDKLIR | |
| | EVKVITLKSKLVSDFRKDFQFYKVREINNYHHAHDAYLNAVVGTALIKKYPKLESEFVYGDYKVYDVRK | |
| | MIAKSEQEIGKATAKYFFYSNIMNFFKTEITLANGEIRKRPLIETNGETGEIVWDKGRDFATVRKVLSM | |
| | PQVNIVKKTEVQTGGFSKESILPKRNSDKLIARKKDWDPKKYGGFDSPTVAYSVLVVAKVEKGKSKKLK | |
| | SVKELLGITIMERSSFEKNPIDFLEAKGYKEVKKDLIIKLPKYSLFELENGRKRMLASAGELQKGNELA | |
| | LPSKYVNFLYLASHYEKLKGSPEDNEQKQLFVEQHKHYLDEIIEQISEFSKRVILADANLDKVLSAYNK | |
| | HRDKPIREQAENIIHLFTLTNLGAPAAFKYFDTTIDRKRYTSTKEVLDATLIHQSITGLYETRIDLSQL | |
| | GGDKRTADGSEFESPKKKAKVE | |
| PL12075 | MPAAKRVKLDGGTLNIEDEHRLHETSKEPDVSLGSTWLSDFPQAWAETGGMGLAVRQAPLIIPLKATST | 16,138 |
| | PVSIKQYPMSQEARLGIKPHIQRLLDQGILVPCQSPWNTPLLPVKKPGTNDYRPVQDLREVNKRVEDIH | |
| | PTVPNPYNLLSGLPPSHQWYTVLDLKDAFFCLRLHPTSQPLFAFEWRDPEMGISGQLTWTRLPQGFKNS | |
| | PTLFNEALHRDLADFRIQHPDLILLQYVDDLLLAATSELDCQQGTRALLQTLGNLGYRASAKKAQICQK | |
| | QVKYLGYLLKEGQRWLTEARKETVMGQPTPKTPRQLREFLGKAGFCRLFIPGFAEMAAPLYPLTKPGTL | |
| | FNWGPDQQKAYQEIKQALLTAPALGLPDLTKPFELFVDEKQGYAKGVLTQKLGPWRRPVAYLSKKLDPV | |
| | AAGWPPCLRMVAAIAVLTKDAGKLTMGQPLVILAPHAVEALVKQPPDRWLSNARMTHYQALLLDTDRVQ | |
| | FGPVVALNPATLLPLPEEGLQHNCLDILAEAHGTRPDLTDQPLPDADHTWYTDGSSLLQEGQRKAGAAV | |
| | TTETEVIWAKALPAGTSAQRAELIALTQALKMAEGKKLNVYTDSRYAFATAHIHGEIYRRRGWLTSEGK | |
| | EIKNKDEILALLKALFLPKRLSIIHCPGHQKGHSAEARGNRMADQAARKAAITETPDTSTLLGSSGGGE | |
| | AAAKMASNFTQFVLVDNGGTGDVTVAPSNFANGIAEWISSNSRSQAYKVTCSVRQSSAQNRKYTIKVEV | |
| | PKGAWRSYLNMELTIPIFATNSDCELIVKAMQGLLKDGNPIPSAIAANSGIYGSSGSSGSSGSSGSSGS | |
| | SDKKYSIGLDIGTNSVGWAVITDEYKVPSKKFKVLGNTDRHSIKKNLIGALLFDSGETAEATRLKRTAR | |
| | RRYTRRKNRICYLQEIFSNEMAKVDDSFFHRLEESFLVEEDKKHERHPIFGNIVDEVAYHEKYPTIYHL | |
| | RKKLVDSTDKADLRLIYLALAHMIKFRGHFLIEGDLNPDNSDVDKLFIQLVQTYNQLFEENPINASGVD | |
| | AKAILSARLSKSRRLENLIAQLPGEKKNGLFGNLIALSLGLTPNFKSNFDLAEDAKLQLSKDTYDDDLD | |
| | NLLAQIGDQYADLFLAAKNLSDAILLSDILRVNTEITKAPLSASMIKRYDEHHQDLTLLKALVRQQLPE | |
| | KYKEIFFDQSKNGYAGYIDGGASQEEFYKFIKPILEKMDGTEELLVKLNREDLLRKQRTFDNGSIPHQI | |
| | HLGELHAILRRQEDFYPFLKDNREKIEKILTFRIPYYVGPLARGNSRFAWMTRKSEETITPWNFEEVVD | |
| | KGASAQSFIERMTNFDKNLPNEKVLPKHSLLYEYFTVYNELTKVKYVTEGMRKPAFLSGEQKKAIVDLL | |
| | FKTNRKVTVKQLKEDYFKKIECFDSVEISGVEDRFNASLGTYHDLLKIIKDKDFLDNEENEDILEDIVL | |
| | TLTLFEDREMIEERLKTYAHLFDDKVMKQLKRRRYTGWGRLSRKLINGIRDKQSGKTILDFLKSDGFAN | |
| | RNFMQLIHDDSLTFKEDIQKAQVSGQGDSLHEHIANLAGSPAIKKGILQTVKVVDELVKVMGRHKPENI | |
| | VIEMARENQTTQKGQKNSRERMKRIEEGIKELGSQILKEHPVENTQLQNEKLYLYYLQNGRDMYVDQEL | |
| | DINRLSDYDVDHIVPQSFLKDDSIDNKVLTRSDKARGKSDNVPSEEVVKKMKNYWRQLLNAKLITQRKF | |
| | DNLTKAERGGLSELDKAGFIKRQLVETRQITKHVAQILDSRMNTKYDENDKLIREVKVITLKSKLVSDF | |
| | RKDFQFYKVREINNYHHAHDAYLNAVVGTALIKKYPKLESEFVYGDYKVYDVRKMIAKSEQEIGKATAK | |
| | YFFYSNIMNFFKTEITLANGEIRKRPLIETNGETGEIVWDKGRDFATVRKVLSMPQVNIVKKTEVQTGG | |
| | FSKESILPKRNSDKLIARKKDWDPKKYGGFDSPTVAYSVLVVAKVEKGKSKKLKSVKELLGITIMERSS | |
| | FEKNPIDFLEAKGYKEVKKDLIIKLPKYSLFELENGRKRMLASAGELQKGNELALPSKYVNFLYLASHY | |
| | EKLKGSPEDNEQKQLFVEQHKHYLDEIIEQISEFSKRVILADANLDKVLSAYNKHRDKPIREQAENIIH | |
| | LFTLTNLGAPAAFKYFDTTIDRKRYTSTKEVLDATLIHQSITGLYETRIDLSQLGGDKRTADGSEFESP | |
| | KKKAKVE | |
| PL12076 | MPAAKRVKLDGGTLNIEDEHRLHETSKEPDVSLGSTWLSDFPQAWAETGGMGLAVRQAPLIIPLKATST | 16,139 |
| | PVSIKQYPMSQEARLGIKPHIQRLLDQGILVPCQSPWNTPLLPVKKPGTNDYRPVQDLREVNKRVEDIH | |
| | PTVPNPYNLLSGLPPSHQWYTVLDLKDAFFCLRLHPTSQPLFAFEWRDPEMGISGQLTWTRLPQGFKNS | |
| | PTLFNEALHRDLADFRIQHPDLILLQYVDDLLLAATSELDCQQGTRALLQTLGNLGYRASAKKAQICQK | |
| | QVKYLGYLLKEGQRWLTEARKETVMGQPTPKTPRQLREFLGKAGFCRLFIPGFAEMAAPLYPLTKPGTL | |
| | FNWGPDQQKAYQEIKQALLTAPALGLPDLTKPFELFVDEKQGYAKGVLTQKLGPWRRPVAYLSKKLDPV | |
| | AAGWPPCLRMVAAIAVLTKDAGKLTMGQPLVILAPHAVEALVKQPPDRWLSNARMTHYQALLLDTDRVQ | |
| | FGPVVALNPATLLPLPEEGLQHNCLDILAEAHGTRPDLTDQPLPDADHTWYTDGSSLLQEGQRKAGAAV | |
| | TTETEVIWAKALPAGTSAQRAELIALTQALKMAEGKKLNVYTDSRYAFATAHIHGEIYRRRGWLTSEGK | |
| | EIKNKDEILALLKALFLPKRLSIIHCPGHQKGHSAEARGNRMADQAARKAAITETPDTSTLLGSSGGGE | |
| | AAAKMASNFTQFVLVDNGGTGDVTVAPSNFANGIAEWISSNSRSQAYKVTCSVRQSSAQNRKYTIKVEV | |
| | PKGAWRSYLNMELTIPIFATNSDCELIVKAMQGLLKDGNPIPSAIAANSGIYGSSGGGEAAAKDKKYSI | |
| | GLDIGTNSVGWAVITDEYKVPSKKFKVLGNTDRHSIKKNLIGALLFDSGETAEATRLKRTARRRYTRRK | |
| | NRICYLQEIFSNEMAKVDDSFFHRLEESFLVEEDKKHERHPIFGNIVDEVAYHEKYPTIYHLRKKLVDS | |
| | TDKADLRLIYLALAHMIKFRGHFLIEGDLNPDNSDVDKLFIQLVQTYNQLFEENPINASGVDAKAILSA | |
| | RLSKSRRLENLIAQLPGEKKNGLFGNLIALSLGLTPNFKSNFDLAEDAKLQLSKDTYDDDLDNLLAQIG | |
| | DQYADLFLAAKNLSDAILLSDILRVNTEITKAPLSASMIKRYDEHHQDLTLLKALVRQQLPEKYKEIFF | |
| | DQSKNGYAGYIDGGASQEEFYKFIKPILEKMDGTEELLVKLNREDLLRKQRTFDNGSIPHQIHLGELHA | |
| | ILRRQEDFYPFLKDNREKIEKILTFRIPYYVGPLARGNSRFAWMTRKSEETITPWNFEEVVDKGASAQS | |
| | FIERMTNFDKNLPNEKVLPKHSLLYEYFTVYNELTKVKYVTEGMRKPAFLSGEQKKAIVDLLFKTNRKV | |
| | TVKQLKEDYFKKIECFDSVEISGVEDRFNASLGTYHDLLKIIKDKDFLDNEENEDILEDIVLTLTLFED | |
| | REMIEERLKTYAHLFDDKVMKQLKRRRYTGWGRLSRKLINGIRDKQSGKTILDFLKSDGFANRNFMQLI | |
| | HDDSLTFKEDIQKAQVSGQGDSLHEHIANLAGSPAIKKGILQTVKVVDELVKVMGRHKPENIVIEMARE | |
| | NQTTQKGQKNSRERMKRIEEGIKELGSQILKEHPVENTQLQNEKLYLYYLQNGRDMYVDQELDINRLSD | |
| | YDVDHIVPQSFLKDDSIDNKVLTRSDKARGKSDNVPSEEVVKKMKNYWRQLLNAKLITQRKFDNLTKAE | |
| | RGGLSELDKAGFIKRQLVETRQITKHVAQILDSRMNTKYDENDKLIREVKVITLKSKLVSDFRKDFQFY | |
| | KVREINNYHHAHDAYLNAVVGTALIKKYPKLESEFVYGDYKVYDVRKMIAKSEQEIGKATAKYFFYSNI | |
| | MNFFKTEITLANGEIRKRPLIETNGETGEIVWDKGRDFATVRKVLSMPQVNIVKKTEVQTGGFSKESIL | |
| | PKRNSDKLIARKKDWDPKKYGGFDSPTVAYSVLVVAKVEKGKSKKLKSVKELLGITIMERSSFEKNPID | |
| | FLEAKGYKEVKKDLIIKLPKYSLFELENGRKRMLASAGELQKGNELALPSKYVNFLYLASHYEKLKGSP | |
| | EDNEQKQLFVEQHKHYLDEIIEQISEFSKRVILADANLDKVLSAYNKHRDKPIREQAENIIHLFTLTNL | |
| | GAPAAFKYFDTTIDRKRYTSTKEVLDATLIHQSITGLYETRIDLSQLGGDKRTADGSEFESPKKKAKVE | |
| PL12077 | MPAAKRVKLDGGTLNIEDEHRLHETSKEPDVSLGSTWLSDFPQAWAETGGMGLAVRQAPLIIPLKATST | 16,140 |
| | PVSIKQYPMSQEARLGIKPHIQRLLDQGILVPCQSPWNTPLLPVKKPGTNDYRPVQDLREVNKRVEDIH | |
| | PTVPNPYNLLSGLPPSHQWYTVLDLKDAFFCLRLHPTSQPLFAFEWRDPEMGISGQLTWTRLPQGFKNS | |
| | PTLFNEALHRDLADFRIQHPDLILLQYVDDLLLAATSELDCQQGTRALLQTLGNLGYRASAKKAQICQK | |
| | QVKYLGYLLKEGQRWLTEARKETVMGQPTPKTPRQLREFLGKAGFCRLFIPGFAEMAAPLYPLTKPGTL | |
| | FNWGPDQQKAYQEIKQALLTAPALGLPDLTKPFELFVDEKQGYAKGVLTQKLGPWRRPVAYLSKKLDPV | |
| | AAGWPPCLRMVAAIAVLTKDAGKLTMGQPLVILAPHAVEALVKQPPDRWLSNARMTHYQALLLDTDRVQ | |
| | FGPVVALNPATLLPLPEEGLQHNCLDILAEAHGTRPDLTDQPLPDADHTWYTDGSSLLQEGQRKAGAAV | |
| | TTETEVIWAKALPAGTSAQRAELIALTQALKMAEGKKLNVYTDSRYAFATAHIHGEIYRRRGWLTSEGK | |
| | EIKNKDEILALLKALFLPKRLSIIHCPGHQKGHSAEARGNRMADQAARKAAITETPDTSTLLGSSGGGE | |
| | AAAKMASNFTQFVLVDNGGTGDVTVAPSNFANGIAEWISSNSRSQAYKVTCSVRQSSAQNRKYTIKVEV | |
| | PKGAWRSYLNMELTIPIFATNSDCELIVKAMQGLLKDGNPIPSAIAANSGIYGGSGGSMASNFTQFVLV | |
| | DNGGTGDVTVAPSNFANGIAEWISSNSRSQAYKVTCSVRQSSAQNRKYTIKVEVPKGAWRSYLNMELTI | |
| | PIFATNSDCELIVKAMQGLLKDGNPIPSAIAANSGIYAEAAAKEAAAKEAAAKEAAAKALEAEAAAKEA | |
| | AAKEAAAKEAAAKADKKYSIGLDIGTNSVGWAVITDEYKVPSKKFKVLGNTDRHSIKKNLIGALLFDSG | |
| | ETAEATRLKRTARRRYTRRKNRICYLQEIFSNEMAKVDDSFFHRLEESFLVEEDKKHERHPIFGNIVDE | |
| | VAYHEKYPTIYHLRKKLVDSTDKADLRLIYLALAHMIKFRGHFLIEGDLNPDNSDVDKLFIQLVQTYNQ | |
| | LFEENPINASGVDAKAILSARLSKSRRLENLIAQLPGEKKNGLFGNLIALSLGLTPNFKSNFDLAEDAK | |
| | LQLSKDTYDDDLDNLLAQIGDQYADLFLAAKNLSDAILLSDILRVNTEITKAPLSASMIKRYDEHHQDL | |
| | TLLKALVRQQLPEKYKEIFFDQSKNGYAGYIDGGASQEEFYKFIKPILEKMDGTEELLVKLNREDLLRK | |
| | QRTFDNGSIPHQIHLGELHAILRRQEDFYPFLKDNREKIEKILTFRIPYYVGPLARGNSRFAWMTRKSE | |
| | ETITPWNFEEVVDKGASAQSFIERMTNFDKNLPNEKVLPKHSLLYEYFTVYNELTKVKYVTEGMRKPAF | |
| | LSGEQKKAIVDLLFKTNRKVTVKQLKEDYFKKIECFDSVEISGVEDRFNASLGTYHDLLKIIKDKDFLD | |
| | NEENEDILEDIVLTLTLFEDREMIEERLKTYAHLFDDKVMKQLKRRRYTGWGRLSRKLINGIRDKQSGK | |
| | TILDFLKSDGFANRNFMQLIHDDSLTFKEDIQKAQVSGQGDSLHEHIANLAGSPAIKKGILQTVKVVDE | |
| | LVKVMGRHKPENIVIEMARENQTTQKGQKNSRERMKRIEEGIKELGSQILKEHPVENTQLQNEKLYLYY | |
| | LQNGRDMYVDQELDINRLSDYDVDHIVPQSFLKDDSIDNKVLTRSDKARGKSDNVPSEEVVKKMKNYWR | |
| | QLLNAKLITQRKFDNLTKAERGGLSELDKAGFIKRQLVETRQITKHVAQILDSRMNTKYDENDKLIREV | |
| | KVITLKSKLVSDFRKDFQFYKVREINNYHHAHDAYLNAVVGTALIKKYPKLESEFVYGDYKVYDVRKMI | |
| | AKSEQEIGKATAKYFFYSNIMNFFKTEITLANGEIRKRPLIETNGETGEIVWDKGRDFATVRKVLSMPQ | |
| | VNIVKKTEVQTGGFSKESILPKRNSDKLIARKKDWDPKKYGGFDSPTVAYSVLVVAKVEKGKSKKLKSV | |
| | KELLGITIMERSSFEKNPIDFLEAKGYKEVKKDLIIKLPKYSLFELENGRKRMLASAGELQKGNELALP | |
| | SKYVNFLYLASHYEKLKGSPEDNEQKQLFVEQHKHYLDEIIEQISEFSKRVILADANLDKVLSAYNKHR | |
| | DKPIREQAENIIHLFTLTNLGAPAAFKYFDTTIDRKRYTSTKEVLDATLIHQSITGLYETRIDLSQLGG | |
| | DKRTADGSEFESPKKKAKVE | |
| PL12078 | MPAAKRVKLDGGTLNIEDEHRLHETSKEPDVSLGSTWLSDFPQAWAETGGMGLAVRQAPLIIPLKATST | 16,141 |
| | PVSIKQYPMSQEARLGIKPHIQRLLDQGILVPCQSPWNTPLLPVKKPGTNDYRPVQDLREVNKRVEDIH | |
| | PTVPNPYNLLSGLPPSHQWYTVLDLKDAFFCLRLHPTSQPLFAFEWRDPEMGISGQLTWTRLPQGFKNS | |
| | PTLFNEALHRDLADFRIQHPDLILLQYVDDLLLAATSELDCQQGTRALLQTLGNLGYRASAKKAQICQK | |
| | QVKYLGYLLKEGQRWLTEARKETVMGQPTPKTPRQLREFLGKAGFCRLFIPGFAEMAAPLYPLTKPGTL | |
| | FNWGPDQQKAYQEIKQALLTAPALGLPDLTKPFELFVDEKQGYAKGVLTQKLGPWRRPVAYLSKKLDPV | |
| | AAGWPPCLRMVAAIAVLTKDAGKLTMGQPLVILAPHAVEALVKQPPDRWLSNARMTHYQALLLDTDRVQ | |
| | FGPVVALNPATLLPLPEEGLQHNCLDILAEAHGTRPDLTDQPLPDADHTWYTDGSSLLQEGQRKAGAAV | |
| | TTETEVIWAKALPAGTSAQRAELIALTQALKMAEGKKLNVYTDSRYAFATAHIHGEIYRRRGWLTSEGK | |
| | EIKNKDEILALLKALFLPKRLSIIHCPGHQKGHSAEARGNRMADQAARKAAITETPDTSTLLGSSGGGE | |
| | AAAKMASNFTQFVLVDNGGTGDVTVAPSNFANGIAEWISSNSRSQAYKVTCSVRQSSAQNRKYTIKVEV | |
| | PKGAWRSYLNMELTIPIFATNSDCELIVKAMQGLLKDGNPIPSAIAANSGIYGGSGGSMASNFTQFVLV | |
| | DNGGTGDVTVAPSNFANGIAEWISSNSRSQAYKVTCSVRQSSAQNRKYTIKVEVPKGAWRSYLNMELTI | |
| | PIFATNSDCELIVKAMQGLLKDGNPIPSAIAANSGIYSGGSSGGSSGSETPGTSESATPESSGGSSGGS | |
| | SDKKYSIGLDIGTNSVGWAVITDEYKVPSKKFKVLGNTDRHSIKKNLIGALLFDSGETAEATRLKRTAR | |
| | RRYTRRKNRICYLQEIFSNEMAKVDDSFFHRLEESFLVEEDKKHERHPIFGNIVDEVAYHEKYPTIYHL | |
| | RKKLVDSTDKADLRLIYLALAHMIKFRGHFLIEGDLNPDNSDVDKLFIQLVQTYNQLFEENPINASGVD | |
| | AKAILSARLSKSRRLENLIAQLPGEKKNGLFGNLIALSLGLTPNFKSNFDLAEDAKLQLSKDTYDDDLD | |
| | NLLAQIGDQYADLFLAAKNLSDAILLSDILRVNTEITKAPLSASMIKRYDEHHQDLTLLKALVRQQLPE | |
| | KYKEIFFDQSKNGYAGYIDGGASQEEFYKFIKPILEKMDGTEELLVKLNREDLLRKQRTFDNGSIPHQI | |
| | HLGELHAILRRQEDFYPFLKDNREKIEKILTFRIPYYVGPLARGNSRFAWMTRKSEETITPWNFEEVVD | |
| | KGASAQSFIERMTNFDKNLPNEKVLPKHSLLYEYFTVYNELTKVKYVTEGMRKPAFLSGEQKKAIVDLL | |
| | FKTNRKVTVKQLKEDYFKKIECFDSVEISGVEDRFNASLGTYHDLLKIIKDKDFLDNEENEDILEDIVL | |
| | TLTLFEDREMIEERLKTYAHLFDDKVMKQLKRRRYTGWGRLSRKLINGIRDKQSGKTILDFLKSDGFAN | |
| | RNFMQLIHDDSLTFKEDIQKAQVSGQGDSLHEHIANLAGSPAIKKGILQTVKVVDELVKVMGRHKPENI | |
| | VIEMARENQTTQKGQKNSRERMKRIEEGIKELGSQILKEHPVENTQLQNEKLYLYYLQNGRDMYVDQEL | |
| | DINRLSDYDVDHIVPQSFLKDDSIDNKVLTRSDKARGKSDNVPSEEVVKKMKNYWRQLLNAKLITQRKF | |
| | DNLTKAERGGLSELDKAGFIKRQLVETRQITKHVAQILDSRMNTKYDENDKLIREVKVITLKSKLVSDF | |
| | RKDFQFYKVREINNYHHAHDAYLNAVVGTALIKKYPKLESEFVYGDYKVYDVRKMIAKSEQEIGKATAK | |
| | YFFYSNIMNFFKTEITLANGEIRKRPLIETNGETGEIVWDKGRDFATVRKVLSMPQVNIVKKTEVQTGG | |
| | FSKESILPKRNSDKLIARKKDWDPKKYGGFDSPTVAYSVLVVAKVEKGKSKKLKSVKELLGITIMERSS | |
| | FEKNPIDFLEAKGYKEVKKDLIIKLPKYSLFELENGRKRMLASAGELQKGNELALPSKYVNFLYLASHY | |
| | EKLKGSPEDNEQKQLFVEQHKHYLDEIIEQISEFSKRVILADANLDKVLSAYNKHRDKPIREQAENIIH | |
| | LFTLTNLGAPAAFKYFDTTIDRKRYTSTKEVLDATLIHQSITGLYETRIDLSQLGGDKRTADGSEFESP | |
| | KKKAKVE | |
| PL12079 | MPAAKRVKLDGGTLNIEDEHRLHETSKEPDVSLGSTWLSDFPQAWAETGGMGLAVRQAPLIIPLKATST | 16,142 |
| | PVSIKQYPMSQEARLGIKPHIQRLLDQGILVPCQSPWNTPLLPVKKPGTNDYRPVQDLREVNKRVEDIH | |
| | PTVPNPYNLLSGLPPSHQWYTVLDLKDAFFCLRLHPTSQPLFAFEWRDPEMGISGQLTWTRLPQGFKNS | |
| | PTLFNEALHRDLADFRIQHPDLILLQYVDDLLLAATSELDCQQGTRALLQTLGNLGYRASAKKAQICQK | |
| | QVKYLGYLLKEGQRWLTEARKETVMGQPTPKTPRQLREFLGKAGFCRLFIPGFAEMAAPLYPLTKPGTL | |
| | FNWGPDQQKAYQEIKQALLTAPALGLPDLTKPFELFVDEKQGYAKGVLTQKLGPWRRPVAYLSKKLDPV | |
| | AAGWPPCLRMVAAIAVLTKDAGKLTMGQPLVILAPHAVEALVKQPPDRWLSNARMTHYQALLLDTDRVQ | |
| | FGPVVALNPATLLPLPEEGLQHNCLDILAEAHGTRPDLTDQPLPDADHTWYTDGSSLLQEGQRKAGAAV | |
| | TTETEVIWAKALPAGTSAQRAELIALTQALKMAEGKKLNVYTDSRYAFATAHIHGEIYRRRGWLTSEGK | |
| | EIKNKDEILALLKALFLPKRLSIIHCPGHQKGHSAEARGNRMADQAARKAAITETPDTSTLLGSSGGGE | |
| | AAAKMASNFTQFVLVDNGGTGDVTVAPSNFANGIAEWISSNSRSQAYKVTCSVRQSSAQNRKYTIKVEV | |
| | PKGAWRSYLNMELTIPIFATNSDCELIVKAMQGLLKDGNPIPSAIAANSGIYGGSGGSMASNFTQFVLV | |
| | DNGGTGDVTVAPSNFANGIAEWISSNSRSQAYKVTCSVRQSSAQNRKYTIKVEVPKGAWRSYLNMELTI | |
| | PIFATNSDCELIVKAMQGLLKDGNPIPSAIAANSGIYGSSGSSGSSGSSGSSGSSDKKYSIGLDIGTNS | |
| | VGWAVITDEYKVPSKKFKVLGNTDRHSIKKNLIGALLFDSGETAEATRLKRTARRRYTRRKNRICYLQE | |
| | IFSNEMAKVDDSFFHRLEESFLVEEDKKHERHPIFGNIVDEVAYHEKYPTIYHLRKKLVDSTDKADLRL | |
| | IYLALAHMIKFRGHFLIEGDLNPDNSDVDKLFIQLVQTYNQLFEENPINASGVDAKAILSARLSKSRRL | |
| | ENLIAQLPGEKKNGLFGNLIALSLGLTPNFKSNFDLAEDAKLQLSKDTYDDDLDNLLAQIGDQYADLFL | |
| | AAKNLSDAILLSDILRVNTEITKAPLSASMIKRYDEHHQDLTLLKALVRQQLPEKYKEIFFDQSKNGYA | |
| | GYIDGGASQEEFYKFIKPILEKMDGTEELLVKLNREDLLRKQRTFDNGSIPHQIHLGELHAILRRQEDF | |
| | YPFLKDNREKIEKILTFRIPYYVGPLARGNSRFAWMTRKSEETITPWNFEEVVDKGASAQSFIERMTNF | |
| | DKNLPNEKVLPKHSLLYEYFTVYNELTKVKYVTEGMRKPAFLSGEQKKAIVDLLFKTNRKVTVKQLKED | |
| | YFKKIECFDSVEISGVEDRFNASLGTYHDLLKIIKDKDFLDNEENEDILEDIVLTLTLFEDREMIEERL | |
| | KTYAHLFDDKVMKQLKRRRYTGWGRLSRKLINGIRDKQSGKTILDFLKSDGFANRNFMQLIHDDSLTFK | |
| | EDIQKAQVSGQGDSLHEHIANLAGSPAIKKGILQTVKVVDELVKVMGRHKPENIVIEMARENQTTQKGQ | |
| | KNSRERMKRIEEGIKELGSQILKEHPVENTQLQNEKLYLYYLQNGRDMYVDQELDINRLSDYDVDHIVP | |
| | QSFLKDDSIDNKVLTRSDKARGKSDNVPSEEVVKKMKNYWRQLLNAKLITQRKFDNLTKAERGGLSELD | |
| | KAGFIKRQLVETRQITKHVAQILDSRMNTKYDENDKLIREVKVITLKSKLVSDFRKDFQFYKVREINNY | |
| | HHAHDAYLNAVVGTALIKKYPKLESEFVYGDYKVYDVRKMIAKSEQEIGKATAKYFFYSNIMNFFKTEI | |
| | TLANGEIRKRPLIETNGETGEIVWDKGRDFATVRKVLSMPQVNIVKKTEVQTGGFSKESILPKRNSDKL | |
| | IARKKDWDPKKYGGFDSPTVAYSVLVVAKVEKGKSKKLKSVKELLGITIMERSSFEKNPIDFLEAKGYK | |
| | EVKKDLIIKLPKYSLFELENGRKRMLASAGELQKGNELALPSKYVNFLYLASHYEKLKGSPEDNEQKQL | |
| | FVEQHKHYLDEIIEQISEFSKRVILADANLDKVLSAYNKHRDKPIREQAENIIHLFTLTNLGAPAAFKY | |
| | FDTTIDRKRYTSTKEVLDATLIHQSITGLYETRIDLSQLGGDKRTADGSEFESPKKKAKVE | |
| PL12080 | MPAAKRVKLDGGTLNIEDEHRLHETSKEPDVSLGSTWLSDFPQAWAETGGMGLAVRQAPLIIPLKATST | 16,143 |
| | PVSIKQYPMSQEARLGIKPHIQRLLDQGILVPCQSPWNTPLLPVKKPGTNDYRPVQDLREVNKRVEDIH | |
| | PTVPNPYNLLSGLPPSHQWYTVLDLKDAFFCLRLHPTSQPLFAFEWRDPEMGISGQLTWTRLPQGFKNS | |
| | PTLFNEALHRDLADFRIQHPDLILLQYVDDLLLAATSELDCQQGTRALLQTLGNLGYRASAKKAQICQK | |
| | QVKYLGYLLKEGQRWLTEARKETVMGQPTPKTPRQLREFLGKAGFCRLFIPGFAEMAAPLYPLTKPGTL | |
| | FNWGPDQQKAYQEIKQALLTAPALGLPDLTKPFELFVDEKQGYAKGVLTQKLGPWRRPVAYLSKKLDPV | |
| | AAGWPPCLRMVAAIAVLTKDAGKLTMGQPLVILAPHAVEALVKQPPDRWLSNARMTHYQALLLDTDRVQ | |
| | FGPVVALNPATLLPLPEEGLQHNCLDILAEAHGTRPDLTDQPLPDADHTWYTDGSSLLQEGQRKAGAAV | |
| | TTETEVIWAKALPAGTSAQRAELIALTQALKMAEGKKLNVYTDSRYAFATAHIHGEIYRRRGWLTSEGK | |
| | EIKNKDEILALLKALFLPKRLSIIHCPGHQKGHSAEARGNRMADQAARKAAITETPDTSTLLGSSGGGE | |
| | AAAKMASNFTQFVLVDNGGTGDVTVAPSNFANGIAEWISSNSRSQAYKVTCSVRQSSAQNRKYTIKVEV | |
| | PKGAWRSYLNMELTIPIFATNSDCELIVKAMQGLLKDGNPIPSAIAANSGIYGGSGGSMASNFTQFVLV | |
| | DNGGTGDVTVAPSNFANGIAEWISSNSRSQAYKVTCSVRQSSAQNRKYTIKVEVPKGAWRSYLNMELTI | |
| | PIFATNSDCELIVKAMQGLLKDGNPIPSAIAANSGIYGSSGGGEAAAKDKKYSIGLDIGTNSVGWAVIT | |
| | DEYKVPSKKFKVLGNTDRHSIKKNLIGALLFDSGETAEATRLKRTARRRYTRRKNRICYLQEIFSNEMA | |
| | KVDDSFFHRLEESFLVEEDKKHERHPIFGNIVDEVAYHEKYPTIYHLRKKLVDSTDKADLRLIYLALAH | |
| | MIKFRGHFLIEGDLNPDNSDVDKLFIQLVQTYNQLFEENPINASGVDAKAILSARLSKSRRLENLIAQL | |
| | PGEKKNGLFGNLIALSLGLTPNFKSNFDLAEDAKLQLSKDTYDDDLDNLLAQIGDQYADLFLAAKNLSD | |
| | AILLSDILRVNTEITKAPLSASMIKRYDEHHQDLTLLKALVRQQLPEKYKEIFFDQSKNGYAGYIDGGA | |
| | SQEEFYKFIKPILEKMDGTEELLVKLNREDLLRKQRTFDNGSIPHQIHLGELHAILRRQEDFYPFLKDN | |
| | REKIEKILTFRIPYYVGPLARGNSRFAWMTRKSEETITPWNFEEVVDKGASAQSFIERMTNFDKNLPNE | |
| | KVLPKHSLLYEYFTVYNELTKVKYVTEGMRKPAFLSGEQKKAIVDLLFKTNRKVTVKQLKEDYFKKIEC | |
| | FDSVEISGVEDRFNASLGTYHDLLKIIKDKDFLDNEENEDILEDIVLTLTLFEDREMIEERLKTYAHLF | |
| | DDKVMKQLKRRRYTGWGRLSRKLINGIRDKQSGKTILDFLKSDGFANRNFMQLIHDDSLTFKEDIQKAQ | |
| | VSGQGDSLHEHIANLAGSPAIKKGILQTVKVVDELVKVMGRHKPENIVIEMARENQTTQKGQKNSRERM | |
| | KRIEEGIKELGSQILKEHPVENTQLQNEKLYLYYLQNGRDMYVDQELDINRLSDYDVDHIVPQSFLKDD | |
| | SIDNKVLTRSDKARGKSDNVPSEEVVKKMKNYWRQLLNAKLITQRKFDNLTKAERGGLSELDKAGFIKR | |
| | QLVETRQITKHVAQILDSRMNTKYDENDKLIREVKVITLKSKLVSDFRKDFQFYKVREINNYHHAHDAY | |
| | LNAVVGTALIKKYPKLESEFVYGDYKVYDVRKMIAKSEQEIGKATAKYFFYSNIMNFFKTEITLANGEI | |
| | RKRPLIETNGETGEIVWDKGRDFATVRKVLSMPQVNIVKKTEVQTGGFSKESILPKRNSDKLIARKKDW | |
| | DPKKYGGFDSPTVAYSVLVVAKVEKGKSKKLKSVKELLGITIMERSSFEKNPIDFLEAKGYKEVKKDLI | |
| | IKLPKYSLFELENGRKRMLASAGELQKGNELALPSKYVNFLYLASHYEKLKGSPEDNEQKQLFVEQHKH | |
| | YLDEIIEQISEFSKRVILADANLDKVLSAYNKHRDKPIREQAENIIHLFTLTNLGAPAAFKYFDTTIDR | |
| | KRYTSTKEVLDATLIHQSITGLYETRIDLSQLGGDKRTADGSEFESPKKKAKVE | |
| PL12081 | MPAAKRVKLDGGTLNIEDEHRLHETSKEPDVSLGSTWLSDFPQAWAETGGMGLAVRQAPLIIPLKATST | 16,144 |
| | PVSIKQYPMSQEARLGIKPHIQRLLDQGILVPCQSPWNTPLLPVKKPGTNDYRPVQDLREVNKRVEDIH | |
| | PTVPNPYNLLSGLPPSHQWYTVLDLKDAFFCLRLHPTSQPLFAFEWRDPEMGISGQLTWTRLPQGFKNS | |
| | PTLFNEALHRDLADFRIQHPDLILLQYVDDLLLAATSELDCQQGTRALLQTLGNLGYRASAKKAQICQK | |
| | QVKYLGYLLKEGQRWLTEARKETVMGQPTPKTPRQLREFLGKAGFCRLFIPGFAEMAAPLYPLTKPGTL | |
| | FNWGPDQQKAYQEIKQALLTAPALGLPDLTKPFELFVDEKQGYAKGVLTQKLGPWRRPVAYLSKKLDPV | |
| | AAGWPPCLRMVAAIAVLTKDAGKLTMGQPLVILAPHAVEALVKQPPDRWLSNARMTHYQALLLDTDRVQ | |
| | FGPVVALNPATLLPLPEEGLQHNCLDILAEAHGTRPDLTDQPLPDADHTWYTDGSSLLQEGQRKAGAAV | |
| | TTETEVIWAKALPAGTSAQRAELIALTQALKMAEGKKLNVYTDSRYAFATAHIHGEIYRRRGWLTSEGK | |
| | EIKNKDEILALLKALFLPKRLSIIHCPGHQKGHSAEARGNRMADQAARKAAITETPDTSTLLGSSGGGE | |
| | AAAKMASNFTQFVLVDNGGTGDVTVAPSNFANGIAEWISSNSRSQAYKVTCSVRQSSAQNRKYTIKVEV | |
| | PKGAWRSYLNMELTIPIFATNSDCELIVKAMQGLLKDGNPIPSAIAANSGIYGGSGGSMASNFTQFVLV | |
| | DNGGTGDVTVAPSNFANGIAEWISSNSRSQAYKVTCSVRQSSAQNRKYTIKVEVPKGAWRSYLNMELTI | |
| | PIFATNSDCELIVKAMQGLLKDGNPIPSAIAANSGIYGGGSGGGSGGGSGGGSMASNFTQFVLVDNGGT | |
| | GDVTVAPSNFANGIAEWISSNSRSQAYKVTCSVRQSSAQNRKYTIKVEVPKGAWRSYLNMELTIPIFAT | |
| | NSDCELIVKAMQGLLKDGNPIPSAIAANSGIYGGSGGSMASNFTQFVLVDNGGTGDVTVAPSNFANGIA | |
| | EWISSNSRSQAYKVTCSVRQSSAQNRKYTIKVEVPKGAWRSYLNMELTIPIFATNSDCELIVKAMQGLL | |
| | KDGNPIPSAIAANSGIYAEAAAKEAAAKEAAAKEAAAKALEAEAAAKEAAAKEAAAKEAAAKADKKYSI | |
| | GLDIGTNSVGWAVITDEYKVPSKKFKVLGNTDRHSIKKNLIGALLFDSGETAEATRLKRTARRRYTRRK | |
| | NRICYLQEIFSNEMAKVDDSFFHRLEESFLVEEDKKHERHPIFGNIVDEVAYHEKYPTIYHLRKKLVDS | |
| | TDKADLRLIYLALAHMIKFRGHFLIEGDLNPDNSDVDKLFIQLVQTYNQLFEENPINASGVDAKAILSA | |
| | RLSKSRRLENLIAQLPGEKKNGLFGNLIALSLGLTPNFKSNFDLAEDAKLQLSKDTYDDDLDNLLAQIG | |
| | DQYADLFLAAKNLSDAILLSDILRVNTEITKAPLSASMIKRYDEHHQDLTLLKALVRQQLPEKYKEIFF | |
| | DQSKNGYAGYIDGGASQEEFYKFIKPILEKMDGTEELLVKLNREDLLRKQRTFDNGSIPHQIHLGELHA | |
| | ILRRQEDFYPFLKDNREKIEKILTFRIPYYVGPLARGNSRFAWMTRKSEETITPWNFEEVVDKGASAQS | |
| | FIERMTNFDKNLPNEKVLPKHSLLYEYFTVYNELTKVKYVTEGMRKPAFLSGEQKKAIVDLLFKTNRKV | |
| | TVKQLKEDYFKKIECFDSVEISGVEDRFNASLGTYHDLLKIIKDKDFLDNEENEDILEDIVLTLTLFED | |
| | REMIEERLKTYAHLFDDKVMKQLKRRRYTGWGRLSRKLINGIRDKQSGKTILDFLKSDGFANRNFMQLI | |
| | HDDSLTFKEDIQKAQVSGQGDSLHEHIANLAGSPAIKKGILQTVKVVDELVKVMGRHKPENIVIEMARE | |
| | NQTTQKGQKNSRERMKRIEEGIKELGSQILKEHPVENTQLQNEKLYLYYLQNGRDMYVDQELDINRLSD | |
| | YDVDHIVPQSFLKDDSIDNKVLTRSDKARGKSDNVPSEEVVKKMKNYWRQLLNAKLITQRKFDNLTKAE | |
| | RGGLSELDKAGFIKRQLVETRQITKHVAQILDSRMNTKYDENDKLIREVKVITLKSKLVSDFRKDFQFY | |
| | KVREINNYHHAHDAYLNAVVGTALIKKYPKLESEFVYGDYKVYDVRKMIAKSEQEIGKATAKYFFYSNI | |
| | MNFFKTEITLANGEIRKRPLIETNGETGEIVWDKGRDFATVRKVLSMPQVNIVKKTEVQTGGFSKESIL | |
| | PKRNSDKLIARKKDWDPKKYGGFDSPTVAYSVLVVAKVEKGKSKKLKSVKELLGITIMERSSFEKNPID | |
| | FLEAKGYKEVKKDLIIKLPKYSLFELENGRKRMLASAGELQKGNELALPSKYVNFLYLASHYEKLKGSP | |
| | EDNEQKQLFVEQHKHYLDEIIEQISEFSKRVILADANLDKVLSAYNKHRDKPIREQAENIIHLFTLTNL | |
| | GAPAAFKYFDTTIDRKRYTSTKEVLDATLIHQSITGLYETRIDLSQLGGDKRTADGSEFESPKKKAKVE | |
| PL12082 | MPAAKRVKLDGGTLNIEDEHRLHETSKEPDVSLGSTWLSDFPQAWAETGGMGLAVRQAPLIIPLKATST | 16,145 |
| | PVSIKQYPMSQEARLGIKPHIQRLLDQGILVPCQSPWNTPLLPVKKPGTNDYRPVQDLREVNKRVEDIH | |
| | PTVPNPYNLLSGLPPSHQWYTVLDLKDAFFCLRLHPTSQPLFAFEWRDPEMGISGQLTWTRLPQGFKNS | |
| | PTLFNEALHRDLADFRIQHPDLILLQYVDDLLLAATSELDCQQGTRALLQTLGNLGYRASAKKAQICQK | |
| | QVKYLGYLLKEGQRWLTEARKETVMGQPTPKTPRQLREFLGKAGFCRLFIPGFAEMAAPLYPLTKPGTL | |
| | FNWGPDQQKAYQEIKQALLTAPALGLPDLTKPFELFVDEKQGYAKGVLTQKLGPWRRPVAYLSKKLDPV | |
| | AAGWPPCLRMVAAIAVLTKDAGKLTMGQPLVILAPHAVEALVKQPPDRWLSNARMTHYQALLLDTDRVQ | |
| | FGPVVALNPATLLPLPEEGLQHNCLDILAEAHGTRPDLTDQPLPDADHTWYTDGSSLLQEGQRKAGAAV | |
| | TTETEVIWAKALPAGTSAQRAELIALTQALKMAEGKKLNVYTDSRYAFATAHIHGEIYRRRGWLTSEGK | |
| | EIKNKDEILALLKALFLPKRLSIIHCPGHQKGHSAEARGNRMADQAARKAAITETPDTSTLLGSSGGGE | |
| | AAAKMASNFTQFVLVDNGGTGDVTVAPSNFANGIAEWISSNSRSQAYKVTCSVRQSSAQNRKYTIKVEV | |
| | PKGAWRSYLNMELTIPIFATNSDCELIVKAMQGLLKDGNPIPSAIAANSGIYGGSGGSMASNFTQFVLV | |
| | DNGGTGDVTVAPSNFANGIAEWISSNSRSQAYKVTCSVRQSSAQNRKYTIKVEVPKGAWRSYLNMELTI | |
| | PIFATNSDCELIVKAMQGLLKDGNPIPSAIAANSGIYGGGSGGGSGGGSGGGSMASNFTQFVLVDNGGT | |
| | GDVTVAPSNFANGIAEWISSNSRSQAYKVTCSVRQSSAQNRKYTIKVEVPKGAWRSYLNMELTIPIFAT | |
| | NSDCELIVKAMQGLLKDGNPIPSAIAANSGIYGGSGGSMASNFTQFVLVDNGGTGDVTVAPSNFANGIA | |
| | EWISSNSRSQAYKVTCSVRQSSAQNRKYTIKVEVPKGAWRSYLNMELTIPIFATNSDCELIVKAMQGLL | |
| | KDGNPIPSAIAANSGIYSGGSSGGSSGSETPGTSESATPESSGGSSGGSSDKKYSIGLDIGTNSVGWAV | |
| | ITDEYKVPSKKFKVLGNTDRHSIKKNLIGALLFDSGETAEATRLKRTARRRYTRRKNRICYLQEIFSNE | |
| | MAKVDDSFFHRLEESFLVEEDKKHERHPIFGNIVDEVAYHEKYPTIYHLRKKLVDSTDKADLRLIYLAL | |
| | AHMIKFRGHFLIEGDLNPDNSDVDKLFIQLVQTYNQLFEENPINASGVDAKAILSARLSKSRRLENLIA | |
| | QLPGEKKNGLFGNLIALSLGLTPNFKSNFDLAEDAKLQLSKDTYDDDLDNLLAQIGDQYADLFLAAKNL | |
| | SDAILLSDILRVNTEITKAPLSASMIKRYDEHHQDLTLLKALVRQQLPEKYKEIFFDQSKNGYAGYIDG | |
| | GASQEEFYKFIKPILEKMDGTEELLVKLNREDLLRKQRTFDNGSIPHQIHLGELHAILRRQEDFYPFLK | |
| | DNREKIEKILTFRIPYYVGPLARGNSRFAWMTRKSEETITPWNFEEVVDKGASAQSFIERMTNFDKNLP | |
| | NEKVLPKHSLLYEYFTVYNELTKVKYVTEGMRKPAFLSGEQKKAIVDLLFKTNRKVTVKQLKEDYFKKI | |
| | ECFDSVEISGVEDRFNASLGTYHDLLKIIKDKDFLDNEENEDILEDIVLTLTLFEDREMIEERLKTYAH | |
| | LFDDKVMKQLKRRRYTGWGRLSRKLINGIRDKQSGKTILDFLKSDGFANRNFMQLIHDDSLTFKEDIQK | |
| | AQVSGQGDSLHEHIANLAGSPAIKKGILQTVKVVDELVKVMGRHKPENIVIEMARENQTTQKGQKNSRE | |
| | RMKRIEEGIKELGSQILKEHPVENTQLQNEKLYLYYLQNGRDMYVDQELDINRLSDYDVDHIVPQSFLK | |
| | DDSIDNKVLTRSDKARGKSDNVPSEEVVKKMKNYWRQLLNAKLITQRKFDNLTKAERGGLSELDKAGFI | |
| | KRQLVETRQITKHVAQILDSRMNTKYDENDKLIREVKVITLKSKLVSDFRKDFQFYKVREINNYHHAHD | |
| | AYLNAVVGTALIKKYPKLESEFVYGDYKVYDVRKMIAKSEQEIGKATAKYFFYSNIMNFFKTEITLANG | |
| | EIRKRPLIETNGETGEIVWDKGRDFATVRKVLSMPQVNIVKKTEVQTGGFSKESILPKRNSDKLIARKK | |
| | DWDPKKYGGFDSPTVAYSVLVVAKVEKGKSKKLKSVKELLGITIMERSSFEKNPIDFLEAKGYKEVKKD | |
| | LIIKLPKYSLFELENGRKRMLASAGELQKGNELALPSKYVNFLYLASHYEKLKGSPEDNEQKQLFVEQH | |
| | KHYLDEIIEQISEFSKRVILADANLDKVLSAYNKHRDKPIREQAENIIHLFTLTNLGAPAAFKYFDTTI | |
| | DRKRYTSTKEVLDATLIHQSITGLYETRIDLSQLGGDKRTADGSEFESPKKKAKVE | |
| PL12083 | MPAAKRVKLDGGTLNIEDEHRLHETSKEPDVSLGSTWLSDFPQAWAETGGMGLAVRQAPLIIPLKATST | 16,146 |
| | PVSIKQYPMSQEARLGIKPHIQRLLDQGILVPCQSPWNTPLLPVKKPGTNDYRPVQDLREVNKRVEDIH | |
| | PTVPNPYNLLSGLPPSHQWYTVLDLKDAFFCLRLHPTSQPLFAFEWRDPEMGISGQLTWTRLPQGFKNS | |
| | PTLFNEALHRDLADFRIQHPDLILLQYVDDLLLAATSELDCQQGTRALLQTLGNLGYRASAKKAQICQK | |
| | QVKYLGYLLKEGQRWLTEARKETVMGQPTPKTPRQLREFLGKAGFCRLFIPGFAEMAAPLYPLTKPGTL | |
| | FNWGPDQQKAYQEIKQALLTAPALGLPDLTKPFELFVDEKQGYAKGVLTQKLGPWRRPVAYLSKKLDPV | |
| | AAGWPPCLRMVAAIAVLTKDAGKLTMGQPLVILAPHAVEALVKQPPDRWLSNARMTHYQALLLDTDRVQ | |
| | FGPVVALNPATLLPLPEEGLQHNCLDILAEAHGTRPDLTDQPLPDADHTWYTDGSSLLQEGQRKAGAAV | |
| | TTETEVIWAKALPAGTSAQRAELIALTQALKMAEGKKLNVYTDSRYAFATAHIHGEIYRRRGWLTSEGK | |
| | EIKNKDEILALLKALFLPKRLSIIHCPGHQKGHSAEARGNRMADQAARKAAITETPDTSTLLGSSGGGE | |
| | AAAKMASNFTQFVLVDNGGTGDVTVAPSNFANGIAEWISSNSRSQAYKVTCSVRQSSAQNRKYTIKVEV | |
| | PKGAWRSYLNMELTIPIFATNSDCELIVKAMQGLLKDGNPIPSAIAANSGIYGGSGGSMASNFTQFVLV | |
| | DNGGTGDVTVAPSNFANGIAEWISSNSRSQAYKVTCSVRQSSAQNRKYTIKVEVPKGAWRSYLNMELTI | |
| | PIFATNSDCELIVKAMQGLLKDGNPIPSAIAANSGIYGGGSGGGSGGGSGGGSMASNFTQFVLVDNGGT | |
| | GDVTVAPSNFANGIAEWISSNSRSQAYKVTCSVRQSSAQNRKYTIKVEVPKGAWRSYLNMELTIPIFAT | |
| | NSDCELIVKAMQGLLKDGNPIPSAIAANSGIYGGSGGSMASNFTQFVLVDNGGTGDVTVAPSNFANGIA | |
| | EWISSNSRSQAYKVTCSVRQSSAQNRKYTIKVEVPKGAWRSYLNMELTIPIFATNSDCELIVKAMQGLL | |
| | KDGNPIPSAIAANSGIYGSSGSSGSSGSSGSSGSSDKKYSIGLDIGTNSVGWAVITDEYKVPSKKFKVL | |
| | GNTDRHSIKKNLIGALLFDSGETAEATRLKRTARRRYTRRKNRICYLQEIFSNEMAKVDDSFFHRLEES | |
| | FLVEEDKKHERHPIFGNIVDEVAYHEKYPTIYHLRKKLVDSTDKADLRLIYLALAHMIKFRGHFLIEGD | |
| | LNPDNSDVDKLFIQLVQTYNQLFEENPINASGVDAKAILSARLSKSRRLENLIAQLPGEKKNGLFGNLI | |
| | ALSLGLTPNFKSNFDLAEDAKLQLSKDTYDDDLDNLLAQIGDQYADLFLAAKNLSDAILLSDILRVNTE | |
| | ITKAPLSASMIKRYDEHHQDLTLLKALVRQQLPEKYKEIFFDQSKNGYAGYIDGGASQEEFYKFIKPIL | |
| | EKMDGTEELLVKLNREDLLRKQRTFDNGSIPHQIHLGELHAILRRQEDFYPFLKDNREKIEKILTFRIP | |
| | YYVGPLARGNSRFAWMTRKSEETITPWNFEEVVDKGASAQSFIERMTNFDKNLPNEKVLPKHSLLYEYF | |
| | TVYNELTKVKYVTEGMRKPAFLSGEQKKAIVDLLFKTNRKVTVKQLKEDYFKKIECFDSVEISGVEDRF | |
| | NASLGTYHDLLKIIKDKDFLDNEENEDILEDIVLTLTLFEDREMIEERLKTYAHLFDDKVMKQLKRRRY | |
| | TGWGRLSRKLINGIRDKQSGKTILDFLKSDGFANRNFMQLIHDDSLTFKEDIQKAQVSGQGDSLHEHIA | |
| | NLAGSPAIKKGILQTVKVVDELVKVMGRHKPENIVIEMARENQTTQKGQKNSRERMKRIEEGIKELGSQ | |
| | ILKEHPVENTQLQNEKLYLYYLQNGRDMYVDQELDINRLSDYDVDHIVPQSFLKDDSIDNKVLTRSDKA | |
| | RGKSDNVPSEEVVKKMKNYWRQLLNAKLITQRKFDNLTKAERGGLSELDKAGFIKRQLVETRQITKHVA | |
| | QILDSRMNTKYDENDKLIREVKVITLKSKLVSDFRKDFQFYKVREINNYHHAHDAYLNAVVGTALIKKY | |
| | PKLESEFVYGDYKVYDVRKMIAKSEQEIGKATAKYFFYSNIMNFFKTEITLANGEIRKRPLIETNGETG | |
| | EIVWDKGRDFATVRKVLSMPQVNIVKKTEVQTGGFSKESILPKRNSDKLIARKKDWDPKKYGGFDSPTV | |
| | AYSVLVVAKVEKGKSKKLKSVKELLGITIMERSSFEKNPIDFLEAKGYKEVKKDLIIKLPKYSLFELEN | |
| | GRKRMLASAGELQKGNELALPSKYVNFLYLASHYEKLKGSPEDNEQKQLFVEQHKHYLDEIIEQISEFS | |
| | KRVILADANLDKVLSAYNKHRDKPIREQAENIIHLFTLTNLGAPAAFKYFDTTIDRKRYTSTKEVLDAT | |
| | LIHQSITGLYETRIDLSQLGGDKRTADGSEFESPKKKAKVE | |
| PL12084 | MPAAKRVKLDGGTLNIEDEHRLHETSKEPDVSLGSTWLSDFPQAWAETGGMGLAVRQAPLIIPLKATST | 16,147 |
| | PVSIKQYPMSQEARLGIKPHIQRLLDQGILVPCQSPWNTPLLPVKKPGTNDYRPVQDLREVNKRVEDIH | |
| | PTVPNPYNLLSGLPPSHQWYTVLDLKDAFFCLRLHPTSQPLFAFEWRDPEMGISGQLTWTRLPQGFKNS | |
| | PTLFNEALHRDLADFRIQHPDLILLQYVDDLLLAATSELDCQQGTRALLQTLGNLGYRASAKKAQICQK | |
| | QVKYLGYLLKEGQRWLTEARKETVMGQPTPKTPRQLREFLGKAGFCRLFIPGFAEMAAPLYPLTKPGTL | |
| | FNWGPDQQKAYQEIKQALLTAPALGLPDLTKPFELFVDEKQGYAKGVLTQKLGPWRRPVAYLSKKLDPV | |
| | AAGWPPCLRMVAAIAVLTKDAGKLTMGQPLVILAPHAVEALVKQPPDRWLSNARMTHYQALLLDTDRVQ | |
| | FGPVVALNPATLLPLPEEGLQHNCLDILAEAHGTRPDLTDQPLPDADHTWYTDGSSLLQEGQRKAGAAV | |
| | TTETEVIWAKALPAGTSAQRAELIALTQALKMAEGKKLNVYTDSRYAFATAHIHGEIYRRRGWLTSEGK | |
| | EIKNKDEILALLKALFLPKRLSIIHCPGHQKGHSAEARGNRMADQAARKAAITETPDTSTLLGSSGGGE | |
| | AAAKMASNFTQFVLVDNGGTGDVTVAPSNFANGIAEWISSNSRSQAYKVTCSVRQSSAQNRKYTIKVEV | |
| | PKGAWRSYLNMELTIPIFATNSDCELIVKAMQGLLKDGNPIPSAIAANSGIYGGSGGSMASNFTQFVLV | |
| | DNGGTGDVTVAPSNFANGIAEWISSNSRSQAYKVTCSVRQSSAQNRKYTIKVEVPKGAWRSYLNMELTI | |
| | PIFATNSDCELIVKAMQGLLKDGNPIPSAIAANSGIYGGGSGGGSGGGSGGGSMASNFTQFVLVDNGGT | |
| | GDVTVAPSNFANGIAEWISSNSRSQAYKVTCSVRQSSAQNRKYTIKVEVPKGAWRSYLNMELTIPIFAT | |
| | NSDCELIVKAMQGLLKDGNPIPSAIAANSGIYGGSGGSMASNFTQFVLVDNGGTGDVTVAPSNFANGIA | |
| | EWISSNSRSQAYKVTCSVRQSSAQNRKYTIKVEVPKGAWRSYLNMELTIPIFATNSDCELIVKAMQGLL | |
| | KDGNPIPSAIAANSGIYGSSGGGEAAAKDKKYSIGLDIGTNSVGWAVITDEYKVPSKKFKVLGNTDRHS | |
| | IKKNLIGALLFDSGETAEATRLKRTARRRYTRRKNRICYLQEIFSNEMAKVDDSFFHRLEESFLVEEDK | |
| | KHERHPIFGNIVDEVAYHEKYPTIYHLRKKLVDSTDKADLRLIYLALAHMIKFRGHFLIEGDLNPDNSD | |
| | VDKLFIQLVQTYNQLFEENPINASGVDAKAILSARLSKSRRLENLIAQLPGEKKNGLFGNLIALSLGLT | |
| | PNFKSNFDLAEDAKLQLSKDTYDDDLDNLLAQIGDQYADLFLAAKNLSDAILLSDILRVNTEITKAPLS | |
| | ASMIKRYDEHHQDLTLLKALVRQQLPEKYKEIFFDQSKNGYAGYIDGGASQEEFYKFIKPILEKMDGTE | |
| | ELLVKLNREDLLRKQRTFDNGSIPHQIHLGELHAILRRQEDFYPFLKDNREKIEKILTFRIPYYVGPLA | |
| | RGNSRFAWMTRKSEETITPWNFEEVVDKGASAQSFIERMTNFDKNLPNEKVLPKHSLLYEYFTVYNELT | |
| | KVKYVTEGMRKPAFLSGEQKKAIVDLLFKTNRKVTVKQLKEDYFKKIECFDSVEISGVEDRFNASLGTY | |
| | HDLLKIIKDKDFLDNEENEDILEDIVLTLTLFEDREMIEERLKTYAHLFDDKVMKQLKRRRYTGWGRLS | |
| | RKLINGIRDKQSGKTILDFLKSDGFANRNFMQLIHDDSLTFKEDIQKAQVSGQGDSLHEHIANLAGSPA | |
| | IKKGILQTVKVVDELVKVMGRHKPENIVIEMARENQTTQKGQKNSRERMKRIEEGIKELGSQILKEHPV | |
| | ENTQLQNEKLYLYYLQNGRDMYVDQELDINRLSDYDVDHIVPQSFLKDDSIDNKVLTRSDKARGKSDNV | |
| | PSEEVVKKMKNYWRQLLNAKLITQRKFDNLTKAERGGLSELDKAGFIKRQLVETRQITKHVAQILDSRM | |
| | NTKYDENDKLIREVKVITLKSKLVSDFRKDFQFYKVREINNYHHAHDAYLNAVVGTALIKKYPKLESEF | |
| | VYGDYKVYDVRKMIAKSEQEIGKATAKYFFYSNIMNFFKTEITLANGEIRKRPLIETNGETGEIVWDKG | |
| | RDFATVRKVLSMPQVNIVKKTEVQTGGFSKESILPKRNSDKLIARKKDWDPKKYGGFDSPTVAYSVLVV | |
| | AKVEKGKSKKLKSVKELLGITIMERSSFEKNPIDFLEAKGYKEVKKDLIIKLPKYSLFELENGRKRMLA | |
| | SAGELQKGNELALPSKYVNFLYLASHYEKLKGSPEDNEQKQLFVEQHKHYLDEIIEQISEFSKRVILAD | |
| | ANLDKVLSAYNKHRDKPIREQAENIIHLFTLTNLGAPAAFKYFDTTIDRKRYTSTKEVLDATLIHQSIT | |
| | GLYETRIDLSQLGGDKRTADGSEFESPKKKAKVE | |
| PL12109/ | MPAAKRVKLDGGTAPLEEEYRLFLEAPIQNVTLLEQWKREIPKVWAEINPPGLASTQAPIHVQLLSTAL | 16,148 |
| PL24684 | PVRVRQYPITLEAKRSLRETIRKFRAAGILRPVHSPWNTPLLPVRKSGTSEYRMVQDLREVNKRVETIH | |
| | PTVPNPYTLLSLLPPDRIWYSVLDLKDAFFCIPLAPESQLIFAFEWADAEEGESGQLTWTRLPQGFKNS | |
| | PTLFNEALNRDLQGFRLDHPSVSLLQYVDDLLIAADTQAACLSATRDLLMTLAELGYRVSGKKAQLCQE | |
| | EVTYLGFKIHKGSRSLSNSRTQAILQIPVPKTKRQVREFLGKIGYCRLFIPGFAELAQPLYAATRPGND | |
| | PLVWGEKEEEAFQSLKLALTQPPALALPSLDKPFQLFVEETSGAAKGVLTQALGPWKRPVAYLSKRLDP | |
| | VAAGWPRCLRAIAAAALLTREASKLTFGQDIEITSSHNLESLLRSPPDKWLTNARITQYQVLLLDPPRV | |
| | RFKQTAALNPATLLPETDDTLPIHHCLDTLDSLTSTRPDLTDQPLAQAEATLFTDGSSYIRDGKRYAGA | |
| | AVVTLDSVIWAEPLPIGTSAQKAELIALTKALEWSKDKSVNIYTDSRYAFATLHVHGMIYRERGWLTAG | |
| | GKAIKNAPEILALLTAVWLPKRVAVMHCKGHQKDDAPTSTGNRRADEVAREVAIRPLSTQATISAEAAA | |
| | KEAAAKEAAAKEAAAKALEAEAAAKEAAAKEAAAKEAAAKAMASNFTQFVLVDNGGTGDVTVAPSNFAN | |
| | GIAEWISSNSRSQAYKVTCSVRQSSAQNRKYTIKVEVPKGAWRSYLNMELTIPIFATNSDCELIVKAMQ | |
| | GLLKDGNPIPSAIAANSGIYAEAAAKEAAAKEAAAKEAAAKALEAEAAAKEAAAKEAAAKEAAAKADKK | |
| | YSIGLDIGTNSVGWAVITDEYKVPSKKFKVLGNTDRHSIKKNLIGALLFDSGETAEATRLKRTARRRYT | |
| | RRKNRICYLQEIFSNEMAKVDDSFFHRLEESFLVEEDKKHERHPIFGNIVDEVAYHEKYPTIYHLRKKL | |
| | VDSTDKADLRLIYLALAHMIKFRGHFLIEGDLNPDNSDVDKLFIQLVQTYNQLFEENPINASGVDAKAI | |
| | LSARLSKSRRLENLIAQLPGEKKNGLFGNLIALSLGLTPNFKSNFDLAEDAKLQLSKDTYDDDLDNLLA | |
| | QIGDQYADLFLAAKNLSDAILLSDILRVNTEITKAPLSASMIKRYDEHHQDLTLLKALVRQQLPEKYKE | |
| | IFFDQSKNGYAGYIDGGASQEEFYKFIKPILEKMDGTEELLVKLNREDLLRKQRTFDNGSIPHQIHLGE | |
| | LHAILRRQEDFYPFLKDNREKIEKILTFRIPYYVGPLARGNSRFAWMTRKSEETITPWNFEEVVDKGAS | |
| | AQSFIERMTNFDKNLPNEKVLPKHSLLYEYFTVYNELTKVKYVTEGMRKPAFLSGEQKKAIVDLLFKTN | |
| | RKVTVKQLKEDYFKKIECFDSVEISGVEDRFNASLGTYHDLLKIIKDKDFLDNEENEDILEDIVLTLTL | |
| | FEDREMIEERLKTYAHLFDDKVMKQLKRRRYTGWGRLSRKLINGIRDKQSGKTILDFLKSDGFANRNFM | |
| | QLIHDDSLTFKEDIQKAQVSGQGDSLHEHIANLAGSPAIKKGILQTVKVVDELVKVMGRHKPENIVIEM | |
| | ARENQTTQKGQKNSRERMKRIEEGIKELGSQILKEHPVENTQLQNEKLYLYYLQNGRDMYVDQELDINR | |
| | LSDYDVDHIVPQSFLKDDSIDNKVLTRSDKARGKSDNVPSEEVVKKMKNYWRQLLNAKLITQRKFDNLT | |
| | KAERGGLSELDKAGFIKRQLVETRQITKHVAQILDSRMNTKYDENDKLIREVKVITLKSKLVSDFRKDF | |
| | QFYKVREINNYHHAHDAYLNAVVGTALIKKYPKLESEFVYGDYKVYDVRKMIAKSEQEIGKATAKYFFY | |
| | SNIMNFFKTEITLANGEIRKRPLIETNGETGEIVWDKGRDFATVRKVLSMPQVNIVKKTEVQTGGFSKE | |
| | SILPKRNSDKLIARKKDWDPKKYGGFDSPTVAYSVLVVAKVEKGKSKKLKSVKELLGITIMERSSFEKN | |
| | PIDFLEAKGYKEVKKDLIIKLPKYSLFELENGRKRMLASAGELQKGNELALPSKYVNFLYLASHYEKLK | |
| | GSPEDNEQKQLFVEQHKHYLDEIIEQISEFSKRVILADANLDKVLSAYNKHRDKPIREQAENIIHLFTL | |
| | TNLGAPAAFKYFDTTIDRKRYTSTKEVLDATLIHQSITGLYETRIDLSQLGGDKRTADGSEFESPKKKA | |
| | KVE | |
| PL12110 | MPAAKRVKLDGGTAPLEEEYRLFLEAPIQNVTLLEQWKREIPKVWAEINPPGLASTQAPIHVQLLSTAL | 16,149 |
| | PVRVRQYPITLEAKRSLRETIRKFRAAGILRPVHSPWNTPLLPVRKSGTSEYRMVQDLREVNKRVETIH | |
| | PTVPNPYTLLSLLPPDRIWYSVLDLKDAFFCIPLAPESQLIFAFEWADAEEGESGQLTWTRLPQGFKNS | |
| | PTLFNEALNRDLQGFRLDHPSVSLLQYVDDLLIAADTQAACLSATRDLLMTLAELGYRVSGKKAQLCQE | |
| | EVTYLGFKIHKGSRSLSNSRTQAILQIPVPKTKRQVREFLGKIGYCRLFIPGFAELAQPLYAATRPGND | |
| | PLVWGEKEEEAFQSLKLALTQPPALALPSLDKPFQLFVEETSGAAKGVLTQALGPWKRPVAYLSKRLDP | |
| | VAAGWPRCLRAIAAAALLTREASKLTFGQDIEITSSHNLESLLRSPPDKWLTNARITQYQVLLLDPPRV | |
| | RFKQTAALNPATLLPETDDTLPIHHCLDTLDSLTSTRPDLTDQPLAQAEATLFTDGSSYIRDGKRYAGA | |
| | AVVTLDSVIWAEPLPIGTSAQKAELIALTKALEWSKDKSVNIYTDSRYAFATLHVHGMIYRERGWLTAG | |
| | GKAIKNAPEILALLTAVWLPKRVAVMHCKGHQKDDAPTSTGNRRADEVAREVAIRPLSTQATISAEAAA | |
| | KEAAAKEAAAKEAAAKALEAEAAAKEAAAKEAAAKEAAAKAMASNFTQFVLVDNGGTGDVTVAPSNFAN | |
| | GIAEWISSNSRSQAYKVTCSVRQSSAQNRKYTIKVEVPKGAWRSYLNMELTIPIFATNSDCELIVKAMQ | |
| | GLLKDGNPIPSAIAANSGIYSGGSSGGSSGSETPGTSESATPESSGGSSGGSSDKKYSIGLDIGTNSVG | |
| | WAVITDEYKVPSKKFKVLGNTDRHSIKKNLIGALLFDSGETAEATRLKRTARRRYTRRKNRICYLQEIF | |
| | SNEMAKVDDSFFHRLEESFLVEEDKKHERHPIFGNIVDEVAYHEKYPTIYHLRKKLVDSTDKADLRLIY | |
| | LALAHMIKFRGHFLIEGDLNPDNSDVDKLFIQLVQTYNQLFEENPINASGVDAKAILSARLSKSRRLEN | |
| | LIAQLPGEKKNGLFGNLIALSLGLTPNFKSNFDLAEDAKLQLSKDTYDDDLDNLLAQIGDQYADLFLAA | |
| | KNLSDAILLSDILRVNTEITKAPLSASMIKRYDEHHQDLTLLKALVRQQLPEKYKEIFFDQSKNGYAGY | |
| | IDGGASQEEFYKFIKPILEKMDGTEELLVKLNREDLLRKQRTFDNGSIPHQIHLGELHAILRRQEDFYP | |
| | FLKDNREKIEKILTFRIPYYVGPLARGNSRFAWMTRKSEETITPWNFEEVVDKGASAQSFIERMTNFDK | |
| | NLPNEKVLPKHSLLYEYFTVYNELTKVKYVTEGMRKPAFLSGEQKKAIVDLLFKTNRKVTVKQLKEDYF | |
| | KKIECFDSVEISGVEDRFNASLGTYHDLLKIIKDKDFLDNEENEDILEDIVLTLTLFEDREMIEERLKT | |
| | YAHLFDDKVMKQLKRRRYTGWGRLSRKLINGIRDKQSGKTILDFLKSDGFANRNFMQLIHDDSLTFKED | |
| | IQKAQVSGQGDSLHEHIANLAGSPAIKKGILQTVKVVDELVKVMGRHKPENIVIEMARENQTTQKGQKN | |
| | SRERMKRIEEGIKELGSQILKEHPVENTQLQNEKLYLYYLQNGRDMYVDQELDINRLSDYDVDHIVPQS | |
| | FLKDDSIDNKVLTRSDKARGKSDNVPSEEVVKKMKNYWRQLLNAKLITQRKFDNLTKAERGGLSELDKA | |
| | GFIKRQLVETRQITKHVAQILDSRMNTKYDENDKLIREVKVITLKSKLVSDFRKDFQFYKVREINNYHH | |
| | AHDAYLNAVVGTALIKKYPKLESEFVYGDYKVYDVRKMIAKSEQEIGKATAKYFFYSNIMNFFKTEITL | |
| | ANGEIRKRPLIETNGETGEIVWDKGRDFATVRKVLSMPQVNIVKKTEVQTGGFSKESILPKRNSDKLIA | |
| | RKKDWDPKKYGGFDSPTVAYSVLVVAKVEKGKSKKLKSVKELLGITIMERSSFEKNPIDFLEAKGYKEV | |
| | KKDLIIKLPKYSLFELENGRKRMLASAGELQKGNELALPSKYVNFLYLASHYEKLKGSPEDNEQKQLFV | |
| | EQHKHYLDEIIEQISEFSKRVILADANLDKVLSAYNKHRDKPIREQAENIIHLFTLTNLGAPAAFKYFD | |
| | TTIDRKRYTSTKEVLDATLIHQSITGLYETRIDLSQLGGDKRTADGSEFESPKKKAKVE | |
| PL12111 | MPAAKRVKLDGGTAPLEEEYRLFLEAPIQNVTLLEQWKREIPKVWAEINPPGLASTQAPIHVQLLSTAL | 16,150 |
| | PVRVRQYPITLEAKRSLRETIRKFRAAGILRPVHSPWNTPLLPVRKSGTSEYRMVQDLREVNKRVETIH | |
| | PTVPNPYTLLSLLPPDRIWYSVLDLKDAFFCIPLAPESQLIFAFEWADAEEGESGQLTWTRLPQGFKNS | |
| | PTLFNEALNRDLQGFRLDHPSVSLLQYVDDLLIAADTQAACLSATRDLLMTLAELGYRVSGKKAQLCQE | |
| | EVTYLGFKIHKGSRSLSNSRTQAILQIPVPKTKRQVREFLGKIGYCRLFIPGFAELAQPLYAATRPGND | |
| | PLVWGEKEEEAFQSLKLALTQPPALALPSLDKPFQLFVEETSGAAKGVLTQALGPWKRPVAYLSKRLDP | |
| | VAAGWPRCLRAIAAAALLTREASKLTFGQDIEITSSHNLESLLRSPPDKWLTNARITQYQVLLLDPPRV | |
| | RFKQTAALNPATLLPETDDTLPIHHCLDTLDSLTSTRPDLTDQPLAQAEATLFTDGSSYIRDGKRYAGA | |
| | AVVTLDSVIWAEPLPIGTSAQKAELIALTKALEWSKDKSVNIYTDSRYAFATLHVHGMIYRERGWLTAG | |
| | GKAIKNAPEILALLTAVWLPKRVAVMHCKGHQKDDAPTSTGNRRADEVAREVAIRPLSTQATISAEAAA | |
| | KEAAAKEAAAKEAAAKALEAEAAAKEAAAKEAAAKEAAAKAMASNFTQFVLVDNGGTGDVTVAPSNFAN | |
| | GIAEWISSNSRSQAYKVTCSVRQSSAQNRKYTIKVEVPKGAWRSYLNMELTIPIFATNSDCELIVKAMQ | |
| | GLLKDGNPIPSAIAANSGIYGSSGSSGSSGSSGSSGSSDKKYSIGLDIGTNSVGWAVITDEYKVPSKKF | |
| | KVLGNTDRHSIKKNLIGALLFDSGETAEATRLKRTARRRYTRRKNRICYLQEIFSNEMAKVDDSFFHRL | |
| | EESFLVEEDKKHERHPIFGNIVDEVAYHEKYPTIYHLRKKLVDSTDKADLRLIYLALAHMIKFRGHFLI | |
| | EGDLNPDNSDVDKLFIQLVQTYNQLFEENPINASGVDAKAILSARLSKSRRLENLIAQLPGEKKNGLFG | |
| | NLIALSLGLTPNFKSNFDLAEDAKLQLSKDTYDDDLDNLLAQIGDQYADLFLAAKNLSDAILLSDILRV | |
| | NTEITKAPLSASMIKRYDEHHQDLTLLKALVRQQLPEKYKEIFFDQSKNGYAGYIDGGASQEEFYKFIK | |
| | PILEKMDGTEELLVKLNREDLLRKQRTFDNGSIPHQIHLGELHAILRRQEDFYPFLKDNREKIEKILTF | |
| | RIPYYVGPLARGNSRFAWMTRKSEETITPWNFEEVVDKGASAQSFIERMTNFDKNLPNEKVLPKHSLLY | |
| | EYFTVYNELTKVKYVTEGMRKPAFLSGEQKKAIVDLLFKTNRKVTVKQLKEDYFKKIECFDSVEISGVE | |
| | DRFNASLGTYHDLLKIIKDKDFLDNEENEDILEDIVLTLTLFEDREMIEERLKTYAHLFDDKVMKQLKR | |
| | RRYTGWGRLSRKLINGIRDKQSGKTILDFLKSDGFANRNFMQLIHDDSLTFKEDIQKAQVSGQGDSLHE | |
| | HIANLAGSPAIKKGILQTVKVVDELVKVMGRHKPENIVIEMARENQTTQKGQKNSRERMKRIEEGIKEL | |
| | GSQILKEHPVENTQLQNEKLYLYYLQNGRDMYVDQELDINRLSDYDVDHIVPQSFLKDDSIDNKVLTRS | |
| | DKARGKSDNVPSEEVVKKMKNYWRQLLNAKLITQRKFDNLTKAERGGLSELDKAGFIKRQLVETRQITK | |
| | HVAQILDSRMNTKYDENDKLIREVKVITLKSKLVSDFRKDFQFYKVREINNYHHAHDAYLNAVVGTALI | |
| | KKYPKLESEFVYGDYKVYDVRKMIAKSEQEIGKATAKYFFYSNIMNFFKTEITLANGEIRKRPLIETNG | |
| | ETGEIVWDKGRDFATVRKVLSMPQVNIVKKTEVQTGGFSKESILPKRNSDKLIARKKDWDPKKYGGFDS | |
| | PTVAYSVLVVAKVEKGKSKKLKSVKELLGITIMERSSFEKNPIDFLEAKGYKEVKKDLIIKLPKYSLFE | |
| | LENGRKRMLASAGELQKGNELALPSKYVNFLYLASHYEKLKGSPEDNEQKQLFVEQHKHYLDEIIEQIS | |
| | EFSKRVILADANLDKVLSAYNKHRDKPIREQAENIIHLFTLTNLGAPAAFKYFDTTIDRKRYTSTKEVL | |
| | DATLIHQSITGLYETRIDLSQLGGDKRTADGSEFESPKKKAKVE | |
| PL12112 | MPAAKRVKLDGGTAPLEEEYRLFLEAPIQNVTLLEQWKREIPKVWAEINPPGLASTQAPIHVQLLSTAL | 16,151 |
| | PVRVRQYPITLEAKRSLRETIRKFRAAGILRPVHSPWNTPLLPVRKSGTSEYRMVQDLREVNKRVETIH | |
| | PTVPNPYTLLSLLPPDRIWYSVLDLKDAFFCIPLAPESQLIFAFEWADAEEGESGQLTWTRLPQGFKNS | |
| | PTLFNEALNRDLQGFRLDHPSVSLLQYVDDLLIAADTQAACLSATRDLLMTLAELGYRVSGKKAQLCQE | |
| | EVTYLGFKIHKGSRSLSNSRTQAILQIPVPKTKRQVREFLGKIGYCRLFIPGFAELAQPLYAATRPGND | |
| | PLVWGEKEEEAFQSLKLALTQPPALALPSLDKPFQLFVEETSGAAKGVLTQALGPWKRPVAYLSKRLDP | |
| | VAAGWPRCLRAIAAAALLTREASKLTFGQDIEITSSHNLESLLRSPPDKWLTNARITQYQVLLLDPPRV | |
| | RFKQTAALNPATLLPETDDTLPIHHCLDTLDSLTSTRPDLTDQPLAQAEATLFTDGSSYIRDGKRYAGA | |
| | AVVTLDSVIWAEPLPIGTSAQKAELIALTKALEWSKDKSVNIYTDSRYAFATLHVHGMIYRERGWLTAG | |
| | GKAIKNAPEILALLTAVWLPKRVAVMHCKGHQKDDAPTSTGNRRADEVAREVAIRPLSTQATISAEAAA | |
| | KEAAAKEAAAKEAAAKALEAEAAAKEAAAKEAAAKEAAAKAMASNFTQFVLVDNGGTGDVTVAPSNFAN | |
| | GIAEWISSNSRSQAYKVTCSVRQSSAQNRKYTIKVEVPKGAWRSYLNMELTIPIFATNSDCELIVKAMQ | |
| | GLLKDGNPIPSAIAANSGIYGSSGGGEAAAKDKKYSIGLDIGTNSVGWAVITDEYKVPSKKFKVLGNTD | |
| | RHSIKKNLIGALLFDSGETAEATRLKRTARRRYTRRKNRICYLQEIFSNEMAKVDDSFFHRLEESFLVE | |
| | EDKKHERHPIFGNIVDEVAYHEKYPTIYHLRKKLVDSTDKADLRLIYLALAHMIKFRGHFLIEGDLNPD | |
| | NSDVDKLFIQLVQTYNQLFEENPINASGVDAKAILSARLSKSRRLENLIAQLPGEKKNGLFGNLIALSL | |
| | GLTPNFKSNFDLAEDAKLQLSKDTYDDDLDNLLAQIGDQYADLFLAAKNLSDAILLSDILRVNTEITKA | |
| | PLSASMIKRYDEHHQDLTLLKALVRQQLPEKYKEIFFDQSKNGYAGYIDGGASQEEFYKFIKPILEKMD | |
| | GTEELLVKLNREDLLRKQRTFDNGSIPHQIHLGELHAILRRQEDFYPFLKDNREKIEKILTFRIPYYVG | |
| | PLARGNSRFAWMTRKSEETITPWNFEEVVDKGASAQSFIERMTNFDKNLPNEKVLPKHSLLYEYFTVYN | |
| | ELTKVKYVTEGMRKPAFLSGEQKKAIVDLLFKTNRKVTVKQLKEDYFKKIECFDSVEISGVEDRFNASL | |
| | GTYHDLLKIIKDKDFLDNEENEDILEDIVLTLTLFEDREMIEERLKTYAHLFDDKVMKQLKRRRYTGWG | |
| | RLSRKLINGIRDKQSGKTILDFLKSDGFANRNFMQLIHDDSLTFKEDIQKAQVSGQGDSLHEHIANLAG | |
| | SPAIKKGILQTVKVVDELVKVMGRHKPENIVIEMARENQTTQKGQKNSRERMKRIEEGIKELGSQILKE | |
| | HPVENTQLQNEKLYLYYLQNGRDMYVDQELDINRLSDYDVDHIVPQSFLKDDSIDNKVLTRSDKARGKS | |
| | DNVPSEEVVKKMKNYWRQLLNAKLITQRKFDNLTKAERGGLSELDKAGFIKRQLVETRQITKHVAQILD | |
| | SRMNTKYDENDKLIREVKVITLKSKLVSDFRKDFQFYKVREINNYHHAHDAYLNAVVGTALIKKYPKLE | |
| | SEFVYGDYKVYDVRKMIAKSEQEIGKATAKYFFYSNIMNFFKTEITLANGEIRKRPLIETNGETGEIVW | |
| | DKGRDFATVRKVLSMPQVNIVKKTEVQTGGFSKESILPKRNSDKLIARKKDWDPKKYGGFDSPTVAYSV | |
| | LVVAKVEKGKSKKLKSVKELLGITIMERSSFEKNPIDFLEAKGYKEVKKDLIIKLPKYSLFELENGRKR | |
| | MLASAGELQKGNELALPSKYVNFLYLASHYEKLKGSPEDNEQKQLFVEQHKHYLDEIIEQISEFSKRVI | |
| | LADANLDKVLSAYNKHRDKPIREQAENIIHLFTLTNLGAPAAFKYFDTTIDRKRYTSTKEVLDATLIHQ | |
| | SITGLYETRIDLSQLGGDKRTADGSEFESPKKKAKVE | |
| PL12113/ | MPAAKRVKLDGGTAPLEEEYRLFLEAPIQNVTLLEQWKREIPKVWAEINPPGLASTQAPIHVQLLSTAL | 16,152 |
| PL24680 | PVRVRQYPITLEAKRSLRETIRKFRAAGILRPVHSPWNTPLLPVRKSGTSEYRMVQDLREVNKRVETIH | |
| | PTVPNPYTLLSLLPPDRIWYSVLDLKDAFFCIPLAPESQLIFAFEWADAEEGESGQLTWTRLPQGFKNS | |
| | PTLFNEALNRDLQGFRLDHPSVSLLQYVDDLLIAADTQAACLSATRDLLMTLAELGYRVSGKKAQLCQE | |
| | EVTYLGFKIHKGSRSLSNSRTQAILQIPVPKTKRQVREFLGKIGYCRLFIPGFAELAQPLYAATRPGND | |
| | PLVWGEKEEEAFQSLKLALTQPPALALPSLDKPFQLFVEETSGAAKGVLTQALGPWKRPVAYLSKRLDP | |
| | VAAGWPRCLRAIAAAALLTREASKLTFGQDIEITSSHNLESLLRSPPDKWLTNARITQYQVLLLDPPRV | |
| | RFKQTAALNPATLLPETDDTLPIHHCLDTLDSLTSTRPDLTDQPLAQAEATLFTDGSSYIRDGKRYAGA | |
| | AVVTLDSVIWAEPLPIGTSAQKAELIALTKALEWSKDKSVNIYTDSRYAFATLHVHGMIYRERGWLTAG | |
| | GKAIKNAPEILALLTAVWLPKRVAVMHCKGHQKDDAPTSTGNRRADEVAREVAIRPLSTQATISAEAAA | |
| | KEAAAKEAAAKEAAAKALEAEAAAKEAAAKEAAAKEAAAKAMASNFTQFVLVDNGGTGDVTVAPSNFAN | |
| | GIAEWISSNSRSQAYKVTCSVRQSSAQNRKYTIKVEVPKGAWRSYLNMELTIPIFATNSDCELIVKAMQ | |
| | GLLKDGNPIPSAIAANSGIYGGSGGSMASNFTQFVLVDNGGTGDVTVAPSNFANGIAEWISSNSRSQAY | |
| | KVTCSVRQSSAQNRKYTIKVEVPKGAWRSYLNMELTIPIFATNSDCELIVKAMQGLLKDGNPIPSAIAA | |
| | NSGIYAEAAAKEAAAKEAAAKEAAAKALEAEAAAKEAAAKEAAAKEAAAKADKKYSIGLDIGTNSVGWA | |
| | VITDEYKVPSKKFKVLGNTDRHSIKKNLIGALLFDSGETAEATRLKRTARRRYTRRKNRICYLQEIFSN | |
| | EMAKVDDSFFHRLEESFLVEEDKKHERHPIFGNIVDEVAYHEKYPTIYHLRKKLVDSTDKADLRLIYLA | |
| | LAHMIKFRGHFLIEGDLNPDNSDVDKLFIQLVQTYNQLFEENPINASGVDAKAILSARLSKSRRLENLI | |
| | AQLPGEKKNGLFGNLIALSLGLTPNFKSNFDLAEDAKLQLSKDTYDDDLDNLLAQIGDQYADLFLAAKN | |
| | LSDAILLSDILRVNTEITKAPLSASMIKRYDEHHQDLTLLKALVRQQLPEKYKEIFFDQSKNGYAGYID | |
| | GGASQEEFYKFIKPILEKMDGTEELLVKLNREDLLRKQRTFDNGSIPHQIHLGELHAILRRQEDFYPFL | |
| | KDNREKIEKILTFRIPYYVGPLARGNSRFAWMTRKSEETITPWNFEEVVDKGASAQSFIERMTNFDKNL | |
| | PNEKVLPKHSLLYEYFTVYNELTKVKYVTEGMRKPAFLSGEQKKAIVDLLFKTNRKVTVKQLKEDYFKK | |
| | IECFDSVEISGVEDRFNASLGTYHDLLKIIKDKDFLDNEENEDILEDIVLTLTLFEDREMIEERLKTYA | |
| | HLFDDKVMKQLKRRRYTGWGRLSRKLINGIRDKQSGKTILDFLKSDGFANRNFMQLIHDDSLTFKEDIQ | |
| | KAQVSGQGDSLHEHIANLAGSPAIKKGILQTVKVVDELVKVMGRHKPENIVIEMARENQTTQKGQKNSR | |
| | ERMKRIEEGIKELGSQILKEHPVENTQLQNEKLYLYYLQNGRDMYVDQELDINRLSDYDVDHIVPQSFL | |
| | KDDSIDNKVLTRSDKARGKSDNVPSEEVVKKMKNYWRQLLNAKLITQRKFDNLTKAERGGLSELDKAGF | |
| | IKRQLVETRQITKHVAQILDSRMNTKYDENDKLIREVKVITLKSKLVSDFRKDFQFYKVREINNYHHAH | |
| | DAYLNAVVGTALIKKYPKLESEFVYGDYKVYDVRKMIAKSEQEIGKATAKYFFYSNIMNFFKTEITLAN | |
| | GEIRKRPLIETNGETGEIVWDKGRDFATVRKVLSMPQVNIVKKTEVQTGGFSKESILPKRNSDKLIARK | |
| | KDWDPKKYGGFDSPTVAYSVLVVAKVEKGKSKKLKSVKELLGITIMERSSFEKNPIDFLEAKGYKEVKK | |
| | DLIIKLPKYSLFELENGRKRMLASAGELQKGNELALPSKYVNFLYLASHYEKLKGSPEDNEQKQLFVEQ | |
| | HKHYLDEIIEQISEFSKRVILADANLDKVLSAYNKHRDKPIREQAENIIHLFTLTNLGAPAAFKYFDTT | |
| | IDRKRYTSTKEVLDATLIHQSITGLYETRIDLSQLGGDKRTADGSEFESPKKKAKVE | |
| PL12114 | MPAAKRVKLDGGTAPLEEEYRLFLEAPIQNVTLLEQWKREIPKVWAEINPPGLASTQAPIHVQLLSTAL | 16,153 |
| | PVRVRQYPITLEAKRSLRETIRKFRAAGILRPVHSPWNTPLLPVRKSGTSEYRMVQDLREVNKRVETIH | |
| | PTVPNPYTLLSLLPPDRIWYSVLDLKDAFFCIPLAPESQLIFAFEWADAEEGESGQLTWTRLPQGFKNS | |
| | PTLFNEALNRDLQGFRLDHPSVSLLQYVDDLLIAADTQAACLSATRDLLMTLAELGYRVSGKKAQLCQE | |
| | EVTYLGFKIHKGSRSLSNSRTQAILQIPVPKTKRQVREFLGKIGYCRLFIPGFAELAQPLYAATRPGND | |
| | PLVWGEKEEEAFQSLKLALTQPPALALPSLDKPFQLFVEETSGAAKGVLTQALGPWKRPVAYLSKRLDP | |
| | VAAGWPRCLRAIAAAALLTREASKLTFGQDIEITSSHNLESLLRSPPDKWLTNARITQYQVLLLDPPRV | |
| | RFKQTAALNPATLLPETDDTLPIHHCLDTLDSLTSTRPDLTDQPLAQAEATLFTDGSSYIRDGKRYAGA | |
| | AVVTLDSVIWAEPLPIGTSAQKAELIALTKALEWSKDKSVNIYTDSRYAFATLHVHGMIYRERGWLTAG | |
| | GKAIKNAPEILALLTAVWLPKRVAVMHCKGHQKDDAPTSTGNRRADEVAREVAIRPLSTQATISAEAAA | |
| | KEAAAKEAAAKEAAAKALEAEAAAKEAAAKEAAAKEAAAKAMASNFTQFVLVDNGGTGDVTVAPSNFAN | |
| | GIAEWISSNSRSQAYKVTCSVRQSSAQNRKYTIKVEVPKGAWRSYLNMELTIPIFATNSDCELIVKAMQ | |
| | GLLKDGNPIPSAIAANSGIYGGSGGSMASNFTQFVLVDNGGTGDVTVAPSNFANGIAEWISSNSRSQAY | |
| | KVTCSVRQSSAQNRKYTIKVEVPKGAWRSYLNMELTIPIFATNSDCELIVKAMQGLLKDGNPIPSAIAA | |
| | NSGIYSGGSSGGSSGSETPGTSESATPESSGGSSGGSSDKKYSIGLDIGTNSVGWAVITDEYKVPSKKF | |
| | KVLGNTDRHSIKKNLIGALLFDSGETAEATRLKRTARRRYTRRKNRICYLQEIFSNEMAKVDDSFFHRL | |
| | EESFLVEEDKKHERHPIFGNIVDEVAYHEKYPTIYHLRKKLVDSTDKADLRLIYLALAHMIKFRGHFLI | |
| | EGDLNPDNSDVDKLFIQLVQTYNQLFEENPINASGVDAKAILSARLSKSRRLENLIAQLPGEKKNGLFG | |
| | NLIALSLGLTPNFKSNFDLAEDAKLQLSKDTYDDDLDNLLAQIGDQYADLFLAAKNLSDAILLSDILRV | |
| | NTEITKAPLSASMIKRYDEHHQDLTLLKALVRQQLPEKYKEIFFDQSKNGYAGYIDGGASQEEFYKFIK | |
| | PILEKMDGTEELLVKLNREDLLRKQRTFDNGSIPHQIHLGELHAILRRQEDFYPFLKDNREKIEKILTF | |
| | RIPYYVGPLARGNSRFAWMTRKSEETITPWNFEEVVDKGASAQSFIERMTNFDKNLPNEKVLPKHSLLY | |
| | EYFTVYNELTKVKYVTEGMRKPAFLSGEQKKAIVDLLFKTNRKVTVKQLKEDYFKKIECFDSVEISGVE | |
| | DRFNASLGTYHDLLKIIKDKDFLDNEENEDILEDIVLTLTLFEDREMIEERLKTYAHLFDDKVMKQLKR | |
| | RRYTGWGRLSRKLINGIRDKQSGKTILDFLKSDGFANRNFMQLIHDDSLTFKEDIQKAQVSGQGDSLHE | |
| | HIANLAGSPAIKKGILQTVKVVDELVKVMGRHKPENIVIEMARENQTTQKGQKNSRERMKRIEEGIKEL | |
| | GSQILKEHPVENTQLQNEKLYLYYLQNGRDMYVDQELDINRLSDYDVDHIVPQSFLKDDSIDNKVLTRS | |
| | DKARGKSDNVPSEEVVKKMKNYWRQLLNAKLITQRKFDNLTKAERGGLSELDKAGFIKRQLVETRQITK | |
| | HVAQILDSRMNTKYDENDKLIREVKVITLKSKLVSDFRKDFQFYKVREINNYHHAHDAYLNAVVGTALI | |
| | KKYPKLESEFVYGDYKVYDVRKMIAKSEQEIGKATAKYFFYSNIMNFFKTEITLANGEIRKRPLIETNG | |
| | ETGEIVWDKGRDFATVRKVLSMPQVNIVKKTEVQTGGFSKESILPKRNSDKLIARKKDWDPKKYGGFDS | |
| | PTVAYSVLVVAKVEKGKSKKLKSVKELLGITIMERSSFEKNPIDFLEAKGYKEVKKDLIIKLPKYSLFE | |
| | LENGRKRMLASAGELQKGNELALPSKYVNFLYLASHYEKLKGSPEDNEQKQLFVEQHKHYLDEIIEQIS | |
| | EFSKRVILADANLDKVLSAYNKHRDKPIREQAENIIHLFTLTNLGAPAAFKYFDTTIDRKRYTSTKEVL | |
| | DATLIHQSITGLYETRIDLSQLGGDKRTADGSEFESPKKKAKVE | |
| PL12115 | MPAAKRVKLDGGTAPLEEEYRLFLEAPIQNVTLLEQWKREIPKVWAEINPPGLASTQAPIHVQLLSTAL | 16,154 |
| | PVRVRQYPITLEAKRSLRETIRKFRAAGILRPVHSPWNTPLLPVRKSGTSEYRMVQDLREVNKRVETIH | |
| | PTVPNPYTLLSLLPPDRIWYSVLDLKDAFFCIPLAPESQLIFAFEWADAEEGESGQLTWTRLPQGFKNS | |
| | PTLFNEALNRDLQGFRLDHPSVSLLQYVDDLLIAADTQAACLSATRDLLMTLAELGYRVSGKKAQLCQE | |
| | EVTYLGFKIHKGSRSLSNSRTQAILQIPVPKTKRQVREFLGKIGYCRLFIPGFAELAQPLYAATRPGND | |
| | PLVWGEKEEEAFQSLKLALTQPPALALPSLDKPFQLFVEETSGAAKGVLTQALGPWKRPVAYLSKRLDP | |
| | VAAGWPRCLRAIAAAALLTREASKLTFGQDIEITSSHNLESLLRSPPDKWLTNARITQYQVLLLDPPRV | |
| | RFKQTAALNPATLLPETDDTLPIHHCLDTLDSLTSTRPDLTDQPLAQAEATLFTDGSSYIRDGKRYAGA | |
| | AVVTLDSVIWAEPLPIGTSAQKAELIALTKALEWSKDKSVNIYTDSRYAFATLHVHGMIYRERGWLTAG | |
| | GKAIKNAPEILALLTAVWLPKRVAVMHCKGHQKDDAPTSTGNRRADEVAREVAIRPLSTQATISAEAAA | |
| | KEAAAKEAAAKEAAAKALEAEAAAKEAAAKEAAAKEAAAKAMASNFTQFVLVDNGGTGDVTVAPSNFAN | |
| | GIAEWISSNSRSQAYKVTCSVRQSSAQNRKYTIKVEVPKGAWRSYLNMELTIPIFATNSDCELIVKAMQ | |
| | GLLKDGNPIPSAIAANSGIYGGSGGSMASNFTQFVLVDNGGTGDVTVAPSNFANGIAEWISSNSRSQAY | |
| | KVTCSVRQSSAQNRKYTIKVEVPKGAWRSYLNMELTIPIFATNSDCELIVKAMQGLLKDGNPIPSAIAA | |
| | NSGIYGSSGSSGSSGSSGSSGSSDKKYSIGLDIGTNSVGWAVITDEYKVPSKKFKVLGNTDRHSIKKNL | |
| | IGALLFDSGETAEATRLKRTARRRYTRRKNRICYLQEIFSNEMAKVDDSFFHRLEESFLVEEDKKHERH | |
| | PIFGNIVDEVAYHEKYPTIYHLRKKLVDSTDKADLRLIYLALAHMIKFRGHFLIEGDLNPDNSDVDKLF | |
| | IQLVQTYNQLFEENPINASGVDAKAILSARLSKSRRLENLIAQLPGEKKNGLFGNLIALSLGLTPNFKS | |
| | NFDLAEDAKLQLSKDTYDDDLDNLLAQIGDQYADLFLAAKNLSDAILLSDILRVNTEITKAPLSASMIK | |
| | RYDEHHQDLTLLKALVRQQLPEKYKEIFFDQSKNGYAGYIDGGASQEEFYKFIKPILEKMDGTEELLVK | |
| | LNREDLLRKQRTFDNGSIPHQIHLGELHAILRRQEDFYPFLKDNREKIEKILTFRIPYYVGPLARGNSR | |
| | FAWMTRKSEETITPWNFEEVVDKGASAQSFIERMTNFDKNLPNEKVLPKHSLLYEYFTVYNELTKVKYV | |
| | TEGMRKPAFLSGEQKKAIVDLLFKTNRKVTVKQLKEDYFKKIECFDSVEISGVEDRFNASLGTYHDLLK | |
| | IIKDKDFLDNEENEDILEDIVLTLTLFEDREMIEERLKTYAHLFDDKVMKQLKRRRYTGWGRLSRKLIN | |
| | GIRDKQSGKTILDFLKSDGFANRNFMQLIHDDSLTFKEDIQKAQVSGQGDSLHEHIANLAGSPAIKKGI | |
| | LQTVKVVDELVKVMGRHKPENIVIEMARENQTTQKGQKNSRERMKRIEEGIKELGSQILKEHPVENTQL | |
| | QNEKLYLYYLQNGRDMYVDQELDINRLSDYDVDHIVPQSFLKDDSIDNKVLTRSDKARGKSDNVPSEEV | |
| | VKKMKNYWRQLLNAKLITQRKFDNLTKAERGGLSELDKAGFIKRQLVETRQITKHVAQILDSRMNTKYD | |
| | ENDKLIREVKVITLKSKLVSDFRKDFQFYKVREINNYHHAHDAYLNAVVGTALIKKYPKLESEFVYGDY | |
| | KVYDVRKMIAKSEQEIGKATAKYFFYSNIMNFFKTEITLANGEIRKRPLIETNGETGEIVWDKGRDFAT | |
| | VRKVLSMPQVNIVKKTEVQTGGFSKESILPKRNSDKLIARKKDWDPKKYGGFDSPTVAYSVLVVAKVEK | |
| | GKSKKLKSVKELLGITIMERSSFEKNPIDFLEAKGYKEVKKDLIIKLPKYSLFELENGRKRMLASAGEL | |
| | QKGNELALPSKYVNFLYLASHYEKLKGSPEDNEQKQLFVEQHKHYLDEIIEQISEFSKRVILADANLDK | |
| | VLSAYNKHRDKPIREQAENIIHLFTLTNLGAPAAFKYFDTTIDRKRYTSTKEVLDATLIHQSITGLYET | |
| | RIDLSQLGGDKRTADGSEFESPKKKAKVE | |
| PL12116 | MPAAKRVKLDGGTAPLEEEYRLFLEAPIQNVTLLEQWKREIPKVWAEINPPGLASTQAPIHVQLLSTAL | 16,155 |
| | PVRVRQYPITLEAKRSLRETIRKFRAAGILRPVHSPWNTPLLPVRKSGTSEYRMVQDLREVNKRVETIH | |
| | PTVPNPYTLLSLLPPDRIWYSVLDLKDAFFCIPLAPESQLIFAFEWADAEEGESGQLTWTRLPQGFKNS | |
| | PTLFNEALNRDLQGFRLDHPSVSLLQYVDDLLIAADTQAACLSATRDLLMTLAELGYRVSGKKAQLCQE | |
| | EVTYLGFKIHKGSRSLSNSRTQAILQIPVPKTKRQVREFLGKIGYCRLFIPGFAELAQPLYAATRPGND | |
| | PLVWGEKEEEAFQSLKLALTQPPALALPSLDKPFQLFVEETSGAAKGVLTQALGPWKRPVAYLSKRLDP | |
| | VAAGWPRCLRAIAAAALLTREASKLTFGQDIEITSSHNLESLLRSPPDKWLTNARITQYQVLLLDPPRV | |
| | RFKQTAALNPATLLPETDDTLPIHHCLDTLDSLTSTRPDLTDQPLAQAEATLFTDGSSYIRDGKRYAGA | |
| | AVVTLDSVIWAEPLPIGTSAQKAELIALTKALEWSKDKSVNIYTDSRYAFATLHVHGMIYRERGWLTAG | |
| | GKAIKNAPEILALLTAVWLPKRVAVMHCKGHQKDDAPTSTGNRRADEVAREVAIRPLSTQATISAEAAA | |
| | KEAAAKEAAAKEAAAKALEAEAAAKEAAAKEAAAKEAAAKAMASNFTQFVLVDNGGTGDVTVAPSNFAN | |
| | GIAEWISSNSRSQAYKVTCSVRQSSAQNRKYTIKVEVPKGAWRSYLNMELTIPIFATNSDCELIVKAMQ | |
| | GLLKDGNPIPSAIAANSGIYGGSGGSMASNFTQFVLVDNGGTGDVTVAPSNFANGIAEWISSNSRSQAY | |
| | KVTCSVRQSSAQNRKYTIKVEVPKGAWRSYLNMELTIPIFATNSDCELIVKAMQGLLKDGNPIPSAIAA | |
| | NSGIYGSSGGGEAAAKDKKYSIGLDIGTNSVGWAVITDEYKVPSKKFKVLGNTDRHSIKKNLIGALLFD | |
| | SGETAEATRLKRTARRRYTRRKNRICYLQEIFSNEMAKVDDSFFHRLEESFLVEEDKKHERHPIFGNIV | |
| | DEVAYHEKYPTIYHLRKKLVDSTDKADLRLIYLALAHMIKFRGHFLIEGDLNPDNSDVDKLFIQLVQTY | |
| | NQLFEENPINASGVDAKAILSARLSKSRRLENLIAQLPGEKKNGLFGNLIALSLGLTPNFKSNFDLAED | |
| | AKLQLSKDTYDDDLDNLLAQIGDQYADLFLAAKNLSDAILLSDILRVNTEITKAPLSASMIKRYDEHHQ | |
| | DLTLLKALVRQQLPEKYKEIFFDQSKNGYAGYIDGGASQEEFYKFIKPILEKMDGTEELLVKLNREDLL | |
| | RKQRTFDNGSIPHQIHLGELHAILRRQEDFYPFLKDNREKIEKILTFRIPYYVGPLARGNSRFAWMTRK | |
| | SEETITPWNFEEVVDKGASAQSFIERMTNFDKNLPNEKVLPKHSLLYEYFTVYNELTKVKYVTEGMRKP | |
| | AFLSGEQKKAIVDLLFKTNRKVTVKQLKEDYFKKIECFDSVEISGVEDRFNASLGTYHDLLKIIKDKDF | |
| | LDNEENEDILEDIVLTLTLFEDREMIEERLKTYAHLFDDKVMKQLKRRRYTGWGRLSRKLINGIRDKQS | |
| | GKTILDFLKSDGFANRNFMQLIHDDSLTFKEDIQKAQVSGQGDSLHEHIANLAGSPAIKKGILQTVKVV | |
| | DELVKVMGRHKPENIVIEMARENQTTQKGQKNSRERMKRIEEGIKELGSQILKEHPVENTQLQNEKLYL | |
| | YYLQNGRDMYVDQELDINRLSDYDVDHIVPQSFLKDDSIDNKVLTRSDKARGKSDNVPSEEVVKKMKNY | |
| | WRQLLNAKLITQRKFDNLTKAERGGLSELDKAGFIKRQLVETRQITKHVAQILDSRMNTKYDENDKLIR | |
| | EVKVITLKSKLVSDFRKDFQFYKVREINNYHHAHDAYLNAVVGTALIKKYPKLESEFVYGDYKVYDVRK | |
| | MIAKSEQEIGKATAKYFFYSNIMNFFKTEITLANGEIRKRPLIETNGETGEIVWDKGRDFATVRKVLSM | |
| | PQVNIVKKTEVQTGGFSKESILPKRNSDKLIARKKDWDPKKYGGFDSPTVAYSVLVVAKVEKGKSKKLK | |
| | SVKELLGITIMERSSFEKNPIDFLEAKGYKEVKKDLIIKLPKYSLFELENGRKRMLASAGELQKGNELA | |
| | LPSKYVNFLYLASHYEKLKGSPEDNEQKQLFVEQHKHYLDEIIEQISEFSKRVILADANLDKVLSAYNK | |
| | HRDKPIREQAENIIHLFTLTNLGAPAAFKYFDTTIDRKRYTSTKEVLDATLIHQSITGLYETRIDLSQL | |
| | GGDKRTADGSEFESPKKKAKVE | |
| PL12117 | MPAAKRVKLDGGTAPLEEEYRLFLEAPIQNVTLLEQWKREIPKVWAEINPPGLASTQAPIHVQLLSTAL | 16,156 |
| | PVRVRQYPITLEAKRSLRETIRKFRAAGILRPVHSPWNTPLLPVRKSGTSEYRMVQDLREVNKRVETIH | |
| | PTVPNPYTLLSLLPPDRIWYSVLDLKDAFFCIPLAPESQLIFAFEWADAEEGESGQLTWTRLPQGFKNS | |
| | PTLFNEALNRDLQGFRLDHPSVSLLQYVDDLLIAADTQAACLSATRDLLMTLAELGYRVSGKKAQLCQE | |
| | EVTYLGFKIHKGSRSLSNSRTQAILQIPVPKTKRQVREFLGKIGYCRLFIPGFAELAQPLYAATRPGND | |
| | PLVWGEKEEEAFQSLKLALTQPPALALPSLDKPFQLFVEETSGAAKGVLTQALGPWKRPVAYLSKRLDP | |
| | VAAGWPRCLRAIAAAALLTREASKLTFGQDIEITSSHNLESLLRSPPDKWLTNARITQYQVLLLDPPRV | |
| | RFKQTAALNPATLLPETDDTLPIHHCLDTLDSLTSTRPDLTDQPLAQAEATLFTDGSSYIRDGKRYAGA | |
| | AVVTLDSVIWAEPLPIGTSAQKAELIALTKALEWSKDKSVNIYTDSRYAFATLHVHGMIYRERGWLTAG | |
| | GKAIKNAPEILALLTAVWLPKRVAVMHCKGHQKDDAPTSTGNRRADEVAREVAIRPLSTQATISAEAAA | |
| | KEAAAKEAAAKEAAAKALEAEAAAKEAAAKEAAAKEAAAKAMASNFTQFVLVDNGGTGDVTVAPSNFAN | |
| | GIAEWISSNSRSQAYKVTCSVRQSSAQNRKYTIKVEVPKGAWRSYLNMELTIPIFATNSDCELIVKAMQ | |
| | GLLKDGNPIPSAIAANSGIYGGSGGSMASNFTQFVLVDNGGTGDVTVAPSNFANGIAEWISSNSRSQAY | |
| | KVTCSVRQSSAQNRKYTIKVEVPKGAWRSYLNMELTIPIFATNSDCELIVKAMQGLLKDGNPIPSAIAA | |
| | NSGIYGGGSGGGSGGGSGGGSMASNFTQFVLVDNGGTGDVTVAPSNFANGIAEWISSNSRSQAYKVTCS | |
| | VRQSSAQNRKYTIKVEVPKGAWRSYLNMELTIPIFATNSDCELIVKAMQGLLKDGNPIPSAIAANSGIY | |
| | GGSGGSMASNFTQFVLVDNGGTGDVTVAPSNFANGIAEWISSNSRSQAYKVTCSVRQSSAQNRKYTIKV | |
| | EVPKGAWRSYLNMELTIPIFATNSDCELIVKAMQGLLKDGNPIPSAIAANSGIYAEAAAKEAAAKEAAA | |
| | KEAAAKALEAEAAAKEAAAKEAAAKEAAAKADKKYSIGLDIGTNSVGWAVITDEYKVPSKKFKVLGNTD | |
| | RHSIKKNLIGALLFDSGETAEATRLKRTARRRYTRRKNRICYLQEIFSNEMAKVDDSFFHRLEESFLVE | |
| | EDKKHERHPIFGNIVDEVAYHEKYPTIYHLRKKLVDSTDKADLRLIYLALAHMIKFRGHFLIEGDLNPD | |
| | NSDVDKLFIQLVQTYNQLFEENPINASGVDAKAILSARLSKSRRLENLIAQLPGEKKNGLFGNLIALSL | |
| | GLTPNFKSNFDLAEDAKLQLSKDTYDDDLDNLLAQIGDQYADLFLAAKNLSDAILLSDILRVNTEITKA | |
| | PLSASMIKRYDEHHQDLTLLKALVRQQLPEKYKEIFFDQSKNGYAGYIDGGASQEEFYKFIKPILEKMD | |
| | GTEELLVKLNREDLLRKQRTFDNGSIPHQIHLGELHAILRRQEDFYPFLKDNREKIEKILTFRIPYYVG | |
| | PLARGNSRFAWMTRKSEETITPWNFEEVVDKGASAQSFIERMTNFDKNLPNEKVLPKHSLLYEYFTVYN | |
| | ELTKVKYVTEGMRKPAFLSGEQKKAIVDLLFKTNRKVTVKQLKEDYFKKIECFDSVEISGVEDRFNASL | |
| | GTYHDLLKIIKDKDFLDNEENEDILEDIVLTLTLFEDREMIEERLKTYAHLFDDKVMKQLKRRRYTGWG | |
| | RLSRKLINGIRDKQSGKTILDFLKSDGFANRNFMQLIHDDSLTFKEDIQKAQVSGQGDSLHEHIANLAG | |
| | SPAIKKGILQTVKVVDELVKVMGRHKPENIVIEMARENQTTQKGQKNSRERMKRIEEGIKELGSQILKE | |
| | HPVENTQLQNEKLYLYYLQNGRDMYVDQELDINRLSDYDVDHIVPQSFLKDDSIDNKVLTRSDKARGKS | |
| | DNVPSEEVVKKMKNYWRQLLNAKLITQRKFDNLTKAERGGLSELDKAGFIKRQLVETRQITKHVAQILD | |
| | SRMNTKYDENDKLIREVKVITLKSKLVSDFRKDFQFYKVREINNYHHAHDAYLNAVVGTALIKKYPKLE | |
| | SEFVYGDYKVYDVRKMIAKSEQEIGKATAKYFFYSNIMNFFKTEITLANGEIRKRPLIETNGETGEIVW | |
| | DKGRDFATVRKVLSMPQVNIVKKTEVQTGGFSKESILPKRNSDKLIARKKDWDPKKYGGFDSPTVAYSV | |
| | LVVAKVEKGKSKKLKSVKELLGITIMERSSFEKNPIDFLEAKGYKEVKKDLIIKLPKYSLFELENGRKR | |
| | MLASAGELQKGNELALPSKYVNFLYLASHYEKLKGSPEDNEQKQLFVEQHKHYLDEIIEQISEFSKRVI | |
| | LADANLDKVLSAYNKHRDKPIREQAENIIHLFTLTNLGAPAAFKYFDTTIDRKRYTSTKEVLDATLIHQ | |
| | SITGLYETRIDLSQLGGDKRTADGSEFESPKKKAKVE | |
| PL12118 | MPAAKRVKLDGGTAPLEEEYRLFLEAPIQNVTLLEQWKREIPKVWAEINPPGLASTQAPIHVQLLSTAL | 16,157 |
| | PVRVRQYPITLEAKRSLRETIRKFRAAGILRPVHSPWNTPLLPVRKSGTSEYRMVQDLREVNKRVETIH | |
| | PTVPNPYTLLSLLPPDRIWYSVLDLKDAFFCIPLAPESQLIFAFEWADAEEGESGQLTWTRLPQGFKNS | |
| | PTLFNEALNRDLQGFRLDHPSVSLLQYVDDLLIAADTQAACLSATRDLLMTLAELGYRVSGKKAQLCQE | |
| | EVTYLGFKIHKGSRSLSNSRTQAILQIPVPKTKRQVREFLGKIGYCRLFIPGFAELAQPLYAATRPGND | |
| | PLVWGEKEEEAFQSLKLALTQPPALALPSLDKPFQLFVEETSGAAKGVLTQALGPWKRPVAYLSKRLDP | |
| | VAAGWPRCLRAIAAAALLTREASKLTFGQDIEITSSHNLESLLRSPPDKWLTNARITQYQVLLLDPPRV | |
| | RFKQTAALNPATLLPETDDTLPIHHCLDTLDSLTSTRPDLTDQPLAQAEATLFTDGSSYIRDGKRYAGA | |
| | AVVTLDSVIWAEPLPIGTSAQKAELIALTKALEWSKDKSVNIYTDSRYAFATLHVHGMIYRERGWLTAG | |
| | GKAIKNAPEILALLTAVWLPKRVAVMHCKGHQKDDAPTSTGNRRADEVAREVAIRPLSTQATISAEAAA | |
| | KEAAAKEAAAKEAAAKALEAEAAAKEAAAKEAAAKEAAAKAMASNFTQFVLVDNGGTGDVTVAPSNFAN | |
| | GIAEWISSNSRSQAYKVTCSVRQSSAQNRKYTIKVEVPKGAWRSYLNMELTIPIFATNSDCELIVKAMQ | |
| | GLLKDGNPIPSAIAANSGIYGGSGGSMASNFTQFVLVDNGGTGDVTVAPSNFANGIAEWISSNSRSQAY | |
| | KVTCSVRQSSAQNRKYTIKVEVPKGAWRSYLNMELTIPIFATNSDCELIVKAMQGLLKDGNPIPSAIAA | |
| | NSGIYGGGSGGGSGGGSGGGSMASNFTQFVLVDNGGTGDVTVAPSNFANGIAEWISSNSRSQAYKVTCS | |
| | VRQSSAQNRKYTIKVEVPKGAWRSYLNMELTIPIFATNSDCELIVKAMQGLLKDGNPIPSAIAANSGIY | |
| | GGSGGSMASNFTQFVLVDNGGTGDVTVAPSNFANGIAEWISSNSRSQAYKVTCSVRQSSAQNRKYTIKV | |
| | EVPKGAWRSYLNMELTIPIFATNSDCELIVKAMQGLLKDGNPIPSAIAANSGIYSGGSSGGSSGSETPG | |
| | TSESATPESSGGSSGGSSDKKYSIGLDIGTNSVGWAVITDEYKVPSKKFKVLGNTDRHSIKKNLIGALL | |
| | FDSGETAEATRLKRTARRRYTRRKNRICYLQEIFSNEMAKVDDSFFHRLEESFLVEEDKKHERHPIFGN | |
| | IVDEVAYHEKYPTIYHLRKKLVDSTDKADLRLIYLALAHMIKFRGHFLIEGDLNPDNSDVDKLFIQLVQ | |
| | TYNQLFEENPINASGVDAKAILSARLSKSRRLENLIAQLPGEKKNGLFGNLIALSLGLTPNFKSNFDLA | |
| | EDAKLQLSKDTYDDDLDNLLAQIGDQYADLFLAAKNLSDAILLSDILRVNTEITKAPLSASMIKRYDEH | |
| | HQDLTLLKALVRQQLPEKYKEIFFDQSKNGYAGYIDGGASQEEFYKFIKPILEKMDGTEELLVKLNRED | |
| | LLRKQRTFDNGSIPHQIHLGELHAILRRQEDFYPFLKDNREKIEKILTFRIPYYVGPLARGNSRFAWMT | |
| | RKSEETITPWNFEEVVDKGASAQSFIERMTNFDKNLPNEKVLPKHSLLYEYFTVYNELTKVKYVTEGMR | |
| | KPAFLSGEQKKAIVDLLFKTNRKVTVKQLKEDYFKKIECFDSVEISGVEDRFNASLGTYHDLLKIIKDK | |
| | DFLDNEENEDILEDIVLTLTLFEDREMIEERLKTYAHLFDDKVMKQLKRRRYTGWGRLSRKLINGIRDK | |
| | QSGKTILDFLKSDGFANRNFMQLIHDDSLTFKEDIQKAQVSGQGDSLHEHIANLAGSPAIKKGILQTVK | |
| | VVDELVKVMGRHKPENIVIEMARENQTTQKGQKNSRERMKRIEEGIKELGSQILKEHPVENTQLQNEKL | |
| | YLYYLQNGRDMYVDQELDINRLSDYDVDHIVPQSFLKDDSIDNKVLTRSDKARGKSDNVPSEEVVKKMK | |
| | NYWRQLLNAKLITQRKFDNLTKAERGGLSELDKAGFIKRQLVETRQITKHVAQILDSRMNTKYDENDKL | |
| | IREVKVITLKSKLVSDFRKDFQFYKVREINNYHHAHDAYLNAVVGTALIKKYPKLESEFVYGDYKVYDV | |
| | RKMIAKSEQEIGKATAKYFFYSNIMNFFKTEITLANGEIRKRPLIETNGETGEIVWDKGRDFATVRKVL | |
| | SMPQVNIVKKTEVQTGGFSKESILPKRNSDKLIARKKDWDPKKYGGFDSPTVAYSVLVVAKVEKGKSKK | |
| | LKSVKELLGITIMERSSFEKNPIDFLEAKGYKEVKKDLIIKLPKYSLFELENGRKRMLASAGELQKGNE | |
| | LALPSKYVNFLYLASHYEKLKGSPEDNEQKQLFVEQHKHYLDEIIEQISEFSKRVILADANLDKVLSAY | |
| | NKHRDKPIREQAENIIHLFTLTNLGAPAAFKYFDTTIDRKRYTSTKEVLDATLIHQSITGLYETRIDLS | |
| | QLGGDKRTADGSEFESPKKKAKVE | |
| PL12119 | MPAAKRVKLDGGTAPLEEEYRLFLEAPIQNVTLLEQWKREIPKVWAEINPPGLASTQAPIHVQLLSTAL | 16,158 |
| | PVRVRQYPITLEAKRSLRETIRKFRAAGILRPVHSPWNTPLLPVRKSGTSEYRMVQDLREVNKRVETIH | |
| | PTVPNPYTLLSLLPPDRIWYSVLDLKDAFFCIPLAPESQLIFAFEWADAEEGESGQLTWTRLPQGFKNS | |
| | PTLFNEALNRDLQGFRLDHPSVSLLQYVDDLLIAADTQAACLSATRDLLMTLAELGYRVSGKKAQLCQE | |
| | EVTYLGFKIHKGSRSLSNSRTQAILQIPVPKTKRQVREFLGKIGYCRLFIPGFAELAQPLYAATRPGND | |
| | PLVWGEKEEEAFQSLKLALTQPPALALPSLDKPFQLFVEETSGAAKGVLTQALGPWKRPVAYLSKRLDP | |
| | VAAGWPRCLRAIAAAALLTREASKLTFGQDIEITSSHNLESLLRSPPDKWLTNARITQYQVLLLDPPRV | |
| | RFKQTAALNPATLLPETDDTLPIHHCLDTLDSLTSTRPDLTDQPLAQAEATLFTDGSSYIRDGKRYAGA | |
| | AVVTLDSVIWAEPLPIGTSAQKAELIALTKALEWSKDKSVNIYTDSRYAFATLHVHGMIYRERGWLTAG | |
| | GKAIKNAPEILALLTAVWLPKRVAVMHCKGHQKDDAPTSTGNRRADEVAREVAIRPLSTQATISAEAAA | |
| | KEAAAKEAAAKEAAAKALEAEAAAKEAAAKEAAAKEAAAKAMASNFTQFVLVDNGGTGDVTVAPSNFAN | |
| | GIAEWISSNSRSQAYKVTCSVRQSSAQNRKYTIKVEVPKGAWRSYLNMELTIPIFATNSDCELIVKAMQ | |
| | GLLKDGNPIPSAIAANSGIYGGSGGSMASNFTQFVLVDNGGTGDVTVAPSNFANGIAEWISSNSRSQAY | |
| | KVTCSVRQSSAQNRKYTIKVEVPKGAWRSYLNMELTIPIFATNSDCELIVKAMQGLLKDGNPIPSAIAA | |
| | NSGIYGGGSGGGSGGGSGGGSMASNFTQFVLVDNGGTGDVTVAPSNFANGIAEWISSNSRSQAYKVTCS | |
| | VRQSSAQNRKYTIKVEVPKGAWRSYLNMELTIPIFATNSDCELIVKAMQGLLKDGNPIPSAIAANSGIY | |
| | GGSGGSMASNFTQFVLVDNGGTGDVTVAPSNFANGIAEWISSNSRSQAYKVTCSVRQSSAQNRKYTIKV | |
| | EVPKGAWRSYLNMELTIPIFATNSDCELIVKAMQGLLKDGNPIPSAIAANSGIYGSSGSSGSSGSSGSS | |
| | GSSDKKYSIGLDIGTNSVGWAVITDEYKVPSKKFKVLGNTDRHSIKKNLIGALLFDSGETAEATRLKRT | |
| | ARRRYTRRKNRICYLQEIFSNEMAKVDDSFFHRLEESFLVEEDKKHERHPIFGNIVDEVAYHEKYPTIY | |
| | HLRKKLVDSTDKADLRLIYLALAHMIKFRGHFLIEGDLNPDNSDVDKLFIQLVQTYNQLFEENPINASG | |
| | VDAKAILSARLSKSRRLENLIAQLPGEKKNGLFGNLIALSLGLTPNFKSNFDLAEDAKLQLSKDTYDDD | |
| | LDNLLAQIGDQYADLFLAAKNLSDAILLSDILRVNTEITKAPLSASMIKRYDEHHQDLTLLKALVRQQL | |
| | PEKYKEIFFDQSKNGYAGYIDGGASQEEFYKFIKPILEKMDGTEELLVKLNREDLLRKQRTFDNGSIPH | |
| | QIHLGELHAILRRQEDFYPFLKDNREKIEKILTFRIPYYVGPLARGNSRFAWMTRKSEETITPWNFEEV | |
| | VDKGASAQSFIERMTNFDKNLPNEKVLPKHSLLYEYFTVYNELTKVKYVTEGMRKPAFLSGEQKKAIVD | |
| | LLFKTNRKVTVKQLKEDYFKKIECFDSVEISGVEDRFNASLGTYHDLLKIIKDKDFLDNEENEDILEDI | |
| | VLTLTLFEDREMIEERLKTYAHLFDDKVMKQLKRRRYTGWGRLSRKLINGIRDKQSGKTILDFLKSDGF | |
| | ANRNFMQLIHDDSLTFKEDIQKAQVSGQGDSLHEHIANLAGSPAIKKGILQTVKVVDELVKVMGRHKPE | |
| | NIVIEMARENQTTQKGQKNSRERMKRIEEGIKELGSQILKEHPVENTQLQNEKLYLYYLQNGRDMYVDQ | |
| | ELDINRLSDYDVDHIVPQSFLKDDSIDNKVLTRSDKARGKSDNVPSEEVVKKMKNYWRQLLNAKLITQR | |
| | KFDNLTKAERGGLSELDKAGFIKRQLVETRQITKHVAQILDSRMNTKYDENDKLIREVKVITLKSKLVS | |
| | DFRKDFQFYKVREINNYHHAHDAYLNAVVGTALIKKYPKLESEFVYGDYKVYDVRKMIAKSEQEIGKAT | |
| | AKYFFYSNIMNFFKTEITLANGEIRKRPLIETNGETGEIVWDKGRDFATVRKVLSMPQVNIVKKTEVQT | |
| | GGFSKESILPKRNSDKLIARKKDWDPKKYGGFDSPTVAYSVLVVAKVEKGKSKKLKSVKELLGITIMER | |
| | SSFEKNPIDFLEAKGYKEVKKDLIIKLPKYSLFELENGRKRMLASAGELQKGNELALPSKYVNFLYLAS | |
| | HYEKLKGSPEDNEQKQLFVEQHKHYLDEIIEQISEFSKRVILADANLDKVLSAYNKHRDKPIREQAENI | |
| | IHLFTLTNLGAPAAFKYFDTTIDRKRYTSTKEVLDATLIHQSITGLYETRIDLSQLGGDKRTADGSEFE | |
| | SPKKKAKVE | |
| PL12120 | MPAAKRVKLDGGTAPLEEEYRLFLEAPIQNVTLLEQWKREIPKVWAEINPPGLASTQAPIHVQLLSTAL | 16,159 |
| | PVRVRQYPITLEAKRSLRETIRKFRAAGILRPVHSPWNTPLLPVRKSGTSEYRMVQDLREVNKRVETIH | |
| | PTVPNPYTLLSLLPPDRIWYSVLDLKDAFFCIPLAPESQLIFAFEWADAEEGESGQLTWTRLPQGFKNS | |
| | PTLFNEALNRDLQGFRLDHPSVSLLQYVDDLLIAADTQAACLSATRDLLMTLAELGYRVSGKKAQLCQE | |
| | EVTYLGFKIHKGSRSLSNSRTQAILQIPVPKTKRQVREFLGKIGYCRLFIPGFAELAQPLYAATRPGND | |
| | PLVWGEKEEEAFQSLKLALTQPPALALPSLDKPFQLFVEETSGAAKGVLTQALGPWKRPVAYLSKRLDP | |
| | VAAGWPRCLRAIAAAALLTREASKLTFGQDIEITSSHNLESLLRSPPDKWLTNARITQYQVLLLDPPRV | |
| | RFKQTAALNPATLLPETDDTLPIHHCLDTLDSLTSTRPDLTDQPLAQAEATLFTDGSSYIRDGKRYAGA | |
| | AVVTLDSVIWAEPLPIGTSAQKAELIALTKALEWSKDKSVNIYTDSRYAFATLHVHGMIYRERGWLTAG | |
| | GKAIKNAPEILALLTAVWLPKRVAVMHCKGHQKDDAPTSTGNRRADEVAREVAIRPLSTQATISAEAAA | |
| | KEAAAKEAAAKEAAAKALEAEAAAKEAAAKEAAAKEAAAKAMASNFTQFVLVDNGGTGDVTVAPSNFAN | |
| | GIAEWISSNSRSQAYKVTCSVRQSSAQNRKYTIKVEVPKGAWRSYLNMELTIPIFATNSDCELIVKAMQ | |
| | GLLKDGNPIPSAIAANSGIYGGSGGSMASNFTQFVLVDNGGTGDVTVAPSNFANGIAEWISSNSRSQAY | |
| | KVTCSVRQSSAQNRKYTIKVEVPKGAWRSYLNMELTIPIFATNSDCELIVKAMQGLLKDGNPIPSAIAA | |
| | NSGIYGGGSGGGSGGGSGGGSMASNFTQFVLVDNGGTGDVTVAPSNFANGIAEWISSNSRSQAYKVTCS | |
| | VRQSSAQNRKYTIKVEVPKGAWRSYLNMELTIPIFATNSDCELIVKAMQGLLKDGNPIPSAIAANSGIY | |
| | GGSGGSMASNFTQFVLVDNGGTGDVTVAPSNFANGIAEWISSNSRSQAYKVTCSVRQSSAQNRKYTIKV | |
| | EVPKGAWRSYLNMELTIPIFATNSDCELIVKAMQGLLKDGNPIPSAIAANSGIYGSSGGGEAAAVEEDK | |
| | KKDKKYSIGLDIGTNSVGWAVITDEYKVPSKKFKVLGNTDRHSIKKNLIGALLFDSGETAEATRLKRTA | |
| | RRRYTRRKNRICYLQEIFSNEMAKVDDSFFHRLEESFLHERHPIFGNIVDEVAYHEKYPTIYHLRKKLV | |
| | DSTDKADLRLIYLALAHMIKFRGHFLIEGDLNPDNSDVDKLFIQLVQTYNQLFEENPINASGVDAKAIL | |
| | SARLSKSRRLENLIAQLPGEKKNGLFGNLIALSLGLTPNFKSNFDLAEDAKLQLSKDTYDDDLDNLLAQ | |
| | IGDQYADLFLAAKNLSDAILLSDILRVNTEITKAPLSASMIKRYDEHHQDLTLLKALVRQQLPEKYKEI | |
| | FFDQSKNGYAGYIDGGASQEEFYKFIKPILEKMDGTEELLVKLNREDLLRKQRTFDNGSIPHQIHLGEL | |
| | HAILRRQEDFYPFLKDNREKIEKILTFRIPYYVGPLARGNSRFAWMTRKSEETITPWNFEEVVDKGASA | |
| | QSFIERMTNFDKNLPNEKVLPKHSLLYEYFTVYNELTKVKYVTEGMRKPAFLSGEQKKAIVDLLFKTNR | |
| | KVTVKQLKEDYFKKIECFDSVEISGVEDRFNASLGTYHDLLKIIKDKDFLDNEENEDILEDIVLTLTLF | |
| | EDREMIEERLKTYAHLFDDKVMKQLKRRRYTGWGRLSRKLINGIRDKQSGKTILDFLKSDGFANRNFMQ | |
| | LIHDDSLTFKEDIQKAQVSGQGDSLHEHIANLAGSPAIKKGILQTVKVVDELVKVMGRHKPENIVIEMA | |
| | RENQTTQKGQKNSRERMKRIEEGIKELGSQILKEHPVENTQLQNEKLYLYYLQNGRDMYVDQELDINRL | |
| | SDYDVDHIVPQSFLKDDSIDNKVLTRSDKARGKSDNVPSEEVVKKMKNYWRQLLNAKLITQRKFDNLTK | |
| | AERGGLSELDKAGFIKRQLVETRQITKHVAQILDSRMNTKYDENDKLIREVKVITLKSKLVSDFRKDFQ | |
| | FYKVREINNYHHAHDAYLNAVVGTALIKKYPKLESEFVYGDYKVYDVRKMIAKSEQEIGKATAKYFFYS | |
| | NIMNFFKTEITLANGEIRKRPLIETNGETGEIVWDKGRDFATVRKVLSMPQVNIVKKTEVQTGGFSKES | |
| | ILPKRNSDKLIARKKDWDPKKYGGFDSPTVAYSVLVVAKVEKGKSKKLKSVKELLGITIMERSSFEKNP | |
| | IDFLEAKGYKEVKKDLIIKLPKYSLFELENGRKRMLASAGELQKGNELALPSKYVNFLYLASHYEKLKG | |
| | SPEDNEQKQLFVEQHKHYLDEIIEQISEFSKRVILADANLDKVLSAYNKHRDKPIREQAENIIHLFTLT | |
| | NLGAPAAFKYFDTTIDRKRYTSTKEVLDATLIHQSITGLYETRIDLSQLGGDKRTADGSEFESPKKKAK | |
| | VE | |
| PL12121 | MPAAKRVKLDGGTAPLEEEYRLFLEAPIQNVTLLEQWKREIPKVWAEINPPGLASTQAPIHVQLLSTAL | 16,160 |
| | PVRVRQYPITLEAKRSLRETIRKFRAAGILRPVHSPWNTPLLPVRKSGTSEYRMVQDLREVNKRVETIH | |
| | PTVPNPYTLLSLLPPDRIWYSVLDLKDAFFCIPLAPESQLIFAFEWADAEEGESGQLTWTRLPQGFKNS | |
| | PTLFNEALNRDLQGFRLDHPSVSLLQYVDDLLIAADTQAACLSATRDLLMTLAELGYRVSGKKAQLCQE | |
| | EVTYLGFKIHKGSRSLSNSRTQAILQIPVPKTKRQVREFLGKIGYCRLFIPGFAELAQPLYAATRPGND | |
| | PLVWGEKEEEAFQSLKLALTQPPALALPSLDKPFQLFVEETSGAAKGVLTQALGPWKRPVAYLSKRLDP | |
| | VAAGWPRCLRAIAAAALLTREASKLTFGQDIEITSSHNLESLLRSPPDKWLTNARITQYQVLLLDPPRV | |
| | RFKQTAALNPATLLPETDDTLPIHHCLDTLDSLTSTRPDLTDQPLAQAEATLFTDGSSYIRDGKRYAGA | |
| | AVVTLDSVIWAEPLPIGTSAQKAELIALTKALEWSKDKSVNIYTDSRYAFATLHVHGMIYRERGWLTAG | |
| | GKAIKNAPEILALLTAVWLPKRVAVMHCKGHQKDDAPTSTGNRRADEVAREVAIRPLSTQATISSGGSS | |
| | GGSSGSETPGTSESATPESSGGSSGGSSMASNFTQFVLVDNGGTGDVTVAPSNFANGIAEWISSNSRSQ | |
| | AYKVTCSVRQSSAQNRKYTIKVEVPKGAWRSYLNMELTIPIFATNSDCELIVKAMQGLLKDGNPIPSAI | |
| | AANSGIYAEAAAKEAAAKEAAAKEAAAKALEAEAAAKEAAAKEAAAKEAAAKADKKYSIGLDIGTNSVG | |
| | WAVITDEYKVPSKKFKVLGNTDRHSIKKNLIGALLFDSGETAEATRLKRTARRRYTRRKNRICYLQEIF | |
| | SNEMAKVDDSFFHRLEESFLVEEDKKHERHPIFGNIVDEVAYHEKYPTIYHLRKKLVDSTDKADLRLIY | |
| | LALAHMIKFRGHFLIEGDLNPDNSDVDKLFIQLVQTYNQLFEENPINASGVDAKAILSARLSKSRRLEN | |
| | LIAQLPGEKKNGLFGNLIALSLGLTPNFKSNFDLAEDAKLQLSKDTYDDDLDNLLAQIGDQYADLFLAA | |
| | KNLSDAILLSDILRVNTEITKAPLSASMIKRYDEHHQDLTLLKALVRQQLPEKYKEIFFDQSKNGYAGY | |
| | IDGGASQEEFYKFIKPILEKMDGTEELLVKLNREDLLRKQRTFDNGSIPHQIHLGELHAILRRQEDFYP | |
| | FLKDNREKIEKILTFRIPYYVGPLARGNSRFAWMTRKSEETITPWNFEEVVDKGASAQSFIERMTNFDK | |
| | NLPNEKVLPKHSLLYEYFTVYNELTKVKYVTEGMRKPAFLSGEQKKAIVDLLFKTNRKVTVKQLKEDYF | |
| | KKIECFDSVEISGVEDRFNASLGTYHDLLKIIKDKDFLDNEENEDILEDIVLTLTLFEDREMIEERLKT | |
| | YAHLFDDKVMKQLKRRRYTGWGRLSRKLINGIRDKQSGKTILDFLKSDGFANRNFMQLIHDDSLTFKED | |
| | IQKAQVSGQGDSLHEHIANLAGSPAIKKGILQTVKVVDELVKVMGRHKPENIVIEMARENQTTQKGQKN | |
| | SRERMKRIEEGIKELGSQILKEHPVENTQLQNEKLYLYYLQNGRDMYVDQELDINRLSDYDVDHIVPQS | |
| | FLKDDSIDNKVLTRSDKARGKSDNVPSEEVVKKMKNYWRQLLNAKLITQRKFDNLTKAERGGLSELDKA | |
| | GFIKRQLVETRQITKHVAQILDSRMNTKYDENDKLIREVKVITLKSKLVSDFRKDFQFYKVREINNYHH | |
| | AHDAYLNAVVGTALIKKYPKLESEFVYGDYKVYDVRKMIAKSEQEIGKATAKYFFYSNIMNFFKTEITL | |
| | ANGEIRKRPLIETNGETGEIVWDKGRDFATVRKVLSMPQVNIVKKTEVQTGGFSKESILPKRNSDKLIA | |
| | RKKDWDPKKYGGFDSPTVAYSVLVVAKVEKGKSKKLKSVKELLGITIMERSSFEKNPIDFLEAKGYKEV | |
| | KKDLIIKLPKYSLFELENGRKRMLASAGELQKGNELALPSKYVNFLYLASHYEKLKGSPEDNEQKQLFV | |
| | HEQKHYLDEIIEQISEFSKRVILADANLDKVLSAYNKHRDKPIREQAENIIHLFTLTNLGAPAAFKYFD | |
| | TTIDRKRYTSTKEVLDATLIHQSITGLYETRIDLSQLGGDKRTADGSEFESPKKKAKVE | |
| PL12122 | MPAAKRVKLDGGTAPLEEEYRLFLEAPIQNVTLLEQWKREIPKVWAEINPPGLASTQAPIHVQLLSTAL | 16,161 |
| | PVRVRQYPITLEAKRSLRETIRKFRAAGILRPVHSPWNTPLLPVRKSGTSEYRMVQDLREVNKRVETIH | |
| | PTPTVPNPYTLLSLLPPDRIWYSVLDLKDAFFCIPLAPESQLIFAFEWADAEEGESGQLTWTRLPQGFK | |
| | NSLFNEALNRDLQGFRLDHPSVSLLQYVDDLLIAADTQAACLSATRDLLMTLAELGYRVSGKKAQLCQE | |
| | EVTYLGFKIHKGSRSLSNSRTQAILQIPVPKTKRQVREFLGKIGYCRLFIPGFAELAQPLYAATRPGND | |
| | PLVWGEKEEEAFQSLKLALTQPPALALPSLDKPFQLFVEETSGAAKGVLTQALGPWKRPVAYLSKRLDP | |
| | VAAGWPRCLRAIAAAALLTREASKLTFGQDIEITSSHNLESLLRSPPDKWLTNARITQYQVLLLDPPRV | |
| | RFKQTAALNPATLLPETDDTLPIHHCLDTLDSLTSTRPDLTDQPLAQAEATLFTDGSSYIRDGKRYAGA | |
| | AVVTLDSVIWAEPLPIGTSAQKAELIALTKALEWSKDKSVNIYTDSRYAFATLHVHGMIYRERGWLTAG | |
| | GKAIKNAPEILALLTAVWLPKRVAVMHCKGHQKDDAPTSTGNRRADEVAREVAIRPLSTQATISSGGSS | |
| | GGSSGSETPGTSESATPESSGGSSGGSSMASNFTQFVLVDNGGTGDVTVAPSNFANGIAEWISSNSRSQ | |
| | AYKVTCSVRQSSAQNRKYTIKVEVPKGAWRSYLNMELTIPIFATNSDCELIVKAMQGLLKDGNPIPSAI | |
| | AANSGIYSGGSSGGSSGSETPGTSESATPESSGGSSGGSSDKKYSIGLDIGTNSVGWAVITDEYKVPSK | |
| | KFKVLGNTDRHSIKKNLIGALLFDSGETAEATRLKRTARRRYTRRKNRICYLQEIFSNEMAKVDDSFFH | |
| | RLEESFLVEEDKKHERHPIFGNIVDEVAYHEKYPTIYHLRKKLVDSTDKADLRLIYLALAHMIKFRGHF | |
| | LIEGDLNPDNSDVDKLFIQLVQTYNQLFEENPINASGVDAKAILSARLSKSRRLENLIAQLPGEKKNGL | |
| | FGNLIALSLGLTPNFKSNFDLAEDAKLQLSKDTYDDDLDNLLAQIGDQYADLFLAAKNLSDAILLSDIL | |
| | RVNTEITKAPLSASMIKRYDEHHQDLTLLKALVRQQLPEKYKEIFFDQSKNGYAGYIDGGASQEEFYKF | |
| | IKPILEKMDGTEELLVKLNREDLLRKQRTFDNGSIPHQIHLGELHAILRRQEDFYPFLKDNREKIEKIL | |
| | TFRIPYYVGPLARGNSRFAWMTRKSEETITPWNFEEVVDKGASAQSFIERMTNFDKNLPNEKVLPKHSL | |
| | LYEYFTVYNELTKVKYVTEGMRKPAFLSGEQKKAIVDLLFKTNRKVTVKQLKEDYFKKIECFDSVEISG | |
| | VEDRFNASLGTYHDLLKIIKDKDFLDNEENEDILEDIVLTLTLFEDREMIEERLKTYAHLFDDKVMKQL | |
| | KRRRYTGWGRLSRKLINGIRDKQSGKTILDFLKSDGFANRNFMQLIHDDSLTFKEDIQKAQVSGQGDSL | |
| | HEHIANLAGSPAIKKGILQTVKVVDELVKVMGRHKPENIVIEMARENQTTQKGQKNSRERMKRIEEGIK | |
| | ELGSQILKEHPVENTQLQNEKLYLYYLQNGRDMYVDQELDINRLSDYDVDHIVPQSFLKDDSIDNKVLT | |
| | RSDKARGKSDNVPSEEVVKKMKNYWRQLLNAKLITQRKFDNLTKAERGGLSELDKAGFIKRQLVETRQI | |
| | TKHVAQILDSRMNTKYDENDKLIREVKVITLKSKLVSDFRKDFQFYKVREINNYHHAHDAYLNAVVGTA | |
| | LIKKYPKLESEFVYGDYKVYDVRKMIAKSEQEIGKATAKYFFYSNIMNFFKTEITLANGEIRKRPLIET | |
| | NGETGEIVWDKGRDFATVRKVLSMPQVNIVKKTEVQTGGFSKESILPKRNSDKLIARKKDWDPKKYGGF | |
| | DSPTVAYSVLVVAKVEKGKSKKLKSVKELLGITIMERSSFEKNPIDFLEAKGYKEVKKDLIIKLPKYSL | |
| | FELENGRKRMLASAGELQKGNELALPSKYVNFLYLASHYEKLKGSPEDNEQKQLFVEQHKHYLDEIIEQ | |
| | ISEFSKRVILADANLDKVLSAYNKHRDKPIREQAENIIHLFTLTNLGAPAAFKYFDTTIDRKRYTSTKE | |
| | VLDATLIHQSITGLYETRIDLSQLGGDKRTADGSEFESPKKKAKVE | |
| PL12123 | MPAAKRVKLDGGTAPLEEEYRLFLEAPIQNVTLLEQWKREIPKVWAEINPPGLASTQAPIHVQLLSTAL | 16,162 |
| | PVRVRQYPITLEAKRSLRETIRKFRAAGILRPVHSPWNTPLLPVRKSGTSEYRMVQDLREVNKRVETIH | |
| | PTVPNPYTLLSLLPPDRIWYSVLDLKDAFFCIPLAPESQLIFAFEWADAEEGESGQLTWTRLPQGFKNS | |
| | PTLFNEALNRDLQGFRLDHPSVSLLQYVDDLLIAADTQAACLSATRDLLMTLAELGYRVSGKKAQLCQE | |
| | EVTYLGFKIHKGSRSLSNSRTQAILQIPVPKTKRQVREFLGKIGYCRLFIPGFAELAQPLYAATRPGND | |
| | PLVWGEKEEEAFQSLKLALTQPPALALPSLDKPFQLFVEETSGAAKGVLTQALGPWKRPVAYLSKRLDP | |
| | VAAGWPRCLRAIAAAALLTREASKLTFGQDIEITSSHNLESLLRSPPDKWLTNARITQYQVLLLDPPRV | |
| | RFKQTAALNPATLLPETDDTLPIHHCLDTLDSLTSTRPDLTDQPLAQAEATLFTDGSSYIRDGKRYAGA | |
| | AVVTLDSVIWAEPLPIGTSAQKAELIALTKALEWSKDKSVNIYTDSRYAFATLHVHGMIYRERGWLTAG | |
| | GKAIKNAPEILALLTAVWLPKRVAVMHCKGHQKDDAPTSTGNRRADEVAREVAIRPLSTQATISSGGSS | |
| | GGSSGSETPGTSESATPESSGGSSGGSSMASNFTQFVLVDNGGTGDVTVAPSNFANGIAEWISSNSRSQ | |
| | AYKVTCSVRQSSAQNRKYTIKVEVPKGAWRSYLNMELTIPIFATNSDCELIVKAMQGLLKDGNPIPSAI | |
| | AANSGIYGSSGSSGSSGSSGSSGSSDKKYSIGLDIGTNSVGWAVITDEYKVPSKKFKVLGNTDRHSIKK | |
| | NLIGALLFDSGETAEATRLKRTARRRYTRRKNRICYLQEIFSNEMAKVDDSFFHRLEESFLVEEDKKHE | |
| | RHPIFGNIVDEVAYHEKYPTIYHLRKKLVDSTDKADLRLIYLALAHMIKFRGHFLIEGDLNPDNSDVDK | |
| | LFIQLVQTYNQLFEENPINASGVDAKAILSARLSKSRRLENLIAQLPGEKKNGLFGNLIALSLGLTPNF | |
| | KSNFDLAEDAKLQLSKDTYDDDLDNLLAQIGDQYADLFLAAKNLSDAILLSDILRVNTEITKAPLSASM | |
| | IKRYDEHHQDLTLLKALVRQQLPEKYKEIFFDQSKNGYAGYIDGGASQEEFYKFIKPILEKMDGTEELL | |
| | VKLNREDLLRKQRTFDNGSIPHQIHLGELHAILRRQEDFYPFLKDNREKIEKILTFRIPYYVGPLARGN | |
| | SRFAWMTRKSEETITPWNFEEVVDKGASAQSFIERMTNFDKNLPNEKVLPKHSLLYEYFTVYNELTKVK | |
| | YVTEGMRKPAFLSGEQKKAIVDLLFKTNRKVTVKQLKEDYFKKIECFDSVEISGVEDRFNASLGTYHDL | |
| | LKIIKDKDFLDNEENEDILEDIVLTLTLFEDREMIEERLKTYAHLFDDKVMKQLKRRRYTGWGRLSRKL | |
| | INGIRDKQSGKTILDFLKSDGFANRNFMQLIHDDSLTFKEDIQKAQVSGQGDSLHEHIANLAGSPAIKK | |
| | GILQTVKVVDELVKVMGRHKPENIVIEMARENQTTQKGQKNSRERMKRIEEGIKELGSQILKEHPVENT | |
| | QLQNEKLYLYYLQNGRDMYVDQELDINRLSDYDVDHIVPQSFLKDDSIDNKVLTRSDKARGKSDNVPSE | |
| | EVVKKMKNYWRQLLNAKLITQRKFDNLTKAERGGLSELDKAGFIKRQLVETRQITKHVAQILDSRMNTK | |
| | YDENDKLIREVKVITLKSKLVSDFRKDFQFYKVREINNYHHAHDAYLNAVVGTALIKKYPKLESEFVYG | |
| | DYKVYDVRKMIAKSEQEIGKATAKYFFYSNIMNFFKTEITLANGEIRKRPLIETNGETGEIVWDKGRDF | |
| | ATVRKVLSMPQVNIVKKTEVQTGGFSKESILPKRNSDKLIARKKDWDPKKYGGFDSPTVAYSVLVVAKV | |
| | EKGKSKKLKSVKELLGITIMERSSFEKNPIDFLEAKGYKEVKKDLIIKLPKYSLFELENGRKRMLASAG | |
| | ELQKGNELALPSKYVNFLYLASHYEKLKGSPEDNEQKQLFVEQHKHYLDEIIEQISEFSKRVILADANL | |
| | DKVLSAYNKHRDKPIREQAENIIHLFTLTNLGAPAAFKYFDTTIDRKRYTSTKEVLDATLIHQSITGLY | |
| | ETRIDLSQLGGDKRTADGSEFESPKKKAKVE | |
| PL12124 | MPAAKRVKLDGGTAPLEEEYRLFLEAPIQNVTLLEQWKREIPKVWAEINPPGLASTQAPIHVQLLSTAL | 16,163 |
| | PVRVRQYPITLEAKRSLRETIRKFRAAGILRPVHSPWNTPLLPVRKSGTSEYRMVQDLREVNKRVETIH | |
| | PTPTVPNPYTLLSLLPPDRIWYSVLDLKDAFFCIPLAPESQLIFAFEWADAEEGESGQLTWTRLPQGFK | |
| | NSLFNEALNRDLQGFRLDHPSVSLLQYVDDLLIAADTQAACLSATRDLLMTLAELGYRVSGKKAQLCQE | |
| | EVTYLGFKIHKGSRSLSNSRTQAILQIPVPKTKRQVREFLGKIGYCRLFIPGFAELAQPLYAATRPGND | |
| | PLVWGEKEEEAFQSLKLALTQPPALALPSLDKPFQLFVEETSGAAKGVLTQALGPWKRPVAYLSKRLDP | |
| | VAAGWPRCLRAIAAAALLTREASKLTFGQDIEITSSHNLESLLRSPPDKWLTNARITQYQVLLLDPPRV | |
| | RFKQTAALNPATLLPETDDTLPIHHCLDTLDSLTSTRPDLTDQPLAQAEATLFTDGSSYIRDGKRYAGA | |
| | AVVTLDSVIWAEPLPIGTSAQKAELIALTKALEWSKDKSVNIYTDSRYAFATLHVHGMIYRERGWLTAG | |
| | GKAIKNAPEILALLTAVWLPKRVAVMHCKGHQKDDAPTSTGNRRADEVAREVAIRPLSTQATISSGGSS | |
| | GGSSGSETPGTSESATPESSGGSSGGSSMASNFTQFVLVDNGGTGDVTVAPSNFANGIAEWISSNSRSQ | |
| | AYKVTCSVRQSSAQNRKYTIKVEVPKGAWRSYLNMELTIPIFATNSDCELIVKAMQGLLKDGNPIPSAI | |
| | AANSGIYGSSGGGEAAAKDKKYSIGLDIGTNSVGWAVITDEYKVPSKKFKVLGNTDRHSIKKNLIGALL | |
| | FDSGETAEATRLKRTARRRYTRRKNRICYLQEIFSNEMAKVDDSFFHRLEESFLVEEDKKHERHPIFGN | |
| | IVDEVAYHEKYPTIYHLRKKLVDSTDKADLRLIYLALAHMIKFRGHFLIEGDLNPDNSDVDKLFIQLVQ | |
| | TYNQLFEENPINASGVDAKAILSARLSKSRRLENLIAQLPGEKKNGLFGNLIALSLGLTPNFKSNFDLA | |
| | EDAKLQLSKDTYDDDLDNLLAQIGDQYADLFLAAKNLSDAILLSDILRVNTEITKAPLSASMIKRYDEH | |
| | HQDLTLLKALVRQQLPEKYKEIFFDQSKNGYAGYIDGGASQEEFYKFIKPILEKMDGTEELLVKLNRED | |
| | LLRKQRTFDNGSIPHQIHLGELHAILRRQEDFYPFLKDNREKIEKILTFRIPYYVGPLARGNSRFAWMT | |
| | RKSEETITPWNFEEVVDKGASAQSFIERMTNFDKNLPNEKVLPKHSLLYEYFTVYNELTKVKYVTEGMR | |
| | KPAFLSGEQKKAIVDLLFKTNRKVTVKQLKEDYFKKIECFDSVEISGVEDRFNASLGTYHDLLKIIKDK | |
| | DFLDNEENEDILEDIVLTLTLFEDREMIEERLKTYAHLFDDKVMKQLKRRRYTGWGRLSRKLINGIRDK | |
| | QSGKTILDFLKSDGFANRNFMQLIHDDSLTFKEDIQKAQVSGQGDSLHEHIANLAGSPAIKKGILQTVK | |
| | VVDELVKVMGRHKPENIVIEMARENQTTQKGQKNSRERMKRIEEGIKELGSQILKEHPVENTQLQNEKL | |
| | YLYYLQNGRDMYVDQELDINRLSDYDVDHIVPQSFLKDDSIDNKVLTRSDKARGKSDNVPSEEVVKKMK | |
| | NYWRQLLNAKLITQRKFDNLTKAERGGLSELDKAGFIKRQLVETRQITKHVAQILDSRMNTKYDENDKL | |
| | IREVKVITLKSKLVSDFRKDFQFYKVREINNYHHAHDAYLNAVVGTALIKKYPKLESEFVYGDYKVYDV | |
| | RKMIAKSEQEIGKATAKYFFYSNIMNFFKTEITLANGEIRKRPLIETNGETGEIVWDKGRDFATVRKVL | |
| | SMPQVNIVKKTEVQTGGFSKESILPKRNSDKLIARKKDWDPKKYGGFDSPTVAYSVLVVAKVEKGKSKK | |
| | LKSVKELLGITIMERSSFEKNPIDFLEAKGYKEVKKDLIIKLPKYSLFELENGRKRMLASAGELQKGNE | |
| | LALPSKYVNFLYLASHYEKLKGSPEDNEQKQLFVEQHKHYLDEIIEQISEFSKRVILADANLDKVLSAY | |
| | NKHRDKPIREQAENIIHLFTLTNLGAPAAFKYFDTTIDRKRYTSTKEVLDATLIHQSITGLYETRIDLS | |
| | QLGGDKRTADGSEFESPKKKAKVE | |
| PL12125 | MPAAKRVKLDGGTAPLEEEYRLFLEAPIQNVTLLEQWKREIPKVWAEINPPGLASTQAPIHVQLLSTAL | 16,164 |
| | PVRVRQYPITLEAKRSLRETIRKFRAAGILRPVHSPWNTPLLPVRKSGTSEYRMVQDLREVNKRVETIH | |
| | PTVPNPYTLLSLLPPDRIWYSVLDLKDAFFCIPLAPESQLIFAFEWADAEEGESGQLTWTRLPQGFKNS | |
| | PTLFNEALNRDLQGFRLDHPSVSLLQYVDDLLIAADTQAACLSATRDLLMTLAELGYRVSGKKAQLCQE | |
| | EVTYLGFKIHKGSRSLSNSRTQAILQIPVPKTKRQVREFLGKIGYCRLFIPGFAELAQPLYAATRPGND | |
| | PLVWGEKEEEAFQSLKLALTQPPALALPSLDKPFQLFVEETSGAAKGVLTQALGPWKRPVAYLSKRLDP | |
| | VAAGWPRCLRAIAAAALLTREASKLTFGQDIEITSSHNLESLLRSPPDKWLTNARITQYQVLLLDPPRV | |
| | RFKQTAALNPATLLPETDDTLPIHHCLDTLDSLTSTRPDLTDQPLAQAEATLFTDGSSYIRDGKRYAGA | |
| | AVVTLDSVIWAEPLPIGTSAQKAELIALTKALEWSKDKSVNIYTDSRYAFATLHVHGMIYRERGWLTAG | |
| | GKAIKNAPEILALLTAVWLPKRVAVMHCKGHQKDDAPTSTGNRRADEVAREVAIRPLSTQATISSGGSS | |
| | GGSSGSETPGTSESATPESSGGSSGGSSMASNFTQFVLVDNGGTGDVTVAPSNFANGIAEWISSNSRSQ | |
| | AYKVTCSVRQSSAQNRKYTIKVEVPKGAWRSYLNMELTIPIFATNSDCELIVKAMQGLLKDGNPIPSAI | |
| | AANSGIYGGSGGSMASNFTQFVLVDNGGTGDVTVAPSNFANGIAEWISSNSRSQAYKVTCSVRQSSAQN | |
| | RKYTIKVEVPKGAWRSYLNMELTIPIFATNSDCELIVKAMQGLLKDGNPIPSAIAANSGIYAEAAAKEA | |
| | AAKEAAAKEAAAKALEAEAAAKEAAAKEAAAKEAAAKADKKYSIGLDIGTNSVGWAVITDEYKVPSKKF | |
| | KVLGNTDRHSIKKNLIGALLFDSGETAEATRLKRTARRRYTRRKNRICYLQEIFSNEMAKVDDSFFHRL | |
| | EESFLVEEDKKHERHPIFGNIVDEVAYHEKYPTIYHLRKKLVDSTDKADLRLIYLALAHMIKFRGHFLI | |
| | EGDLNPDNSDVDKLFIQLVQTYNQLFEENPINASGVDAKAILSARLSKSRRLENLIAQLPGEKKNGLFG | |
| | NLIALSLGLTPNFKSNFDLAEDAKLQLSKDTYDDDLDNLLAQIGDQYADLFLAAKNLSDAILLSDILRV | |
| | NTEITKAPLSASMIKRYDEHHQDLTLLKALVRQQLPEKYKEIFFDQSKNGYAGYIDGGASQEEFYKFIK | |
| | PILEKMDGTEELLVKLNREDLLRKQRTFDNGSIPHQIHLGELHAILRRQEDFYPFLKDNREKIEKILTF | |
| | RIPYYVGPLARGNSRFAWMTRKSEETITPWNFEEVVDKGASAQSFIERMTNFDKNLPNEKVLPKHSLLY | |
| | EYFTVYNELTKVKYVTEGMRKPAFLSGEQKKAIVDLLFKTNRKVTVKQLKEDYFKKIECFDSVEISGVE | |
| | DRFNASLGTYHDLLKIIKDKDFLDNEENEDILEDIVLTLTLFEDREMIEERLKTYAHLFDDKVMKQLKR | |
| | RRYTGWGRLSRKLINGIRDKQSGKTILDFLKSDGFANRNFMQLIHDDSLTFKEDIQKAQVSGQGDSLHE | |
| | HIANLAGSPAIKKGILQTVKVVDELVKVMGRHKPENIVIEMARENQTTQKGQKNSRERMKRIEEGIKEL | |
| | GSQILKEHPVENTQLQNEKLYLYYLQNGRDMYVDQELDINRLSDYDVDHIVPQSFLKDDSIDNKVLTRS | |
| | DKARGKSDNVPSEEVVKKMKNYWRQLLNAKLITQRKFDNLTKAERGGLSELDKAGFIKRQLVETRQITK | |
| | HVAQILDSRMNTKYDENDKLIREVKVITLKSKLVSDFRKDFQFYKVREINNYHHAHDAYLNAVVGTALI | |
| | KKYPKLESEFVYGDYKVYDVRKMIAKSEQEIGKATAKYFFYSNIMNFFKTEITLANGEIRKRPLIETNG | |
| | ETGEIVWDKGRDFATVRKVLSMPQVNIVKKTEVQTGGFSKESILPKRNSDKLIARKKDWDPKKYGGFDS | |
| | PTVAYSVLVVAKVEKGKSKKLKSVKELLGITIMERSSFEKNPIDFLEAKGYKEVKKDLIIKLPKYSLFE | |
| | LENGRKRMLASAGELQKGNELALPSKYVNFLYLASHYEKLKGSPEDNEQKQLFVEQHKHYLDEIIEQIS | |
| | EFSKRVILADANLDKVLSAYNKHRDKPIREQAENIIHLFTLTNLGAPAAFKYFDTTIDRKRYTSTKEVL | |
| | DATLIHQSITGLYETRIDLSQLGGDKRTADGSEFESPKKKAKVE | |
| PL12126 | MPAAKRVKLDGGTAPLEEEYRLFLEAPIQNVTLLEQWKREIPKVWAEINPPGLASTQAPIHVQLLSTAL | 16,165 |
| | PVRVRQYPITLEAKRSLRETIRKFRAAGILRPVHSPWNTPLLPVRKSGTSEYRMVQDLREVNKRVETIH | |
| | PTVPNPYTLLSLLPPDRIWYSVLDLKDAFFCIPLAPESQLIFAFEWADAEEGESGQLTWTRLPQGFKNS | |
| | PTLFNEALNRDLQGFRLDHPSVSLLQYVDDLLIAADTQAACLSATRDLLMTLAELGYRVSGKKAQLCQE | |
| | EVTYLGFKIHKGSRSLSNSRTQAILQIPVPKTKRQVREFLGKIGYCRLFIPGFAELAQPLYAATRPGND | |
| | PLVWGEKEEEAFQSLKLALTQPPALALPSLDKPFQLFVEETSGAAKGVLTQALGPWKRPVAYLSKRLDP | |
| | VAAGWPRCLRAIAAAALLTREASKLTFGQDIEITSSHNLESLLRSPPDKWLTNARITQYQVLLLDPPRV | |
| | RFKQTAALNPATLLPETDDTLPIHHCLDTLDSLTSTRPDLTDQPLAQAEATLFTDGSSYIRDGKRYAGA | |
| | AVVTLDSVIWAEPLPIGTSAQKAELIALTKALEWSKDKSVNIYTDSRYAFATLHVHGMIYRERGWLTAG | |
| | GKAIKNAPEILALLTAVWLPKRVAVMHCKGHQKDDAPTSTGNRRADEVAREVAIRPLSTQATISSGGSS | |
| | GGSSGSETPGTSESATPESSGGSSGGSSMASNFTQFVLVDNGGTGDVTVAPSNFANGIAEWISSNSRSQ | |
| | AYKVTCSVRQSSAQNRKYTIKVEVPKGAWRSYLNMELTIPIFATNSDCELIVKAMQGLLKDGNPIPSAI | |
| | AANSGIYGGSGGSMASNFTQFVLVDNGGTGDVTVAPSNFANGIAEWISSNSRSQAYKVTCSVRQSSAQN | |
| | RKYTIKVEVPKGAWRSYLNMELTIPIFATNSDCELIVKAMQGLLKDGNPIPSAIAANSGIYSGGSSGGS | |
| | SGSETPGTSESATPESSGGSSGGSSDKKYSIGLDIGTNSVGWAVITDEYKVPSKKFKVLGNTDRHSIKK | |
| | NLIGALLFDSGETAEATRLKRTARRRYTRRKNRICYLQEIFSNEMAKVDDSFFHRLEESFLVEEDKKHE | |
| | RHPIFGNIVDEVAYHEKYPTIYHLRKKLVDSTDKADLRLIYLALAHMIKFRGHFLIEGDLNPDNSDVDK | |
| | LFIQLVQTYNQLFEENPINASGVDAKAILSARLSKSRRLENLIAQLPGEKKNGLFGNLIALSLGLTPNF | |
| | KSNFDLAEDAKLQLSKDTYDDDLDNLLAQIGDQYADLFLAAKNLSDAILLSDILRVNTEITKAPLSASM | |
| | IKRYDEHHQDLTLLKALVRQQLPEKYKEIFFDQSKNGYAGYIDGGASQEEFYKFIKPILEKMDGTEELL | |
| | VKLNREDLLRKQRTFDNGSIPHQIHLGELHAILRRQEDFYPFLKDNREKIEKILTFRIPYYVGPLARGN | |
| | SRFAWMTRKSEETITPWNFEEVVDKGASAQSFIERMTNFDKNLPNEKVLPKHSLLYEYFTVYNELTKVK | |
| | YVTEGMRKPAFLSGEQKKAIVDLLFKTNRKVTVKQLKEDYFKKIECFDSVEISGVEDRFNASLGTYHDL | |
| | LKIIKDKDFLDNEENEDILEDIVLTLTLFEDREMIEERLKTYAHLFDDKVMKQLKRRRYTGWGRLSRKL | |
| | INGIRDKQSGKTILDFLKSDGFANRNFMQLIHDDSLTFKEDIQKAQVSGQGDSLHEHIANLAGSPAIKK | |
| | GILQTVKVVDELVKVMGRHKPENIVIEMARENQTTQKGQKNSRERMKRIEEGIKELGSQILKEHPVENT | |
| | QLQNEKLYLYYLQNGRDMYVDQELDINRLSDYDVDHIVPQSFLKDDSIDNKVLTRSDKARGKSDNVPSE | |
| | EVVKKMKNYWRQLLNAKLITQRKFDNLTKAERGGLSELDKAGFIKRQLVETRQITKHVAQILDSRMNTK | |
| | YDENDKLIREVKVITLKSKLVSDFRKDFQFYKVREINNYHHAHDAYLNAVVGTALIKKYPKLESEFVYG | |
| | DYKVYDVRKMIAKSEQEIGKATAKYFFYSNIMNFFKTEITLANGEIRKRPLIETNGETGEIVWDKGRDF | |
| | ATVRKVLSMPQVNIVKKTEVQTGGFSKESILPKRNSDKLIARKKDWDPKKYGGFDSPTVAYSVLVVAKV | |
| | EKGKSKKLKSVKELLGITIMERSSFEKNPIDFLEAKGYKEVKKDLIIKLPKYSLFELENGRKRMLASAG | |
| | ELQKGNELALPSKYVNFLYLASHYEKLKGSPEDNEQKQLFVEQHKHYLDEIIEQISEFSKRVILADANL | |
| | DKVLSAYNKHRDKPIREQAENIIHLFTLTNLGAPAAFKYFDTTIDRKRYTSTKEVLDATLIHQSITGLY | |
| | ETRIDLSQLGGDKRTADGSEFESPKKKAKVE | |
| PL12127 | MPAAKRVKLDGGTAPLEEEYRLFLEAPIQNVTLLEQWKREIPKVWAEINPPGLASTQAPIHVQLLSTAL | 16,166 |
| | PVRVRQYPITLEAKRSLRETIRKFRAAGILRPVHSPWNTPLLPVRKSGTSEYRMVQDLREVNKRVETIH | |
| | PTVPNPYTLLSLLPPDRIWYSVLDLKDAFFCIPLAPESQLIFAFEWADAEEGESGQLTWTRLPQGFKNS | |
| | PTLFNEALNRDLQGFRLDHPSVSLLQYVDDLLIAADTQAACLSATRDLLMTLAELGYRVSGKKAQLCQE | |
| | EVTYLGFKIHKGSRSLSNSRTQAILQIPVPKTKRQVREFLGKIGYCRLFIPGFAELAQPLYAATRPGND | |
| | PLVWGEKEEEAFQSLKLALTQPPALALPSLDKPFQLFVEETSGAAKGVLTQALGPWKRPVAYLSKRLDP | |
| | VAAGWPRCLRAIAAAALLTREASKLTFGQDIEITSSHNLESLLRSPPDKWLTNARITQYQVLLLDPPRV | |
| | RFKQTAALNPATLLPETDDTLPIHHCLDTLDSLTSTRPDLTDQPLAQAEATLFTDGSSYIRDGKRYAGA | |
| | AVVTLDSVIWAEPLPIGTSAQKAELIALTKALEWSKDKSVNIYTDSRYAFATLHVHGMIYRERGWLTAG | |
| | GKAIKNAPEILALLTAVWLPKRVAVMHCKGHQKDDAPTSTGNRRADEVAREVAIRPLSTQATISSGGSS | |
| | GGSSGSETPGTSESATPESSGGSSGGSSMASNFTQFVLVDNGGTGDVTVAPSNFANGIAEWISSNSRSQ | |
| | AYKVTCSVRQSSAQNRKYTIKVEVPKGAWRSYLNMELTIPIFATNSDCELIVKAMQGLLKDGNPIPSAI | |
| | AANSGIYGGSGGSMASNFTQFVLVDNGGTGDVTVAPSNFANGIAEWISSNSRSQAYKVTCSVRQSSAQN | |
| | RKYTIKVEVPKGAWRSYLNMELTIPIFATNSDCELIVKAMQGLLKDGNPIPSAIAANSGIYGSSGSSGS | |
| | SGSSGSSGSSDKKYSIGLDIGTNSVGWAVITDEYKVPSKKFKVLGNTDRHSIKKNLIGALLFDSGETAE | |
| | ATRLKRTARRRYTRRKNRICYLQEIFSNEMAKVDDSFFHRLEESFLVEEDKKHERHPIFGNIVDEVAYH | |
| | EKYPTIYHLRKKLVDSTDKADLRLIYLALAHMIKFRGHFLIEGDLNPDNSDVDKLFIQLVQTYNQLFEE | |
| | NPINASGVDAKAILSARLSKSRRLENLIAQLPGEKKNGLFGNLIALSLGLTPNFKSNFDLAEDAKLQLS | |
| | KDTYDDDLDNLLAQIGDQYADLFLAAKNLSDAILLSDILRVNTEITKAPLSASMIKRYDEHHQDLTLLK | |
| | ALVRQQLPEKYKEIFFDQSKNGYAGYIDGGASQEEFYKFIKPILEKMDGTEELLVKLNREDLLRKQRTF | |
| | DNGSIPHQIHLGELHAILRRQEDFYPFLKDNREKIEKILTFRIPYYVGPLARGNSRFAWMTRKSEETIT | |
| | PWNFEEVVDKGASAQSFIERMTNFDKNLPNEKVLPKHSLLYEYFTVYNELTKVKYVTEGMRKPAFLSGE | |
| | QKKAIVDLLFKTNRKVTVKQLKEDYFKKIECFDSVEISGVEDRFNASLGTYHDLLKIIKDKDFLDNEEN | |
| | DILEDIVLTLTLFEDREMIEERLKTYAHLFDDKVMKQLKRRRYTGWGRLSRKLINGIRDKQSGKTILDF | |
| | LKSDGFANRNFMQLIEHDDSLTFKEDIQKAQVSGQGDSLHEHIANLAGSPAIKKGILQTVKVVDELVKV | |
| | MGRHKPENIVIEMARENQTTQKGQKNSRERMKRIEEGIKELGSQILKEHPVENTQLQNEKLYLYYLQNG | |
| | RDMYVDQELDINRLSDYDVDHIVPQSFLKDDSIDNKVLTRSDKARGKSDNVPSEEVVKKMKNYWRQLLN | |
| | AKLITQRKFDNLTKAERGGLSELDKAGFIKRQLVETRQITKHVAQILDSRMNTKYDENDKLIREVKVIT | |
| | LKSKLVSDFRKDFQFYKVREINNYHHAHDAYLNAVVGTALIKKYPKLESEFVYGDYKVYDVRKMIAKSE | |
| | QEIGKATAKYFFYSNIMNFFKTEITLANGEIRKRPLIETNGETGEIVWDKGRDFATVRKVLSMPQVNIV | |
| | KKTEVQTGGFSKESILPKRNSDKLIARKKDWDPKKYGGFDSPTVAYSVLVVAKVEKGKSKKLKSVKELL | |
| | GITIMERSSFEKNPIDFLEAKGYKEVKKDLIIKLPKYSLFELENGRKRMLASAGELQKGNELALPSKYV | |
| | NFLYLASHYEKLKGSPEDNEQKQLFVEQHKHYLDEIIEQISEFSKRVILADANLDKVLSAYNKHRDKPI | |
| | REQAENIIHLFTLTNLGAPAAFKYFDTTIDRKRYTSTKEVLDATLIHQSITGLYETRIDLSQLGGDKRT | |
| | ADGSEFESPKKKAKVE | |
| PL12128 | MPAAKRVKLDGGTAPLEEEYRLFLEAPIQNVTLLEQWKREIPKVWAEINPPGLASTQAPIHVQLLSTAL | 16,167 |
| | PVRVRQYPITLEAKRSLRETIRKFRAAGILRPVHSPWNTPLLPVRKSGTSEYRMVQDLREVNKRVETIH | |
| | PTVPNPYTLLSLLPPDRIWYSVLDLKDAFFCIPLAPESQLIFAFEWADAEEGESGQLTWTRLPQGFKNS | |
| | PTLFNEALNRDLQGFRLDHPSVSLLQYVDDLLIAADTQAACLSATRDLLMTLAELGYRVSGKKAQLCQE | |
| | EVTYLGFKIHKGSRSLSNSRTQAILQIPVPKTKRQVREFLGKIGYCRLFIPGFAELAQPLYAATRPGND | |
| | PLVWGEKEEEAFQSLKLALTQPPALALPSLDKPFQLFVEETSGAAKGVLTQALGPWKRPVAYLSKRLDP | |
| | VAAGWPRCLRAIAAAALLTREASKLTFGQDIEITSSHNLESLLRSPPDKWLTNARITQYQVLLLDPPRV | |
| | RFKQTAALNPATLLPETDDTLPIHHCLDTLDSLTSTRPDLTDQPLAQAEATLFTDGSSYIRDGKRYAGA | |
| | AVVTLDSVIWAEPLPIGTSAQKAELIALTKALEWSKDKSVNIYTDSRYAFATLHVHGMIYRERGWLTAG | |
| | GKAIKNAPEILALLTAVWLPKRVAVMHCKGHQKDDAPTSTGNRRADEVAREVAIRPLSTQATISSGGSS | |
| | GGSSGSETPGTSESATPESSGGSSGGSSMASNFTQFVLVDNGGTGDVTVAPSNFANGIAEWISSNSRSQ | |
| | AYKVTCSVRQSSAQNRKYTIKVEVPKGAWRSYLNMELTIPIFATNSDCELIVKAMQGLLKDGNPIPSAI | |
| | AANSGIYGGSGGSMASNFTQFVLVDNGGTGDVTVAPSNFANGIAEWISSNSRSQAYKVTCSVRQSSAQN | |
| | RKYTIKVEVPKGAWRSYLNMELTIPIFATNSDCELIVKAMQGLLKDGNPIPSAIAANSGIYGSSGGGEA | |
| | AAKDKKYSIGLDIGTNSVGWAVITDEYKVPSKKFKVLGNTDRHSIKKNLIGALLFDSGETAEATRLKRT | |
| | ARRRYTRRKNRICYLQEIFSNEMAKVDDSFFHRLEESFLVEEDKKHERHPIFGNIVDEVAYHEKYPTIY | |
| | HLRKKLVDSTDKADLRLIYLALAHMIKFRGHFLIEGDLNPDNSDVDKLFIQLVQTYNQLFEENPINASG | |
| | VDAKAILSARLSKSRRLENLIAQLPGEKKNGLFGNLIALSLGLTPNFKSNFDLAEDAKLQLSKDTYDDD | |
| | LDNLLAQIGDQYADLFLAAKNLSDAILLSDILRVNTEITKAPLSASMIKRYDEHHQDLTLLKALVRQQL | |
| | PEKYKEIFFDQSKNGYAGYIDGGASQEEFYKFIKPILEKMDGTEELLVKLNREDLLRKQRTFDNGSIPH | |
| | QIHLGELHAILRRQEDFYPFLKDNREKIEKILTFRIPYYVGPLARGNSRFAWMTRKSEETITPWNFEEV | |
| | VDKGASAQSFIERMTNFDKNLPNEKVLPKHSLLYEYFTVYNELTKVKYVTEGMRKPAFLSGEQKKAIVD | |
| | LLFKTNRKVTVKQLKEDYFKKIECFDSVEISGVEDRFNASLGTYHDLLKIIKDKDFLDNEENEDILEDI | |
| | VLTLTLFEDREMIEERLKTYAHLFDDKVMKQLKRRRYTGWGRLSRKLINGIRDKQSGKTILDFLKSDGF | |
| | ANRNFMQLIHDDSLTFKEDIQKAQVSGQGDSLHEHIANLAGSPAIKKGILQTVKVVDELVKVMGRHKPE | |
| | NIVIEMARENQTTQKGQKNSRERMKRIEEGIKELGSQILKEHPVENTQLQNEKLYLYYLQNGRDMYVDQ | |
| | ELDINRLSDYDVDHIVPQSFLKDDSIDNKVLTRSDKARGKSDNVPSEEVVKKMKNYWRQLLNAKLITQR | |
| | KFDNLTKAERGGLSELDKAGFIKRQLVETRQITKHVAQILDSRMNTKYDENDKLIREVKVITLKSKLVS | |
| | DFRKDFQFYKVREINNYHHAHDAYLNAVVGTALIKKYPKLESEFVYGDYKVYDVRKMIAKSEQEIGKAT | |
| | AKYFFYSNIMNFFKTEITLANGEIRKRPLIETNGETGEIVWDKGRDFATVRKVLSMPQVNIVKKTEVQT | |
| | GGFSKESILPKRNSDKLIARKKDWDPKKYGGFDSPTVAYSVLVVAKVEKGKSKKLKSVKELLGITIMER | |
| | SSFEKNPIDFLEAKGYKEVKKDLIIKLPKYSLFELENGRKRMLASAGELQKGNELALPSKYVNFLYLAS | |
| | HYEKLKGSPEDNEQKQLFVEQHKHYLDEIIEQISEFSKRVILADANLDKVLSAYNKHRDKPIREQAENI | |
| | IHLFTLTNLGAPAAFKYFDTTIDRKRYTSTKEVLDATLIHQSITGLYETRIDLSQLGGDKRTADGSEFE | |
| | SPKKKAKVE | |
| PL12129 | MPAAKRVKLDGGTAPLEEEYRLFLEAPIQNVTLLEQWKREIPKVWAEINPPGLASTQAPIHVQLLSTAL | 16,168 |
| | PVRVRQYPITLEAKRSLRETIRKFRAAGILRPVHSPWNTPLLPVRKSGTSEYRMVQDLREVNKRVETIH | |
| | PTVPNPYTLLSLLPPDRIWYSVLDLKDAFFCIPLAPESQLIFAFEWADAEEGESGQLTWTRLPQGFKNS | |
| | PTLFNEALNRDLQGFRLDHPSVSLLQYVDDLLIAADTQAACLSATRDLLMTLAELGYRVSGKKAQLCQE | |
| | EVTYLGFKIHKGSRSLSNSRTQAILQIPVPKTKRQVREFLGKIGYCRLFIPGFAELAQPLYAATRPGND | |
| | PLVWGEKEEEAFQSLKLALTQPPALALPSLDKPFQLFVEETSGAAKGVLTQALGPWKRPVAYLSKRLDP | |
| | VAAGWPRCLRAIAAAALLTREASKLTFGQDIEITSSHNLESLLRSPPDKWLTNARITQYQVLLLDPPRV | |
| | RFKQTAALNPATLLPETDDTLPIHHCLDTLDSLTSTRPDLTDQPLAQAEATLFTDGSSYIRDGKRYAGA | |
| | AVVTLDSVIWAEPLPIGTSAQKAELIALTKALEWSKDKSVNIYTDSRYAFATLHVHGMIYRERGWLTAG | |
| | GKAIKNAPEILALLTAVWLPKRVAVMHCKGHQKDDAPTSTGNRRADEVAREVAIRPLSTQATISSGGSS | |
| | GGSSGSETPGTSESATPESSGGSSGGSSMASNFTQFVLVDNGGTGDVTVAPSNFANGIAEWISSNSRSQ | |
| | AYKVTCSVRQSSAQNRKYTIKVEVPKGAWRSYLNMELTIPIFATNSDCELIVKAMQGLLKDGNPIPSAI | |
| | AANSGIYGGSGGSMASNFTQFVLVDNGGTGDVTVAPSNFANGIAEWISSNSRSQAYKVTCSVRQSSAQN | |
| | RKYTIKVEVPKGAWRSYLNMELTIPIFATNSDCELIVKAMQGLLKDGNPIPSAIAANSGIYGGGSGGGS | |
| | GGGSGGGSMASNFTQFVLVDNGGTGDVTVAPSNFANGIAEWISSNSRSQAYKVTCSVRQSSAQNRKYTI | |
| | KVEVPKGAWRSYLNMELTIPIFATNSDCELIVKAMQGLLKDGNPIPSAIAANSGIYGGSGGSMASNFTQ | |
| | FVLVDNGGTGDVTVAPSNFANGIAEWISSNSRSQAYKVTCSVRQSSAQNRKYTIKVEVPKGAWRSYLNM | |
| | ELTIPIFATNSDCELIVKAMQGLLKDGNPIPSAIAANSGIYAEAAAKEAAAKEAAAKEAAAKALEAEAA | |
| | AKEAAAKEAAAKEAAAKADKKYSIGLDIGTNSVGWAVITDEYKVPSKKFKVLGNTDRHSIKKNLIGALL | |
| | FDSGETAEATRLKRTARRRYTRRKNRICYLQEIFSNEMAKVDDSFFHRLEESFLVEEDKKHERHPIFGN | |
| | IVDEVAYHEKYPTIYHLRKKLVDSTDKADLRLIYLALAHMIKFRGHFLIEGDLNPDNSDVDKLFIQLVQ | |
| | TYNQLFEENPINASGVDAKAILSARLSKSRRLENLIAQLPGEKKNGLFGNLIALSLGLTPNFKSNFDLA | |
| | EDAKLQLSKDTYDDDLDNLLAQIGDQYADLFLAAKNLSDAILLSDILRVNTEITKAPLSASMIKRYDEH | |
| | HQDLTLLKALVRQQLPEKYKEIFFDQSKNGYAGYIDGGASQEEFYKFIKPILEKMDGTEELLVKLNRED | |
| | LLRKQRTFDNGSIPHQIHLGELHAILRRQEDFYPFLKDNREKIEKILTFRIPYYVGPLARGNSRFAWMT | |
| | RKSEETITPWNFEEVVDKGASAQSFIERMTNFDKNLPNEKVLPKHSLLYEYFTVYNELTKVKYVTEGMR | |
| | KPAFLSGEQKKAIVDLLFKTNRKVTVKQLKEDYFKKIECFDSVEISGVEDRFNASLGTYHDLLKIIKDK | |
| | DFLDNEENEDILEDIVLTLTLFEDREMIEERLKTYAHLFDDKVMKQLKRRRYTGWGRLSRKLINGIRDK | |
| | QSGKTILDFLKSDGFANRNFMQLIHDDSLTFKEDIQKAQVSGQGDSLHEHIANLAGSPAIKKGILQTVK | |
| | VVDELVKVMGRHKPENIVIEMARENQTTQKGQKNSRERMKRIEEGIKELGSQILKEHPVENTQLQNEKL | |
| | YLYYLQNGRDMYVDQELDINRLSDYDVDHIVPQSFLKDDSIDNKVLTRSDKARGKSDNVPSEEVVKKMK | |
| | NYWRQLLNAKLITQRKFDNLTKAERGGLSELDKAGFIKRQLVETRQITKHVAQILDSRMNTKYDENDKL | |
| | IREVKVITLKSKLVSDFRKDFQFYKVREINNYHHAHDAYLNAVVGTALIKKYPKLESEFVYGDYKVYDV | |
| | RKMIAKSEQEIGKATAKYFFYSNIMNFFKTEITLANGEIRKRPLIETNGETGEIVWDKGRDFATVRKVL | |
| | SMPQVNIVKKTEVQTGGFSKESILPKRNSDKLIARKKDWDPKKYGGFDSPTVAYSVLVVAKVEKGKSKK | |
| | LKSVKELLGITIMERSSFEKNPIDFLEAKGYKEVKKDLIIKLPKYSLFELENGRKRMLASAGELQKGNE | |
| | LALPSKYVNFLYLASHYEKLKGSPEDNEQKQLFVEQHKHYLDEIIEQISEFSKRVILADANLDKVLSAY | |
| | NKHRDKPIREQAENIIHLFTLTNLGAPAAFKYFDTTIDRKRYTSTKEVLDATLIHQSITGLYETRIDLS | |
| | QLGGDKRTADGSEFESPKKKAKVE | |
| PL12130 | MPAAKRVKLDGGTAPLEEEYRLFLEAPIQNVTLLEQWKREIPKVWAEINPPGLASTQAPIHVQLLSTAL | 16,169 |
| | PVRVRQYPITLEAKRSLRETIRKFRAAGILRPVHSPWNTPLLPVRKSGTSEYRMVQDLREVNKRVETIH | |
| | PTPTVPNPYTLLSLLPPDRIWYSVLDLKDAFFCIPLAPESQLIFAFEWADAEEGESGQLTWTRLPQGFK | |
| | NSLFNEALNRDLQGFRLDHPSVSLLQYVDDLLIAADTQAACLSATRDLLMTLAELGYRVSGKKAQLCQE | |
| | EVTYLGFKIHKGSRSLSNSRTQAILQIPVPKTKRQVREFLGKIGYCRLFIPGFAELAQPLYAATRPGND | |
| | PLVWGEKEEEAFQSLKLALTQPPALALPSLDKPFQLFVEETSGAAKGVLTQALGPWKRPVAYLSKRLDP | |
| | VAAGWPRCLRAIAAAALLTREASKLTFGQDIEITSSHNLESLLRSPPDKWLTNARITQYQVLLLDPPRV | |
| | RFKQTAALNPATLLPETDDTLPIHHCLDTLDSLTSTRPDLTDQPLAQAEATLFTDGSSYIRDGKRYAGA | |
| | AVVTLDSVIWAEPLPIGTSAQKAELIALTKALEWSKDKSVNIYTDSRYAFATLHVHGMIYRERGWLTAG | |
| | GKAIKNAPEILALLTAVWLPKRVAVMHCKGHQKDDAPTSTGNRRADEVAREVAIRPLSTQATISSGGSS | |
| | GGSSGSETPGTSESATPESSGGSSGGSSMASNFTQFVLVDNGGTGDVTVAPSNFANGIAEWISSNSRSQ | |
| | AYKVTCSVRQSSAQNRKYTIKVEVPKGAWRSYLNMELTIPIFATNSDCELIVKAMQGLLKDGNPIPSAI | |
| | AANSGIYGGSGGSMASNFTQFVLVDNGGTGDVTVAPSNFANGIAEWISSNSRSQAYKVTCSVRQSSAQN | |
| | RKYTIKVEVPKGAWRSYLNMELTIPIFATNSDCELIVKAMQGLLKDGNPIPSAIAANSGIYGGGSGGGS | |
| | GGGSGGGSMASNFTQFVLVDNGGTGDVTVAPSNFANGIAEWISSNSRSQAYKVTCSVRQSSAQNRKYTI | |
| | KVEVPKGAWRSYLNMELTIPIFATNSDCELIVKAMQGLLKDGNPIPSAIAANSGIYGGSGGSMASNFTQ | |
| | FVLVDNGGTGDVTVAPSNFANGIAEWISSNSRSQAYKVTCSVRQSSAQNRKYTIKVEVPKGAWRSYLNM | |
| | ELTIPIFATNSDCELIVKAMQGLLKDGNPIPSAIAANSGIYSGGSSGGSSGSETPGTSESATPESSGGS | |
| | SGGSSDKKYSIGLDIGTNSVGWAVITDEYKVPSKKFKVLGNTDRHSIKKNLIGALLFDSGETAEATRLK | |
| | RTARRRYTRRKNRICYLQEIFSNEMAKVDDSFFHRLEESFLVEEDKKHERHPIFGNIVDEVAYHEKYPT | |
| | LIYHRKKLVDSTDKADLRLIYLALAHMIKFRGHFLIEGDLNPDNSDVDKLFIQLVQTYNQLFEENPINA | |
| | SGVDAKAILSARLSKSRRLENLIAQLPGEKKNGLFGNLIALSLGLTPNFKSNFDLAEDAKLQLSKDTYD | |
| | DDLDNLLAQIGDQYADLFLAAKNLSDAILLSDILRVNTEITKAPLSASMIKRYDEHHQDLTLLKALVRQ | |
| | QLPEKYKEIFFDQSKNGYAGYIDGGASQEEFYKFIKPILEKMDGTEELLVKLNREDLLRKQRTFDNGSI | |
| | PHQIHLGELHAILRRQEDFYPFLKDNREKIEKILTFRIPYYVGPLARGNSRFAWMTRKSEETITPWNFE | |
| | EVVDKGASAQSFIERMTNFDKNLPNEKVLPKHSLLYEYFTVYNELTKVKYVTEGMRKPAFLSGEQKKAI | |
| | VDLLFKTNRKVTVKQLKEDYFKKIECFDSVEISGVEDRFNASLGTYHDLLKIIKDKDFLDNEENEDILE | |
| | DIVLTLTLFEDREMIEERLKTYAHLFDDKVMKQLKRRRYTGWGRLSRKLINGIRDKQSGKTILDFLKSD | |
| | GFANRNFMQLIHDDSLTFKEDIQKAQVSGQGDSLHEHIANLAGSPAIKKGILQTVKVVDELVKVMGRHK | |
| | PENIVIEMARENQTTQKGQKNSRERMKRIEEGIKELGSQILKEHPVENTQLQNEKLYLYYLQNGRDMYV | |
| | DQELDINRLSDYDVDHIVPQSFLKDDSIDNKVLTRSDKARGKSDNVPSEEVVKKMKNYWRQLLNAKLIT | |
| | QRKFDNLTKAERGGLSELDKAGFIKRQLVETRQITKHVAQILDSRMNTKYDENDKLIREVKVITLKSKL | |
| | VSDFRKDFQFYKVREINNYHHAHDAYLNAVVGTALIKKYPKLESEFVYGDYKVYDVRKMIAKSEQEIGK | |
| | ATAKYFFYSNIMNFFKTEITLANGEIRKRPLIETNGETGEIVWDKGRDFATVRKVLSMPQVNIVKKTEV | |
| | QTGGFSKESILPKRNSDKLIARKKDWDPKKYGGFDSPTVAYSVLVVAKVEKGKSKKLKSVKELLGITIM | |
| | ERSSFEKNPIDFLEAKGYKEVKKDLIIKLPKYSLFELENGRKRMLASAGELQKGNELALPSKYVNFLYL | |
| | ASHYEKLKGSPEDNEQKQLFVEQHKHYLDEIIEQISEFSKRVILADANLDKVLSAYNKHRDKPIREQAE | |
| | NIIHLFTLTNLGAPAAFKYFDTTIDRKRYTSTKEVLDATLIHQSITGLYETRIDLSQLGGDKRTADGSE | |
| | FESPKKKAKVE | |
| PL12131 | MPAAKRVKLDGGTAPLEEEYRLFLEAPIQNVTLLEQWKREIPKVWAEINPPGLASTQAPIHVQLLSTAL | 16,170 |
| | PVRVRQYPITLEAKRSLRETIRKFRAAGILRPVHSPWNTPLLPVRKSGTSEYRMVQDLREVNKRVETIH | |
| | PTVPNPYTLLSLLPPDRIWYSVLDLKDAFFCIPLAPESQLIFAFEWADAEEGESGQLTWTRLPQGFKNS | |
| | PTLFNEALNRDLQGFRLDHPSVSLLQYVDDLLIAADTQAACLSATRDLLMTLAELGYRVSGKKAQLCQE | |
| | EVTYLGFKIHKGSRSLSNSRTQAILQIPVPKTKRQVREFLGKIGYCRLFIPGFAELAQPLYAATRPGND | |
| | PLVWGEKEEEAFQSLKLALTQPPALALPSLDKPFQLFVEETSGAAKGVLTQALGPWKRPVAYLSKRLDP | |
| | VAAGWPRCLRAIAAAALLTREASKLTFGQDIEITSSHNLESLLRSPPDKWLTNARITQYQVLLLDPPRV | |
| | RFKQTAALNPATLLPETDDTLPIHHCLDTLDSLTSTRPDLTDQPLAQAEATLFTDGSSYIRDGKRYAGA | |
| | AVVTLDSVIWAEPLPIGTSAQKAELIALTKALEWSKDKSVNIYTDSRYAFATLHVHGMIYRERGWLTAG | |
| | GKAIKNAPEILALLTAVWLPKRVAVMHCKGHQKDDAPTSTGNRRADEVAREVAIRPLSTQATISSGGSS | |
| | GGSSGSETPGTSESATPESSGGSSGGSSMASNFTQFVLVDNGGTGDVTVAPSNFANGIAEWISSNSRSQ | |
| | AYKVTCSVRQSSAQNRKYTIKVEVPKGAWRSYLNMELTIPIFATNSDCELIVKAMQGLLKDGNPIPSAI | |
| | AANSGIYGGSGGSMASNFTQFVLVDNGGTGDVTVAPSNFANGIAEWISSNSRSQAYKVTCSVRQSSAQN | |
| | RKYTIKVEVPKGAWRSYLNMELTIPIFATNSDCELIVKAMQGLLKDGNPIPSAIAANSGIYGGGSGGGS | |
| | GGGSGGGSMASNFTQFVLVDNGGTGDVTVAPSNFANGIAEWISSNSRSQAYKVTCSVRQSSAQNRKYTI | |
| | KVEVPKGAWRSYLNMELTIPIFATNSDCELIVKAMQGLLKDGNPIPSAIAANSGIYGGSGGSMASNFTQ | |
| | FVLVDNGGTGDVTVAPSNFANGIAEWISSNSRSQAYKVTCSVRQSSAQNRKYTIKVEVPKGAWRSYLNM | |
| | ELTIPIFATNSDCELIVKAMQGLLKDGNPIPSAIAANSGIYGSSGSSGSSGSSGSSGSSDKKYSIGLDI | |
| | GTNSVGWAVITDEYKVPSKKFKVLGNTDRHSIKKNLIGALLFDSGETAEATRLKRTARRRYTRRKNRIC | |
| | YLQEIFSNEMAKVDDSFFHRLEESFLVEEDKKHERHPIFGNIVDEVAYHEKYPTIYHLRKKLVDSTDKA | |
| | DLRLIYLALAHMIKFRGHFLIEGDLNPDNSDVDKLFIQLVQTYNQLFEENPINASGVDAKAILSARLSK | |
| | SRRLENLIAQLPGEKKNGLFGNLIALSLGLTPNFKSNFDLAEDAKLQLSKDTYDDDLDNLLAQIGDQYA | |
| | DLFLAAKNLSDAILLSDILRVNTEITKAPLSASMIKRYDEHHQDLTLLKALVRQQLPEKYKEIFFDQSK | |
| | NGYAGYIDGGASQEEFYKFIKPILEKMDGTEELLVKLNREDLLRKQRTFDNGSIPHQIHLGELHAILRR | |
| | QEDFYPFLKDNREKIEKILTFRIPYYVGPLARGNSRFAWMTRKSEETITPWNFEEVVDKGASAQSFIER | |
| | MTNFDKNLPNEKVLPKHSLLYEYFTVYNELTKVKYVTEGMRKPAFLSGEQKKAIVDLLFKTNRKVTVKQ | |
| | LKEDYFKKIECFDSVEISGVEDRFNASLGTYHDLLKIIKDKDFLDNEENEDILEDIVLTLTLFEDREMI | |
| | EERLKTYAHLFDDKVMKQLKRRRYTGWGRLSRKLINGIRDKQSGKTILDFLKSDGFANRNFMQLIHDDS | |
| | LTFKEDIQKAQVSGQGDSLHEHIANLAGSPAIKKGILQTVKVVDELVKVMGRHKPENIVIEMARENQTT | |
| | QKGQKNSRERMKRIEEGIKELGSQILKEHPVENTQLQNEKLYLYYLQNGRDMYVDQELDINRLSDYDVD | |
| | HIVPQSFLKDDSIDNKVLTRSDKARGKSDNVPSEEVVKKMKNYWRQLLNAKLITQRKFDNLTKAERGGL | |
| | SELDKAGFIKRQLVETRQITKHVAQILDSRMNTKYDENDKLIREVKVITLKSKLVSDFRKDFQFYKVRE | |
| | INNYHHAHDAYLNAVVGTALIKKYPKLESEFVYGDYKVYDVRKMIAKSEQEIGKATAKYFFYSNIMNFF | |
| | KTEITLANGEIRKRPLIETNGETGEIVWDKGRDFATVRKVLSMPQVNIVKKTEVQTGGFSKESILPKRN | |
| | SDKLIARKKDWDPKKYGGFDSPTVAYSVLVVAKVEKGKSKKLKSVKELLGITIMERSSFEKNPIDFLEA | |
| | KGYKEVKKDLIIKLPKYSLFELENGRKRMLASAGELQKGNELALPSKYVNFLYLASHYEKLKGSPEDNE | |
| | QKQLFVEQHKHYLDEIIEQISEFSKRVILADANLDKVLSAYNKHRDKPIREQAENIIHLFTLTNLGAPA | |
| | AFKYFDTTIDRKRYTSTKEVLDATLIHQSITGLYETRIDLSQLGGDKRTADGSEFESPKKKAKVE | |
| PL12132 | MPAAKRVKLDGGTAPLEEEYRLFLEAPIQNVTLLEQWKREIPKVWAEINPPGLASTQAPIHVQLLSTAL | 16,171 |
| | PVRVRQYPITLEAKRSLRETIRKFRAAGILRPVHSPWNTPLLPVRKSGTSEYRMVQDLREVNKRVETIH | |
| | PTVPNPYTLLSLLPPDRIWYSVLDLKDAFFCIPLAPESQLIFAFEWADAEEGESGQLTWTRLPQGFKNS | |
| | PTLFNEALNRDLQGFRLDHPSVSLLQYVDDLLIAADTQAACLSATRDLLMTLAELGYRVSGKKAQLCQE | |
| | EVTYLGFKIHKGSRSLSNSRTQAILQIPVPKTKRQVREFLGKIGYCRLFIPGFAELAQPLYAATRPGND | |
| | PLVWGEKEEEAFQSLKLALTQPPALALPSLDKPFQLFVEETSGAAKGVLTQALGPWKRPVAYLSKRLDP | |
| | VAAGWPRCLRAIAAAALLTREASKLTFGQDIEITSSHNLESLLRSPPDKWLTNARITQYQVLLLDPPRV | |
| | RFKQTAALNPATLLPETDDTLPIHHCLDTLDSLTSTRPDLTDQPLAQAEATLFTDGSSYIRDGKRYAGA | |
| | AVVTLDSVIWAEPLPIGTSAQKAELIALTKALEWSKDKSVNIYTDSRYAFATLHVHGMIYRERGWLTAG | |
| | GKAIKNAPEILALLTAVWLPKRVAVMHCKGHQKDDAPTSTGNRRADEVAREVAIRPLSTQATISSGGSS | |
| | GGSSGSETPGTSESATPESSGGSSGGSSMASNFTQFVLVDNGGTGDVTVAPSNFANGIAEWISSNSRSQ | |
| | AYKVTCSVRQSSAQNRKYTIKVEVPKGAWRSYLNMELTIPIFATNSDCELIVKAMQGLLKDGNPIPSAI | |
| | AANSGIYGGSGGSMASNFTQFVLVDNGGTGDVTVAPSNFANGIAEWISSNSRSQAYKVTCSVRQSSAQN | |
| | RKYTIKVEVPKGAWRSYLNMELTIPIFATNSDCELIVKAMQGLLKDGNPIPSAIAANSGIYGGGSGGGS | |
| | GGGSGGGSMASNFTQFVLVDNGGTGDVTVAPSNFANGIAEWISSNSRSQAYKVTCSVRQSSAQNRKYTI | |
| | KVEVPKGAWRSYLNMELTIPIFATNSDCELIVKAMQGLLKDGNPIPSAIAANSGIYGGSGGSMASNFTQ | |
| | FVLVDNGGTGDVTVAPSNFANGIAEWISSNSRSQAYKVTCSVRQSSAQNRKYTIKVEVPKGAWRSYLNM | |
| | ELTIPIFATNSDCELIVKAMQGLLKDGNPIPSAIAANSGIYGSSGGGEAAAKDKKYSIGLDIGTNSVGW | |
| | AVITDEYKVPSKKFKVLGNTDRHSIKKNLIGALLFDSGETAEATRLKRTARRRYTRRKNRICYLQEIFS | |
| | NEMAKVDDSFFHRLEESFLVEEDKKHERHPIFGNIVDEVAYHEKYPTIYHLRKKLVDSTDKADLRLIYL | |
| | ALAHMIKFRGHFLIEGDLNPDNSDVDKLFIQLVQTYNQLFEENPINASGVDAKAILSARLSKSRRLENL | |
| | IAQLPGEKKNGLFGNLIALSLGLTPNFKSNFDLAEDAKLQLSKDTYDDDLDNLLAQIGDQYADLFLAAK | |
| | NLSDAILLSDILRVNTEITKAPLSASMIKRYDEHHQDLTLLKALVRQQLPEKYKEIFFDQSKNGYAGYI | |
| | DGGASQEEFYKFIKPILEKMDGTEELLVKLNREDLLRKQRTFDNGSIPHQIHLGELHAILRRQEDFYPF | |
| | LKDNREKIEKILTFRIPYYVGPLARGNSRFAWMTRKSEETITPWNFEEVVDKGASAQSFIERMTNFDKN | |
| | LPNEKVLPKHSLLYEYFTVYNELTKVKYVTEGMRKPAFLSGEQKKAIVDLLFKTNRKVTVKQLKEDYFK | |
| | KIECFDSVEISGVEDRFNASLGTYHDLLKIIKDKDFLDNEENEDILEDIVLTLTLFEDREMIEERLKTY | |
| | AHLFDDKVMKQLKRRRYTGWGRLSRKLINGIRDKQSGKTILDFLKSDGFANRNFMQLIHDDSLTFKEDI | |
| | QKAQVSGQGDSLHEHIANLAGSPAIKKGILQTVKVVDELVKVMGRHKPENIVIEMARENQTTQKGQKNS | |
| | RERMKRIEEGIKELGSQILKEHPVENTQLQNEKLYLYYLQNGRDMYVDQELDINRLSDYDVDHIVPQSF | |
| | LKDDSIDNKVLTRSDKARGKSDNVPSEEVVKKMKNYWRQLLNAKLITQRKFDNLTKAERGGLSELDKAG | |
| | FIKRQLVETRQITKHVAQILDSRMNTKYDENDKLIREVKVITLKSKLVSDFRKDFQFYKVREINNYHHA | |
| | HDAYLNAVVGTALIKKYPKLESEFVYGDYKVYDVRKMIAKSEQEIGKATAKYFFYSNIMNFFKTEITLA | |
| | NGEIRKRPLIETNGETGEIVWDKGRDFATVRKVLSMPQVNIVKKTEVQTGGFSKESILPKRNSDKLIAR | |
| | KKDWDPKKYGGFDSPTVAYSVLVVAKVEKGKSKKLKSVKELLGITIMERSSFEKNPIDFLEAKGYKEVK | |
| | KDLIIKLPKYSLFELENGRKRMLASAGELQKGNELALPSKYVNFLYLASHYEKLKGSPEDNEQKQLFVE | |
| | QHKHYLDEIIEQISEFSKRVILADANLDKVLSAYNKHRDKPIREQAENIIHLFTLTNLGAPAAFKYFDT | |
| | TIDRKRYTSTKEVLDATLIHQSITGLYETRIDLSQLGGDKRTADGSEFESPKKKAKVE | |
| PL12133 | MPAAKRVKLDGGTAPLEEEYRLFLEAPIQNVTLLEQWKREIPKVWAEINPPGLASTQAPIHVQLLSTAL | 16,172 |
| | PVRVRQYPITLEAKRSLRETIRKFRAAGILRPVHSPWNTPLLPVRKSGTSEYRMVQDLREVNKRVETIH | |
| | PTVPNPYTLLSLLPPDRIWYSVLDLKDAFFCIPLAPESQLIFAFEWADAEEGESGQLTWTRLPQGFKNS | |
| | PTLFNEALNRDLQGFRLDHPSVSLLQYVDDLLIAADTQAACLSATRDLLMTLAELGYRVSGKKAQLCQE | |
| | EVTYLGFKIHKGSRSLSNSRTQAILQIPVPKTKRQVREFLGKIGYCRLFIPGFAELAQPLYAATRPGND | |
| | PLVWGEKEEEAFQSLKLALTQPPALALPSLDKPFQLFVEETSGAAKGVLTQALGPWKRPVAYLSKRLDP | |
| | VAAGWPRCLRAIAAAALLTREASKLTFGQDIEITSSHNLESLLRSPPDKWLTNARITQYQVLLLDPPRV | |
| | RFKQTAALNPATLLPETDDTLPIHHCLDTLDSLTSTRPDLTDQPLAQAEATLFTDGSSYIRDGKRYAGA | |
| | AVVTLDSVIWAEPLPIGTSAQKAELIALTKALEWSKDKSVNIYTDSRYAFATLHVHGMIYRERGWLTAG | |
| | GKAIKNAPEILALLTAVWLPKRVAVMHCKGHQKDDAPTSTGNRRADEVAREVAIRPLSTQATISGSSGS | |
| | SGSSGSSGSSGSSMASNFTQFVLVDNGGTGDVTVAPSNFANGIAEWISSNSRSQAYKVTCSVRQSSAQA | |
| | NRKYTIKVEVPKGAWRSYLNMELTIPIFATNSDCELIVKAMQGLLKDGNPIPSAIAANSGIYAEAAAKE | |
| | AAAKEAAKEAAAKALEAEAAAKEAAAKEAAAKEAAAKADKKYSIGLDIGTNSVGWAVITDEYKVPSKKF | |
| | KVLGNTDRHSIKKNLIGALLFDSGETAEATRLKRTARRRYTRRKNRICYLQEIFSNEMAKVDDSFFHRL | |
| | EESFLVEEDKKHERHPIFGNIVDEVAYHEKYPTIYHLRKKLVDSTDKADLRLIYLALAHMIKFRGHFLI | |
| | EGDLNPDNSDVDKLFIQLVQTYNQLFEENPINASGVDAKAILSARLSKSRRLENLIAQLPGEKKNGLFG | |
| | NLIALSLGLTPNFKSNFDLAEDAKLQLSKDTYDDDLDNLLAQIGDQYADLFLAAKNLSDAILLSDILRV | |
| | NTEITKAPLSASMIKRYDEHHQDLTLLKALVRQQLPEKYKEIFFDQSKNGYAGYIDGGASQEEFYKFIK | |
| | PILEKMDGTEELLVKLNREDLLRKQRTFDNGSIPHQIHLGELHAILRRQEDFYPFLKDNREKIEKILTF | |
| | RIPYYVGPLARGNSRFAWMTRKSEETITPWNFEEVVDKGASAQSFIERMTNFDKNLPNEKVLPKHSLLY | |
| | EYFTVYNELTKVKYVTEGMRKPAFLSGEQKKAIVDLLFKTNRKVTVKQLKEDYFKKIECFDSVEISGVE | |
| | DRFNASLGTYHDLLKIIKDKDFLDNEENEDILEDIVLTLTLFEDREMIEERLKTYAHLFDDKVMKQLKR | |
| | RRYTGWGRLSRKLINGIRDKQSGKTILDFLKSDGFANRNFMQLIHDDSLTFKEDIQKAQVSGQGDSLHE | |
| | HIANLAGSPAIKKGILQTVKVVDELVKVMGRHKPENIVIEMARENQTTQKGQKNSRERMKRIEEGIKEL | |
| | GSQILKEHPVENTQLQNEKLYLYYLQNGRDMYVDQELDINRLSDYDVDHIVPQSFLKDDSIDNKVLTRS | |
| | DKARGKSDNVPSEEVVKKMKNYWRQLLNAKLITQRKFDNLTKAERGGLSELDKAGFIKRQLVETRQITK | |
| | HVAQILDSRMNTKYDENDKLIREVKVITLKSKLVSDFRKDFQFYKVREINNYHHAHDAYLNAVVGTALI | |
| | KKYPKLESEFVYGDYKVYDVRKMIAKSEQEIGKATAKYFFYSNIMNFFKTEITLANGEIRKRPLIETNG | |
| | ETGEIVWDKGRDFATVRKVLSMPQVNIVKKTEVQTGGFSKESILPKRNSDKLIARKKDWDPKKYGGFDS | |
| | PTVAYSVLVVAKVEKGKSKKLKSVKELLGITIMERSSFEKNPIDFLEAKGYKEVKKDLIIKLPKYSLFE | |
| | LENGRKRMLASAGELQKGNELALPSKYVNFLYLASHYEKLKGSPEDNEQKQLFVEQHKHYLDEIIEQIS | |
| | EFSKRVILADANLDKVLSAYNKHRDKPIREQAENIIHLFTLTNLGAPAAFKYFDTTIDRKRYTSTKEVL | |
| | DATLIHQSITGLYETRIDLSQLGGDKRTADGSEFESPKKKAKVE | |
| PL12134 | MPAAKRVKLDGGTAPLEEEYRLFLEAPIQNVTLLEQWKREIPKVWAEINPPGLASTQAPIHVQLLSTAL | 16,173 |
| | PVRVRQYPITLEAKRSLRETIRKFRAAGILRPVHSPWNTPLLPVRKSGTSEYRMVQDLREVNKRVETIH | |
| | PTVPNPYTLLSLLPPDRIWYSVLDLKDAFFCIPLAPESQLIFAFEWADAEEGESGQLTWTRLPQGFKNS | |
| | PTLFNEALNRDLQGFRLDHPSVSLLQYVDDLLIAADTQAACLSATRDLLMTLAELGYRVSGKKAQLCQE | |
| | EVTYLGFKIHKGSRSLSNSRTQAILQIPVPKTKRQVREFLGKIGYCRLFIPGFAELAQPLYAATRPGND | |
| | PLVWGEKEEEAFQSLKLALTQPPALALPSLDKPFQLFVEETSGAAKGVLTQALGPWKRPVAYLSKRLDP | |
| | VAAGWPRCLRAIAAAALLTREASKLTFGQDIEITSSHNLESLLRSPPDKWLTNARITQYQVLLLDPPRV | |
| | RFKQTAALNPATLLPETDDTLPIHHCLDTLDSLTSTRPDLTDQPLAQAEATLFTDGSSYIRDGKRYAGA | |
| | AVVTLDSVIWAEPLPIGTSAQKAELIALTKALEWSKDKSVNIYTDSRYAFATLHVHGMIYRERGWLTAG | |
| | GKAIKNAPEILALLTAVWLPKRVAVMHCKGHQKDDAPTSTGNRRADEVAREVAIRPLSTQATISGSSGS | |
| | SGSSGSSGSSGSSMASNFTQFVLVDNGGTGDVTVAPSNFANGIAEWISSNSRSQAYKVTCSVRQSSAQN | |
| | RKYTIKVEVPKGAWRSYLNMELTIPIFATNSDCELIVKAMQGLLKDGNPIPSAIAANSGIYSGGSSGGS | |
| | SGSETPGTSESATPESSGGSSGGSSDKKYSIGLDIGTNSVGWAVITDEYKVPSKKFKVLGNTDRHSIKK | |
| | NLIGALLFDSGETAEATRLKRTARRRYTRRKNRICYLQEIFSNEMAKVDDSFFHRLEESFLVEEDKKHE | |
| | RHPIFGNIVDEVAYHEKYPTIYHLRKKLVDSTDKADLRLIYLALAHMIKFRGHFLIEGDLNPDNSDVDK | |
| | LFIQLVQTYNQLFEENPINASGVDAKAILSARLSKSRRLENLIAQLPGEKKNGLFGNLIALSLGLTPNF | |
| | KSNFDLAEDAKLQLSKDTYDDDLDNLLAQIGDQYADLFLAAKNLSDAILLSDILRVNTEITKAPLSASM | |
| | IKRYDEHHQDLTLLKALVRQQLPEKYKEIFFDQSKNGYAGYIDGGASQEEFYKFIKPILEKMDGTEELL | |
| | VKLNREDLLRKQRTFDNGSIPHQIHLGELHAILRRQEDFYPFLKDNREKIEKILTFRIPYYVGPLARGN | |
| | SRFAWMTRKSEETITPWNFEEVVDKGASAQSFIERMTNFDKNLPNEKVLPKHSLLYEYFTVYNELTKVK | |
| | YVTEGMRKPAFLSGEQKKAIVDLLFKTNRKVTVKQLKEDYFKKIECFDSVEISGVEDRFNASLGTYHDL | |
| | LKIIKDKDFLDNEENEDILEDIVLTLTLFEDREMIEERLKTYAHLFDDKVMKQLKRRRYTGWGRLSRKL | |
| | INGIRDKQSGKTILDFLKSDGFANRNFMQLIHDDSLTFKEDIQKAQVSGQGDSLHEHIANLAGSPAIKK | |
| | GILQTVKVVDELVKVMGRHKPENIVIEMARENQTTQKGQKNSRERMKRIEEGIKELGSQILKEHPVENT | |
| | QLQNEKLYLYYLQNGRDMYVDQELDINRLSDYDVDHIVPQSFLKDDSIDNKVLTRSDKARGKSDNVPSE | |
| | EVVKKMKNYWRQLLNAKLITQRKFDNLTKAERGGLSELDKAGFIKRQLVETRQITKHVAQILDSRMNTK | |
| | YDENDKLIREVKVITLKSKLVSDFRKDFQFYKVREINNYHHAHDAYLNAVVGTALIKKYPKLESEFVYG | |
| | DYKVYDVRKMIAKSEQEIGKATAKYFFYSNIMNFFKTEITLANGEIRKRPLIETNGETGEIVWDKGRDF | |
| | ATVRKVLSMPQVNIVKKTEVQTGGFSKESILPKRNSDKLIARKKDWDPKKYGGFDSPTVAYSVLVVAKV | |
| | EKGKSKKLKSVKELLGITIMERSSFEKNPIDFLEAKGYKEVKKDLIIKLPKYSLFELENGRKRMLASAG | |
| | ELQKGNELALPSKYVNFLYLASHYEKLKGSPEDNEQKQLFVEQHKHYLDEIIEQISEFSKRVILADANL | |
| | DKVLSAYNKHRDKPIREQAENIIHLFTLTNLGAPAAFKYFDTTIDRKRYTSTKEVLDATLIHQSITGLY | |
| | ETRIDLSQLGGDKRTADGSEFESPKKKAKVE | |
| PL12135 | MPAAKRVKLDGGTAPLEEEYRLFLEAPIQNVTLLEQWKREIPKVWAEINPPGLASTQAPIHVQLLSTAL | 16,174 |
| | PVRVRQYPITLEAKRSLRETIRKFRAAGILRPVHSPWNTPLLPVRKSGTSEYRMVQDLREVNKRVETIH | |
| | PTVPNPYTLLSLLPPDRIWYSVLDLKDAFFCIPLAPESQLIFAFEWADAEEGESGQLTWTRLPQGFKNS | |
| | PTLFNEALNRDLQGFRLDHPSVSLLQYVDDLLIAADTQAACLSATRDLLMTLAELGYRVSGKKAQLCQE | |
| | EVTYLGFKIHKGSRSLSNSRTQAILQIPVPKTKRQVREFLGKIGYCRLFIPGFAELAQPLYAATRPGND | |
| | PLVWGEKEEEAFQSLKLALTQPPALALPSLDKPFQLFVEETSGAAKGVLTQALGPWKRPVAYLSKRLDP | |
| | VAAGWPRCLRAIAAAALLTREASKLTFGQDIEITSSHNLESLLRSPPDKWLTNARITQYQVLLLDPPRV | |
| | RFKQTAALNPATLLPETDDTLPIHHCLDTLDSLTSTRPDLTDQPLAQAEATLFTDGSSYIRDGKRYAGA | |
| | AVVTLDSVIWAEPLPIGTSAQKAELIALTKALEWSKDKSVNIYTDSRYAFATLHVHGMIYRERGWLTAG | |
| | GKAIKNAPEILALLTAVWLPKRVAVMHCKGHQKDDAPTSTGNRRADEVAREVAIRPLSTQATISGSSGS | |
| | SGSSGSSGSSGSSMASNFTQFVLVDNGGTGDVTVAPSNFANGIAEWISSNSRSQAYKVTCSVRQSSAQN | |
| | RKYTIKVEVPKGAWRSYLNMELTIPIFATNSDCELIVKAMQGLLKDGNPIPSAIAANSGIYGSSGSSGS | |
| | SGSSGSSGSSDKKYSIGLDIGTNSVGWAVITDEYKVPSKKFKVLGNTDRHSIKKNLIGALLFDSGETAE | |
| | ATRLKRTARRRYTRRKNRICYLQEIFSNEMAKVDDSFFHRLEESFLVEEDKKHERHPIFGNIVDEVAYH | |
| | EKYPTIYHLRKKLVDSTDKADLRLIYLALAHMIKFRGHFLIEGDLNPDNSDVDKLFIQLVQTYNQLFEE | |
| | NPINASGVDAKAILSARLSKSRRLENLIAQLPGEKKNGLFGNLIALSLGLTPNFKSNFDLAEDAKLQLS | |
| | KDTYDDDLDNLLAQIGDQYADLFLAAKNLSDAILLSDILRVNTEITKAPLSASMIKRYDEHHQDLTLLK | |
| | ALVRQQLPEKYKEIFFDQSKNGYAGYIDGGASQEEFYKFIKPILEKMDGTEELLVKLNREDLLRKQRTF | |
| | DNGSIPHQIHLGELHAILRRQEDFYPFLKDNREKIEKILTFRIPYYVGPLARGNSRFAWMTRKSEETIT | |
| | PWNFEEVVDKGASAQSFIERMTNFDKNLPNEKVLPKHSLLYEYFTVYNELTKVKYVTEGMRKPAFLSGE | |
| | QKKAIVDLLFKTNRKVTVKQLKEDYFKKIECFDSVEISGVEDRFNASLGTYHDLLKIIKDKDFLDNEEN | |
| | EDILEDIVLTLTLFEDREMIEERLKTYAHLFDDKVMKQLKRRRYTGWGRLSRKLINGIRDKQSGKTILD | |
| | FLKSDGFANRNFMQLIHDDSLTFKEDIQKAQVSGQGDSLHEHIANLAGSPAIKKGILQTVKVVDELVKV | |
| | MGRHKPENIVIEMARENQTTQKGQKNSRERMKRIEEGIKELGSQILKEHPVENTQLQNEKLYLYYLQNG | |
| | RDMYVDQELDINRLSDYDVDHIVPQSFLKDDSIDNKVLTRSDKARGKSDNVPSEEVVKKMKNYWRQLLN | |
| | AKLITQRKFDNLTKAERGGLSELDKAGFIKRQLVETRQITKHVAQILDSRMNTKYDENDKLIREVKVIT | |
| | LKSKLVSDFRKDFQFYKVREINNYHHAHDAYLNAVVGTALIKKYPKLESEFVYGDYKVYDVRKMIAKSE | |
| | QEIGKATAKYFFYSNIMNFFKTEITLANGEIRKRPLIETNGETGEIVWDKGRDFATVRKVLSMPQVNIV | |
| | KKTEVQTGGFSKESILPKRNSDKLIARKKDWDPKKYGGFDSPTVAYSVLVVAKVEKGKSKKLKSVKELL | |
| | GITIMERSSFEKNPIDFLEAKGYKEVKKDLIIKLPKYSLFELENGRKRMLASAGELQKGNELALPSKYV | |
| | NFLYLASHYEKLKGSPEDNEQKQLFVEQHKHYLDEIIEQISEFSKRVILADANLDKVLSAYNKHRDKPI | |
| | REQAENIIHLFTLTNLGAPAAFKYFDTTIDRKRYTSTKEVLDATLIHQSITGLYETRIDLSQLGGDKRT | |
| | ADGSEFESPKKKAKVE | |
| PL12136 | MPAAKRVKLDGGTAPLEEEYRLFLEAPIQNVTLLEQWKREIPKVWAEINPPGLASTQAPIHVQLLSTAL | 16,175 |
| | PVRVRQYPITLEAKRSLRETIRKFRAAGILRPVHSPWNTPLLPVRKSGTSEYRMVQDLREVNKRVETIH | |
| | PTVPNPYTLLSLLPPDRIWYSVLDLKDAFFCIPLAPESQLIFAFEWADAEEGESGQLTWTRLPQGFKNS | |
| | PTLFNEALNRDLQGFRLDHPSVSLLQYVDDLLIAADTQAACLSATRDLLMTLAELGYRVSGKKAQLCQE | |
| | EVTYLGFKIHKGSRSLSNSRTQAILQIPVPKTKRQVREFLGKIGYCRLFIPGFAELAQPLYAATRPGND | |
| | PLVWGEKEEEAFQSLKLALTQPPALALPSLDKPFQLFVEETSGAAKGVLTQALGPWKRPVAYLSKRLDP | |
| | VAAGWPRCLRAIAAAALLTREASKLTFGQDIEITSSHNLESLLRSPPDKWLTNARITQYQVLLLDPPRV | |
| | RFKQTAALNPATLLPETDDTLPIHHCLDTLDSLTSTRPDLTDQPLAQAEATLFTDGSSYIRDGKRYAGA | |
| | AVVTLDSVIWAEPLPIGTSAQKAELIALTKALEWSKDKSVNIYTDSRYAFATLHVHGMIYRERGWLTAG | |
| | GKAIKNAPEILALLTAVWLPKRVAVMHCKGHQKDDAPTSTGNRRADEVAREVAIRPLSTQATISGSSGS | |
| | SGSSGSSGSSGSSMASNFTQFVLVDNGGTGDVTVAPSNFANGIAEWISSNSRSQAYKVTCSVRQSSAQN | |
| | RKYTIKVEVPKGAWRSYLNMELTIPIFATNSDCELIVKAMQGLLKDGNPIPSAIAANSGIYGSSGGGEA | |
| | AAKDKKYSIGLDIGTNSVGWAVITDEYKVPSKKFKVLGNTDRHSIKKNLIGALLFDSGETAEATRLKRT | |
| | ARRRYTRRKNRICYLQEIFSNEMAKVDDSFFHRLEESFLVEEDKKHERHPIFGNIVDEVAYHEKYPTIY | |
| | HLRKKLVDSTDKADLRLIYLALAHMIKFRGHFLIEGDLNPDNSDVDKLFIQLVQTYNQLFEENPINASG | |
| | VDAKAILSARLSKSRRLENLIAQLPGEKKNGLFGNLIALSLGLTPNFKSNFDLAEDAKLQLSKDTYDDD | |
| | LDNLLAQIGDQYADLFLAAKNLSDAILLSDILRVNTEITKAPLSASMIKRYDEHHQDLTLLKALVRQQL | |
| | PEKYKEIFFDQSKNGYAGYIDGGASQEEFYKFIKPILEKMDGTEELLVKLNREDLLRKQRTFDNGSIPH | |
| | QIHLGELHAILRRQEDFYPFLKDNREKIEKILTFRIPYYVGPLARGNSRFAWMTRKSEETITPWNFEEV | |
| | VDKGASAQSFIERMTNFDKNLPNEKVLPKHSLLYEYFTVYNELTKVKYVTEGMRKPAFLSGEQKKAIVD | |
| | LLFKTNRKVTVKQLKEDYFKKIECFDSVEISGVEDRFNASLGTYHDLLKIIKDKDFLDNEENEDILEDI | |
| | VLTLTLFEDREMIEERLKTYAHLFDDKVMKQLKRRRYTGWGRLSRKLINGIRDKQSGKTILDFLKSDGF | |
| | ANRNFMQLIHDDSLTFKEDIQKAQVSGQGDSLHEHIANLAGSPAIKKGILQTVKVVDELVKVMGRHKPE | |
| | NIVIEMARENQTTQKGQKNSRERMKRIEEGIKELGSQILKEHPVENTQLQNEKLYLYYLQNGRDMYVDQ | |
| | ELDINRLSDYDVDHIVPQSFLKDDSIDNKVLTRSDKARGKSDNVPSEEVVKKMKNYWRQLLNAKLITQR | |
| | KFDNLTKAERGGLSELDKAGFIKRQLVETRQITKHVAQILDSRMNTKYDENDKLIREVKVITLKSKLVS | |
| | DFRKDFQFYKVREINNYHHAHDAYLNAVVGTALIKKYPKLESEFVYGDYKVYDVRKMIAKSEQEIGKAT | |
| | AKYFFYSNIMNFFKTEITLANGEIRKRPLIETNGETGEIVWDKGRDFATVRKVLSMPQVNIVKKTEVQT | |
| | GGFSKESILPKRNSDKLIARKKDWDPKKYGGFDSPTVAYSVLVVAKVEKGKSKKLKSVKELLGITIMER | |
| | SSFEKNPIDFLEAKGYKEVKKDLIIKLPKYSLFELENGRKRMLASAGELQKGNELALPSKYVNFLYLAS | |
| | HYEKLKGSPEDNEQKQLFVEQHKHYLDEIIEQISEFSKRVILADANLDKVLSAYNKHRDKPIREQAENI | |
| | IHLFTLTNLGAPAAFKYFDTTIDRKRYTSTKEVLDATLIHQSITGLYETRIDLSQLGGDKRTADGSEFE | |
| | SPKKKAKVE | |
| PL12137 | MPAAKRVKLDGGTAPLEEEYRLFLEAPIQNVTLLEQWKREIPKVWAEINPPGLASTQAPIHVQLLSTAL | 16,176 |
| | PVRVRQYPITLEAKRSLRETIRKFRAAGILRPVHSPWNTPLLPVRKSGTSEYRMVQDLREVNKRVETIH | |
| | PTVPNPYTLLSLLPPDRIWYSVLDLKDAFFCIPLAPESQLIFAFEWADAEEGESGQLTWTRLPQGFKNS | |
| | PTLFNEALNRDLQGFRLDHPSVSLLQYVDDLLIAADTQAACLSATRDLLMTLAELGYRVSGKKAQLCQE | |
| | EVTYLGFKIHKGSRSLSNSRTQAILQIPVPKTKRQVREFLGKIGYCRLFIPGFAELAQPLYAATRPGND | |
| | PLVWGEKEEEAFQSLKLALTQPPALALPSLDKPFQLFVEETSGAAKGVLTQALGPWKRPVAYLSKRLDP | |
| | VAAGWPRCLRAIAAAALLTREASKLTFGQDIEITSSHNLESLLRSPPDKWLTNARITQYQVLLLDPPRV | |
| | RFKQTAALNPATLLPETDDTLPIHHCLDTLDSLTSTRPDLTDQPLAQAEATLFTDGSSYIRDGKRYAGA | |
| | AVVTLDSVIWAEPLPIGTSAQKAELIALTKALEWSKDKSVNIYTDSRYAFATLHVHGMIYRERGWLTAG | |
| | GKAIKNAPEILALLTAVWLPKRVAVMHCKGHQKDDAPTSTGNRRADEVAREVAIRPLSTQATISGSSGS | |
| | SGSSGSSGSSGSSMASNFTQFVLVDNGGTGDVTVAPSNFANGIAEWISSNSRSQAYKVTCSVRQSSAQN | |
| | RKYTIKVEVPKGAWRSYLNMELTIPIFATNSDCELIVKAMQGLLKDGNPIPSAIAANSGIYGGSGGSMA | |
| | SNFTQFVLVDNGGTGDVTVAPSNFANGIAEWISSNSRSQAYKVTCSVRQSSAQNRKYTIKVEVPKGAWR | |
| | SYLNMELTIPIFATNSDCELIVKAMQGLLKDGNPIPSAIAANSGIYAEAAAKEAAAKEAAAKEAAAKAL | |
| | EAEAAAKEAAAKEAAAKEAAAKADKKYSIGLDIGTNSVGWAVITDEYKVPSKKFKVLGNTDRHSIKKNL | |
| | IGALLFDSGETAEATRLKRTARRRYTRRKNRICYLQEIFSNEMAKVDDSFFHRLEESFLVEEDKKHERH | |
| | PIFGNIVDEVAYHEKYPTIYHLRKKLVDSTDKADLRLIYLALAHMIKFRGHFLIEGDLNPDNSDVDKLF | |
| | IQLVQTYNQLFEENPINASGVDAKAILSARLSKSRRLENLIAQLPGEKKNGLFGNLIALSLGLTPNFKS | |
| | NFDLAEDAKLQLSKDTYDDDLDNLLAQIGDQYADLFLAAKNLSDAILLSDILRVNTEITKAPLSASMIK | |
| | RYDEHHQDLTLLKALVRQQLPEKYKEIFFDQSKNGYAGYIDGGASQEEFYKFIKPILEKMDGTEELLVK | |
| | LNREDLLRKQRTFDNGSIPHQIHLGELHAILRRQEDFYPFLKDNREKIEKILTFRIPYYVGPLARGNSR | |
| | FAWMTRKSEETITPWNFEEVVDKGASAQSFIERMTNFDKNLPNEKVLPKHSLLYEYFTVYNELTKVKYV | |
| | TEGMRKPAFLSGEQKKAIVDLLFKTNRKVTVKQLKEDYFKKIECFDSVEISGVEDRFNASLGTYHDLLK | |
| | IIKDKDFLDNEENEDILEDIVLTLTLFEDREMIEERLKTYAHLFDDKVMKQLKRRRYTGWGRLSRKLIN | |
| | GIRDKQSGKTILDFLKSDGFANRNFMQLIHDDSLTFKEDIQKAQVSGQGDSLHEHIANLAGSPAIKKGI | |
| | LQTVKVVDELVKVMGRHKPENIVIEMARENQTTQKGQKNSRERMKRIEEGIKELGSQILKEHPVENTQL | |
| | QNEKLYLYYLQNGRDMYVDQELDINRLSDYDVDHIVPQSFLKDDSIDNKVLTRSDKARGKSDNVPSEEV | |
| | VKKMKNYWRQLLNAKLITQRKFDNLTKAERGGLSELDKAGFIKRQLVETRQITKHVAQILDSRMNTKYD | |
| | ENDKLIREVKVITLKSKLVSDFRKDFQFYKVREINNYHHAHDAYLNAVVGTALIKKYPKLESEFVYGDY | |
| | KVYDVRKMIAKSEQEIGKATAKYFFYSNIMNFFKTEITLANGEIRKRPLIETNGETGEIVWDKGRDFAT | |
| | VRKVLSMPQVNIVKKTEVQTGGFSKESILPKRNSDKLIARKKDWDPKKYGGFDSPTVAYSVLVVAKVEK | |
| | GKSKKLKSVKELLGITIMERSSFEKNPIDFLEAKGYKEVKKDLIIKLPKYSLFELENGRKRMLASAGEL | |
| | QKGNELALPSKYVNFLYLASHYEKLKGSPEDNEQKQLFVEQHKHYLDEIIEQISEFSKRVILADANLDK | |
| | VLSAYNKHRDKPIREQAENIIHLFTLTNLGAPAAFKYFDTTIDRKRYTSTKEVLDATLIHQSITGLYET | |
| | RIDLSQLGGDKRTADGSEFESPKKKAKVE | |
| PL12138 | MPAAKRVKLDGGTAPLEEEYRLFLEAPIQNVTLLEQWKREIPKVWAEINPPGLASTQAPIHVQLLSTAL | 16,177 |
| | PVRVRQYPITLEAKRSLRETIRKFRAAGILRPVHSPWNTPLLPVRKSGTSEYRMVQDLREVNKRVETIH | |
| | PTVPNPYTLLSLLPPDRIWYSVLDLKDAFFCIPLAPESQLIFAFEWADAEEGESGQLTWTRLPQGFKNS | |
| | PTLFNEALNRDLQGFRLDHPSVSLLQYVDDLLIAADTQAACLSATRDLLMTLAELGYRVSGKKAQLCQE | |
| | EVTYLGFKIHKGSRSLSNSRTQAILQIPVPKTKRQVREFLGKIGYCRLFIPGFAELAQPLYAATRPGND | |
| | PLVWGEKEEEAFQSLKLALTQPPALALPSLDKPFQLFVEETSGAAKGVLTQALGPWKRPVAYLSKRLDP | |
| | VAAGWPRCLRAIAAAALLTREASKLTFGQDIEITSSHNLESLLRSPPDKWLTNARITQYQVLLLDPPRV | |
| | RFKQTAALNPATLLPETDDTLPIHHCLDTLDSLTSTRPDLTDQPLAQAEATLFTDGSSYIRDGKRYAGA | |
| | AVVTLDSVIWAEPLPIGTSAQKAELIALTKALEWSKDKSVNIYTDSRYAFATLHVHGMIYRERGWLTAG | |
| | GKAIKNAPEILALLTAVWLPKRVAVMHCKGHQKDDAPTSTGNRRADEVAREVAIRPLSTQATISGSSGS | |
| | SGSSGSSGSSGSSMASNFTQFVLVDNGGTGDVTVAPSNFANGIAEWISSNSRSQAYKVTCSVRQSSAQN | |
| | RKYTIKVEVPKGAWRSYLNMELTIPIFATNSDCELIVKAMQGLLKDGNPIPSAIAANSGIYGGSGGSMA | |
| | SNFTQFVLVDNGGTGDVTVAPSNFANGIAEWISSNSRSQAYKVTCSVRQSSAQNRKYTIKVEVPKGAWR | |
| | SYLNMELTIPIFATNSDCELIVKAMQGLLKDGNPIPSAIAANSGIYSGGSSGGSSGSETPGTSESATPE | |
| | SSGGSSGGSSDKKYSIGLDIGTNSVGWAVITDEYKVPSKKFKVLGNTDRHSIKKNLIGALLFDSGETAE | |
| | ATRLKRTARRRYTRRKNRICYLQEIFSNEMAKVDDSFFHRLEESFLVEEDKKHERHPIFGNIVDEVAYH | |
| | EKYPTIYHLRKKLVDSTDKADLRLIYLALAHMIKFRGHFLIEGDLNPDNSDVDKLFIQLVQTYNQLFEE | |
| | NPINASGVDAKAILSARLSKSRRLENLIAQLPGEKKNGLFGNLIALSLGLTPNFKSNFDLAEDAKLQLS | |
| | KDTYDDDLDNLLAQIGDQYADLFLAAKNLSDAILLSDILRVNTEITKAPLSASMIKRYDEHHQDLTLLK | |
| | ALVRQQLPEKYKEIFFDQSKNGYAGYIDGGASQEEFYKFIKPILEKMDGTEELLVKLNREDLLRKQRTF | |
| | DNGSIPHQIHLGELHAILRRQEDFYPFLKDNREKIEKILTFRIPYYVGPLARGNSRFAWMTRKSEETIT | |
| | PWNFEEVVDKGASAQSFIERMTNFDKNLPNEKVLPKHSLLYEYFTVYNELTKVKYVTEGMRKPAFLSGE | |
| | QKKAIVDLLFKTNRKVTVKQLKEDYFKKIECFDSVEISGVEDRFNASLGTYHDLLKIIKDKDFLDNEEN | |
| | EDILEDIVLTLTLFEDREMIEERLKTYAHLFDDKVMKQLKRRRYTGWGRLSRKLINGIRDKQSGKTILD | |
| | FLKSDGFANRNFMQLIHDDSLTFKEDIQKAQVSGQGDSLHEHIANLAGSPAIKKGILQTVKVVDELVKV | |
| | MGRHKPENIVIEMARENQTTQKGQKNSRERMKRIEEGIKELGSQILKEHPVENTQLQNEKLYLYYLQNG | |
| | RDMYVDQELDINRLSDYDVDHIVPQSFLKDDSIDNKVLTRSDKARGKSDNVPSEEVVKKMKNYWRQLLN | |
| | AKLITQRKFDNLTKAERGGLSELDKAGFIKRQLVETRQITKHVAQILDSRMNTKYDENDKLIREVKVIT | |
| | LKSKLVSDFRKDFQFYKVREINNYHHAHDAYLNAVVGTALIKKYPKLESEFVYGDYKVYDVRKMIAKSE | |
| | QEIGKATAKYFFYSNIMNFFKTEITLANGEIRKRPLIETNGETGEIVWDKGRDFATVRKVLSMPQVNIV | |
| | KKTEVQTGGFSKESILPKRNSDKLIARKKDWDPKKYGGFDSPTVAYSVLVVAKVEKGKSKKLKSVKELL | |
| | GITIMERSSFEKNPIDFLEAKGYKEVKKDLIIKLPKYSLFELENGRKRMLASAGELQKGNELALPSKYV | |
| | NFLYLASHYEKLKGSPEDNEQKQLFVEQHKHYLDEIIEQISEFSKRVILADANLDKVLSAYNKHRDKPI | |
| | REQAENIIHLFTLTNLGAPAAFKYFDTTIDRKRYTSTKEVLDATLIHQSITGLYETRIDLSQLGGDKRT | |
| | ADGSEFESPKKKAKVE | |
| PL12139 | MPAAKRVKLDGGTAPLEEEYRLFLEAPIQNVTLLEQWKREIPKVWAEINPPGLASTQAPIHVQLLSTAL | 16,178 |
| | PVRVRQYPITLEAKRSLRETIRKFRAAGILRPVHSPWNTPLLPVRKSGTSEYRMVQDLREVNKRVETIH | |
| | PTVPNPYTLLSLLPPDRIWYSVLDLKDAFFCIPLAPESQLIFAFEWADAEEGESGQLTWTRLPQGFKNS | |
| | PTLFNEALNRDLQGFRLDHPSVSLLQYVDDLLIAADTQAACLSATRDLLMTLAELGYRVSGKKAQLCQE | |
| | EVTYLGFKIHKGSRSLSNSRTQAILQIPVPKTKRQVREFLGKIGYCRLFIPGFAELAQPLYAATRPGND | |
| | PLVWGEKEEEAFQSLKLALTQPPALALPSLDKPFQLFVEETSGAAKGVLTQALGPWKRPVAYLSKRLDP | |
| | VAAGWPRCLRAIAAAALLTREASKLTFGQDIEITSSHNLESLLRSPPDKWLTNARITQYQVLLLDPPRV | |
| | RFKQTAALNPATLLPETDDTLPIHHCLDTLDSLTSTRPDLTDQPLAQAEATLFTDGSSYIRDGKRYAGA | |
| | AVVTLDSVIWAEPLPIGTSAQKAELIALTKALEWSKDKSVNIYTDSRYAFATLHVHGMIYRERGWLTAG | |
| | GKAIKNAPEILALLTAVWLPKRVAVMHCKGHQKDDAPTSTGNRRADEVAREVAIRPLSTQATISGSSGS | |
| | SGSSGSSGSSGSSMASNFTQFVLVDNGGTGDVTVAPSNFANGIAEWISSNSRSQAYKVTCSVRQSSAQN | |
| | RKYTIKVEVPKGAWRSYLNMELTIPIFATNSDCELIVKAMQGLLKDGNPIPSAIAANSGIYGGSGGSMA | |
| | SNFTQFVLVDNGGTGDVTVAPSNFANGIAEWISSNSRSQAYKVTCSVRQSSAQNRKYTIKVEVPKGAWR | |
| | SYLNMELTIPIFATNSDCELIVKAMQGLLKDGNPIPSAIAANSGIYGSSGSSGSSGSSGSSGSSDKKYS | |
| | IGLDIGTNSVGWAVITDEYKVPSKKFKVLGNTDRHSIKKNLIGALLFDSGETAEATRLKRTARRRYTRR | |
| | KNRICYLQEIFSNEMAKVDDSFFHRLEESFLVEEDKKHERHPIFGNIVDEVAYHEKYPTIYHLRKKLVD | |
| | STDKADLRLIYLALAHMIKFRGHFLIEGDLNPDNSDVDKLFIQLVQTYNQLFEENPINASGVDAKAILS | |
| | ARLSKSRRLENLIAQLPGEKKNGLFGNLIALSLGLTPNFKSNFDLAEDAKLQLSKDTYDDDLDNLLAQI | |
| | GDQYADLFLAAKNLSDAILLSDILRVNTEITKAPLSASMIKRYDEHHQDLTLLKALVRQQLPEKYKEIF | |
| | FDQSKNGYAGYIDGGASQEEFYKFIKPILEKMDGTEELLVKLNREDLLRKQRTFDNGSIPHQIHLGELH | |
| | AILRRQEDFYPFLKDNREKIEKILTFRIPYYVGPLARGNSRFAWMTRKSEETITPWNFEEVVDKGASAQ | |
| | SFIERMTNFDKNLPNEKVLPKHSLLYEYFTVYNELTKVKYVTEGMRKPAFLSGEQKKAIVDLLFKTNRK | |
| | VTVKQLKEDYFKKIECFDSVEISGVEDRFNASLGTYHDLLKIIKDKDFLDNEENEDILEDIVLTLTLFE | |
| | DREMIEERLKTYAHLFDDKVMKQLKRRRYTGWGRLSRKLINGIRDKQSGKTILDFLKSDGFANRNFMQL | |
| | IHDDSLTFKEDIQKAQVSGQGDSLHEHIANLAGSPAIKKGILQTVKVVDELVKVMGRHKPENIVIEMAR | |
| | ENQTTQKGQKNSRERMKRIEEGIKELGSQILKEHPVENTQLQNEKLYLYYLQNGRDMYVDQELDINRLS | |
| | DYDVDHIVPQSFLKDDSIDNKVLTRSDKARGKSDNVPSEEVVKKMKNYWRQLLNAKLITQRKFDNLTKA | |
| | ERGGLSELDKAGFIKRQLVETRQITKHVAQILDSRMNTKYDENDKLIREVKVITLKSKLVSDFRKDFQF | |
| | YKVREINNYHHAHDAYLNAVVGTALIKKYPKLESEFVYGDYKVYDVRKMIAKSEQEIGKATAKYFFYSN | |
| | IMNFFKTEITLANGEIRKRPLIETNGETGEIVWDKGRDFATVRKVLSMPQVNIVKKTEVQTGGFSKESI | |
| | LPKRNSDKLIARKKDWDPKKYGGFDSPTVAYSVLVVAKVEKGKSKKLKSVKELLGITIMERSSFEKNPI | |
| | DFLEAKGYKEVKKDLIIKLPKYSLFELENGRKRMLASAGELQKGNELALPSKYVNFLYLASHYEKLKGS | |
| | PEDNEQKQLFVEQHKHYLDEIIEQISEFSKRVILADANLDKVLSAYNKHRDKPIREQAENIIHLFTLTN | |
| | LGAPAAFKYFDTTIDRKRYTSTKEVLDATLIHQSITGLYETRIDLSQLGGDKRTADGSEFESPKKKAKV | |
| | E | |
| PL12140 | MPAAKRVKLDGGTAPLEEEYRLFLEAPIQNVTLLEQWKREIPKVWAEINPPGLASTQAPIHVQLLSTAL | 16,179 |
| | PVRVRQYPITLEAKRSLRETIRKFRAAGILRPVHSPWNTPLLPVRKSGTSEYRMVQDLREVNKRVETIH | |
| | PTVPNPYTLLSLLPPDRIWYSVLDLKDAFFCIPLAPESQLIFAFEWADAEEGESGQLTWTRLPQGFKNS | |
| | PTLFNEALNRDLQGFRLDHPSVSLLQYVDDLLIAADTQAACLSATRDLLMTLAELGYRVSGKKAQLCQE | |
| | EVTYLGFKIHKGSRSLSNSRTQAILQIPVPKTKRQVREFLGKIGYCRLFIPGFAELAQPLYAATRPGND | |
| | PLVWGEKEEEAFQSLKLALTQPPALALPSLDKPFQLFVEETSGAAKGVLTQALGPWKRPVAYLSKRLDP | |
| | VAAGWPRCLRAIAAAALLTREASKLTFGQDIEITSSHNLESLLRSPPDKWLTNARITQYQVLLLDPPRV | |
| | RFKQTAALNPATLLPETDDTLPIHHCLDTLDSLTSTRPDLTDQPLAQAEATLFTDGSSYIRDGKRYAGA | |
| | AVVTLDSVIWAEPLPIGTSAQKAELIALTKALEWSKDKSVNIYTDSRYAFATLHVHGMIYRERGWLTAG | |
| | GKAIKNAPEILALLTAVWLPKRVAVMHCKGHQKDDAPTSTGNRRADEVAREVAIRPLSTQATISGSSGS | |
| | SGSSGSSGSSGSSMASNFTQFVLVDNGGTGDVTVAPSNFANGIAEWISSNSRSQAYKVTCSVRQSSAQN | |
| | RKYTIKVEVPKGAWRSYLNMELTIPIFATNSDCELIVKAMQGLLKDGNPIPSAIAANSGIYGGSGGSMA | |
| | SNFTQFVLVDNGGTGDVTVAPSNFANGIAEWISSNSRSQAYKVTCSVRQSSAQNRKYTIKVEVPKGAWR | |
| | SYLNMELTIPIFATNSDCELIVKAMQGLLKDGNPIPSAIAANSGIYGSSGGGEAAAKDKKYSIGLDIGT | |
| | NSVGWAVITDEYKVPSKKFKVLGNTDRHSIKKNLIGALLFDSGETAEATRLKRTARRRYTRRKNRICYL | |
| | QEIFSNEMAKVDDSFFHRLEESFLVEEDKKHERHPIFGNIVDEVAYHEKYPTIYHLRKKLVDSTDKADL | |
| | RLIYLALAHMIKFRGHFLIEGDLNPDNSDVDKLFIQLVQTYNQLFEENPINASGVDAKAILSARLSKSR | |
| | RLENLIAQLPGEKKNGLFGNLIALSLGLTPNFKSNFDLAEDAKLQLSKDTYDDDLDNLLAQIGDQYADL | |
| | FLAAKNLSDAILLSDILRVNTEITKAPLSASMIKRYDEHHQDLTLLKALVRQQLPEKYKEIFFDQSKNG | |
| | YAGYIDGGASQEEFYKFIKPILEKMDGTEELLVKLNREDLLRKQRTFDNGSIPHQIHLGELHAILRRQE | |
| | DFYPFLKDNREKIEKILTFRIPYYVGPLARGNSRFAWMTRKSEETITPWNFEEVVDKGASAQSFIERMT | |
| | NFDKNLPNEKVLPKHSLLYEYFTVYNELTKVKYVTEGMRKPAFLSGEQKKAIVDLLFKTNRKVTVKQLK | |
| | EDYFKKIECFDSVEISGVEDRFNASLGTYHDLLKIIKDKDFLDNEENEDILEDIVLTLTLFEDREMIEE | |
| | RLKTYAHLFDDKVMKQLKRRRYTGWGRLSRKLINGIRDKQSGKTILDFLKSDGFANRNFMQLIHDDSLT | |
| | FKEDIQKAQVSGQGDSLHEHIANLAGSPAIKKGILQTVKVVDELVKVMGRHKPENIVIEMARENQTTQK | |
| | GQKNSRERMKRIEEGIKELGSQILKEHPVENTQLQNEKLYLYYLQNGRDMYVDQELDINRLSDYDVDHI | |
| | VPQSFLKDDSIDNKVLTRSDKARGKSDNVPSEEVVKKMKNYWRQLLNAKLITQRKFDNLTKAERGGLSE | |
| | LDKAGFIKRQLVETRQITKHVAQILDSRMNTKYDENDKLIREVKVITLKSKLVSDFRKDFQFYKVREIN | |
| | NYHHAHDAYLNAVVGTALIKKYPKLESEFVYGDYKVYDVRKMIAKSEQEIGKATAKYFFYSNIMNFFKT | |
| | EITLANGEIRKRPLIETNGETGEIVWDKGRDFATVRKVLSMPQVNIVKKTEVQTGGFSKESILPKRNSD | |
| | KLIARKKDWDPKKYGGFDSPTVAYSVLVVAKVEKGKSKKLKSVKELLGITIMERSSFEKNPIDFLEAKG | |
| | YKEVKKDLIIKLPKYSLFELENGRKRMLASAGELQKGNELALPSKYVNFLYLASHYEKLKGSPEDNEQK | |
| | QLFVEQHKHYLDEIIEQISEFSKRVILADANLDKVLSAYNKHRDKPIREQAENIIHLFTLTNLGAPAAF | |
| | KYFDTTIDRKRYTSTKEVLDATLIHQSITGLYETRIDLSQLGGDKRTADGSEFESPKKKAKVE | |
| PL12141 | MPAAKRVKLDGGTAPLEEEYRLFLEAPIQNVTLLEQWKREIPKVWAEINPPGLASTQAPIHVQLLSTAL | 16,180 |
| | PVRVRQYPITLEAKRSLRETIRKFRAAGILRPVHSPWNTPLLPVRKSGTSEYRMVQDLREVNKRVETIH | |
| | PTVPNPYTLLSLLPPDRIWYSVLDLKDAFFCIPLAPESQLIFAFEWADAEEGESGQLTWTRLPQGFKNS | |
| | PTLFNEALNRDLQGFRLDHPSVSLLQYVDDLLIAADTQAACLSATRDLLMTLAELGYRVSGKKAQLCQE | |
| | EVTYLGFKIHKGSRSLSNSRTQAILQIPVPKTKRQVREFLGKIGYCRLFIPGFAELAQPLYAATRPGND | |
| | PLVWGEKEEEAFQSLKLALTQPPALALPSLDKPFQLFVEETSGAAKGVLTQALGPWKRPVAYLSKRLDP | |
| | VAAGWPRCLRAIAAAALLTREASKLTFGQDIEITSSHNLESLLRSPPDKWLTNARITQYQVLLLDPPRV | |
| | RFKQTAALNPATLLPETDDTLPIHHCLDTLDSLTSTRPDLTDQPLAQAEATLFTDGSSYIRDGKRYAGA | |
| | AVVTLDSVIWAEPLPIGTSAQKAELIALTKALEWSKDKSVNIYTDSRYAFATLHVHGMIYRERGWLTAG | |
| | GKAIKNAPEILALLTAVWLPKRVAVMHCKGHQKDDAPTSTGNRRADEVAREVAIRPLSTQATISGSSGS | |
| | SGSSGSSGSSGSSMASNFTQFVLVDNGGTGDVTVAPSNFANGIAEWISSNSRSQAYKVTCSVRQSSAQN | |
| | RKYTIKVEVPKGAWRSYLNMELTIPIFATNSDCELIVKAMQGLLKDGNPIPSAIAANSGIYGGSGGSMA | |
| | SNFTQFVLVDNGGTGDVTVAPSNFANGIAEWISSNSRSQAYKVTCSVRQSSAQNRKYTIKVEVPKGAWR | |
| | SYLNMELTIPIFATNSDCELIVKAMQGLLKDGNPIPSAIAANSGIYGGGSGGGSGGGSGGGSMASNFTQ | |
| | FVLVDNGGTGDVTVAPSNFANGIAEWISSNSRSQAYKVTCSVRQSSAQNRKYTIKVEVPKGAWRSYLNM | |
| | ELTIPIFATNSDCELIVKAMQGLLKDGNPIPSAIAANSGIYGGSGGSMASNFTQFVLVDNGGTGDVTVA | |
| | PSNFANGIAEWISSNSRSQAYKVTCSVRQSSAQNRKYTIKVEVPKGAWRSYLNMELTIPIFATNSDCEL | |
| | IVKAMQGLLKDGNPIPSAIAANSGIYAEAAAKEAAAKEAAAKEAAAKALEAEAAAKEAAAKEAAAKEAA | |
| | AKADKKYSIGLDIGTNSVGWAVITDEYKVPSKKFKVLGNTDRHSIKKNLIGALLFDSGETAEATRLKRT | |
| | ARRRYTRRKNRICYLQEIFSNEMAKVDDSFFHRLEESFLVEEDKKHERHPIFGNIVDEVAYHEKYPTIY | |
| | HLRKKLVDSTDKADLRLIYLALAHMIKFRGHFLIEGDLNPDNSDVDKLFIQLVQTYNQLFEENPINASG | |
| | VDAKAILSARLSKSRRLENLIAQLPGEKKNGLFGNLIALSLGLTPNFKSNFDLAEDAKLQLSKDTYDDD | |
| | LDNLLAQIGDQYADLFLAAKNLSDAILLSDILRVNTEITKAPLSASMIKRYDEHHQDLTLLKALVRQQL | |
| | PEKYKEIFFDQSKNGYAGYIDGGASQEEFYKFIKPILEKMDGTEELLVKLNREDLLRKQRTFDNGSIPH | |
| | QIHLGELHAILRRQEDFYPFLKDNREKIEKILTFRIPYYVGPLARGNSRFAWMTRKSEETITPWNFEEV | |
| | VDKGASAQSFIERMTNFDKNLPNEKVLPKHSLLYEYFTVYNELTKVKYVTEGMRKPAFLSGEQKKAIVD | |
| | LLFKTNRKVTVKQLKEDYFKKIECFDSVEISGVEDRFNASLGTYHDLLKIIKDKDFLDNEENEDILEDI | |
| | VLTLTLFEDREMIEERLKTYAHLFDDKVMKQLKRRRYTGWGRLSRKLINGIRDKQSGKTILDFLKSDGF | |
| | ANRNFMQLIHDDSLTFKEDIQKAQVSGQGDSLHEHIANLAGSPAIKKGILQTVKVVDELVKVMGRHKPE | |
| | NIVIEMARENQTTQKGQKNSRERMKRIEEGIKELGSQILKEHPVENTQLQNEKLYLYYLQNGRDMYVDQ | |
| | ELDINRLSDYDVDHIVPQSFLKDDSIDNKVLTRSDKARGKSDNVPSEEVVKKMKNYWRQLLNAKLITQR | |
| | KFDNLTKAERGGLSELDKAGFIKRQLVETRQITKHVAQILDSRMNTKYDENDKLIREVKVITLKSKLVS | |
| | DFRKDFQFYKVREINNYHHAHDAYLNAVVGTALIKKYPKLESEFVYGDYKVYDVRKMIAKSEQEIGKAT | |
| | AKYFFYSNIMNFFKTEITLANGEIRKRPLIETNGETGEIVWDKGRDFATVRKVLSMPQVNIVKKTEVQT | |
| | GGFSKESILPKRNSDKLIARKKDWDPKKYGGFDSPTVAYSVLVVAKVEKGKSKKLKSVKELLGITIMER | |
| | SSFEKNPIDFLEAKGYKEVKKDLIIKLPKYSLFELENGRKRMLASAGELQKGNELALPSKYVNFLYLAS | |
| | HYEKLKGSPEDNEQKQLFVEQHKHYLDEIIEQISEFSKRVILADANLDKVLSAYNKHRDKPIREQAENI | |
| | IHLFTLTNLGAPAAFKYFDTTIDRKRYTSTKEVLDATLIHQSITGLYETRIDLSQLGGDKRTADGSEFE | |
| | SPKKKAKVE | |
| PL12142 | MPAAKRVKLDGGTAPLEEEYRLFLEAPIQNVTLLEQWKREIPKVWAEINPPGLASTQAPIHVQLLSTAL | 16,181 |
| | PVRVRQYPITLEAKRSLRETIRKFRAAGILRPVHSPWNTPLLPVRKSGTSEYRMVQDLREVNKRVETIH | |
| | PTVPNPYTLLSLLPPDRIWYSVLDLKDAFFCIPLAPESQLIFAFEWADAEEGESGQLTWTRLPQGFKNS | |
| | PTLFNEALNRDLQGFRLDHPSVSLLQYVDDLLIAADTQAACLSATRDLLMTLAELGYRVSGKKAQLCQE | |
| | EVTYLGFKIHKGSRSLSNSRTQAILQIPVPKTKRQVREFLGKIGYCRLFIPGFAELAQPLYAATRPGND | |
| | PLVWGEKEEEAFQSLKLALTQPPALALPSLDKPFQLFVEETSGAAKGVLTQALGPWKRPVAYLSKRLDP | |
| | VAAGWPRCLRAIAAAALLTREASKLTFGQDIEITSSHNLESLLRSPPDKWLTNARITQYQVLLLDPPRV | |
| | RFKQTAALNPATLLPETDDTLPIHHCLDTLDSLTSTRPDLTDQPLAQAEATLFTDGSSYIRDGKRYAGA | |
| | AVVTLDSVIWAEPLPIGTSAQKAELIALTKALEWSKDKSVNIYTDSRYAFATLHVHGMIYRERGWLTAG | |
| | GKAIKNAPEILALLTAVWLPKRVAVMHCKGHQKDDAPTSTGNRRADEVAREVAIRPLSTQATISGSSGS | |
| | SGSSGSSGSSGSSMASNFTQFVLVDNGGTGDVTVAPSNFANGIAEWISSNSRSQAYKVTCSVRQSSAQN | |
| | RKYTIKVEVPKGAWRSYLNMELTIPIFATNSDCELIVKAMQGLLKDGNPIPSAIAANSGIYGGSGGSMA | |
| | SNFTQFVLVDNGGTGDVTVAPSNFANGIAEWISSNSRSQAYKVTCSVRQSSAQNRKYTIKVEVPKGAWR | |
| | SYLNMELTIPIFATNSDCELIVKAMQGLLKDGNPIPSAIAANSGIYGGGSGGGSGGGSGGGSMASNFTQ | |
| | FVLVDNGGTGDVTVAPSNFANGIAEWISSNSRSQAYKVTCSVRQSSAQNRKYTIKVEVPKGAWRSYLNM | |
| | ELTIPIFATNSDCELIVKAMQGLLKDGNPIPSAIAANSGIYGGSGGSMASNFTQFVLVDNGGTGDVTVA | |
| | PSNFANGIAEWISSNSRSQAYKVTCSVRQSSAQNRKYTIKVEVPKGAWRSYLNMELTIPIFATNSDCEL | |
| | IVKAMQGLLKDGNPIPSAIAANSGIYSGGSSGGSSGSETPGTSESATPESSGGSSGGSSDKKYSIGLDI | |
| | GTNSVGWAVITDEYKVPSKKFKVLGNTDRHSIKKNLIGALLFDSGETAEATRLKRTARRRYTRRKNRIC | |
| | YLQEIFSNEMAKVDDSFFHRLEESFLVEEDKKHERHPIFGNIVDEVAYHEKYPTIYHLRKKLVDSTDKA | |
| | DLRLIYLALAHMIKFRGHFLIEGDLNPDNSDVDKLFIQLVQTYNQLFEENPINASGVDAKAILSARLSK | |
| | SRRLENLIAQLPGEKKNGLFGNLIALSLGLTPNFKSNFDLAEDAKLQLSKDTYDDDLDNLLAQIGDQYA | |
| | DLFLAAKNLSDAILLSDILRVNTEITKAPLSASMIKRYDEHHQDLTLLKALVRQQLPEKYKEIFFDQSK | |
| | NGYAGYIDGGASQEEFYKFIKPILEKMDGTEELLVKLNREDLLRKQRTFDNGSIPHQIHLGELHAILRR | |
| | QEDFYPFLKDNREKIEKILTFRIPYYVGPLARGNSRFAWMTRKSEETITPWNFEEVVDKGASAQSFIER | |
| | MTNFDKNLPNEKVLPKHSLLYEYFTVYNELTKVKYVTEGMRKPAFLSGEQKKAIVDLLFKTNRKVTVKQ | |
| | LKEDYFKKIECFDSVEISGVEDRFNASLGTYHDLLKIIKDKDFLDNEENEDILEDIVLTLTLFEDREMI | |
| | EERLKTYAHLFDDKVMKQLKRRRYTGWGRLSRKLINGIRDKQSGKTILDFLKSDGFANRNFMQLIHDDS | |
| | LTFKEDIQKAQVSGQGDSLHEHIANLAGSPAIKKGILQTVKVVDELVKVMGRHKPENIVIEMARENQTT | |
| | QKGQKNSRERMKRIEEGIKELGSQILKEHPVENTQLQNEKLYLYYLQNGRDMYVDQELDINRLSDYDVD | |
| | HIVPQSFLKDDSIDNKVLTRSDKARGKSDNVPSEEVVKKMKNYWRQLLNAKLITQRKFDNLTKAERGGL | |
| | SELDKAGFIKRQLVETRQITKHVAQILDSRMNTKYDENDKLIREVKVITLKSKLVSDFRKDFQFYKVRE | |
| | INNYHHAHDAYLNAVVGTALIKKYPKLESEFVYGDYKVYDVRKMIAKSEQEIGKATAKYFFYSNIMNFF | |
| | KTEITLANGEIRKRPLIETNGETGEIVWDKGRDFATVRKVLSMPQVNIVKKTEVQTGGFSKESILPKRN | |
| | SDKLIARKKDWDPKKYGGFDSPTVAYSVLVVAKVEKGKSKKLKSVKELLGITIMERSSFEKNPIDFLEA | |
| | KGYKEVKKDLIIKLPKYSLFELENGRKRMLASAGELQKGNELALPSKYVNFLYLASHYEKLKGSPEDNE | |
| | QKQLFVEQHKHYLDEIIEQISEFSKRVILADANLDKVLSAYNKHRDKPIREQAENIIHLFTLTNLGAPA | |
| | AFKYFDTTIDRKRYTSTKEVLDATLIHQSITGLYETRIDLSQLGGDKRTADGSEFESPKKKAKVE | |
| PL12143 | MPAAKRVKLDGGTAPLEEEYRLFLEAPIQNVTLLEQWKREIPKVWAEINPPGLASTQAPIHVQLLSTAL | 16,182 |
| | PVRVRQYPITLEAKRSLRETIRKFRAAGILRPVHSPWNTPLLPVRKSGTSEYRMVQDLREVNKRVETIH | |
| | PTVPNPYTLLSLLPPDRIWYSVLDLKDAFFCIPLAPESQLIFAFEWADAEEGESGQLTWTRLPQGFKNS | |
| | PTLFNEALNRDLQGFRLDHPSVSLLQYVDDLLIAADTQAACLSATRDLLMTLAELGYRVSGKKAQLCQE | |
| | EVTYLGFKIHKGSRSLSNSRTQAILQIPVPKTKRQVREFLGKIGYCRLFIPGFAELAQPLYAATRPGND | |
| | PLVWGEKEEEAFQSLKLALTQPPALALPSLDKPFQLFVEETSGAAKGVLTQALGPWKRPVAYLSKRLDP | |
| | VAAGWPRCLRAIAAAALLTREASKLTFGQDIEITSSHNLESLLRSPPDKWLTNARITQYQVLLLDPPRV | |
| | RFKQTAALNPATLLPETDDTLPIHHCLDTLDSLTSTRPDLTDQPLAQAEATLFTDGSSYIRDGKRYAGA | |
| | AVVTLDSVIWAEPLPIGTSAQKAELIALTKALEWSKDKSVNIYTDSRYAFATLHVHGMIYRERGWLTAG | |
| | GKAIKNAPEILALLTAVWLPKRVAVMHCKGHQKDDAPTSTGNRRADEVAREVAIRPLSTQATISGSSGS | |
| | SGSSGSSGSSGSSMASNFTQFVLVDNGGTGDVTVAPSNFANGIAEWISSNSRSQAYKVTCSVRQSSAQN | |
| | RKYTIKVEVPKGAWRSYLNMELTIPIFATNSDCELIVKAMQGLLKDGNPIPSAIAANSGIYGGSGGSMA | |
| | SNFTQFVLVDNGGTGDVTVAPSNFANGIAEWISSNSRSQAYKVTCSVRQSSAQNRKYTIKVEVPKGAWR | |
| | SYLNMELTIPIFATNSDCELIVKAMQGLLKDGNPIPSAIAANSGIYGGGSGGGSGGGSGGGSMASNFTQ | |
| | FVLVDNGGTGDVTVAPSNFANGIAEWISSNSRSQAYKVTCSVRQSSAQNRKYTIKVEVPKGAWRSYLNM | |
| | ELTIPIFATNSDCELIVKAMQGLLKDGNPIPSAIAANSGIYGGSGGSMASNFTQFVLVDNGGTGDVTVA | |
| | PSNFANGIAEWISSNSRSQAYKVTCSVRQSSAQNRKYTIKVEVPKGAWRSYLNMELTIPIFATNSDCEL | |
| | IVKAMQGLLKDGNPIPSAIAANSGIYGSSGSSGSSGSSGSSGSSDKKYSIGLDIGTNSVGWAVITDEYK | |
| | VPSKKFKVLGNTDRHSIKKNLIGALLFDSGETAEATRLKRTARRRYTRRKNRICYLQEIFSNEMAKVDD | |
| | SFFHRLEESFLVEEDKKHERHPIFGNIVDEVAYHEKYPTIYHLRKKLVDSTDKADLRLIYLALAHMIKF | |
| | RGHFLIEGDLNPDNSDVDKLFIQLVQTYNQLFEENPINASGVDAKAILSARLSKSRRLENLIAQLPGEK | |
| | KNGLFGNLIALSLGLTPNFKSNFDLAEDAKLQLSKDTYDDDLDNLLAQIGDQYADLFLAAKNLSDAILL | |
| | SDILRVNTEITKAPLSASMIKRYDEHHQDLTLLKALVRQQLPEKYKEIFFDQSKNGYAGYIDGGASQEE | |
| | FYKFIKPILEKMDGTEELLVKLNREDLLRKQRTFDNGSIPHQIHLGELHAILRRQEDFYPFLKDNREKI | |
| | EKILTFRIPYYVGPLARGNSRFAWMTRKSEETITPWNFEEVVDKGASAQSFIERMTNFDKNLPNEKVLP | |
| | KHSLLYEYFTVYNELTKVKYVTEGMRKPAFLSGEQKKAIVDLLFKTNRKVTVKQLKEDYFKKIECFDSV | |
| | EISGVEDRFNASLGTYHDLLKIIKDKDFLDNEENEDILEDIVLTLTLFEDREMIEERLKTYAHLFDDKV | |
| | MKQLKRRRYTGWGRLSRKLINGIRDKQSGKTILDFLKSDGFANRNFMQLIHDDSLTFKEDIQKAQVSGQ | |
| | GDSLHEHIANLAGSPAIKKGILQTVKVVDELVKVMGRHKPENIVIEMARENQTTQKGQKNSRERMKRIE | |
| | EGIKELGSQILKEHPVENTQLQNEKLYLYYLQNGRDMYVDQELDINRLSDYDVDHIVPQSFLKDDSIDN | |
| | KVLTRSDKARGKSDNVPSEEVVKKMKNYWRQLLNAKLITQRKFDNLTKAERGGLSELDKAGFIKRQLVE | |
| | TRQITKHVAQILDSRMNTKYDENDKLIREVKVITLKSKLVSDFRKDFQFYKVREINNYHHAHDAYLNAV | |
| | VGTALIKKYPKLESEFVYGDYKVYDVRKMIAKSEQEIGKATAKYFFYSNIMNFFKTEITLANGEIRKRP | |
| | LIETNGETGEIVWDKGRDFATVRKVLSMPQVNIVKKTEVQTGGFSKESILPKRNSDKLIARKKDWDPKK | |
| | YGGFDSPTVAYSVLVVAKVEKGKSKKLKSVKELLGITIMERSSFEKNPIDFLEAKGYKEVKKDLIIKLP | |
| | KYSLFELENGRKRMLASAGELQKGNELALPSKYVNFLYLASHYEKLKGSPEDNEQKQLFVEQHKHYLDE | |
| | IIEQISEFSKRVILADANLDKVLSAYNKHRDKPIREQAENIIHLFTLTNLGAPAAFKYFDTTIDRKRYT | |
| | STKEVLDATLIHQSITGLYETRIDLSQLGGDKRTADGSEFESPKKKAKVE | |
| PL12144 | MPAAKRVKLDGGTAPLEEEYRLFLEAPIQNVTLLEQWKREIPKVWAEINPPGLASTQAPIHVQLLSTAL | 16,183 |
| | PVRVRQYPITLEAKRSLRETIRKFRAAGILRPVHSPWNTPLLPVRKSGTSEYRMVQDLREVNKRVETIH | |
| | PTVPNPYTLLSLLPPDRIWYSVLDLKDAFFCIPLAPESQLIFAFEWADAEEGESGQLTWTRLPQGFKNS | |
| | PTLFNEALNRDLQGFRLDHPSVSLLQYVDDLLIAADTQAACLSATRDLLMTLAELGYRVSGKKAQLCQE | |
| | EVTYLGFKIHKGSRSLSNSRTQAILQIPVPKTKRQVREFLGKIGYCRLFIPGFAELAQPLYAATRPGND | |
| | PLVWGEKEEEAFQSLKLALTQPPALALPSLDKPFQLFVEETSGAAKGVLTQALGPWKRPVAYLSKRLDP | |
| | VAAGWPRCLRAIAAAALLTREASKLTFGQDIEITSSHNLESLLRSPPDKWLTNARITQYQVLLLDPPRV | |
| | RFKQTAALNPATLLPETDDTLPIHHCLDTLDSLTSTRPDLTDQPLAQAEATLFTDGSSYIRDGKRYAGA | |
| | AVVTLDSVIWAEPLPIGTSAQKAELIALTKALEWSKDKSVNIYTDSRYAFATLHVHGMIYRERGWLTAG | |
| | GKAIKNAPEILALLTAVWLPKRVAVMHCKGHQKDDAPTSTGNRRADEVAREVAIRPLSTQATISGSSGS | |
| | SGSSGSSGSSGSSMASNFTQFVLVDNGGTGDVTVAPSNFANGIAEWISSNSRSQAYKVTCSVRQSSAQN | |
| | RKYTIKVEVPKGAWRSYLNMELTIPIFATNSDCELIVKAMQGLLKDGNPIPSAIAANSGIYGGSGGSMA | |
| | SNFTQFVLVDNGGTGDVTVAPSNFANGIAEWISSNSRSQAYKVTCSVRQSSAQNRKYTIKVEVPKGAWR | |
| | SYLNMELTIPIFATNSDCELIVKAMQGLLKDGNPIPSAIAANSGIYGGGSGGGSGGGSGGGSMASNFTQ | |
| | FVLVDNGGTGDVTVAPSNFANGIAEWISSNSRSQAYKVTCSVRQSSAQNRKYTIKVEVPKGAWRSYLNM | |
| | ELTIPIFATNSDCELIVKAMQGLLKDGNPIPSAIAANSGIYGGSGGSMASNFTQFVLVDNGGTGDVTVA | |
| | PSNFANGIAEWISSNSRSQAYKVTCSVRQSSAQNRKYTIKVEVPKGAWRSYLNMELTIPIFATNSDCEL | |
| | IVKAMQGLLKDGNPIPSAIAANSGIYGSSGGGEAAAKDKKYSIGLDIGTNSVGWAVITDEYKVPSKKFK | |
| | VLGNTDRHSIKKNLIGALLFDSGETAEATRLKRTARRRYTRRKNRICYLQEIFSNEMAKVDDSFFHRLE | |
| | ESFLVEEDKKHERHPIFGNIVDEVAYHEKYPTIYHLRKKLVDSTDKADLRLIYLALAHMIKFRGHFLIE | |
| | GDLNPDNSDVDKLFIQLVQTYNQLFEENPINASGVDAKAILSARLSKSRRLENLIAQLPGEKKNGLFGN | |
| | LIALSLGLTPNFKSNFDLAEDAKLQLSKDTYDDDLDNLLAQIGDQYADLFLAAKNLSDAILLSDILRVN | |
| | TEITKAPLSASMIKRYDEHHQDLTLLKALVRQQLPEKYKEIFFDQSKNGYAGYIDGGASQEEFYKFIKP | |
| | ILEKMDGTEELLVKLNREDLLRKQRTFDNGSIPHQIHLGELHAILRRQEDFYPFLKDNREKIEKILTFR | |
| | IPYYVGPLARGNSRFAWMTRKSEETITPWNFEEVVDKGASAQSFIERMTNFDKNLPNEKVLPKHSLLYE | |
| | YFTVYNELTKVKYVTEGMRKPAFLSGEQKKAIVDLLFKTNRKVTVKQLKEDYFKKIECFDSVEISGVED | |
| | RFNASLGTYHDLLKIIKDKDFLDNEENEDILEDIVLTLTLFEDREMIEERLKTYAHLFDDKVMKQLKRR | |
| | RYTGWGRLSRKLINGIRDKQSGKTILDFLKSDGFANRNFMQLIHDDSLTFKEDIQKAQVSGQGDSLHEH | |
| | IANLAGSPAIKKGILQTVKVVDELVKVMGRHKPENIVIEMARENQTTQKGQKNSRERMKRIEEGIKELG | |
| | SQILKEHPVENTQLQNEKLYLYYLQNGRDMYVDQELDINRLSDYDVDHIVPQSFLKDDSIDNKVLTRSD | |
| | KARGKSDNVPSEEVVKKMKNYWRQLLNAKLITQRKFDNLTKAERGGLSELDKAGFIKRQLVETRQITKH | |
| | VAQILDSRMNTKYDENDKLIREVKVITLKSKLVSDFRKDFQFYKVREINNYHHAHDAYLNAVVGTALIK | |
| | KYPKLESEFVYGDYKVYDVRKMIAKSEQEIGKATAKYFFYSNIMNFFKTEITLANGEIRKRPLIETNGE | |
| | TGEIVWDKGRDFATVRKVLSMPQVNIVKKTEVQTGGFSKESILPKRNSDKLIARKKDWDPKKYGGFDSP | |
| | TVAYSVLVVAKVEKGKSKKLKSVKELLGITIMERSSFEKNPIDFLEAKGYKEVKKDLIIKLPKYSLFEL | |
| | ENGRKRMLASAGELQKGNELALPSKYVNFLYLASHYEKLKGSPEDNEQKQLFVEQHKHYLDEIIEQISE | |
| | FSKRVILADANLDKVLSAYNKHRDKPIREQAENIIHLFTLTNLGAPAAFKYFDTTIDRKRYTSTKEVLD | |
| | ATLIHQSITGLYETRIDLSQLGGDKRTADGSEFESPKKKAKVE | |
| PL12145 | MPAAKRVKLDGGTAPLEEEYRLFLEAPIQNVTLLEQWKREIPKVWAEINPPGLASTQAPIHVQLLSTAL | 16,184 |
| | PVRVRQYPITLEAKRSLRETIRKFRAAGILRPVHSPWNTPLLPVRKSGTSEYRMVQDLREVNKRVETIH | |
| | PTVPNPYTLLSLLPPDRIWYSVLDLKDAFFCIPLAPESQLIFAFEWADAEEGESGQLTWTRLPQGFKNS | |
| | PTLFNEALNRDLQGFRLDHPSVSLLQYVDDLLIAADTQAACLSATRDLLMTLAELGYRVSGKKAQLCQE | |
| | EVTYLGFKIHKGSRSLSNSRTQAILQIPVPKTKRQVREFLGKIGYCRLFIPGFAELAQPLYAATRPGND | |
| | PLVWGEKEEEAFQSLKLALTQPPALALPSLDKPFQLFVEETSGAAKGVLTQALGPWKRPVAYLSKRLDP | |
| | VAAGWPRCLRAIAAAALLTREASKLTFGQDIEITSSHNLESLLRSPPDKWLTNARITQYQVLLLDPPRV | |
| | RFKQTAALNPATLLPETDDTLPIHHCLDTLDSLTSTRPDLTDQPLAQAEATLFTDGSSYIRDGKRYAGA | |
| | AVVTLDSVIWAEPLPIGTSAQKAELIALTKALEWSKDKSVNIYTDSRYAFATLHVHGMIYRERGWLTAG | |
| | GKAIKNAPEILALLTAVWLPKRVAVMHCKGHQKDDAPTSTGNRRADEVAREVAIRPLSTQATISGSSGG | |
| | GEAAAKMASNFTQFVLVDNGGTGDVTVAPSNFANGIAEWISSNSRSQAYKVTCSVRQSSAQNRKYTIKV | |
| | EVPKGAWRSYLNMELTIPIFATNSDCELIVKAMQGLLKDGNPIPSAIAANSGIYAEAAAKEAAAKEAAA | |
| | KEAAAKALEAEAAAKEAAAKEAAAKEAAAKADKKYSIGLDIGTNSVGWAVITDEYKVPSKKFKVLGNTD | |
| | RHSIKKNLIGALLFDSGETAEATRLKRTARRRYTRRKNRICYLQEIFSNEMAKVDDSFFHRLEESFLVE | |
| | EDKKHERHPIFGNIVDEVAYHEKYPTIYHLRKKLVDSTDKADLRLIYLALAHMIKFRGHFLIEGDLNPD | |
| | NSDVDKLFIQLVQTYNQLFEENPINASGVDAKAILSARLSKSRRLENLIAQLPGEKKNGLFGNLIALSL | |
| | GLTPNFKSNFDLAEDAKLQLSKDTYDDDLDNLLAQIGDQYADLFLAAKNLSDAILLSDILRVNTEITKA | |
| | PLSASMIKRYDEHHQDLTLLKALVRQQLPEKYKEIFFDQSKNGYAGYIDGGASQEEFYKFIKPILEKMD | |
| | GTEELLVKLNREDLLRKQRTFDNGSIPHQIHLGELHAILRRQEDFYPFLKDNREKIEKILTFRIPYYVG | |
| | PLARGNSRFAWMTRKSEETITPWNFEEVVDKGASAQSFIERMTNFDKNLPNEKVLPKHSLLYEYFTVYN | |
| | ELTKVKYVTEGMRKPAFLSGEQKKAIVDLLFKTNRKVTVKQLKEDYFKKIECFDSVEISGVEDRFNASL | |
| | GTYHDLLKIIKDKDFLDNEENEDILEDIVLTLTLFEDREMIEERLKTYAHLFDDKVMKQLKRRRYTGWG | |
| | RLSRKLINGIRDKQSGKTILDFLKSDGFANRNFMQLIHDDSLTFKEDIQKAQVSGQGDSLHEHIANLAG | |
| | SPAIKKGILQTVKVVDELVKVMGRHKPENIVIEMARENQTTQKGQKNSRERMKRIEEGIKELGSQILKE | |
| | HPVENTQLQNEKLYLYYLQNGRDMYVDQELDINRLSDYDVDHIVPQSFLKDDSIDNKVLTRSDKARGKS | |
| | DNVPSEEVVKKMKNYWRQLLNAKLITQRKFDNLTKAERGGLSELDKAGFIKRQLVETRQITKHVAQILD | |
| | SRMNTKYDENDKLIREVKVITLKSKLVSDFRKDFQFYKVREINNYHHAHDAYLNAVVGTALIKKYPKLE | |
| | SEFVYGDYKVYDVRKMIAKSEQEIGKATAKYFFYSNIMNFFKTEITLANGEIRKRPLIETNGETGEIVW | |
| | DKGRDFATVRKVLSMPQVNIVKKTEVQTGGFSKESILPKRNSDKLIARKKDWDPKKYGGFDSPTVAYSV | |
| | LVVAKVEKGKSKKLKSVKELLGITIMERSSFEKNPIDFLEAKGYKEVKKDLIIKLPKYSLFELENGRKR | |
| | MLASAGELQKGNELALPSKYVNFLYLASHYEKLKGSPEDNEQKQLFVEQHKHYLDEIIEQISEFSKRVI | |
| | LADANLDKVLSAYNKHRDKPIREQAENIIHLFTLTNLGAPAAFKYFDTTIDRKRYTSTKEVLDATLIHQ | |
| | SITGLYETRIDLSQLGGDKRTADGSEFESPKKKAKVE | |
| PL12146 | MPAAKRVKLDGGTAPLEEEYRLFLEAPIQNVTLLEQWKREIPKVWAEINPPGLASTQAPIHVQLLSTAL | 16,185 |
| | PVRVRQYPITLEAKRSLRETIRKFRAAGILRPVHSPWNTPLLPVRKSGTSEYRMVQDLREVNKRVETIH | |
| | PTVPNPYTLLSLLPPDRIWYSVLDLKDAFFCIPLAPESQLIFAFEWADAEEGESGQLTWTRLPQGFKNS | |
| | PTLFNEALNRDLQGFRLDHPSVSLLQYVDDLLIAADTQAACLSATRDLLMTLAELGYRVSGKKAQLCQE | |
| | EVTYLGFKIHKGSRSLSNSRTQAILQIPVPKTKRQVREFLGKIGYCRLFIPGFAELAQPLYAATRPGND | |
| | PLVWGEKEEEAFQSLKLALTQPPALALPSLDKPFQLFVEETSGAAKGVLTQALGPWKRPVAYLSKRLDP | |
| | VAAGWPRCLRAIAAAALLTREASKLTFGQDIEITSSHNLESLLRSPPDKWLTNARITQYQVLLLDPPRV | |
| | RFKQTAALNPATLLPETDDTLPIHHCLDTLDSLTSTRPDLTDQPLAQAEATLFTDGSSYIRDGKRYAGA | |
| | AVVTLDSVIWAEPLPIGTSAQKAELIALTKALEWSKDKSVNIYTDSRYAFATLHVHGMIYRERGWLTAG | |
| | GKAIKNAPEILALLTAVWLPKRVAVMHCKGHQKDDAPTSTGNRRADEVAREVAIRPLSTQATISGSSGG | |
| | GEAAAKMASNFTQFVLVDNGGTGDVTVAPSNFANGIAEWISSNSRSQAYKVTCSVRQSSAQNRKYTIKV | |
| | EVPKGAWRSYLNMELTIPIFATNSDCELIVKAMQGLLKDGNPIPSAIAANSGIYSGGSSGGSSGSETPG | |
| | TSESATPESSGGSSGGSSDKKYSIGLDIGTNSVGWAVITDEYKVPSKKFKVLGNTDRHSIKKNLIGALL | |
| | FDSGETAEATRLKRTARRRYTRRKNRICYLQEIFSNEMAKVDDSFFHRLEESFLVEEDKKHERHPIFGN | |
| | IVDEVAYHEKYPTIYHLRKKLVDSTDKADLRLIYLALAHMIKFRGHFLIEGDLNPDNSDVDKLFIQLVQ | |
| | TYNQLFEENPINASGVDAKAILSARLSKSRRLENLIAQLPGEKKNGLFGNLIALSLGLTPNFKSNFDLA | |
| | EDAKLQLSKDTYDDDLDNLLAQIGDQYADLFLAAKNLSDAILLSDILRVNTEITKAPLSASMIKRYDEH | |
| | HQDLTLLKALVRQQLPEKYKEIFFDQSKNGYAGYIDGGASQEEFYKFIKPILEKMDGTEELLVKLNRED | |
| | LLRKQRTFDNGSIPHQIHLGELHAILRRQEDFYPFLKDNREKIEKILTFRIPYYVGPLARGNSRFAWMT | |
| | RKSEETITPWNFEEVVDKGASAQSFIERMTNFDKNLPNEKVLPKHSLLYEYFTVYNELTKVKYVTEGMR | |
| | KPAFLSGEQKKAIVDLLFKTNRKVTVKQLKEDYFKKIECFDSVEISGVEDRFNASLGTYHDLLKIIKDK | |
| | DFLDNEENEDILEDIVLTLTLFEDREMIEERLKTYAHLFDDKVMKQLKRRRYTGWGRLSRKLINGIRDK | |
| | QSGKTILDFLKSDGFANRNFMQLIHDDSLTFKEDIQKAQVSGQGDSLHEHIANLAGSPAIKKGILQTVK | |
| | VVDELVKVMGRHKPENIVIEMARENQTTQKGQKNSRERMKRIEEGIKELGSQILKEHPVENTQLQNEKL | |
| | YLYYLQNGRDMYVDQELDINRLSDYDVDHIVPQSFLKDDSIDNKVLTRSDKARGKSDNVPSEEVVKKMK | |
| | NYWRQLLNAKLITQRKFDNLTKAERGGLSELDKAGFIKRQLVETRQITKHVAQILDSRMNTKYDENDKL | |
| | IREVKVITLKSKLVSDFRKDFQFYKVREINNYHHAHDAYLNAVVGTALIKKYPKLESEFVYGDYKVYDV | |
| | RKMIAKSEQEIGKATAKYFFYSNIMNFFKTEITLANGEIRKRPLIETNGETGEIVWDKGRDFATVRKVL | |
| | SMPQVNIVKKTEVQTGGFSKESILPKRNSDKLIARKKDWDPKKYGGFDSPTVAYSVLVVAKVEKGKSKK | |
| | LKSVKELLGITIMERSSFEKNPIDFLEAKGYKEVKKDLIIKLPKYSLFELENGRKRMLASAGELQKGNE | |
| | LALPSKYVNFLYLASHYEKLKGSPEDNEQKQLFVEQHKHYLDEIIEQISEFSKRVILADANLDKVLSAY | |
| | NKHRDKPIREQAENIIHLFTLTNLGAPAAFKYFDTTIDRKRYTSTKEVLDATLIHQSITGLYETRIDLS | |
| | QLGGDKRTADGSEFESPKKKAKVE | |
| PL12147 | MPAAKRVKLDGGTAPLEEEYRLFLEAPIQNVTLLEQWKREIPKVWAEINPPGLASTQAPIHVQLLSTAL | 16,186 |
| | PVRVRQYPITLEAKRSLRETIRKFRAAGILRPVHSPWNTPLLPVRKSGTSEYRMVQDLREVNKRVETIH | |
| | PTVPNPYTLLSLLPPDRIWYSVLDLKDAFFCIPLAPESQLIFAFEWADAEEGESGQLTWTRLPQGFKNS | |
| | PTLFNEALNRDLQGFRLDHPSVSLLQYVDDLLIAADTQAACLSATRDLLMTLAELGYRVSGKKAQLCQE | |
| | EVTYLGFKIHKGSRSLSNSRTQAILQIPVPKTKRQVREFLGKIGYCRLFIPGFAELAQPLYAATRPGND | |
| | PLVWGEKEEEAFQSLKLALTQPPALALPSLDKPFQLFVEETSGAAKGVLTQALGPWKRPVAYLSKRLDP | |
| | VAAGWPRCLRAIAAAALLTREASKLTFGQDIEITSSHNLESLLRSPPDKWLTNARITQYQVLLLDPPRV | |
| | RFKQTAALNPATLLPETDDTLPIHHCLDTLDSLTSTRPDLTDQPLAQAEATLFTDGSSYIRDGKRYAGA | |
| | AVVTLDSVIWAEPLPIGTSAQKAELIALTKALEWSKDKSVNIYTDSRYAFATLHVHGMIYRERGWLTAG | |
| | GKAIKNAPEILALLTAVWLPKRVAVMHCKGHQKDDAPTSTGNRRADEVAREVAIRPLSTQATISGSSGG | |
| | GEAAAKMASNFTQFVLVDNGGTGDVTVAPSNFANGIAEWISSNSRSQAYKVTCSVRQSSAQNRKYTIKV | |
| | EVPKGAWRSYLNMELTIPIFATNSDCELIVKAMQGLLKDGNPIPSAIAANSGIYGSSGSSGSSGSSGSS | |
| | GSSDKKYSIGLDIGTNSVGWAVITDEYKVPSKKFKVLGNTDRHSIKKNLIGALLFDSGETAEATRLKRT | |
| | ARRRYTRRKNRICYLQEIFSNEMAKVDDSFFHRLEESFLVEEDKKHERHPIFGNIVDEVAYHEKYPTIY | |
| | HLRKKLVDSTDKADLRLIYLALAHMIKFRGHFLIEGDLNPDNSDVDKLFIQLVQTYNQLFEENPINASG | |
| | VDAKAILSARLSKSRRLENLIAQLPGEKKNGLFGNLIALSLGLTPNFKSNFDLAEDAKLQLSKDTYDDD | |
| | LDNLLAQIGDQYADLFLAAKNLSDAILLSDILRVNTEITKAPLSASMIKRYDEHHQDLTLLKALVRQQL | |
| | PEKYKEIFFDQSKNGYAGYIDGGASQEEFYKFIKPILEKMDGTEELLVKLNREDLLRKQRTFDNGSIPH | |
| | QIHLGELHAILRRQEDFYPFLKDNREKIEKILTFRIPYYVGPLARGNSRFAWMTRKSEETITPWNFEEV | |
| | VDKGASAQSFIERMTNFDKNLPNEKVLPKHSLLYEYFTVYNELTKVKYVTEGMRKPAFLSGEQKKAIVD | |
| | LLFKTNRKVTVKQLKEDYFKKIECFDSVEISGVEDRFNASLGTYHDLLKIIKDKDFLDNEENEDILEDI | |
| | VLTLTLFEDREMIEERLKTYAHLFDDKVMKQLKRRRYTGWGRLSRKLINGIRDKQSGKTILDFLKSDGF | |
| | ANRNFMQLIHDDSLTFKEDIQKAQVSGQGDSLHEHIANLAGSPAIKKGILQTVKVVDELVKVMGRHKPE | |
| | NIVIEMARENQTTQKGQKNSRERMKRIEEGIKELGSQILKEHPVENTQLQNEKLYLYYLQNGRDMYVDQ | |
| | ELDINRLSDYDVDHIVPQSFLKDDSIDNKVLTRSDKARGKSDNVPSEEVVKKMKNYWRQLLNAKLITQR | |
| | KFDNLTKAERGGLSELDKAGFIKRQLVETRQITKHVAQILDSRMNTKYDENDKLIREVKVITLKSKLVS | |
| | DFRKDFQFYKVREINNYHHAHDAYLNAVVGTALIKKYPKLESEFVYGDYKVYDVRKMIAKSEQEIGKAT | |
| | AKYFFYSNIMNFFKTEITLANGEIRKRPLIETNGETGEIVWDKGRDFATVRKVLSMPQVNIVKKTEVQT | |
| | GGFSKESILPKRNSDKLIARKKDWDPKKYGGFDSPTVAYSVLVVAKVEKGKSKKLKSVKELLGITIMER | |
| | SSFEKNPIDFLEAKGYKEVKKDLIIKLPKYSLFELENGRKRMLASAGELQKGNELALPSKYVNFLYLAS | |
| | HYEKLKGSPEDNEQKQLFVEQHKHYLDEIIEQISEFSKRVILADANLDKVLSAYNKHRDKPIREQAENI | |
| | IHLFTLTNLGAPAAFKYFDTTIDRKRYTSTKEVLDATLIHQSITGLYETRIDLSQLGGDKRTADGSEFE | |
| | SPKKKAKVE | |
| PL12148 | MPAAKRVKLDGGTAPLEEEYRLFLEAPIQNVTLLEQWKREIPKVWAEINPPGLASTQAPIHVQLLSTAL | 16,187 |
| | PVRVRQYPITLEAKRSLRETIRKFRAAGILRPVHSPWNTPLLPVRKSGTSEYRMVQDLREVNKRVETIH | |
| | PTVPNPYTLLSLLPPDRIWYSVLDLKDAFFCIPLAPESQLIFAFEWADAEEGESGQLTWTRLPQGFKNS | |
| | PTLFNEALNRDLQGFRLDHPSVSLLQYVDDLLIAADTQAACLSATRDLLMTLAELGYRVSGKKAQLCQE | |
| | EVTYLGFKIHKGSRSLSNSRTQAILQIPVPKTKRQVREFLGKIGYCRLFIPGFAELAQPLYAATRPGND | |
| | PLVWGEKEEEAFQSLKLALTQPPALALPSLDKPFQLFVEETSGAAKGVLTQALGPWKRPVAYLSKRLDP | |
| | VAAGWPRCLRAIAAAALLTREASKLTFGQDIEITSSHNLESLLRSPPDKWLTNARITQYQVLLLDPPRV | |
| | RFKQTAALNPATLLPETDDTLPIHHCLDTLDSLTSTRPDLTDQPLAQAEATLFTDGSSYIRDGKRYAGA | |
| | AVVTLDSVIWAEPLPIGTSAQKAELIALTKALEWSKDKSVNIYTDSRYAFATLHVHGMIYRERGWLTAG | |
| | GKAIKNAPEILALLTAVWLPKRVAVMHCKGHQKDDAPTSTGNRRADEVAREVAIRPLSTQATISGSSGG | |
| | GEAAAKMASNFTQFVLVDNGGTGDVTVAPSNFANGIAEWISSNSRSQAYKVTCSVRQSSAQNRKYTIKV | |
| | EVPKGAWRSYLNMELTIPIFATNSDCELIVKAMQGLLKDGNPIPSAIAANSGIYGSSGGGEAAAKDKKY | |
| | SIGLDIGTNSVGWAVITDEYKVPSKKFKVLGNTDRHSIKKNLIGALLFDSGETAEATRLKRTARRRYTR | |
| | RKNRICYLQEIFSNEMAKVDDSFFHRLEESFLVEEDKKHERHPIFGNIVDEVAYHEKYPTIYHLRKKLV | |
| | DSTDKADLRLIYLALAHMIKFRGHFLIEGDLNPDNSDVDKLFIQLVQTYNQLFEENPINASGVDAKAIL | |
| | SARLSKSRRLENLIAQLPGEKKNGLFGNLIALSLGLTPNFKSNFDLAEDAKLQLSKDTYDDDLDNLLAQ | |
| | IGDQYADLFLAAKNLSDAILLSDILRVNTEITKAPLSASMIKRYDEHHQDLTLLKALVRQQLPEKYKEI | |
| | FFDQSKNGYAGYIDGGASQEEFYKFIKPILEKMDGTEELLVKLNREDLLRKQRTFDNGSIPHQIHLGEL | |
| | HAILRRQEDFYPFLKDNREKIEKILTFRIPYYVGPLARGNSRFAWMTRKSEETITPWNFEEVVDKGASA | |
| | QSFIERMTNFDKNLPNEKVLPKHSLLYEYFTVYNELTKVKYVTEGMRKPAFLSGEQKKAIVDLLFKTNR | |
| | KVTVKQLKEDYFKKIECFDSVEISGVEDRFNASLGTYHDLLKIIKDKDFLDNEENEDILEDIVLTLTLF | |
| | EDREMIEERLKTYAHLFDDKVMKQLKRRRYTGWGRLSRKLINGIRDKQSGKTILDFLKSDGFANRNFMQ | |
| | LIHDDSLTFKEDIQKAQVSGQGDSLHEHIANLAGSPAIKKGILQTVKVVDELVKVMGRHKPENIVIEMA | |
| | RENQTTQKGQKNSRERMKRIEEGIKELGSQILKEHPVENTQLQNEKLYLYYLQNGRDMYVDQELDINRL | |
| | SDYDVDHIVPQSFLKDDSIDNKVLTRSDKARGKSDNVPSEEVVKKMKNYWRQLLNAKLITQRKFDNLTK | |
| | AERGGLSELDKAGFIKRQLVETRQITKHVAQILDSRMNTKYDENDKLIREVKVITLKSKLVSDFRKDFQ | |
| | FYKVREINNYHHAHDAYLNAVVGTALIKKYPKLESEFVYGDYKVYDVRKMIAKSEQEIGKATAKYFFYS | |
| | NIMNFFKTEITLANGEIRKRPLIETNGETGEIVWDKGRDFATVRKVLSMPQVNIVKKTEVQTGGFSKES | |
| | ILPKRNSDKLIARKKDWDPKKYGGFDSPTVAYSVLVVAKVEKGKSKKLKSVKELLGITIMERSSFEKNP | |
| | IDFLEAKGYKEVKKDLIIKLPKYSLFELENGRKRMLASAGELQKGNELALPSKYVNFLYLASHYEKLKG | |
| | SPEDNEQKQLFVEQHKHYLDEIIEQISEFSKRVILADANLDKVLSAYNKHRDKPIREQAENIIHLFTLT | |
| | NLGAPAAFKYFDTTIDRKRYTSTKEVLDATLIHQSITGLYETRIDLSQLGGDKRTADGSEFESPKKKAK | |
| | VE | |
| PL12149 | MPAAKRVKLDGGTAPLEEEYRLFLEAPIQNVTLLEQWKREIPKVWAEINPPGLASTQAPIHVQLLSTAL | 16,188 |
| | PVRVRQYPITLEAKRSLRETIRKFRAAGILRPVHSPWNTPLLPVRKSGTSEYRMVQDLREVNKRVETIH | |
| | PTVPNPYTLLSLLPPDRIWYSVLDLKDAFFCIPLAPESQLIFAFEWADAEEGESGQLTWTRLPQGFKNS | |
| | PTLFNEALNRDLQGFRLDHPSVSLLQYVDDLLIAADTQAACLSATRDLLMTLAELGYRVSGKKAQLCQE | |
| | EVTYLGFKIHKGSRSLSNSRTQAILQIPVPKTKRQVREFLGKIGYCRLFIPGFAELAQPLYAATRPGND | |
| | PLVWGEKEEEAFQSLKLALTQPPALALPSLDKPFQLFVEETSGAAKGVLTQALGPWKRPVAYLSKRLDP | |
| | VAAGWPRCLRAIAAAALLTREASKLTFGQDIEITSSHNLESLLRSPPDKWLTNARITQYQVLLLDPPRV | |
| | RFKQTAALNPATLLPETDDTLPIHHCLDTLDSLTSTRPDLTDQPLAQAEATLFTDGSSYIRDGKRYAGA | |
| | AVVTLDSVIWAEPLPIGTSAQKAELIALTKALEWSKDKSVNIYTDSRYAFATLHVHGMIYRERGWLTAG | |
| | GKAIKNAPEILALLTAVWLPKRVAVMHCKGHQKDDAPTSTGNRRADEVAREVAIRPLSTQATISGSSGG | |
| | GEAAAKMASNFTQFVLVDNGGTGDVTVAPSNFANGIAEWISSNSRSQAYKVTCSVRQSSAQNRKYTIKV | |
| | EVPKGAWRSYLNMELTIPIFATNSDCELIVKAMQGLLKDGNPIPSAIAANSGIYGGSGGSMASNFTQFV | |
| | LVDNGGTGDVTVAPSNFANGIAEWISSNSRSQAYKVTCSVRQSSAQNRKYTIKVEVPKGAWRSYLNMEL | |
| | TIPIFATNSDCELIVKAMQGLLKDGNPIPSAIAANSGIYAEAAAKEAAAKEAAAKEAAAKALEAEAAAK | |
| | EAAAKEAAAKEAAAKADKKYSIGLDIGTNSVGWAVITDEYKVPSKKFKVLGNTDRHSIKKNLIGALLFD | |
| | SGETAEATRLKRTARRRYTRRKNRICYLQEIFSNEMAKVDDSFFHRLEESFLVEEDKKHERHPIFGNIV | |
| | DEVAYHEKYPTIYHLRKKLVDSTDKADLRLIYLALAHMIKFRGHFLIEGDLNPDNSDVDKLFIQLVQTY | |
| | NQLFEENPINASGVDAKAILSARLSKSRRLENLIAQLPGEKKNGLFGNLIALSLGLTPNFKSNFDLAED | |
| | AKLQLSKDTYDDDLDNLLAQIGDQYADLFLAAKNLSDAILLSDILRVNTEITKAPLSASMIKRYDEHHQ | |
| | DLTLLKALVRQQLPEKYKEIFFDQSKNGYAGYIDGGASQEEFYKFIKPILEKMDGTEELLVKLNREDLL | |
| | RKQRTFDNGSIPHQIHLGELHAILRRQEDFYPFLKDNREKIEKILTFRIPYYVGPLARGNSRFAWMTRK | |
| | SEETITPWNFEEVVDKGASAQSFIERMTNFDKNLPNEKVLPKHSLLYEYFTVYNELTKVKYVTEGMRKP | |
| | AFLSGEQKKAIVDLLFKTNRKVTVKQLKEDYFKKIECFDSVEISGVEDRFNASLGTYHDLLKIIKDKDF | |
| | LDNEENEDILEDIVLTLTLFEDREMIEERLKTYAHLFDDKVMKQLKRRRYTGWGRLSRKLINGIRDKQS | |
| | GKTILDFLKSDGFANRNFMQLIHDDSLTFKEDIQKAQVSGQGDSLHEHIANLAGSPAIKKGILQTVKVV | |
| | DELVKVMGRHKPENIVIEMARENQTTQKGQKNSRERMKRIEEGIKELGSQILKEHPVENTQLQNEKLYL | |
| | YYLQNGRDMYVDQELDINRLSDYDVDHIVPQSFLKDDSIDNKVLTRSDKARGKSDNVPSEEVVKKMKNY | |
| | WRQLLNAKLITQRKFDNLTKAERGGLSELDKAGFIKRQLVETRQITKHVAQILDSRMNTKYDENDKLIR | |
| | EVKVITLKSKLVSDFRKDFQFYKVREINNYHHAHDAYLNAVVGTALIKKYPKLESEFVYGDYKVYDVRK | |
| | MIAKSEQEIGKATAKYFFYSNIMNFFKTEITLANGEIRKRPLIETNGETGEIVWDKGRDFATVRKVLSM | |
| | PQVNIVKKTEVQTGGFSKESILPKRNSDKLIARKKDWDPKKYGGFDSPTVAYSVLVVAKVEKGKSKKLK | |
| | SVKELLGITIMERSSFEKNPIDFLEAKGYKEVKKDLIIKLPKYSLFELENGRKRMLASAGELQKGNELA | |
| | LPSKYVNFLYLASHYEKLKGSPEDNEQKQLFVEQHKHYLDEIIEQISEFSKRVILADANLDKVLSAYNK | |
| | HRDKPIREQAENIIHLFTLTNLGAPAAFKYFDTTIDRKRYTSTKEVLDATLIHQSITGLYETRIDLSQL | |
| | GGDKRTADGSEFESPKKKAKVE | |
| PL12150 | MPAAKRVKLDGGTAPLEEEYRLFLEAPIQNVTLLEQWKREIPKVWAEINPPGLASTQAPIHVQLLSTAL | 16,189 |
| | PVRVRQYPITLEAKRSLRETIRKFRAAGILRPVHSPWNTPLLPVRKSGTSEYRMVQDLREVNKRVETIH | |
| | PTVPNPYTLLSLLPPDRIWYSVLDLKDAFFCIPLAPESQLIFAFEWADAEEGESGQLTWTRLPQGFKNS | |
| | PTLFNEALNRDLQGFRLDHPSVSLLQYVDDLLIAADTQAACLSATRDLLMTLAELGYRVSGKKAQLCQE | |
| | EVTYLGFKIHKGSRSLSNSRTQAILQIPVPKTKRQVREFLGKIGYCRLFIPGFAELAQPLYAATRPGND | |
| | PLVWGEKEEEAFQSLKLALTQPPALALPSLDKPFQLFVEETSGAAKGVLTQALGPWKRPVAYLSKRLDP | |
| | VAAGWPRCLRAIAAAALLTREASKLTFGQDIEITSSHNLESLLRSPPDKWLTNARITQYQVLLLDPPRV | |
| | RFKQTAALNPATLLPETDDTLPIHHCLDTLDSLTSTRPDLTDQPLAQAEATLFTDGSSYIRDGKRYAGA | |
| | AVVTLDSVIWAEPLPIGTSAQKAELIALTKALEWSKDKSVNIYTDSRYAFATLHVHGMIYRERGWLTAG | |
| | GKAIKNAPEILALLTAVWLPKRVAVMHCKGHQKDDAPTSTGNRRADEVAREVAIRPLSTQATISGSSGG | |
| | GEAAAKMASNFTQFVLVDNGGTGDVTVAPSNFANGIAEWISSNSRSQAYKVTCSVRQSSAQNRKYTIKV | |
| | EVPKGAWRSYLNMELTIPIFATNSDCELIVKAMQGLLKDGNPIPSAIAANSGIYGGSGGSMASNFTQFV | |
| | LVDNGGTGDVTVAPSNFANGIAEWISSNSRSQAYKVTCSVRQSSAQNRKYTIKVEVPKGAWRSYLNMEL | |
| | TIPIFATNSDCELIVKAMQGLLKDGNPIPSAIAANSGIYSGGSSGGSSGSETPGTSESATPESSGGSSG | |
| | GSSDKKYSIGLDIGTNSVGWAVITDEYKVPSKKFKVLGNTDRHSIKKNLIGALLFDSGETAEATRLKRT | |
| | ARRRYTRRKNRICYLQEIFSNEMAKVDDSFFHRLEESFLVEEDKKHERHPIFGNIVDEVAYHEKYPTIY | |
| | HLRKKLVDSTDKADLRLIYLALAHMIKFRGHFLIEGDLNPDNSDVDKLFIQLVQTYNQLFEENPINASG | |
| | VDAKAILSARLSKSRRLENLIAQLPGEKKNGLFGNLIALSLGLTPNFKSNFDLAEDAKLQLSKDTYDDD | |
| | LDNLLAQIGDQYADLFLAAKNLSDAILLSDILRVNTEITKAPLSASMIKRYDEHHQDLTLLKALVRQQL | |
| | PEKYKEIFFDQSKNGYAGYIDGGASQEEFYKFIKPILEKMDGTEELLVKLNREDLLRKQRTFDNGSIPH | |
| | QIHLGELHAILRRQEDFYPFLKDNREKIEKILTFRIPYYVGPLARGNSRFAWMTRKSEETITPWNFEEV | |
| | VDKGASAQSFIERMTNFDKNLPNEKVLPKHSLLYEYFTVYNELTKVKYVTEGMRKPAFLSGEQKKAIVD | |
| | LLFKTNRKVTVKQLKEDYFKKIECFDSVEISGVEDRFNASLGTYHDLLKIIKDKDFLDNEENEDILEDI | |
| | VLTLTLFEDREMIEERLKTYAHLFDDKVMKQLKRRRYTGWGRLSRKLINGIRDKQSGKTILDFLKSDGF | |
| | ANRNFMQLIHDDSLTFKEDIQKAQVSGQGDSLHEHIANLAGSPAIKKGILQTVKVVDELVKVMGRHKPE | |
| | NIVIEMARENQTTQKGQKNSRERMKRIEEGIKELGSQILKEHPVENTQLQNEKLYLYYLQNGRDMYVDQ | |
| | ELDINRLSDYDVDHIVPQSFLKDDSIDNKVLTRSDKARGKSDNVPSEEVVKKMKNYWRQLLNAKLITQR | |
| | KFDNLTKAERGGLSELDKAGFIKRQLVETRQITKHVAQILDSRMNTKYDENDKLIREVKVITLKSKLVS | |
| | DFRKDFQFYKVREINNYHHAHDAYLNAVVGTALIKKYPKLESEFVYGDYKVYDVRKMIAKSEQEIGKAT | |
| | AKYFFYSNIMNFFKTEITLANGEIRKRPLIETNGETGEIVWDKGRDFATVRKVLSMPQVNIVKKTEVQT | |
| | GGFSKESILPKRNSDKLIARKKDWDPKKYGGFDSPTVAYSVLVVAKVEKGKSKKLKSVKELLGITIMER | |
| | SSFEKNPIDFLEAKGYKEVKKDLIIKLPKYSLFELENGRKRMLASAGELQKGNELALPSKYVNFLYLAS | |
| | HYEKLKGSPEDNEQKQLFVEQHKHYLDEIIEQISEFSKRVILADANLDKVLSAYNKHRDKPIREQAENI | |
| | IHLFTLTNLGAPAAFKYFDTTIDRKRYTSTKEVLDATLIHQSITGLYETRIDLSQLGGDKRTADGSEFE | |
| | SPKKKAKVE | |
| PL12151 | MPAAKRVKLDGGTAPLEEEYRLFLEAPIQNVTLLEQWKREIPKVWAEINPPGLASTQAPIHVQLLSTAL | 16,190 |
| | PVRVRQYPITLEAKRSLRETIRKFRAAGILRPVHSPWNTPLLPVRKSGTSEYRMVQDLREVNKRVETIH | |
| | PTVPNPYTLLSLLPPDRIWYSVLDLKDAFFCIPLAPESQLIFAFEWADAEEGESGQLTWTRLPQGFKNS | |
| | PTLFNEALNRDLQGFRLDHPSVSLLQYVDDLLIAADTQAACLSATRDLLMTLAELGYRVSGKKAQLCQE | |
| | EVTYLGFKIHKGSRSLSNSRTQAILQIPVPKTKRQVREFLGKIGYCRLFIPGFAELAQPLYAATRPGND | |
| | PLVWGEKEEEAFQSLKLALTQPPALALPSLDKPFQLFVEETSGAAKGVLTQALGPWKRPVAYLSKRLDP | |
| | VAAGWPRCLRAIAAAALLTREASKLTFGQDIEITSSHNLESLLRSPPDKWLTNARITQYQVLLLDPPRV | |
| | RFKQTAALNPATLLPETDDTLPIHHCLDTLDSLTSTRPDLTDQPLAQAEATLFTDGSSYIRDGKRYAGA | |
| | AVVTLDSVIWAEPLPIGTSAQKAELIALTKALEWSKDKSVNIYTDSRYAFATLHVHGMIYRERGWLTAG | |
| | GKAIKNAPEILALLTAVWLPKRVAVMHCKGHQKDDAPTSTGNRRADEVAREVAIRPLSTQATISGSSGG | |
| | GEAAAKMASNFTQFVLVDNGGTGDVTVAPSNFANGIAEWISSNSRSQAYKVTCSVRQSSAQNRKYTIKV | |
| | EVPKGAWRSYLNMELTIPIFATNSDCELIVKAMQGLLKDGNPIPSAIAANSGIYGGSGGSMASNFTQFV | |
| | LVDNGGTGDVTVAPSNFANGIAEWISSNSRSQAYKVTCSVRQSSAQNRKYTIKVEVPKGAWRSYLNMEL | |
| | TIPIFATNSDCELIVKAMQGLLKDGNPIPSAIAANSGIYGSSGSSGSSGSSGSSGSSDKKYSIGLDIGT | |
| | NSVGWAVITDEYKVPSKKFKVLGNTDRHSIKKNLIGALLFDSGETAEATRLKRTARRRYTRRKNRICYL | |
| | QEIFSNEMAKVDDSFFHRLEESFLVEEDKKHERHPIFGNIVDEVAYHEKYPTIYHLRKKLVDSTDKADL | |
| | RLIYLALAHMIKFRGHFLIEGDLNPDNSDVDKLFIQLVQTYNQLFEENPINASGVDAKAILSARLSKSR | |
| | RLENLIAQLPGEKKNGLFGNLIALSLGLTPNFKSNFDLAEDAKLQLSKDTYDDDLDNLLAQIGDQYADL | |
| | FLAAKNLSDAILLSDILRVNTEITKAPLSASMIKRYDEHHQDLTLLKALVRQQLPEKYKEIFFDQSKNG | |
| | YAGYIDGGASQEEFYKFIKPILEKMDGTEELLVKLNREDLLRKQRTFDNGSIPHQIHLGELHAILRRQE | |
| | DFYPFLKDNREKIEKILTFRIPYYVGPLARGNSRFAWMTRKSEETITPWNFEEVVDKGASAQSFIERMT | |
| | NFDKNLPNEKVLPKHSLLYEYFTVYNELTKVKYVTEGMRKPAFLSGEQKKAIVDLLFKTNRKVTVKQLK | |
| | EDYFKKIECFDSVEISGVEDRFNASLGTYHDLLKIIKDKDFLDNEENEDILEDIVLTLTLFEDREMIEE | |
| | RLKTYAHLFDDKVMKQLKRRRYTGWGRLSRKLINGIRDKQSGKTILDFLKSDGFANRNFMQLIHDDSLT | |
| | FKEDIQKAQVSGQGDSLHEHIANLAGSPAIKKGILQTVKVVDELVKVMGRHKPENIVIEMARENQTTQK | |
| | GQKNSRERMKRIEEGIKELGSQILKEHPVENTQLQNEKLYLYYLQNGRDMYVDQELDINRLSDYDVDHI | |
| | VPQSFLKDDSIDNKVLTRSDKARGKSDNVPSEEVVKKMKNYWRQLLNAKLITQRKFDNLTKAERGGLSE | |
| | LDKAGFIKRQLVETRQITKHVAQILDSRMNTKYDENDKLIREVKVITLKSKLVSDFRKDFQFYKVREIN | |
| | NYHHAHDAYLNAVVGTALIKKYPKLESEFVYGDYKVYDVRKMIAKSEQEIGKATAKYFFYSNIMNFFKT | |
| | EITLANGEIRKRPLIETNGETGEIVWDKGRDFATVRKVLSMPQVNIVKKTEVQTGGFSKESILPKRNSD | |
| | KLIARKKDWDPKKYGGFDSPTVAYSVLVVAKVEKGKSKKLKSVKELLGITIMERSSFEKNPIDFLEAKG | |
| | YKEVKKDLIIKLPKYSLFELENGRKRMLASAGELQKGNELALPSKYVNFLYLASHYEKLKGSPEDNEQK | |
| | QLFVEQHKHYLDEIIEQISEFSKRVILADANLDKVLSAYNKHRDKPIREQAENIIHLFTLTNLGAPAAF | |
| | KYFDTTIDRKRYTSTKEVLDATLIHQSITGLYETRIDLSQLGGDKRTADGSEFESPKKKAKVE | |
| PL12152 | MPAAKRVKLDGGTAPLEEEYRLFLEAPIQNVTLLEQWKREIPKVWAEINPPGLASTQAPIHVQLLSTAL | 16,191 |
| | PVRVRQYPITLEAKRSLRETIRKFRAAGILRPVHSPWNTPLLPVRKSGTSEYRMVQDLREVNKRVETIH | |
| | PTVPNPYTLLSLLPPDRIWYSVLDLKDAFFCIPLAPESQLIFAFEWADAEEGESGQLTWTRLPQGFKNS | |
| | PTLFNEALNRDLQGFRLDHPSVSLLQYVDDLLIAADTQAACLSATRDLLMTLAELGYRVSGKKAQLCQE | |
| | EVTYLGFKIHKGSRSLSNSRTQAILQIPVPKTKRQVREFLGKIGYCRLFIPGFAELAQPLYAATRPGND | |
| | PLVWGEKEEEAFQSLKLALTQPPALALPSLDKPFQLFVEETSGAAKGVLTQALGPWKRPVAYLSKRLDP | |
| | VAAGWPRCLRAIAAAALLTREASKLTFGQDIEITSSHNLESLLRSPPDKWLTNARITQYQVLLLDPPRV | |
| | RFKQTAALNPATLLPETDDTLPIHHCLDTLDSLTSTRPDLTDQPLAQAEATLFTDGSSYIRDGKRYAGA | |
| | AVVTLDSVIWAEPLPIGTSAQKAELIALTKALEWSKDKSVNIYTDSRYAFATLHVHGMIYRERGWLTAG | |
| | GKAIKNAPEILALLTAVWLPKRVAVMHCKGHQKDDAPTSTGNRRADEVAREVAIRPLSTQATISGSSGG | |
| | GEAAAKMASNFTQFVLVDNGGTGDVTVAPSNFANGIAEWISSNSRSQAYKVTCSVRQSSAQNRKYTIKV | |
| | EVPKGAWRSYLNMELTIPIFATNSDCELIVKAMQGLLKDGNPIPSAIAANSGIYGGSGGSMASNFTQFV | |
| | LVDNGGTGDVTVAPSNFANGIAEWISSNSRSQAYKVTCSVRQSSAQNRKYTIKVEVPKGAWRSYLNMEL | |
| | TIPIFATNSDCELIVKAMQGLLKDGNPIPSAIAANSGIYGSSGGGEAAAKDKKYSIGLDIGTNSVGWAV | |
| | ITDEYKVPSKKFKVLGNTDRHSIKKNLIGALLFDSGETAEATRLKRTARRRYTRRKNRICYLQEIFSNE | |
| | MAKVDDSFFHRLEESFLVEEDKKHERHPIFGNIVDEVAYHEKYPTIYHLRKKLVDSTDKADLRLIYLAL | |
| | AHMIKFRGHFLIEGDLNPDNSDVDKLFIQLVQTYNQLFEENPINASGVDAKAILSARLSKSRRLENLIA | |
| | QLPGEKKNGLFGNLIALSLGLTPNFKSNFDLAEDAKLQLSKDTYDDDLDNLLAQIGDQYADLFLAAKNL | |
| | SDAILLSDILRVNTEITKAPLSASMIKRYDEHHQDLTLLKALVRQQLPEKYKEIFFDQSKNGYAGYIDG | |
| | GASQEEFYKFIKPILEKMDGTEELLVKLNREDLLRKQRTFDNGSIPHQIHLGELHAILRRQEDFYPFLK | |
| | DNREKIEKILTFRIPYYVGPLARGNSRFAWMTRKSEETITPWNFEEVVDKGASAQSFIERMTNFDKNLP | |
| | NEKVLPKHSLLYEYFTVYNELTKVKYVTEGMRKPAFLSGEQKKAIVDLLFKTNRKVTVKQLKEDYFKKI | |
| | ECFDSVEISGVEDRFNASLGTYHDLLKIIKDKDFLDNEENEDILEDIVLTLTLFEDREMIEERLKTYAH | |
| | LFDDKVMKQLKRRRYTGWGRLSRKLINGIRDKQSGKTILDFLKSDGFANRNFMQLIHDDSLTFKEDIQK | |
| | AQVSGQGDSLHEHIANLAGSPAIKKGILQTVKVVDELVKVMGRHKPENIVIEMARENQTTQKGQKNSRE | |
| | RMKRIEEGIKELGSQILKEHPVENTQLQNEKLYLYYLQNGRDMYVDQELDINRLSDYDVDHIVPQSFLK | |
| | DDSIDNKVLTRSDKARGKSDNVPSEEVVKKMKNYWRQLLNAKLITQRKFDNLTKAERGGLSELDKAGFI | |
| | KRQLVETRQITKHVAQILDSRMNTKYDENDKLIREVKVITLKSKLVSDFRKDFQFYKVREINNYHHAHD | |
| | AYLNAVVGTALIKKYPKLESEFVYGDYKVYDVRKMIAKSEQEIGKATAKYFFYSNIMNFFKTEITLANG | |
| | EIRKRPLIETNGETGEIVWDKGRDFATVRKVLSMPQVNIVKKTEVQTGGFSKESILPKRNSDKLIARKK | |
| | DWDPKKYGGFDSPTVAYSVLVVAKVEKGKSKKLKSVKELLGITIMERSSFEKNPIDFLEAKGYKEVKKD | |
| | LIIKLPKYSLFELENGRKRMLASAGELQKGNELALPSKYVNFLYLASHYEKLKGSPEDNEQKQLFVEQH | |
| | KHYLDEIIEQISEFSKRVILADANLDKVLSAYNKHRDKPIREQAENIIHLFTLTNLGAPAAFKYFDTTI | |
| | DRKRYTSTKEVLDATLIHQSITGLYETRIDLSQLGGDKRTADGSEFESPKKKAKVE | |
| PL12153 | MPAAKRVKLDGGTAPLEEEYRLFLEAPIQNVTLLEQWKREIPKVWAEINPPGLASTQAPIHVQLLSTAL | 16,192 |
| | PVRVRQYPITLEAKRSLRETIRKFRAAGILRPVHSPWNTPLLPVRKSGTSEYRMVQDLREVNKRVETIH | |
| | PTVPNPYTLLSLLPPDRIWYSVLDLKDAFFCIPLAPESQLIFAFEWADAEEGESGQLTWTRLPQGFKNS | |
| | PTLFNEALNRDLQGFRLDHPSVSLLQYVDDLLIAADTQAACLSATRDLLMTLAELGYRVSGKKAQLCQE | |
| | EVTYLGFKIHKGSRSLSNSRTQAILQIPVPKTKRQVREFLGKIGYCRLFIPGFAELAQPLYAATRPGND | |
| | PLVWGEKEEEAFQSLKLALTQPPALALPSLDKPFQLFVEETSGAAKGVLTQALGPWKRPVAYLSKRLDP | |
| | VAAGWPRCLRAIAAAALLTREASKLTFGQDIEITSSHNLESLLRSPPDKWLTNARITQYQVLLLDPPRV | |
| | RFKQTAALNPATLLPETDDTLPIHHCLDTLDSLTSTRPDLTDQPLAQAEATLFTDGSSYIRDGKRYAGA | |
| | AVVTLDSVIWAEPLPIGTSAQKAELIALTKALEWSKDKSVNIYTDSRYAFATLHVHGMIYRERGWLTAG | |
| | GKAIKNAPEILALLTAVWLPKRVAVMHCKGHQKDDAPTSTGNRRADEVAREVAIRPLSTQATISGSSGG | |
| | GEAAAKMASNFTQFVLVDNGGTGDVTVAPSNFANGIAEWISSNSRSQAYKVTCSVRQSSAQNRKYTIKV | |
| | EVPKGAWRSYLNMELTIPIFATNSDCELIVKAMQGLLKDGNPIPSAIAANSGIYGGSGGSMASNFTQFV | |
| | LVDNGGTGDVTVAPSNFANGIAEWISSNSRSQAYKVTCSVRQSSAQNRKYTIKVEVPKGAWRSYLNMEL | |
| | TIPIFATNSDCELIVKAMQGLLKDGNPIPSAIAANSGIYGGGSGGGSGGGSGGGSMASNFTQFVLVDNG | |
| | GTGDVTVAPSNFANGIAEWISSNSRSQAYKVTCSVRQSSAQNRKYTIKVEVPKGAWRSYLNMELTIPIF | |
| | ATNSDCELIVKAMQGLLKDGNPIPSAIAANSGIYGGSGGSMASNFTQFVLVDNGGTGDVTVAPSNFANG | |
| | IAEWISSNSRSQAYKVTCSVRQSSAQNRKYTIKVEVPKGAWRSYLNMELTIPIFATNSDCELIVKAMQG | |
| | LLKDGNPIPSAIAANSGIYAEAAAKEAAAKEAAAKEAAAKALEAEAAAKEAAAKEAAAKEAAAKADKKY | |
| | SIGLDIGTNSVGWAVITDEYKVPSKKFKVLGNTDRHSIKKNLIGALLFDSGETAEATRLKRTARRRYTR | |
| | RKNRICYLQEIFSNEMAKVDDSFFHRLEESFLVEEDKKHERHPIFGNIVDEVAYHEKYPTIYHLRKKLV | |
| | DSTDKADLRLIYLALAHMIKFRGHFLIEGDLNPDNSDVDKLFIQLVQTYNQLFEENPINASGVDAKAIL | |
| | SARLSKSRRLENLIAQLPGEKKNGLFGNLIALSLGLTPNFKSNFDLAEDAKLQLSKDTYDDDLDNLLAQ | |
| | IGDQYADLFLAAKNLSDAILLSDILRVNTEITKAPLSASMIKRYDEHHQDLTLLKALVRQQLPEKYKEI | |
| | FFDQSKNGYAGYIDGGASQEEFYKFIKPILEKMDGTEELLVKLNREDLLRKQRTFDNGSIPHQIHLGEL | |
| | HAILRRQEDFYPFLKDNREKIEKILTFRIPYYVGPLARGNSRFAWMTRKSEETITPWNFEEVVDKGASA | |
| | QSFIERMTNFDKNLPNEKVLPKHSLLYEYFTVYNELTKVKYVTEGMRKPAFLSGEQKKAIVDLLFKTNR | |
| | KVTVKQLKEDYFKKIECFDSVEISGVEDRFNASLGTYHDLLKIIKDKDFLDNEENEDILEDIVLTLTLF | |
| | EDREMIEERLKTYAHLFDDKVMKQLKRRRYTGWGRLSRKLINGIRDKQSGKTILDFLKSDGFANRNFMQ | |
| | LIHDDSLTFKEDIQKAQVSGQGDSLHEHIANLAGSPAIKKGILQTVKVVDELVKVMGRHKPENIVIEMA | |
| | RENQTTQKGQKNSRERMKRIEEGIKELGSQILKEHPVENTQLQNEKLYLYYLQNGRDMYVDQELDINRL | |
| | SDYDVDHIVPQSFLKDDSIDNKVLTRSDKARGKSDNVPSEEVVKKMKNYWRQLLNAKLITQRKFDNLTK | |
| | AERGGLSELDKAGFIKRQLVETRQITKHVAQILDSRMNTKYDENDKLIREVKVITLKSKLVSDFRKDFQ | |
| | FYKVREINNYHHAHDAYLNAVVGTALIKKYPKLESEFVYGDYKVYDVRKMIAKSEQEIGKATAKYFFYS | |
| | NIMNFFKTEITLANGEIRKRPLIETNGETGEIVWDKGRDFATVRKVLSMPQVNIVKKTEVQTGGFSKES | |
| | ILPKRNSDKLIARKKDWDPKKYGGFDSPTVAYSVLVVAKVEKGKSKKLKSVKELLGITIMERSSFEKNP | |
| | IDFLEAKGYKEVKKDLIIKLPKYSLFELENGRKRMLASAGELQKGNELALPSKYVNFLYLASHYEKLKG | |
| | SPEDNEQKQLFVEQHKHYLDEIIEQISEFSKRVILADANLDKVLSAYNKHRDKPIREQAENIIHLFTLT | |
| | NLGAPAAFKYFDTTIDRKRYTSTKEVLDATLIHQSITGLYETRIDLSQLGGDKRTADGSEFESPKKKAK | |
| | VE | |
| PL12154 | MPAAKRVKLDGGTAPLEEEYRLFLEAPIQNVTLLEQWKREIPKVWAEINPPGLASTQAPIHVQLLSTAL | 16,193 |
| | PVRVRQYPITLEAKRSLRETIRKFRAAGILRPVHSPWNTPLLPVRKSGTSEYRMVQDLREVNKRVETIH | |
| | PTVPNPYTLLSLLPPDRIWYSVLDLKDAFFCIPLAPESQLIFAFEWADAEEGESGQLTWTRLPQGFKNS | |
| | PTLFNEALNRDLQGFRLDHPSVSLLQYVDDLLIAADTQAACLSATRDLLMTLAELGYRVSGKKAQLCQE | |
| | EVTYLGFKIHKGSRSLSNSRTQAILQIPVPKTKRQVREFLGKIGYCRLFIPGFAELAQPLYAATRPGND | |
| | PLVWGEKEEEAFQSLKLALTQPPALALPSLDKPFQLFVEETSGAAKGVLTQALGPWKRPVAYLSKRLDP | |
| | VAAGWPRCLRAIAAAALLTREASKLTFGQDIEITSSHNLESLLRSPPDKWLTNARITQYQVLLLDPPRV | |
| | RFKQTAALNPATLLPETDDTLPIHHCLDTLDSLTSTRPDLTDQPLAQAEATLFTDGSSYIRDGKRYAGA | |
| | AVVTLDSVIWAEPLPIGTSAQKAELIALTKALEWSKDKSVNIYTDSRYAFATLHVHGMIYRERGWLTAG | |
| | GKAIKNAPEILALLTAVWLPKRVAVMHCKGHQKDDAPTSTGNRRADEVAREVAIRPLSTQATISGSSGG | |
| | GEAAAKMASNFTQFVLVDNGGTGDVTVAPSNFANGIAEWISSNSRSQAYKVTCSVRQSSAQNRKYTIKV | |
| | EVPKGAWRSYLNMELTIPIFATNSDCELIVKAMQGLLKDGNPIPSAIAANSGIYGGSGGSMASNFTQFV | |
| | LVDNGGTGDVTVAPSNFANGIAEWISSNSRSQAYKVTCSVRQSSAQNRKYTIKVEVPKGAWRSYLNMEL | |
| | TIPIFATNSDCELIVKAMQGLLKDGNPIPSAIAANSGIYGGGSGGGSGGGSGGGSMASNFTQFVLVDNG | |
| | GTGDVTVAPSNFANGIAEWISSNSRSQAYKVTCSVRQSSAQNRKYTIKVEVPKGAWRSYLNMELTIPIF | |
| | ATNSDCELIVKAMQGLLKDGNPIPSAIAANSGIYGGSGGSMASNFTQFVLVDNGGTGDVTVAPSNFANG | |
| | IAEWISSNSRSQAYKVTCSVRQSSAQNRKYTIKVEVPKGAWRSYLNMELTIPIFATNSDCELIVKAMQG | |
| | LLKDGNPIPSAIAANSGIYSGGSSGGSSGSETPGTSESATPESSGGSSGGSSDKKYSIGLDIGTNSVGW | |
| | AVITDEYKVPSKKFKVLGNTDRHSIKKNLIGALLFDSGETAEATRLKRTARRRYTRRKNRICYLQEIFS | |
| | NEMAKVDDSFFHRLEESFLVEEDKKHERHPIFGNIVDEVAYHEKYPTIYHLRKKLVDSTDKADLRLIYL | |
| | ALAHMIKFRGHFLIEGDLNPDNSDVDKLFIQLVQTYNQLFEENPINASGVDAKAILSARLSKSRRLENL | |
| | IAQLPGEKKNGLFGNLIALSLGLTPNFKSNFDLAEDAKLQLSKDTYDDDLDNLLAQIGDQYADLFLAAK | |
| | NLSDAILLSDILRVNTEITKAPLSASMIKRYDEHHQDLTLLKALVRQQLPEKYKEIFFDQSKNGYAGYI | |
| | DGGASQEEFYKFIKPILEKMDGTEELLVKLNREDLLRKQRTFDNGSIPHQIHLGELHAILRRQEDFYPF | |
| | LKDNREKIEKILTFRIPYYVGPLARGNSRFAWMTRKSEETITPWNFEEVVDKGASAQSFIERMTNFDKN | |
| | LPNEKVLPKHSLLYEYFTVYNELTKVKYVTEGMRKPAFLSGEQKKAIVDLLFKTNRKVTVKQLKEDYFK | |
| | KIECFDSVEISGVEDRFNASLGTYHDLLKIIKDKDFLDNEENEDILEDIVLTLTLFEDREMIEERLKTY | |
| | AHLFDDKVMKQLKRRRYTGWGRLSRKLINGIRDKQSGKTILDFLKSDGFANRNFMQLIHDDSLTFKEDI | |
| | QKAQVSGQGDSLHEHIANLAGSPAIKKGILQTVKVVDELVKVMGRHKPENIVIEMARENQTTQKGQKNS | |
| | RERMKRIEEGIKELGSQILKEHPVENTQLQNEKLYLYYLQNGRDMYVDQELDINRLSDYDVDHIVPQSF | |
| | LKDDSIDNKVLTRSDKARGKSDNVPSEEVVKKMKNYWRQLLNAKLITQRKFDNLTKAERGGLSELDKAG | |
| | FIKRQLVETRQITKHVAQILDSRMNTKYDENDKLIREVKVITLKSKLVSDFRKDFQFYKVREINNYHHA | |
| | HDAYLNAVVGTALIKKYPKLESEFVYGDYKVYDVRKMIAKSEQEIGKATAKYFFYSNIMNFFKTEITLA | |
| | NGEIRKRPLIETNGETGEIVWDKGRDFATVRKVLSMPQVNIVKKTEVQTGGFSKESILPKRNSDKLIAR | |
| | KKDWDPKKYGGFDSPTVAYSVLVVAKVEKGKSKKLKSVKELLGITIMERSSFEKNPIDFLEAKGYKEVK | |
| | KDLIIKLPKYSLFELENGRKRMLASAGELQKGNELALPSKYVNFLYLASHYEKLKGSPEDNEQKQLFVE | |
| | QHKHYLDEIIEQISEFSKRVILADANLDKVLSAYNKHRDKPIREQAENIIHLFTLTNLGAPAAFKYFDT | |
| | TIDRKRYTSTKEVLDATLIHQSITGLYETRIDLSQLGGDKRTADGSEFESPKKKAKVE | |
| PL12155 | MPAAKRVKLDGGTAPLEEEYRLFLEAPIQNVTLLEQWKREIPKVWAEINPPGLASTQAPIHVQLLSTAL | 16,194 |
| | PVRVRQYPITLEAKRSLRETIRKFRAAGILRPVHSPWNTPLLPVRKSGTSEYRMVQDLREVNKRVETIH | |
| | PTVPNPYTLLSLLPPDRIWYSVLDLKDAFFCIPLAPESQLIFAFEWADAEEGESGQLTWTRLPQGFKNS | |
| | PTLFNEALNRDLQGFRLDHPSVSLLQYVDDLLIAADTQAACLSATRDLLMTLAELGYRVSGKKAQLCQE | |
| | EVTYLGFKIHKGSRSLSNSRTQAILQIPVPKTKRQVREFLGKIGYCRLFIPGFAELAQPLYAATRPGND | |
| | PLVWGEKEEEAFQSLKLALTQPPALALPSLDKPFQLFVEETSGAAKGVLTQALGPWKRPVAYLSKRLDP | |
| | VAAGWPRCLRAIAAAALLTREASKLTFGQDIEITSSHNLESLLRSPPDKWLTNARITQYQVLLLDPPRV | |
| | RFKQTAALNPATLLPETDDTLPIHHCLDTLDSLTSTRPDLTDQPLAQAEATLFTDGSSYIRDGKRYAGA | |
| | AVVTLDSVIWAEPLPIGTSAQKAELIALTKALEWSKDKSVNIYTDSRYAFATLHVHGMIYRERGWLTAG | |
| | GKAIKNAPEILALLTAVWLPKRVAVMHCKGHQKDDAPTSTGNRRADEVAREVAIRPLSTQATISGSSGG | |
| | GEAAAKMASNFTQFVLVDNGGTGDVTVAPSNFANGIAEWISSNSRSQAYKVTCSVRQSSAQNRKYTIKV | |
| | EVPKGAWRSYLNMELTIPIFATNSDCELIVKAMQGLLKDGNPIPSAIAANSGIYGGSGGSMASNFTQFV | |
| | LVDNGGTGDVTVAPSNFANGIAEWISSNSRSQAYKVTCSVRQSSAQNRKYTIKVEVPKGAWRSYLNMEL | |
| | TIPIFATNSDCELIVKAMQGLLKDGNPIPSAIAANSGIYGGGSGGGSGGGSGGGSMASNFTQFVLVDNG | |
| | GTGDVTVAPSNFANGIAEWISSNSRSQAYKVTCSVRQSSAQNRKYTIKVEVPKGAWRSYLNMELTIPIF | |
| | ATNSDCELIVKAMQGLLKDGNPIPSAIAANSGIYGGSGGSMASNFTQFVLVDNGGTGDVTVAPSNFANG | |
| | IAEWISSNSRSQAYKVTCSVRQSSAQNRKYTIKVEVPKGAWRSYLNMELTIPIFATNSDCELIVKAMQG | |
| | LLKDGNPIPSAIAANSGIYGSSGSSGSSGSSGSSGSSDKKYSIGLDIGTNSVGWAVITDEYKVPSKKFK | |
| | VLGNTDRHSIKKNLIGALLFDSGETAEATRLKRTARRRYTRRKNRICYLQEIFSNEMAKVDDSFFHRLE | |
| | ESFLVEEDKKHERHPIFGNIVDEVAYHEKYPTIYHLRKKLVDSTDKADLRLIYLALAHMIKFRGHFLIE | |
| | GDLNPDNSDVDKLFIQLVQTYNQLFEENPINASGVDAKAILSARLSKSRRLENLIAQLPGEKKNGLFGN | |
| | LIALSLGLTPNFKSNFDLAEDAKLQLSKDTYDDDLDNLLAQIGDQYADLFLAAKNLSDAILLSDILRVN | |
| | TEITKAPLSASMIKRYDEHHQDLTLLKALVRQQLPEKYKEIFFDQSKNGYAGYIDGGASQEEFYKFIKP | |
| | ILEKMDGTEELLVKLNREDLLRKQRTFDNGSIPHQIHLGELHAILRRQEDFYPFLKDNREKIEKILTFR | |
| | IPYYVGPLARGNSRFAWMTRKSEETITPWNFEEVVDKGASAQSFIERMTNFDKNLPNEKVLPKHSLLYE | |
| | YFTVYNELTKVKYVTEGMRKPAFLSGEQKKAIVDLLFKTNRKVTVKQLKEDYFKKIECFDSVEISGVED | |
| | RFNASLGTYHDLLKIIKDKDFLDNEENEDILEDIVLTLTLFEDREMIEERLKTYAHLFDDKVMKQLKRR | |
| | RYTGWGRLSRKLINGIRDKQSGKTILDFLKSDGFANRNFMQLIHDDSLTFKEDIQKAQVSGQGDSLHEH | |
| | IANLAGSPAIKKGILQTVKVVDELVKVMGRHKPENIVIEMARENQTTQKGQKNSRERMKRIEEGIKELG | |
| | SQILKEHPVENTQLQNEKLYLYYLQNGRDMYVDQELDINRLSDYDVDHIVPQSFLKDDSIDNKVLTRSD | |
| | KARGKSDNVPSEEVVKKMKNYWRQLLNAKLITQRKFDNLTKAERGGLSELDKAGFIKRQLVETRQITKH | |
| | VAQILDSRMNTKYDENDKLIREVKVITLKSKLVSDFRKDFQFYKVREINNYHHAHDAYLNAVVGTALIK | |
| | KYPKLESEFVYGDYKVYDVRKMIAKSEQEIGKATAKYFFYSNIMNFFKTEITLANGEIRKRPLIETNGE | |
| | TGEIVWDKGRDFATVRKVLSMPQVNIVKKTEVQTGGFSKESILPKRNSDKLIARKKDWDPKKYGGFDSP | |
| | TVAYSVLVVAKVEKGKSKKLKSVKELLGITIMERSSFEKNPIDFLEAKGYKEVKKDLIIKLPKYSLFEL | |
| | ENGRKRMLASAGELQKGNELALPSKYVNFLYLASHYEKLKGSPEDNEQKQLFVEQHKHYLDEIIEQISE | |
| | FSKRVILADANLDKVLSAYNKHRDKPIREQAENIIHLFTLTNLGAPAAFKYFDTTIDRKRYTSTKEVLD | |
| | ATLIHQSITGLYETRIDLSQLGGDKRTADGSEFESPKKKAKVE | |
| PL12156 | MPAAKRVKLDGGTAPLEEEYRLFLEAPIQNVTLLEQWKREIPKVWAEINPPGLASTQAPIHVQLLSTAL | 16,195 |
| | PVRVRQYPITLEAKRSLRETIRKFRAAGILRPVHSPWNTPLLPVRKSGTSEYRMVQDLREVNKRVETIH | |
| | PTVPNPYTLLSLLPPDRIWYSVLDLKDAFFCIPLAPESQLIFAFEWADAEEGESGQLTWTRLPQGFKNS | |
| | PTLFNEALNRDLQGFRLDHPSVSLLQYVDDLLIAADTQAACLSATRDLLMTLAELGYRVSGKKAQLCQE | |
| | EVTYLGFKIHKGSRSLSNSRTQAILQIPVPKTKRQVREFLGKIGYCRLFIPGFAELAQPLYAATRPGND | |
| | PLVWGEKEEEAFQSLKLALTQPPALALPSLDKPFQLFVEETSGAAKGVLTQALGPWKRPVAYLSKRLDP | |
| | VAAGWPRCLRAIAAAALLTREASKLTFGQDIEITSSHNLESLLRSPPDKWLTNARITQYQVLLLDPPRV | |
| | RFKQTAALNPATLLPETDDTLPIHHCLDTLDSLTSTRPDLTDQPLAQAEATLFTDGSSYIRDGKRYAGA | |
| | AVVTLDSVIWAEPLPIGTSAQKAELIALTKALEWSKDKSVNIYTDSRYAFATLHVHGMIYRERGWLTAG | |
| | GKAIKNAPEILALLTAVWLPKRVAVMHCKGHQKDDAPTSTGNRRADEVAREVAIRPLSTQATISGSSGG | |
| | GEAAAKMASNFTQFVLVDNGGTGDVTVAPSNFANGIAEWISSNSRSQAYKVTCSVRQSSAQNRKYTIKV | |
| | EVPKGAWRSYLNMELTIPIFATNSDCELIVKAMQGLLKDGNPIPSAIAANSGIYGGSGGSMASNFTQFV | |
| | LVDNGGTGDVTVAPSNFANGIAEWISSNSRSQAYKVTCSVRQSSAQNRKYTIKVEVPKGAWRSYLNMEL | |
| | TIPIFATNSDCELIVKAMQGLLKDGNPIPSAIAANSGIYGGGSGGGSGGGSGGGSMASNFTQFVLVDNG | |
| | GTGDVTVAPSNFANGIAEWISSNSRSQAYKVTCSVRQSSAQNRKYTIKVEVPKGAWRSYLNMELTIPIF | |
| | ATNSDCELIVKAMQGLLKDGNPIPSAIAANSGIYGGSGGSMASNFTQFVLVDNGGTGDVTVAPSNFANG | |
| | IAEWISSNSRSQAYKVTCSVRQSSAQNRKYTIKVEVPKGAWRSYLNMELTIPIFATNSDCELIVKAMQG | |
| | LLKDGNPIPSAIAANSGIYGSSGGGEAAAKDKKYSIGLDIGTNSVGWAVITDEYKVPSKKFKVLGNTDR | |
| | HSIKKNLIGALLFDSGETAEATRLKRTARRRYTRRKNRICYLQEIFSNEMAKVDDSFFHRLEESFLVEE | |
| | DKKHERHPIFGNIVDEVAYHEKYPTIYHLRKKLVDSTDKADLRLIYLALAHMIKFRGHFLIEGDLNPDN | |
| | SDVDKLFIQLVQTYNQLFEENPINASGVDAKAILSARLSKSRRLENLIAQLPGEKKNGLFGNLIALSLG | |
| | LTPNFKSNFDLAEDAKLQLSKDTYDDDLDNLLAQIGDQYADLFLAAKNLSDAILLSDILRVNTEITKAP | |
| | LSASMIKRYDEHHQDLTLLKALVRQQLPEKYKEIFFDQSKNGYAGYIDGGASQEEFYKFIKPILEKMDG | |
| | TEELLVKLNREDLLRKQRTFDNGSIPHQIHLGELHAILRRQEDFYPFLKDNREKIEKILTFRIPYYVGP | |
| | LARGNSRFAWMTRKSEETITPWNFEEVVDKGASAQSFIERMTNFDKNLPNEKVLPKHSLLYEYFTVYNE | |
| | LTKVKYVTEGMRKPAFLSGEQKKAIVDLLFKTNRKVTVKQLKEDYFKKIECFDSVEISGVEDRFNASLG | |
| | TYHDLLKIIKDKDFLDNEENEDILEDIVLTLTLFEDREMIEERLKTYAHLFDDKVMKQLKRRRYTGWGR | |
| | LSRKLINGIRDKQSGKTILDFLKSDGFANRNFMQLIHDDSLTFKEDIQKAQVSGQGDSLHEHIANLAGS | |
| | PAIKKGILQTVKVVDELVKVMGRHKPENIVIEMARENQTTQKGQKNSRERMKRIEEGIKELGSQILKEH | |
| | PVENTQLQNEKLYLYYLQNGRDMYVDQELDINRLSDYDVDHIVPQSFLKDDSIDNKVLTRSDKARGKSD | |
| | NVPSEEVVKKMKNYWRQLLNAKLITQRKFDNLTKAERGGLSELDKAGFIKRQLVETRQITKHVAQILDS | |
| | RMNTKYDENDKLIREVKVITLKSKLVSDFRKDFQFYKVREINNYHHAHDAYLNAVVGTALIKKYPKLES | |
| | EFVYGDYKVYDVRKMIAKSEQEIGKATAKYFFYSNIMNFFKTEITLANGEIRKRPLIETNGETGEIVWD | |
| | KGRDFATVRKVLSMPQVNIVKKTEVQTGGFSKESILPKRNSDKLIARKKDWDPKKYGGFDSPTVAYSVL | |
| | VVAKVEKGKSKKLKSVKELLGITIMERSSFEKNPIDFLEAKGYKEVKKDLIIKLPKYSLFELENGRKRM | |
| | LASAGELQKGNELALPSKYVNFLYLASHYEKLKGSPEDNEQKQLFVEQHKHYLDEIIEQISEFSKRVIL | |
| | ADANLDKVLSAYNKHRDKPIREQAENIIHLFTLTNLGAPAAFKYFDTTIDRKRYTSTKEVLDATLIHQS | |
| | ITGLYETRIDLSQLGGDKRTADGSEFESPKKKAKVE | |

TABLE S3
Exemplary gene modifying sequences for Configuration 3
(i.e., Cas9 - linker - RT - linker - (RBP repeat)n)

| Identi- | | SEQ ID |
|---|---|---|
| fier | Full Amino Acid Sequence | NO: |
| PL12085 | MPAAKRVKLDGGDKKYSIGLDIGTNSVGWAVITDEYKVPSKKFKVLGNTDRHSIKKNLIGALLFDSGET | 16,200 |
| | AEATRLKRTARRRYTRRKNRICYLQEIFSNEMAKVDDSFFHRLEESFLVEEDKKHERHPIFGNIVDEVA | |
| | YHEKYPTIYHLRKKLVDSTDKADLRLIYLALAHMIKFRGHFLIEGDLNPDNSDVDKLFIQLVQTYNQLF | |
| | EENPINASGVDAKAILSARLSKSRRLENLIAQLPGEKKNGLFGNLIALSLGLTPNFKSNFDLAEDAKLQ | |
| | LSKDTYDDDLDNLLAQIGDQYADLFLAAKNLSDAILLSDILRVNTEITKAPLSASMIKRYDEHHQDLTL | |
| | LKALVRQQLPEKYKEIFFDQSKNGYAGYIDGGASQEEFYKFIKPILEKMDGTEELLVKLNREDLLRKQR | |
| | TFDNGSIPHQIHLGELHAILRRQEDFYPFLKDNREKIEKILTFRIPYYVGPLARGNSRFAWMTRKSEET | |
| | ITPWNFEEVVDKGASAQSFIERMTNFDKNLPNEKVLPKHSLLYEYFTVYNELTKVKYVTEGMRKPAFLS | |
| | GEQKKAIVDLLFKTNRKVTVKQLKEDYFKKIECFDSVEISGVEDRFNASLGTYHDLLKIIKDKDFLDNE | |
| | ENEDILEDIVLTLTLFEDREMIEERLKTYAHLFDDKVMKQLKRRRYTGWGRLSRKLINGIRDKQSGKTI | |
| | LDFLKSDGFANRNFMQLIHDDSLTFKEDIQKAQVSGQGDSLHEHIANLAGSPAIKKGILQTVKVVDELV | |
| | KVMGRHKPENIVIEMARENQTTQKGQKNSRERMKRIEEGIKELGSQILKEHPVENTQLQNEKLYLYYLQ | |
| | NGRDMYVDQELDINRLSDYDVDHIVPQSFLKDDSIDNKVLTRSDKARGKSDNVPSEEVVKKMKNYWRQL | |
| | LNAKLITQRKFDNLTKAERGGLSELDKAGFIKRQLVETRQITKHVAQILDSRMNTKYDENDKLIREVKV | |
| | ITLKSKLVSDFRKDFQFYKVREINNYHHAHDAYLNAVVGTALIKKYPKLESEFVYGDYKVYDVRKMIAK | |
| | SEQEIGKATAKYFFYSNIMNFFKTEITLANGEIRKRPLIETNGETGEIVWDKGRDFATVRKVLSMPQVN | |
| | IVKKTEVQTGGFSKESILPKRNSDKLIARKKDWDPKKYGGFDSPTVAYSVLVVAKVEKGKSKKLKSVKE | |
| | LLGITIMERSSFEKNPIDFLEAKGYKEVKKDLIIKLPKYSLFELENGRKRMLASAGELQKGNELALPSK | |
| | YVNFLYLASHYEKLKGSPEDNEQKQLFVEQHKHYLDEIIEQISEFSKRVILADANLDKVLSAYNKHRDK | |
| | PIREQAENIIHLFTLTNLGAPAAFKYFDTTIDRKRYTSTKEVLDATLIHQSITGLYETRIDLSQLGGDA | |
| | EAAAKEAAAKEAAAKEAAAKALEAEAAAKEAAAKEAAAKEAAAKATAPLEEEYRLFLEAPIQNVTLLEQ | |
| | WKREIPKVWAEINPPGLASTQAPIHVQLLSTALPVRVRQYPITLEAKRSLRETIRKFRAAGILRPVHSP | |
| | WNTPLLPVRKSGTSEYRMVQDLREVNKRVETIHPTVPNPYTLLSLLPPDRIWYSVLDLKDAFFCIPLAP | |
| | ESQLIFAFEWADAEEGESGQLTWTRLPQGFKNSPTLFNEALNRDLQGFRLDHPSVSLLQYVDDLLIAAD | |
| | TQAACLSATRDLLMTLAELGYRVSGKKAQLCQEEVTYLGFKIHKGSRSLSNSRTQAILQIPVPKTKRQV | |
| | REFLGKIGYCRLFIPGFAELAQPLYAATRPGNDPLVWGEKEEEAFQSLKLALTQPPALALPSLDKPFQL | |
| | FVEETSGAAKGVLTQALGPWKRPVAYLSKRLDPVAAGWPRCLRAIAAAALLTREASKLTFGQDIEITSS | |
| | HNLESLLRSPPDKWLTNARITQYQVLLLDPPRVRFKQTAALNPATLLPETDDTLPIHHCLDTLDSLTST | |
| | RPDLTDQPLAQAEATLFTDGSSYIRDGKRYAGAAVVTLDSVIWAEPLPIGTSAQKAELIALTKALEWSK | |
| | DKSVNIYTDSRYAFATLHVHGMIYRERGWLTAGGKAIKNAPEILALLTAVWLPKRVAVMHCKGHQKDDA | |
| | PTSTGNRRADEVAREVAIRPLSTQATISAEAAAKEAAAKEAAAKEAAAKALEAEAAAKEAAAKEAAAKE | |
| | AAAKAMASNFTQFVLVDNGGTGDVTVAPSNFANGIAEWISSNSRSQAYKVTCSVRQSSAQNRKYTIKVE | |
| | VPKGAWRSYLNMELTIPIFATNSDCELIVKAMQGLLKDGNPIPSAIAANSGIYKRTADGSEFESPKKKA | |
| | KVE | |
| PL12086 | MPAAKRVKLDGGDKKYSIGLDIGTNSVGWAVITDEYKVPSKKFKVLGNTDRHSIKKNLIGALLFDSGET | 16,201 |
| | AEATRLKRTARRRYTRRKNRICYLQEIFSNEMAKVDDSFFHRLEESFLVEEDKKHERHPIFGNIVDEVA | |
| | YHEKYPTIYHLRKKLVDSTDKADLRLIYLALAHMIKFRGHFLIEGDLNPDNSDVDKLFIQLVQTYNQLF | |
| | EENPINASGVDAKAILSARLSKSRRLENLIAQLPGEKKNGLFGNLIALSLGLTPNFKSNFDLAEDAKLQ | |
| | LSKDTYDDDLDNLLAQIGDQYADLFLAAKNLSDAILLSDILRVNTEITKAPLSASMIKRYDEHHQDLTL | |
| | LKALVRQQLPEKYKEIFFDQSKNGYAGYIDGGASQEEFYKFIKPILEKMDGTEELLVKLNREDLLRKQR | |
| | TFDNGSIPHQIHLGELHAILRRQEDFYPFLKDNREKIEKILTFRIPYYVGPLARGNSRFAWMTRKSEET | |
| | ITPWNFEEVVDKGASAQSFIERMTNFDKNLPNEKVLPKHSLLYEYFTVYNELTKVKYVTEGMRKPAFLS | |
| | GEQKKAIVDLLFKTNRKVTVKQLKEDYFKKIECFDSVEISGVEDRFNASLGTYHDLLKIIKDKDFLDNE | |
| | ENEDILEDIVLTLTLFEDREMIEERLKTYAHLFDDKVMKQLKRRRYTGWGRLSRKLINGIRDKQSGKTI | |
| | LDFLKSDGFANRNFMQLIHDDSLTFKEDIQKAQVSGQGDSLHEHIANLAGSPAIKKGILQTVKVVDELV | |
| | KVMGRHKPENIVIEMARENQTTQKGQKNSRERMKRIEEGIKELGSQILKEHPVENTQLQNEKLYLYYLQ | |
| | NGRDMYVDQELDINRLSDYDVDHIVPQSFLKDDSIDNKVLTRSDKARGKSDNVPSEEVVKKMKNYWRQL | |
| | LNAKLITQRKFDNLTKAERGGLSELDKAGFIKRQLVETRQITKHVAQILDSRMNTKYDENDKLIREVKV | |
| | ITLKSKLVSDFRKDFQFYKVREINNYHHAHDAYLNAVVGTALIKKYPKLESEFVYGDYKVYDVRKMIAK | |
| | SEQEIGKATAKYFFYSNIMNFFKTEITLANGEIRKRPLIETNGETGEIVWDKGRDFATVRKVLSMPQVN | |
| | IVKKTEVQTGGFSKESILPKRNSDKLIARKKDWDPKKYGGFDSPTVAYSVLVVAKVEKGKSKKLKSVKE | |
| | LLGITIMERSSFEKNPIDFLEAKGYKEVKKDLIIKLPKYSLFELENGRKRMLASAGELQKGNELALPSK | |
| | YVNFLYLASHYEKLKGSPEDNEQKQLFVEQHKHYLDEIIEQISEFSKRVILADANLDKVLSAYNKHRDK | |
| | PIREQAENIIHLFTLTNLGAPAAFKYFDTTIDRKRYTSTKEVLDATLIHQSITGLYETRIDLSQLGGDA | |
| | EAAAKEAAAKEAAAKEAAAKALEAEAAAKEAAAKEAAAKEAAAKATAPLEEEYRLFLEAPIQNVTLLEQ | |
| | WKREIPKVWAEINPPGLASTQAPIHVQLLSTALPVRVRQYPITLEAKRSLRETIRKFRAAGILRPVHSP | |
| | WNTPLLPVRKSGTSEYRMVQDLREVNKRVETIHPTVPNPYTLLSLLPPDRIWYSVLDLKDAFFCIPLAP | |
| | ESQLIFAFEWADAEEGESGQLTWTRLPQGFKNSPTLFNEALNRDLQGFRLDHPSVSLLQYVDDLLIAAD | |
| | TQAACLSATRDLLMTLAELGYRVSGKKAQLCQEEVTYLGFKIHKGSRSLSNSRTQAILQIPVPKTKRQV | |
| | REFLGKIGYCRLFIPGFAELAQPLYAATRPGNDPLVWGEKEEEAFQSLKLALTQPPALALPSLDKPFQL | |
| | FVEETSGAAKGVLTQALGPWKRPVAYLSKRLDPVAAGWPRCLRAIAAAALLTREASKLTFGQDIEITSS | |
| | HNLESLLRSPPDKWLTNARITQYQVLLLDPPRVRFKQTAALNPATLLPETDDTLPIHHCLDTLDSLTST | |
| | RPDLTDQPLAQAEATLFTDGSSYIRDGKRYAGAAVVTLDSVIWAEPLPIGTSAQKAELIALTKALEWSK | |
| | DKSVNIYTDSRYAFATLHVHGMIYRERGWLTAGGKAIKNAPEILALLTAVWLPKRVAVMHCKGHQKDDA | |
| | PTSTGNRRADEVAREVAIRPLSTQATISAEAAAKEAAAKEAAAKEAAAKALEAEAAAKEAAAKEAAAKE | |
| | AAAKAMASNFTQFVLVDNGGTGDVTVAPSNFANGIAEWISSNSRSQAYKVTCSVRQSSAQNRKYTIKVE | |
| | VPKGAWRSYLNMELTIPIFATNSDCELIVKAMQGLLKDGNPIPSAIAANSGIYGGSGGSMASNFTQFVL | |
| | VDNGGTGDVTVAPSNFANGIAEWISSNSRSQAYKVTCSVRQSSAQNRKYTIKVEVPKGAWRSYLNMELT | |
| | IPIFATNSDCELIVKAMQGLLKDGNPIPSAIAANSGIYKRTADGSEFESPKKKAKVE | |
| PL12087 | MPAAKRVKLDGGDKKYSIGLDIGTNSVGWAVITDEYKVPSKKFKVLGNTDRHSIKKNLIGALLFDSGET | 16,202 |
| | AEATRLKRTARRRYTRRKNRICYLQEIFSNEMAKVDDSFFHRLEESFLVEEDKKHERHPIFGNIVDEVA | |
| | YHEKYPTIYHLRKKLVDSTDKADLRLIYLALAHMIKFRGHFLIEGDLNPDNSDVDKLFIQLVQTYNQLF | |
| | EENPINASGVDAKAILSARLSKSRRLENLIAQLPGEKKNGLFGNLIALSLGLTPNFKSNFDLAEDAKLQ | |
| | LSKDTYDDDLDNLLAQIGDQYADLFLAAKNLSDAILLSDILRVNTEITKAPLSASMIKRYDEHHQDLTL | |
| | LKALVRQQLPEKYKEIFFDQSKNGYAGYIDGGASQEEFYKFIKPILEKMDGTEELLVKLNREDLLRKQR | |
| | TFDNGSIPHQIHLGELHAILRRQEDFYPFLKDNREKIEKILTFRIPYYVGPLARGNSRFAWMTRKSEET | |
| | ITPWNFEEVVDKGASAQSFIERMTNFDKNLPNEKVLPKHSLLYEYFTVYNELTKVKYVTEGMRKPAFLS | |
| | GEQKKAIVDLLFKTNRKVTVKQLKEDYFKKIECFDSVEISGVEDRFNASLGTYHDLLKIIKDKDFLDNE | |
| | ENEDILEDIVLTLTLFEDREMIEERLKTYAHLFDDKVMKQLKRRRYTGWGRLSRKLINGIRDKQSGKTI | |
| | LDFLKSDGFANRNFMQLIHDDSLTFKEDIQKAQVSGQGDSLHEHIANLAGSPAIKKGILQTVKVVDELV | |
| | KVMGRHKPENIVIEMARENQTTQKGQKNSRERMKRIEEGIKELGSQILKEHPVENTQLQNEKLYLYYLQ | |
| | NGRDMYVDQELDINRLSDYDVDHIVPQSFLKDDSIDNKVLTRSDKARGKSDNVPSEEVVKKMKNYWRQL | |
| | LNAKLITQRKFDNLTKAERGGLSELDKAGFIKRQLVETRQITKHVAQILDSRMNTKYDENDKLIREVKV | |
| | ITLKSKLVSDFRKDFQFYKVREINNYHHAHDAYLNAVVGTALIKKYPKLESEFVYGDYKVYDVRKMIAK | |
| | SEQEIGKATAKYFFYSNIMNFFKTEITLANGEIRKRPLIETNGETGEIVWDKGRDFATVRKVLSMPQVN | |
| | IVKKTEVQTGGFSKESILPKRNSDKLIARKKDWDPKKYGGFDSPTVAYSVLVVAKVEKGKSKKLKSVKE | |
| | LLGITIMERSSFEKNPIDFLEAKGYKEVKKDLIIKLPKYSLFELENGRKRMLASAGELQKGNELALPSK | |
| | YVNFLYLASHYEKLKGSPEDNEQKQLFVEQHKHYLDEIIEQISEFSKRVILADANLDKVLSAYNKHRDK | |
| | PIREQAENIIHLFTLTNLGAPAAFKYFDTTIDRKRYTSTKEVLDATLIHQSITGLYETRIDLSQLGGDA | |
| | EAAAKEAAAKEAAAKEAAAKALEAEAAAKEAAAKEAAAKEAAAKATAPLEEEYRLFLEAPIQNVTLLEQ | |
| | WKREIPKVWAEINPPGLASTQAPIHVQLLSTALPVRVRQYPITLEAKRSLRETIRKFRAAGILRPVHSP | |
| | WNTPLLPVRKSGTSEYRMVQDLREVNKRVETIHPTVPNPYTLLSLLPPDRIWYSVLDLKDAFFCIPLAP | |
| | ESQLIFAFEWADAEEGESGQLTWTRLPQGFKNSPTLFNEALNRDLQGFRLDHPSVSLLQYVDDLLIAAD | |
| | TQAACLSATRDLLMTLAELGYRVSGKKAQLCQEEVTYLGFKIHKGSRSLSNSRTQAILQIPVPKTKRQV | |
| | REFLGKIGYCRLFIPGFAELAQPLYAATRPGNDPLVWGEKEEEAFQSLKLALTQPPALALPSLDKPFQL | |
| | FVEETSGAAKGVLTQALGPWKRPVAYLSKRLDPVAAGWPRCLRAIAAAALLTREASKLTFGQDIEITSS | |
| | HNLESLLRSPPDKWLTNARITQYQVLLLDPPRVRFKQTAALNPATLLPETDDTLPIHHCLDTLDSLTST | |
| | RPDLTDQPLAQAEATLFTDGSSYIRDGKRYAGAAVVTLDSVIWAEPLPIGTSAQKAELIALTKALEWSK | |
| | DKSVNIYTDSRYAFATLHVHGMIYRERGWLTAGGKAIKNAPEILALLTAVWLPKRVAVMHCKGHQKDDA | |
| | PTSTGNRRADEVAREVAIRPLSTQATISAEAAAKEAAAKEAAAKEAAAKALEAEAAAKEAAAKEAAAKE | |
| | AAAKAMASNFTQFVLVDNGGTGDVTVAPSNFANGIAEWISSNSRSQAYKVTCSVRQSSAQNRKYTIKVE | |
| | VPKGAWRSYLNMELTIPIFATNSDCELIVKAMQGLLKDGNPIPSAIAANSGIYGGSGGSMASNFTQFVL | |
| | VDNGGTGDVTVAPSNFANGIAEWISSNSRSQAYKVTCSVRQSSAQNRKYTIKVEVPKGAWRSYLNMELT | |
| | IPIFATNSDCELIVKAMQGLLKDGNPIPSAIAANSGIYGGGSGGGSGGGSGGGSMASNFTQFVLVDNGG | |
| | TGDVTVAPSNFANGIAEWISSNSRSQAYKVTCSVRQSSAQNRKYTIKVEVPKGAWRSYLNMELTIPIFA | |
| | TNSDCELIVKAMQGLLKDGNPIPSAIAANSGIYGGSGGSMASNFTQFVLVDNGGTGDVTVAPSNFANGI | |
| | AEWISSNSRSQAYKVTCSVRQSSAQNRKYTIKVEVPKGAWRSYLNMELTIPIFATNSDCELIVKAMQGL | |
| | LKDGNPIPSAIAANSGIYKRTADGSEFESPKKKAKVE | |
| PL12088 | MPAAKRVKLDGGDKKYSIGLDIGTNSVGWAVITDEYKVPSKKFKVLGNTDRHSIKKNLIGALLFDSGET | 16,203 |
| | AEATRLKRTARRRYTRRKNRICYLQEIFSNEMAKVDDSFFHRLEESFLVEEDKKHERHPIFGNIVDEVA | |
| | YHEKYPTIYHLRKKLVDSTDKADLRLIYLALAHMIKFRGHFLIEGDLNPDNSDVDKLFIQLVQTYNQLF | |
| | EENPINASGVDAKAILSARLSKSRRLENLIAQLPGEKKNGLFGNLIALSLGLTPNFKSNFDLAEDAKLQ | |
| | LSKDTYDDDLDNLLAQIGDQYADLFLAAKNLSDAILLSDILRVNTEITKAPLSASMIKRYDEHHQDLTL | |
| | LKALVRQQLPEKYKEIFFDQSKNGYAGYIDGGASQEEFYKFIKPILEKMDGTEELLVKLNREDLLRKQR | |
| | TFDNGSIPHQIHLGELHAILRRQEDFYPFLKDNREKIEKILTFRIPYYVGPLARGNSRFAWMTRKSEET | |
| | ITPWNFEEVVDKGASAQSFIERMTNFDKNLPNEKVLPKHSLLYEYFTVYNELTKVKYVTEGMRKPAFLS | |
| | GEQKKAIVDLLFKTNRKVTVKQLKEDYFKKIECFDSVEISGVEDRFNASLGTYHDLLKIIKDKDFLDNE | |
| | ENEDILEDIVLTLTLFEDREMIEERLKTYAHLFDDKVMKQLKRRRYTGWGRLSRKLINGIRDKQSGKTI | |
| | LDFLKSDGFANRNFMQLIHDDSLTFKEDIQKAQVSGQGDSLHEHIANLAGSPAIKKGILQTVKVVDELV | |
| | KVMGRHKPENIVIEMARENQTTQKGQKNSRERMKRIEEGIKELGSQILKEHPVENTQLQNEKLYLYYLQ | |
| | NGRDMYVDQELDINRLSDYDVDHIVPQSFLKDDSIDNKVLTRSDKARGKSDNVPSEEVVKKMKNYWRQL | |
| | LNAKLITQRKFDNLTKAERGGLSELDKAGFIKRQLVETRQITKHVAQILDSRMNTKYDENDKLIREVKV | |
| | ITLKSKLVSDFRKDFQFYKVREINNYHHAHDAYLNAVVGTALIKKYPKLESEFVYGDYKVYDVRKMIAK | |
| | SEQEIGKATAKYFFYSNIMNFFKTEITLANGEIRKRPLIETNGETGEIVWDKGRDFATVRKVLSMPQVN | |
| | IVKKTEVQTGGFSKESILPKRNSDKLIARKKDWDPKKYGGFDSPTVAYSVLVVAKVEKGKSKKLKSVKE | |
| | LLGITIMERSSFEKNPIDFLEAKGYKEVKKDLIIKLPKYSLFELENGRKRMLASAGELQKGNELALPSK | |
| | YVNFLYLASHYEKLKGSPEDNEQKQLFVEQHKHYLDEIIEQISEFSKRVILADANLDKVLSAYNKHRDK | |
| | PIREQAENIIHLFTLTNLGAPAAFKYFDTTIDRKRYTSTKEVLDATLIHQSITGLYETRIDLSQLGGDA | |
| | EAAAKEAAAKEAAAKEAAAKALEAEAAAKEAAAKEAAAKEAAAKATAPLEEEYRLFLEAPIQNVTLLEQ | |
| | WKREIPKVWAEINPPGLASTQAPIHVQLLSTALPVRVRQYPITLEAKRSLRETIRKFRAAGILRPVHSP | |
| | WNTPLLPVRKSGTSEYRMVQDLREVNKRVETIHPTVPNPYTLLSLLPPDRIWYSVLDLKDAFFCIPLAP | |
| | ESQLIFAFEWADAEEGESGQLTWTRLPQGFKNSPTLFNEALNRDLQGFRLDHPSVSLLQYVDDLLIAAD | |
| | TQAACLSATRDLLMTLAELGYRVSGKKAQLCQEEVTYLGFKIHKGSRSLSNSRTQAILQIPVPKTKRQV | |
| | REFLGKIGYCRLFIPGFAELAQPLYAATRPGNDPLVWGEKEEEAFQSLKLALTQPPALALPSLDKPFQL | |
| | FVEETSGAAKGVLTQALGPWKRPVAYLSKRLDPVAAGWPRCLRAIAAAALLTREASKLTFGQDIEITSS | |
| | HNLESLLRSPPDKWLTNARITQYQVLLLDPPRVRFKQTAALNPATLLPETDDTLPIHHCLDTLDSLTST | |
| | RPDLTDQPLAQAEATLFTDGSSYIRDGKRYAGAAVVTLDSVIWAEPLPIGTSAQKAELIALTKALEWSK | |
| | DKSVNIYTDSRYAFATLHVHGMIYRERGWLTAGGKAIKNAPEILALLTAVWLPKRVAVMHCKGHQKDDA | |
| | PTSTGNRRADEVAREVAIRPLSTQATISSGGSSGGSSGSETPGTSESATPESSGGSSGGSSMASNFTQF | |
| | VLVDNGGTGDVTVAPSNFANGIAEWISSNSRSQAYKVTCSVRQSSAQNRKYTIKVEVPKGAWRSYLNME | |
| | LTIPIFATNSDCELIVKAMQGLLKDGNPIPSAIAANSGIYKRTADGSEFESPKKKAKVE | |
| PL12089 | MPAAKRVKLDGGDKKYSIGLDIGTNSVGWAVITDEYKVPSKKFKVLGNTDRHSIKKNLIGALLFDSGET | 16,204 |
| | AEATRLKRTARRRYTRRKNRICYLQEIFSNEMAKVDDSFFHRLEESFLVEEDKKHERHPIFGNIVDEVA | |
| | YHEKYPTIYHLRKKLVDSTDKADLRLIYLALAHMIKFRGHFLIEGDLNPDNSDVDKLFIQLVQTYNQLF | |
| | EENPINASGVDAKAILSARLSKSRRLENLIAQLPGEKKNGLFGNLIALSLGLTPNFKSNFDLAEDAKLQ | |
| | LSKDTYDDDLDNLLAQIGDQYADLFLAAKNLSDAILLSDILRVNTEITKAPLSASMIKRYDEHHQDLTL | |
| | LKALVRQQLPEKYKEIFFDQSKNGYAGYIDGGASQEEFYKFIKPILEKMDGTEELLVKLNREDLLRKQR | |
| | TFDNGSIPHQIHLGELHAILRRQEDFYPFLKDNREKIEKILTFRIPYYVGPLARGNSRFAWMTRKSEET | |
| | ITPWNFEEVVDKGASAQSFIERMTNFDKNLPNEKVLPKHSLLYEYFTVYNELTKVKYVTEGMRKPAFLS | |
| | GEQKKAIVDLLFKTNRKVTVKQLKEDYFKKIECFDSVEISGVEDRFNASLGTYHDLLKIIKDKDFLDNE | |
| | ENEDILEDIVLTLTLFEDREMIEERLKTYAHLFDDKVMKQLKRRRYTGWGRLSRKLINGIRDKQSGKTI | |
| | LDFLKSDGFANRNFMQLIHDDSLTFKEDIQKAQVSGQGDSLHEHIANLAGSPAIKKGILQTVKVVDELV | |
| | KVMGRHKPENIVIEMARENQTTQKGQKNSRERMKRIEEGIKELGSQILKEHPVENTQLQNEKLYLYYLQ | |
| | NGRDMYVDQELDINRLSDYDVDHIVPQSFLKDDSIDNKVLTRSDKARGKSDNVPSEEVVKKMKNYWRQL | |
| | LNAKLITQRKFDNLTKAERGGLSELDKAGFIKRQLVETRQITKHVAQILDSRMNTKYDENDKLIREVKV | |
| | ITLKSKLVSDFRKDFQFYKVREINNYHHAHDAYLNAVVGTALIKKYPKLESEFVYGDYKVYDVRKMIAK | |
| | SEQEIGKATAKYFFYSNIMNFFKTEITLANGEIRKRPLIETNGETGEIVWDKGRDFATVRKVLSMPQVN | |
| | IVKKTEVQTGGFSKESILPKRNSDKLIARKKDWDPKKYGGFDSPTVAYSVLVVAKVEKGKSKKLKSVKE | |
| | LLGITIMERSSFEKNPIDFLEAKGYKEVKKDLIIKLPKYSLFELENGRKRMLASAGELQKGNELALPSK | |
| | YVNFLYLASHYEKLKGSPEDNEQKQLFVEQHKHYLDEIIEQISEFSKRVILADANLDKVLSAYNKHRDK | |
| | PIREQAENIIHLFTLTNLGAPAAFKYFDTTIDRKRYTSTKEVLDATLIHQSITGLYETRIDLSQLGGDA | |
| | EAAAKEAAAKEAAAKEAAAKALEAEAAAKEAAAKEAAAKEAAAKATAPLEEEYRLFLEAPIQNVTLLEQ | |
| | WKREIPKVWAEINPPGLASTQAPIHVQLLSTALPVRVRQYPITLEAKRSLRETIRKFRAAGILRPVHSP | |
| | WNTPLLPVRKSGTSEYRMVQDLREVNKRVETIHPTVPNPYTLLSLLPPDRIWYSVLDLKDAFFCIPLAP | |
| | ESQLIFAFEWADAEEGESGQLTWTRLPQGFKNSPTLFNEALNRDLQGFRLDHPSVSLLQYVDDLLIAAD | |
| | TQAACLSATRDLLMTLAELGYRVSGKKAQLCQEEVTYLGFKIHKGSRSLSNSRTQAILQIPVPKTKRQV | |
| | REFLGKIGYCRLFIPGFAELAQPLYAATRPGNDPLVWGEKEEEAFQSLKLALTQPPALALPSLDKPFQL | |
| | FVEETSGAAKGVLTQALGPWKRPVAYLSKRLDPVAAGWPRCLRAIAAAALLTREASKLTFGQDIEITSS | |
| | HNLESLLRSPPDKWLTNARITQYQVLLLDPPRVRFKQTAALNPATLLPETDDTLPIHHCLDTLDSLTST | |
| | RPDLTDQPLAQAEATLFTDGSSYIRDGKRYAGAAVVTLDSVIWAEPLPIGTSAQKAELIALTKALEWSK | |
| | DKSVNIYTDSRYAFATLHVHGMIYRERGWLTAGGKAIKNAPEILALLTAVWLPKRVAVMHCKGHQKDDA | |
| | PTSTGNRRADEVAREVAIRPLSTQATISSGGSSGGSSGSETPGTSESATPESSGGSSGGSSMASNFTQF | |
| | VLVDNGGTGDVTVAPSNFANGIAEWISSNSRSQAYKVTCSVRQSSAQNRKYTIKVEVPKGAWRSYLNME | |
| | LTIPIFATNSDCELIVKAMQGLLKDGNPIPSAIAANSGIYGGSGGSMASNFTQFVLVDNGGTGDVTVAP | |
| | SNFANGIAEWISSNSRSQAYKVTCSVRQSSAQNRKYTIKVEVPKGAWRSYLNMELTIPIFATNSDCELI | |
| | VKAMQGLLKDGNPIPSAIAANSGIYKRTADGSEFESPKKKAKVE | |
| PL12090 | MPAAKRVKLDGGDKKYSIGLDIGTNSVGWAVITDEYKVPSKKFKVLGNTDRHSIKKNLIGALLFDSGET | 16,205 |
| | AEATRLKRTARRRYTRRKNRICYLQEIFSNEMAKVDDSFFHRLEESFLVEEDKKHERHPIFGNIVDEVA | |
| | YHEKYPTIYHLRKKLVDSTDKADLRLIYLALAHMIKFRGHFLIEGDLNPDNSDVDKLFIQLVQTYNQLF | |
| | EENPINASGVDAKAILSARLSKSRRLENLIAQLPGEKKNGLFGNLIALSLGLTPNFKSNFDLAEDAKLQ | |
| | LSKDTYDDDLDNLLAQIGDQYADLFLAAKNLSDAILLSDILRVNTEITKAPLSASMIKRYDEHHQDLTL | |
| | LKALVRQQLPEKYKEIFFDQSKNGYAGYIDGGASQEEFYKFIKPILEKMDGTEELLVKLNREDLLRKQR | |
| | TFDNGSIPHQIHLGELHAILRRQEDFYPFLKDNREKIEKILTFRIPYYVGPLARGNSRFAWMTRKSEET | |
| | ITPWNFEEVVDKGASAQSFIERMTNFDKNLPNEKVLPKHSLLYEYFTVYNELTKVKYVTEGMRKPAFLS | |
| | GEQKKAIVDLLFKTNRKVTVKQLKEDYFKKIECFDSVEISGVEDRFNASLGTYHDLLKIIKDKDFLDNE | |
| | ENEDILEDIVLTLTLFEDREMIEERLKTYAHLFDDKVMKQLKRRRYTGWGRLSRKLINGIRDKQSGKTI | |
| | LDFLKSDGFANRNFMQLIHDDSLTFKEDIQKAQVSGQGDSLHEHIANLAGSPAIKKGILQTVKVVDELV | |
| | KVMGRHKPENIVIEMARENQTTQKGQKNSRERMKRIEEGIKELGSQILKEHPVENTQLQNEKLYLYYLQ | |
| | NGRDMYVDQELDINRLSDYDVDHIVPQSFLKDDSIDNKVLTRSDKARGKSDNVPSEEVVKKMKNYWRQL | |
| | LNAKLITQRKFDNLTKAERGGLSELDKAGFIKRQLVETRQITKHVAQILDSRMNTKYDENDKLIREVKV | |
| | ITLKSKLVSDFRKDFQFYKVREINNYHHAHDAYLNAVVGTALIKKYPKLESEFVYGDYKVYDVRKMIAK | |
| | SEQEIGKATAKYFFYSNIMNFFKTEITLANGEIRKRPLIETNGETGEIVWDKGRDFATVRKVLSMPQVN | |
| | IVKKTEVQTGGFSKESILPKRNSDKLIARKKDWDPKKYGGFDSPTVAYSVLVVAKVEKGKSKKLKSVKE | |
| | LLGITIMERSSFEKNPIDFLEAKGYKEVKKDLIIKLPKYSLFELENGRKRMLASAGELQKGNELALPSK | |
| | YVNFLYLASHYEKLKGSPEDNEQKQLFVEQHKHYLDEIIEQISEFSKRVILADANLDKVLSAYNKHRDK | |
| | PIREQAENIIHLFTLTNLGAPAAFKYFDTTIDRKRYTSTKEVLDATLIHQSITGLYETRIDLSQLGGDA | |
| | EAAAKEAAAKEAAAKEAAAKALEAEAAAKEAAAKEAAAKEAAAKATAPLEEEYRLFLEAPIQNVTLLEQ | |
| | WKREIPKVWAEINPPGLASTQAPIHVQLLSTALPVRVRQYPITLEAKRSLRETIRKFRAAGILRPVHSP | |
| | WNTPLLPVRKSGTSEYRMVQDLREVNKRVETIHPTVPNPYTLLSLLPPDRIWYSVLDLKDAFFCIPLAP | |
| | ESQLIFAFEWADAEEGESGQLTWTRLPQGFKNSPTLFNEALNRDLQGFRLDHPSVSLLQYVDDLLIAAD | |
| | TQAACLSATRDLLMTLAELGYRVSGKKAQLCQEEVTYLGFKIHKGSRSLSNSRTQAILQIPVPKTKRQV | |
| | REFLGKIGYCRLFIPGFAELAQPLYAATRPGNDPLVWGEKEEEAFQSLKLALTQPPALALPSLDKPFQL | |
| | FVEETSGAAKGVLTQALGPWKRPVAYLSKRLDPVAAGWPRCLRAIAAAALLTREASKLTFGQDIEITSS | |
| | HNLESLLRSPPDKWLTNARITQYQVLLLDPPRVRFKQTAALNPATLLPETDDTLPIHHCLDTLDSLTST | |
| | RPDLTDQPLAQAEATLFTDGSSYIRDGKRYAGAAVVTLDSVIWAEPLPIGTSAQKAELIALTKALEWSK | |
| | DKSVNIYTDSRYAFATLHVHGMIYRERGWLTAGGKAIKNAPEILALLTAVWLPKRVAVMHCKGHQKDDA | |
| | PTSTGNRRADEVAREVAIRPLSTQATISSGGSSGGSSGSETPGTSESATPESSGGSSGGSSMASNFTQF | |
| | VLVDNGGTGDVTVAPSNFANGIAEWISSNSRSQAYKVTCSVRQSSAQNRKYTIKVEVPKGAWRSYLNME | |
| | LTIPIFATNSDCELIVKAMQGLLKDGNPIPSAIAANSGIYGGSGGSMASNFTQFVLVDNGGTGDVTVAP | |
| | SNFANGIAEWISSNSRSQAYKVTCSVRQSSAQNRKYTIKVEVPKGAWRSYLNMELTIPIFATNSDCELI | |
| | VKAMQGLLKDGNPIPSAIAANSGIYGGGSGGGSGGGSGGGSMASNFTQFVLVDNGGTGDVTVAPSNFAN | |
| | GIAEWISSNSRSQAYKVTCSVRQSSAQNRKYTIKVEVPKGAWRSYLNMELTIPIFATNSDCELIVKAMQ | |
| | GLLKDGNPIPSAIAANSGIYGGSGGSMASNFTQFVLVDNGGTGDVTVAPSNFANGIAEWISSNSRSQAY | |
| | KVTCSVRQSSAQNRKYTIKVEVPKGAWRSYLNMELTIPIFATNSDCELIVKAMQGLLKDGNPIPSAIAA | |
| | NSGIYKRTADGSEFESPKKKAKVE | |
| PL12091 | MPAAKRVKLDGGDKKYSIGLDIGTNSVGWAVITDEYKVPSKKFKVLGNTDRHSIKKNLIGALLFDSGET | 16,206 |
| | AEATRLKRTARRRYTRRKNRICYLQEIFSNEMAKVDDSFFHRLEESFLVEEDKKHERHPIFGNIVDEVA | |
| | YHEKYPTIYHLRKKLVDSTDKADLRLIYLALAHMIKFRGHFLIEGDLNPDNSDVDKLFIQLVQTYNQLF | |
| | EENPINASGVDAKAILSARLSKSRRLENLIAQLPGEKKNGLFGNLIALSLGLTPNFKSNFDLAEDAKLQ | |
| | LSKDTYDDDLDNLLAQIGDQYADLFLAAKNLSDAILLSDILRVNTEITKAPLSASMIKRYDEHHQDLTL | |
| | LKALVRQQLPEKYKEIFFDQSKNGYAGYIDGGASQEEFYKFIKPILEKMDGTEELLVKLNREDLLRKQR | |
| | TFDNGSIPHQIHLGELHAILRRQEDFYPFLKDNREKIEKILTFRIPYYVGPLARGNSRFAWMTRKSEET | |
| | ITPWNFEEVVDKGASAQSFIERMTNFDKNLPNEKVLPKHSLLYEYFTVYNELTKVKYVTEGMRKPAFLS | |
| | GEQKKAIVDLLFKTNRKVTVKQLKEDYFKKIECFDSVEISGVEDRFNASLGTYHDLLKIIKDKDFLDNE | |
| | ENEDILEDIVLTLTLFEDREMIEERLKTYAHLFDDKVMKQLKRRRYTGWGRLSRKLINGIRDKQSGKTI | |
| | LDFLKSDGFANRNFMQLIHDDSLTFKEDIQKAQVSGQGDSLHEHIANLAGSPAIKKGILQTVKVVDELV | |
| | KVMGRHKPENIVIEMARENQTTQKGQKNSRERMKRIEEGIKELGSQILKEHPVENTQLQNEKLYLYYLQ | |
| | NGRDMYVDQELDINRLSDYDVDHIVPQSFLKDDSIDNKVLTRSDKARGKSDNVPSEEVVKKMKNYWRQL | |
| | LNAKLITQRKFDNLTKAERGGLSELDKAGFIKRQLVETRQITKHVAQILDSRMNTKYDENDKLIREVKV | |
| | ITLKSKLVSDFRKDFQFYKVREINNYHHAHDAYLNAVVGTALIKKYPKLESEFVYGDYKVYDVRKMIAK | |
| | SEQEIGKATAKYFFYSNIMNFFKTEITLANGEIRKRPLIETNGETGEIVWDKGRDFATVRKVLSMPQVN | |
| | IVKKTEVQTGGFSKESILPKRNSDKLIARKKDWDPKKYGGFDSPTVAYSVLVVAKVEKGKSKKLKSVKE | |
| | LLGITIMERSSFEKNPIDFLEAKGYKEVKKDLIIKLPKYSLFELENGRKRMLASAGELQKGNELALPSK | |
| | YVNFLYLASHYEKLKGSPEDNEQKQLFVEQHKHYLDEIIEQISEFSKRVILADANLDKVLSAYNKHRDK | |
| | PIREQAENIIHLFTLTNLGAPAAFKYFDTTIDRKRYTSTKEVLDATLIHQSITGLYETRIDLSQLGGDA | |
| | EAAAKEAAAKEAAAKEAAAKALEAEAAAKEAAAKEAAAKEAAAKATAPLEEEYRLFLEAPIQNVTLLEQ | |
| | WKREIPKVWAEINPPGLASTQAPIHVQLLSTALPVRVRQYPITLEAKRSLRETIRKFRAAGILRPVHSP | |
| | WNTPLLPVRKSGTSEYRMVQDLREVNKRVETIHPTVPNPYTLLSLLPPDRIWYSVLDLKDAFFCIPLAP | |
| | ESQLIFAFEWADAEEGESGQLTWTRLPQGFKNSPTLFNEALNRDLQGFRLDHPSVSLLQYVDDLLIAAD | |
| | TQAACLSATRDLLMTLAELGYRVSGKKAQLCQEEVTYLGFKIHKGSRSLSNSRTQAILQIPVPKTKRQV | |
| | REFLGKIGYCRLFIPGFAELAQPLYAATRPGNDPLVWGEKEEEAFQSLKLALTQPPALALPSLDKPFQL | |
| | FVEETSGAAKGVLTQALGPWKRPVAYLSKRLDPVAAGWPRCLRAIAAAALLTREASKLTFGQDIEITSS | |
| | HNLESLLRSPPDKWLTNARITQYQVLLLDPPRVRFKQTAALNPATLLPETDDTLPIHHCLDTLDSLTST | |
| | RPDLTDQPLAQAEATLFTDGSSYIRDGKRYAGAAVVTLDSVIWAEPLPIGTSAQKAELIALTKALEWSK | |
| | DKSVNIYTDSRYAFATLHVHGMIYRERGWLTAGGKAIKNAPEILALLTAVWLPKRVAVMHCKGHQKDDA | |
| | PTSTGNRRADEVAREVAIRPLSTQATISGSSGSSGSSGSSGSSGSSMASNFTQFVLVDNGGTGDVTVAP | |
| | SNFANGIAEWISSNSRSQAYKVTCSVRQSSAQNRKYTIKVEVPKGAWRSYLNMELTIPIFATNSDCELI | |
| | VKAMQGLLKDGNPIPSAIAANSGIYKRTADGSEFESPKKKAKVE | |
| PL12092 | MPAAKRVKLDGGDKKYSIGLDIGTNSVGWAVITDEYKVPSKKFKVLGNTDRHSIKKNLIGALLFDSGET | 16,207 |
| | AEATRLKRTARRRYTRRKNRICYLQEIFSNEMAKVDDSFFHRLEESFLVEEDKKHERHPIFGNIVDEVA | |
| | YHEKYPTIYHLRKKLVDSTDKADLRLIYLALAHMIKFRGHFLIEGDLNPDNSDVDKLFIQLVQTYNQLF | |
| | EENPINASGVDAKAILSARLSKSRRLENLIAQLPGEKKNGLFGNLIALSLGLTPNFKSNFDLAEDAKLQ | |
| | LSKDTYDDDLDNLLAQIGDQYADLFLAAKNLSDAILLSDILRVNTEITKAPLSASMIKRYDEHHQDLTL | |
| | LKALVRQQLPEKYKEIFFDQSKNGYAGYIDGGASQEEFYKFIKPILEKMDGTEELLVKLNREDLLRKQR | |
| | TFDNGSIPHQIHLGELHAILRRQEDFYPFLKDNREKIEKILTFRIPYYVGPLARGNSRFAWMTRKSEET | |
| | ITPWNFEEVVDKGASAQSFIERMTNFDKNLPNEKVLPKHSLLYEYFTVYNELTKVKYVTEGMRKPAFLS | |
| | GEQKKAIVDLLFKTNRKVTVKQLKEDYFKKIECFDSVEISGVEDRFNASLGTYHDLLKIIKDKDFLDNE | |
| | ENEDILEDIVLTLTLFEDREMIEERLKTYAHLFDDKVMKQLKRRRYTGWGRLSRKLINGIRDKQSGKTI | |
| | LDFLKSDGFANRNFMQLIHDDSLTFKEDIQKAQVSGQGDSLHEHIANLAGSPAIKKGILQTVKVVDELV | |
| | KVMGRHKPENIVIEMARENQTTQKGQKNSRERMKRIEEGIKELGSQILKEHPVENTQLQNEKLYLYYLQ | |
| | NGRDMYVDQELDINRLSDYDVDHIVPQSFLKDDSIDNKVLTRSDKARGKSDNVPSEEVVKKMKNYWRQL | |
| | LNAKLITQRKFDNLTKAERGGLSELDKAGFIKRQLVETRQITKHVAQILDSRMNTKYDENDKLIREVKV | |
| | ITLKSKLVSDFRKDFQFYKVREINNYHHAHDAYLNAVVGTALIKKYPKLESEFVYGDYKVYDVRKMIAK | |
| | SEQEIGKATAKYFFYSNIMNFFKTEITLANGEIRKRPLIETNGETGEIVWDKGRDFATVRKVLSMPQVN | |
| | IVKKTEVQTGGFSKESILPKRNSDKLIARKKDWDPKKYGGFDSPTVAYSVLVVAKVEKGKSKKLKSVKE | |
| | LLGITIMERSSFEKNPIDFLEAKGYKEVKKDLIIKLPKYSLFELENGRKRMLASAGELQKGNELALPSK | |
| | YVNFLYLASHYEKLKGSPEDNEQKQLFVEQHKHYLDEIIEQISEFSKRVILADANLDKVLSAYNKHRDK | |
| | PIREQAENIIHLFTLTNLGAPAAFKYFDTTIDRKRYTSTKEVLDATLIHQSITGLYETRIDLSQLGGDA | |
| | EAAAKEAAAKEAAAKEAAAKALEAEAAAKEAAAKEAAAKEAAAKATAPLEEEYRLFLEAPIQNVTLLEQ | |
| | WKREIPKVWAEINPPGLASTQAPIHVQLLSTALPVRVRQYPITLEAKRSLRETIRKFRAAGILRPVHSP | |
| | WNTPLLPVRKSGTSEYRMVQDLREVNKRVETIHPTVPNPYTLLSLLPPDRIWYSVLDLKDAFFCIPLAP | |
| | ESQLIFAFEWADAEEGESGQLTWTRLPQGFKNSPTLFNEALNRDLQGFRLDHPSVSLLQYVDDLLIAAD | |
| | TQAACLSATRDLLMTLAELGYRVSGKKAQLCQEEVTYLGFKIHKGSRSLSNSRTQAILQIPVPKTKRQV | |
| | REFLGKIGYCRLFIPGFAELAQPLYAATRPGNDPLVWGEKEEEAFQSLKLALTQPPALALPSLDKPFQL | |
| | FVEETSGAAKGVLTQALGPWKRPVAYLSKRLDPVAAGWPRCLRAIAAAALLTREASKLTFGQDIEITSS | |
| | HNLESLLRSPPDKWLTNARITQYQVLLLDPPRVRFKQTAALNPATLLPETDDTLPIHHCLDTLDSLTST | |
| | RPDLTDQPLAQAEATLFTDGSSYIRDGKRYAGAAVVTLDSVIWAEPLPIGTSAQKAELIALTKALEWSK | |
| | DKSVNIYTDSRYAFATLHVHGMIYRERGWLTAGGKAIKNAPEILALLTAVWLPKRVAVMHCKGHQKDDA | |
| | PTSTGNRRADEVAREVAIRPLSTQATISGSSGSSGSSGSSGSSGSSMASNFTQFVLVDNGGTGDVTVAP | |
| | SNFANGIAEWISSNSRSQAYKVTCSVRQSSAQNRKYTIKVEVPKGAWRSYLNMELTIPIFATNSDCELI | |
| | VKAMQGLLKDGNPIPSAIAANSGIYGGSGGSMASNFTQFVLVDNGGTGDVTVAPSNFANGIAEWISSNS | |
| | RSQAYKVTCSVRQSSAQNRKYTIKVEVPKGAWRSYLNMELTIPIFATNSDCELIVKAMQGLLKDGNPIP | |
| | SAIAANSGIYKRTADGSEFESPKKKAKVE | |
| PL12093 | MPAAKRVKLDGGDKKYSIGLDIGTNSVGWAVITDEYKVPSKKFKVLGNTDRHSIKKNLIGALLFDSGET | 16,208 |
| | AEATRLKRTARRRYTRRKNRICYLQEIFSNEMAKVDDSFFHRLEESFLVEEDKKHERHPIFGNIVDEVA | |
| | YHEKYPTIYHLRKKLVDSTDKADLRLIYLALAHMIKFRGHFLIEGDLNPDNSDVDKLFIQLVQTYNQLF | |
| | EENPINASGVDAKAILSARLSKSRRLENLIAQLPGEKKNGLFGNLIALSLGLTPNFKSNFDLAEDAKLQ | |
| | LSKDTYDDDLDNLLAQIGDQYADLFLAAKNLSDAILLSDILRVNTEITKAPLSASMIKRYDEHHQDLTL | |
| | LKALVRQQLPEKYKEIFFDQSKNGYAGYIDGGASQEEFYKFIKPILEKMDGTEELLVKLNREDLLRKQR | |
| | TFDNGSIPHQIHLGELHAILRRQEDFYPFLKDNREKIEKILTFRIPYYVGPLARGNSRFAWMTRKSEET | |
| | ITPWNFEEVVDKGASAQSFIERMTNFDKNLPNEKVLPKHSLLYEYFTVYNELTKVKYVTEGMRKPAFLS | |
| | GEQKKAIVDLLFKTNRKVTVKQLKEDYFKKIECFDSVEISGVEDRFNASLGTYHDLLKIIKDKDFLDNE | |
| | ENEDILEDIVLTLTLFEDREMIEERLKTYAHLFDDKVMKQLKRRRYTGWGRLSRKLINGIRDKQSGKTI | |
| | LDFLKSDGFANRNFMQLIHDDSLTFKEDIQKAQVSGQGDSLHEHIANLAGSPAIKKGILQTVKVVDELV | |
| | KVMGRHKPENIVIEMARENQTTQKGQKNSRERMKRIEEGIKELGSQILKEHPVENTQLQNEKLYLYYLQ | |
| | NGRDMYVDQELDINRLSDYDVDHIVPQSFLKDDSIDNKVLTRSDKARGKSDNVPSEEVVKKMKNYWRQL | |
| | LNAKLITQRKFDNLTKAERGGLSELDKAGFIKRQLVETRQITKHVAQILDSRMNTKYDENDKLIREVKV | |
| | ITLKSKLVSDFRKDFQFYKVREINNYHHAHDAYLNAVVGTALIKKYPKLESEFVYGDYKVYDVRKMIAK | |
| | SEQEIGKATAKYFFYSNIMNFFKTEITLANGEIRKRPLIETNGETGEIVWDKGRDFATVRKVLSMPQVN | |
| | IVKKTEVQTGGFSKESILPKRNSDKLIARKKDWDPKKYGGFDSPTVAYSVLVVAKVEKGKSKKLKSVKE | |
| | LLGITIMERSSFEKNPIDFLEAKGYKEVKKDLIIKLPKYSLFELENGRKRMLASAGELQKGNELALPSK | |
| | YVNFLYLASHYEKLKGSPEDNEQKQLFVEQHKHYLDEIIEQISEFSKRVILADANLDKVLSAYNKHRDK | |
| | PIREQAENIIHLFTLTNLGAPAAFKYFDTTIDRKRYTSTKEVLDATLIHQSITGLYETRIDLSQLGGDA | |
| | EAAAKEAAAKEAAAKEAAAKALEAEAAAKEAAAKEAAAKEAAAKATAPLEEEYRLFLEAPIQNVTLLEQ | |
| | WKREIPKVWAEINPPGLASTQAPIHVQLLSTALPVRVRQYPITLEAKRSLRETIRKFRAAGILRPVHSP | |
| | WNTPLLPVRKSGTSEYRMVQDLREVNKRVETIHPTVPNPYTLLSLLPPDRIWYSVLDLKDAFFCIPLAP | |
| | ESQLIFAFEWADAEEGESGQLTWTRLPQGFKNSPTLFNEALNRDLQGFRLDHPSVSLLQYVDDLLIAAD | |
| | TQAACLSATRDLLMTLAELGYRVSGKKAQLCQEEVTYLGFKIHKGSRSLSNSRTQAILQIPVPKTKRQV | |
| | REFLGKIGYCRLFIPGFAELAQPLYAATRPGNDPLVWGEKEEEAFQSLKLALTQPPALALPSLDKPFQL | |
| | FVEETSGAAKGVLTQALGPWKRPVAYLSKRLDPVAAGWPRCLRAIAAAALLTREASKLTFGQDIEITSS | |
| | HNLESLLRSPPDKWLTNARITQYQVLLLDPPRVRFKQTAALNPATLLPETDDTLPIHHCLDTLDSLTST | |
| | RPDLTDQPLAQAEATLFTDGSSYIRDGKRYAGAAVVTLDSVIWAEPLPIGTSAQKAELIALTKALEWSK | |
| | DKSVNIYTDSRYAFATLHVHGMIYRERGWLTAGGKAIKNAPEILALLTAVWLPKRVAVMHCKGHQKDDA | |
| | PTSTGNRRADEVAREVAIRPLSTQATISGSSGSSGSSGSSGSSGSSMASNFTQFVLVDNGGTGDVTVAP | |
| | SNFANGIAEWISSNSRSQAYKVTCSVRQSSAQNRKYTIKVEVPKGAWRSYLNMELTIPIFATNSDCELI | |
| | VKAMQGLLKDGNPIPSAIAANSGIYGGSGGSMASNFTQFVLVDNGGTGDVTVAPSNFANGIAEWISSNS | |
| | RSQAYKVTCSVRQSSAQNRKYTIKVEVPKGAWRSYLNMELTIPIFATNSDCELIVKAMQGLLKDGNPIP | |
| | SAIAANSGIYGGGSGGGSGGGSGGGSMASNFTQFVLVDNGGTGDVTVAPSNFANGIAEWISSNSRSQAY | |
| | KVTCSVRQSSAQNRKYTIKVEVPKGAWRSYLNMELTIPIFATNSDCELIVKAMQGLLKDGNPIPSAIAA | |
| | NSGIYGGSGGSMASNFTQFVLVDNGGTGDVTVAPSNFANGIAEWISSNSRSQAYKVTCSVRQSSAQNRK | |
| | YTIKVEVPKGAWRSYLNMELTIPIFATNSDCELIVKAMQGLLKDGNPIPSAIAANSGIYKRTADGSEFE | |
| | SPKKKAKVE | |
| PL12094 | MPAAKRVKLDGGDKKYSIGLDIGTNSVGWAVITDEYKVPSKKFKVLGNTDRHSIKKNLIGALLFDSGET | 16,209 |
| | AEATRLKRTARRRYTRRKNRICYLQEIFSNEMAKVDDSFFHRLEESFLVEEDKKHERHPIFGNIVDEVA | |
| | YHEKYPTIYHLRKKLVDSTDKADLRLIYLALAHMIKFRGHFLIEGDLNPDNSDVDKLFIQLVQTYNQLF | |
| | EENPINASGVDAKAILSARLSKSRRLENLIAQLPGEKKNGLFGNLIALSLGLTPNFKSNFDLAEDAKLQ | |
| | LSKDTYDDDLDNLLAQIGDQYADLFLAAKNLSDAILLSDILRVNTEITKAPLSASMIKRYDEHHQDLTL | |
| | LKALVRQQLPEKYKEIFFDQSKNGYAGYIDGGASQEEFYKFIKPILEKMDGTEELLVKLNREDLLRKQR | |
| | TFDNGSIPHQIHLGELHAILRRQEDFYPFLKDNREKIEKILTFRIPYYVGPLARGNSRFAWMTRKSEET | |
| | ITPWNFEEVVDKGASAQSFIERMTNFDKNLPNEKVLPKHSLLYEYFTVYNELTKVKYVTEGMRKPAFLS | |
| | GEQKKAIVDLLFKTNRKVTVKQLKEDYFKKIECFDSVEISGVEDRFNASLGTYHDLLKIIKDKDFLDNE | |
| | ENEDILEDIVLTLTLFEDREMIEERLKTYAHLFDDKVMKQLKRRRYTGWGRLSRKLINGIRDKQSGKTI | |
| | LDFLKSDGFANRNFMQLIHDDSLTFKEDIQKAQVSGQGDSLHEHIANLAGSPAIKKGILQTVKVVDELV | |
| | KVMGRHKPENIVIEMARENQTTQKGQKNSRERMKRIEEGIKELGSQILKEHPVENTQLQNEKLYLYYLQ | |
| | NGRDMYVDQELDINRLSDYDVDHIVPQSFLKDDSIDNKVLTRSDKARGKSDNVPSEEVVKKMKNYWRQL | |
| | LNAKLITQRKFDNLTKAERGGLSELDKAGFIKRQLVETRQITKHVAQILDSRMNTKYDENDKLIREVKV | |
| | ITLKSKLVSDFRKDFQFYKVREINNYHHAHDAYLNAVVGTALIKKYPKLESEFVYGDYKVYDVRKMIAK | |
| | SEQEIGKATAKYFFYSNIMNFFKTEITLANGEIRKRPLIETNGETGEIVWDKGRDFATVRKVLSMPQVN | |
| | IVKKTEVQTGGFSKESILPKRNSDKLIARKKDWDPKKYGGFDSPTVAYSVLVVAKVEKGKSKKLKSVKE | |
| | LLGITIMERSSFEKNPIDFLEAKGYKEVKKDLIIKLPKYSLFELENGRKRMLASAGELQKGNELALPSK | |
| | YVNFLYLASHYEKLKGSPEDNEQKQLFVEQHKHYLDEIIEQISEFSKRVILADANLDKVLSAYNKHRDK | |
| | PIREQAENIIHLFTLTNLGAPAAFKYFDTTIDRKRYTSTKEVLDATLIHQSITGLYETRIDLSQLGGDA | |
| | EAAAKEAAAKEAAAKEAAAKALEAEAAAKEAAAKEAAAKEAAAKATAPLEEEYRLFLEAPIQNVTLLEQ | |
| | WKREIPKVWAEINPPGLASTQAPIHVQLLSTALPVRVRQYPITLEAKRSLRETIRKFRAAGILRPVHSP | |
| | WNTPLLPVRKSGTSEYRMVQDLREVNKRVETIHPTVPNPYTLLSLLPPDRIWYSVLDLKDAFFCIPLAP | |
| | ESQLIFAFEWADAEEGESGQLTWTRLPQGFKNSPTLFNEALNRDLQGFRLDHPSVSLLQYVDDLLIAAD | |
| | TQAACLSATRDLLMTLAELGYRVSGKKAQLCQEEVTYLGFKIHKGSRSLSNSRTQAILQIPVPKTKRQV | |
| | REFLGKIGYCRLFIPGFAELAQPLYAATRPGNDPLVWGEKEEEAFQSLKLALTQPPALALPSLDKPFQL | |
| | FVEETSGAAKGVLTQALGPWKRPVAYLSKRLDPVAAGWPRCLRAIAAAALLTREASKLTFGQDIEITSS | |
| | HNLESLLRSPPDKWLTNARITQYQVLLLDPPRVRFKQTAALNPATLLPETDDTLPIHHCLDTLDSLTST | |
| | RPDLTDQPLAQAEATLFTDGSSYIRDGKRYAGAAVVTLDSVIWAEPLPIGTSAQKAELIALTKALEWSK | |
| | DKSVNIYTDSRYAFATLHVHGMIYRERGWLTAGGKAIKNAPEILALLTAVWLPKRVAVMHCKGHQKDDA | |
| | PTSTGNRRADEVAREVAIRPLSTQATISGSSGGGEAAAKMASNFTQFVLVDNGGTGDVTVAPSNFANGI | |
| | AEWISSNSRSQAYKVTCSVRQSSAQNRKYTIKVEVPKGAWRSYLNMELTIPIFATNSDCELIVKAMQGL | |
| | LKDGNPIPSAIAANSGIYKRTADGSEFESPKKKAKVE | |
| PL12095 | MPAAKRVKLDGGDKKYSIGLDIGTNSVGWAVITDEYKVPSKKFKVLGNTDRHSIKKNLIGALLFDSGET | 16,210 |
| | AEATRLKRTARRRYTRRKNRICYLQEIFSNEMAKVDDSFFHRLEESFLVEEDKKHERHPIFGNIVDEVA | |
| | YHEKYPTIYHLRKKLVDSTDKADLRLIYLALAHMIKFRGHFLIEGDLNPDNSDVDKLFIQLVQTYNQLF | |
| | EENPINASGVDAKAILSARLSKSRRLENLIAQLPGEKKNGLFGNLIALSLGLTPNFKSNFDLAEDAKLQ | |
| | LSKDTYDDDLDNLLAQIGDQYADLFLAAKNLSDAILLSDILRVNTEITKAPLSASMIKRYDEHHQDLTL | |
| | LKALVRQQLPEKYKEIFFDQSKNGYAGYIDGGASQEEFYKFIKPILEKMDGTEELLVKLNREDLLRKQR | |
| | TFDNGSIPHQIHLGELHAILRRQEDFYPFLKDNREKIEKILTFRIPYYVGPLARGNSRFAWMTRKSEET | |
| | ITPWNFEEVVDKGASAQSFIERMTNFDKNLPNEKVLPKHSLLYEYFTVYNELTKVKYVTEGMRKPAFLS | |
| | GEQKKAIVDLLFKTNRKVTVKQLKEDYFKKIECFDSVEISGVEDRFNASLGTYHDLLKIIKDKDFLDNE | |
| | ENEDILEDIVLTLTLFEDREMIEERLKTYAHLFDDKVMKQLKRRRYTGWGRLSRKLINGIRDKQSGKTI | |
| | LDFLKSDGFANRNFMQLIHDDSLTFKEDIQKAQVSGQGDSLHEHIANLAGSPAIKKGILQTVKVVDELV | |
| | KVMGRHKPENIVIEMARENQTTQKGQKNSRERMKRIEEGIKELGSQILKEHPVENTQLQNEKLYLYYLQ | |
| | NGRDMYVDQELDINRLSDYDVDHIVPQSFLKDDSIDNKVLTRSDKARGKSDNVPSEEVVKKMKNYWRQL | |
| | LNAKLITQRKFDNLTKAERGGLSELDKAGFIKRQLVETRQITKHVAQILDSRMNTKYDENDKLIREVKV | |
| | ITLKSKLVSDFRKDFQFYKVREINNYHHAHDAYLNAVVGTALIKKYPKLESEFVYGDYKVYDVRKMIAK | |
| | SEQEIGKATAKYFFYSNIMNFFKTEITLANGEIRKRPLIETNGETGEIVWDKGRDFATVRKVLSMPQVN | |
| | IVKKTEVQTGGFSKESILPKRNSDKLIARKKDWDPKKYGGFDSPTVAYSVLVVAKVEKGKSKKLKSVKE | |
| | LLGITIMERSSFEKNPIDFLEAKGYKEVKKDLIIKLPKYSLFELENGRKRMLASAGELQKGNELALPSK | |
| | YVNFLYLASHYEKLKGSPEDNEQKQLFVEQHKHYLDEIIEQISEFSKRVILADANLDKVLSAYNKHRDK | |
| | PIREQAENIIHLFTLTNLGAPAAFKYFDTTIDRKRYTSTKEVLDATLIHQSITGLYETRIDLSQLGGDA | |
| | EAAAKEAAAKEAAAKEAAAKALEAEAAAKEAAAKEAAAKEAAAKATAPLEEEYRLFLEAPIQNVTLLEQ | |
| | WKREIPKVWAEINPPGLASTQAPIHVQLLSTALPVRVRQYPITLEAKRSLRETIRKFRAAGILRPVHSP | |
| | WNTPLLPVRKSGTSEYRMVQDLREVNKRVETIHPTVPNPYTLLSLLPPDRIWYSVLDLKDAFFCIPLAP | |
| | ESQLIFAFEWADAEEGESGQLTWTRLPQGFKNSPTLFNEALNRDLQGFRLDHPSVSLLQYVDDLLIAAD | |
| | TQAACLSATRDLLMTLAELGYRVSGKKAQLCQEEVTYLGFKIHKGSRSLSNSRTQAILQIPVPKTKRQV | |
| | REFLGKIGYCRLFIPGFAELAQPLYAATRPGNDPLVWGEKEEEAFQSLKLALTQPPALALPSLDKPFQL | |
| | FVEETSGAAKGVLTQALGPWKRPVAYLSKRLDPVAAGWPRCLRAIAAAALLTREASKLTFGQDIEITSS | |
| | HNLESLLRSPPDKWLTNARITQYQVLLLDPPRVRFKQTAALNPATLLPETDDTLPIHHCLDTLDSLTST | |
| | RPDLTDQPLAQAEATLFTDGSSYIRDGKRYAGAAVVTLDSVIWAEPLPIGTSAQKAELIALTKALEWSK | |
| | DKSVNIYTDSRYAFATLHVHGMIYRERGWLTAGGKAIKNAPEILALLTAVWLPKRVAVMHCKGHQKDDA | |
| | PTSTGNRRADEVAREVAIRPLSTQATISGSSGGGEAAAKMASNFTQFVLVDNGGTGDVTVAPSNFANGI | |
| | AEWISSNSRSQAYKVTCSVRQSSAQNRKYTIKVEVPKGAWRSYLNMELTIPIFATNSDCELIVKAMQGL | |
| | LKDGNPIPSAIAANSGIYGGSGGSMASNFTQFVLVDNGGTGDVTVAPSNFANGIAEWISSNSRSQAYKV | |
| | TCSVRQSSAQNRKYTIKVEVPKGAWRSYLNMELTIPIFATNSDCELIVKAMQGLLKDGNPIPSAIAANS | |
| | GIYKRTADGSEFESPKKKAKVE | |
| PL12096 | MPAAKRVKLDGGDKKYSIGLDIGTNSVGWAVITDEYKVPSKKFKVLGNTDRHSIKKNLIGALLFDSGET | 16,211 |
| | AEATRLKRTARRRYTRRKNRICYLQEIFSNEMAKVDDSFFHRLEESFLVEEDKKHERHPIFGNIVDEVA | |
| | YHEKYPTIYHLRKKLVDSTDKADLRLIYLALAHMIKFRGHFLIEGDLNPDNSDVDKLFIQLVQTYNQLF | |
| | EENPINASGVDAKAILSARLSKSRRLENLIAQLPGEKKNGLFGNLIALSLGLTPNFKSNFDLAEDAKLQ | |
| | LSKDTYDDDLDNLLAQIGDQYADLFLAAKNLSDAILLSDILRVNTEITKAPLSASMIKRYDEHHQDLTL | |
| | LKALVRQQLPEKYKEIFFDQSKNGYAGYIDGGASQEEFYKFIKPILEKMDGTEELLVKLNREDLLRKQR | |
| | TFDNGSIPHQIHLGELHAILRRQEDFYPFLKDNREKIEKILTFRIPYYVGPLARGNSRFAWMTRKSEET | |
| | ITPWNFEEVVDKGASAQSFIERMTNFDKNLPNEKVLPKHSLLYEYFTVYNELTKVKYVTEGMRKPAFLS | |
| | GEQKKAIVDLLFKTNRKVTVKQLKEDYFKKIECFDSVEISGVEDRFNASLGTYHDLLKIIKDKDFLDNE | |
| | ENEDILEDIVLTLTLFEDREMIEERLKTYAHLFDDKVMKQLKRRRYTGWGRLSRKLINGIRDKQSGKTI | |
| | LDFLKSDGFANRNFMQLIHDDSLTFKEDIQKAQVSGQGDSLHEHIANLAGSPAIKKGILQTVKVVDELV | |
| | KVMGRHKPENIVIEMARENQTTQKGQKNSRERMKRIEEGIKELGSQILKEHPVENTQLQNEKLYLYYLQ | |
| | NGRDMYVDQELDINRLSDYDVDHIVPQSFLKDDSIDNKVLTRSDKARGKSDNVPSEEVVKKMKNYWRQL | |
| | LNAKLITQRKFDNLTKAERGGLSELDKAGFIKRQLVETRQITKHVAQILDSRMNTKYDENDKLIREVKV | |
| | ITLKSKLVSDFRKDFQFYKVREINNYHHAHDAYLNAVVGTALIKKYPKLESEFVYGDYKVYDVRKMIAK | |
| | SEQEIGKATAKYFFYSNIMNFFKTEITLANGEIRKRPLIETNGETGEIVWDKGRDFATVRKVLSMPQVN | |
| | IVKKTEVQTGGFSKESILPKRNSDKLIARKKDWDPKKYGGFDSPTVAYSVLVVAKVEKGKSKKLKSVKE | |
| | LLGITIMERSSFEKNPIDFLEAKGYKEVKKDLIIKLPKYSLFELENGRKRMLASAGELQKGNELALPSK | |
| | YVNFLYLASHYEKLKGSPEDNEQKQLFVEQHKHYLDEIIEQISEFSKRVILADANLDKVLSAYNKHRDK | |
| | PIREQAENIIHLFTLTNLGAPAAFKYFDTTIDRKRYTSTKEVLDATLIHQSITGLYETRIDLSQLGGDA | |
| | EAAAKEAAAKEAAAKEAAAKALEAEAAAKEAAAKEAAAKEAAAKATAPLEEEYRLFLEAPIQNVTLLEQ | |
| | WKREIPKVWAEINPPGLASTQAPIHVQLLSTALPVRVRQYPITLEAKRSLRETIRKFRAAGILRPVHSP | |
| | WNTPLLPVRKSGTSEYRMVQDLREVNKRVETIHPTVPNPYTLLSLLPPDRIWYSVLDLKDAFFCIPLAP | |
| | ESQLIFAFEWADAEEGESGQLTWTRLPQGFKNSPTLFNEALNRDLQGFRLDHPSVSLLQYVDDLLIAAD | |
| | TQAACLSATRDLLMTLAELGYRVSGKKAQLCQEEVTYLGFKIHKGSRSLSNSRTQAILQIPVPKTKRQV | |
| | REFLGKIGYCRLFIPGFAELAQPLYAATRPGNDPLVWGEKEEEAFQSLKLALTQPPALALPSLDKPFQL | |
| | FVEETSGAAKGVLTQALGPWKRPVAYLSKRLDPVAAGWPRCLRAIAAAALLTREASKLTFGQDIEITSS | |
| | HNLESLLRSPPDKWLTNARITQYQVLLLDPPRVRFKQTAALNPATLLPETDDTLPIHHCLDTLDSLTST | |
| | RPDLTDQPLAQAEATLFTDGSSYIRDGKRYAGAAVVTLDSVIWAEPLPIGTSAQKAELIALTKALEWSK | |
| | DKSVNIYTDSRYAFATLHVHGMIYRERGWLTAGGKAIKNAPEILALLTAVWLPKRVAVMHCKGHQKDDA | |
| | PTSTGNRRADEVAREVAIRPLSTQATISGSSGGGEAAAKMASNFTQFVLVDNGGTGDVTVAPSNFANGI | |
| | AEWISSNSRSQAYKVTCSVRQSSAQNRKYTIKVEVPKGAWRSYLNMELTIPIFATNSDCELIVKAMQGL | |
| | LKDGNPIPSAIAANSGIYGGSGGSMASNFTQFVLVDNGGTGDVTVAPSNFANGIAEWISSNSRSQAYKV | |
| | TCSVRQSSAQNRKYTIKVEVPKGAWRSYLNMELTIPIFATNSDCELIVKAMQGLLKDGNPIPSAIAANS | |
| | GIYGGGSGGGSGGGSGGGSMASNFTQFVLVDNGGTGDVTVAPSNFANGIAEWISSNSRSQAYKVTCSVR | |
| | QSSAQNRKYTIKVEVPKGAWRSYLNMELTIPIFATNSDCELIVKAMQGLLKDGNPIPSAIAANSGIYGG | |
| | SGGSMASNFTQFVLVDNGGTGDVTVAPSNFANGIAEWISSNSRSQAYKVTCSVRQSSAQNRKYTIKVEV | |
| | PKGAWRSYLNMELTIPIFATNSDCELIVKAMQGLLKDGNPIPSAIAANSGIYKRTADGSEFESPKKKAK | |
| | VE | |
| PL12097 | MPAAKRVKLDGGDKKYSIGLDIGTNSVGWAVITDEYKVPSKKFKVLGNTDRHSIKKNLIGALLFDSGET | 16,212 |
| | AEATRLKRTARRRYTRRKNRICYLQEIFSNEMAKVDDSFFHRLEESFLVEEDKKHERHPIFGNIVDEVA | |
| | YHEKYPTIYHLRKKLVDSTDKADLRLIYLALAHMIKFRGHFLIEGDLNPDNSDVDKLFIQLVQTYNQLF | |
| | EENPINASGVDAKAILSARLSKSRRLENLIAQLPGEKKNGLFGNLIALSLGLTPNFKSNFDLAEDAKLQ | |
| | LSKDTYDDDLDNLLAQIGDQYADLFLAAKNLSDAILLSDILRVNTEITKAPLSASMIKRYDEHHQDLTL | |
| | LKALVRQQLPEKYKEIFFDQSKNGYAGYIDGGASQEEFYKFIKPILEKMDGTEELLVKLNREDLLRKQR | |
| | TFDNGSIPHQIHLGELHAILRRQEDFYPFLKDNREKIEKILTFRIPYYVGPLARGNSRFAWMTRKSEET | |
| | ITPWNFEEVVDKGASAQSFIERMTNFDKNLPNEKVLPKHSLLYEYFTVYNELTKVKYVTEGMRKPAFLS | |
| | GEQKKAIVDLLFKTNRKVTVKQLKEDYFKKIECFDSVEISGVEDRFNASLGTYHDLLKIIKDKDFLDNE | |
| | ENEDILEDIVLTLTLFEDREMIEERLKTYAHLFDDKVMKQLKRRRYTGWGRLSRKLINGIRDKQSGKTI | |
| | LDFLKSDGFANRNFMQLIHDDSLTFKEDIQKAQVSGQGDSLHEHIANLAGSPAIKKGILQTVKVVDELV | |
| | KVMGRHKPENIVIEMARENQTTQKGQKNSRERMKRIEEGIKELGSQILKEHPVENTQLQNEKLYLYYLQ | |
| | NGRDMYVDQELDINRLSDYDVDHIVPQSFLKDDSIDNKVLTRSDKARGKSDNVPSEEVVKKMKNYWRQL | |
| | LNAKLITQRKFDNLTKAERGGLSELDKAGFIKRQLVETRQITKHVAQILDSRMNTKYDENDKLIREVKV | |
| | ITLKSKLVSDFRKDFQFYKVREINNYHHAHDAYLNAVVGTALIKKYPKLESEFVYGDYKVYDVRKMIAK | |
| | SEQEIGKATAKYFFYSNIMNFFKTEITLANGEIRKRPLIETNGETGEIVWDKGRDFATVRKVLSMPQVN | |
| | IVKKTEVQTGGFSKESILPKRNSDKLIARKKDWDPKKYGGFDSPTVAYSVLVVAKVEKGKSKKLKSVKE | |
| | LLGITIMERSSFEKNPIDFLEAKGYKEVKKDLIIKLPKYSLFELENGRKRMLASAGELQKGNELALPSK | |
| | YVNFLYLASHYEKLKGSPEDNEQKQLFVEQHKHYLDEIIEQISEFSKRVILADANLDKVLSAYNKHRDK | |
| | PIREQAENIIHLFTLTNLGAPAAFKYFDTTIDRKRYTSTKEVLDATLIHQSITGLYETRIDLSQLGGDA | |
| | EAAAKEAAAKEAAAKEAAAKALEAEAAAKEAAAKEAAAKEAAAKATLNIEDEHRLHETSKEPDVSLGST | |
| | WLSDFPQAWAETGGMGLAVRQAPLIIPLKATSTPVSIKQYPMSQEARLGIKPHIQRLLDQGILVPCQSP | |
| | WNTPLLPVKKPGTNDYRPVQDLREVNKRVEDIHPTVPNPYNLLSGLPPSHQWYTVLDLKDAFFCLRLHP | |
| | TSQPLFAFEWRDPEMGISGQLTWTRLPQGFKNSPTLFNEALHRDLADFRIQHPDLILLQYVDDLLLAAT | |
| | SELDCQQGTRALLQTLGNLGYRASAKKAQICQKQVKYLGYLLKEGQRWLTEARKETVMGQPTPKTPRQL | |
| | REFLGKAGFCRLFIPGFAEMAAPLYPLTKPGTLFNWGPDQQKAYQEIKQALLTAPALGLPDLTKPFELF | |
| | VDEKQGYAKGVLTQKLGPWRRPVAYLSKKLDPVAAGWPPCLRMVAAIAVLTKDAGKLTMGQPLVILAPH | |
| | AVEALVKQPPDRWLSNARMTHYQALLLDTDRVQFGPVVALNPATLLPLPEEGLQHNCLDILAEAHGTRP | |
| | DLTDQPLPDADHTWYTDGSSLLQEGQRKAGAAVTTETEVIWAKALPAGTSAQRAELIALTQALKMAEGK | |
| | KLNVYTDSRYAFATAHIHGEIYRRRGWLTSEGKEIKNKDEILALLKALFLPKRLSIIHCPGHQKGHSAE | |
| | ARGNRMADQAARKAAITETPDTSTLLAEAAAKEAAAKEAAAKEAAAKALEAEAAAKEAAAKEAAAKEAA | |
| | AKAMASNFTQFVLVDNGGTGDVTVAPSNFANGIAEWISSNSRSQAYKVTCSVRQSSAQNRKYTIKVEVP | |
| | KGAWRSYLNMELTIPIFATNSDCELIVKAMQGLLKDGNPIPSAIAANSGIYKRTADGSEFESPKKKAKV | |
| | E | |
| PL12098 | MPAAKRVKLDGGDKKYSIGLDIGTNSVGWAVITDEYKVPSKKFKVLGNTDRHSIKKNLIGALLFDSGET | 16,213 |
| | AEATRLKRTARRRYTRRKNRICYLQEIFSNEMAKVDDSFFHRLEESFLVEEDKKHERHPIFGNIVDEVA | |
| | YHEKYPTIYHLRKKLVDSTDKADLRLIYLALAHMIKFRGHFLIEGDLNPDNSDVDKLFIQLVQTYNQLF | |
| | EENPINASGVDAKAILSARLSKSRRLENLIAQLPGEKKNGLFGNLIALSLGLTPNFKSNFDLAEDAKLQ | |
| | LSKDTYDDDLDNLLAQIGDQYADLFLAAKNLSDAILLSDILRVNTEITKAPLSASMIKRYDEHHQDLTL | |
| | LKALVRQQLPEKYKEIFFDQSKNGYAGYIDGGASQEEFYKFIKPILEKMDGTEELLVKLNREDLLRKQR | |
| | TFDNGSIPHQIHLGELHAILRRQEDFYPFLKDNREKIEKILTFRIPYYVGPLARGNSRFAWMTRKSEET | |
| | ITPWNFEEVVDKGASAQSFIERMTNFDKNLPNEKVLPKHSLLYEYFTVYNELTKVKYVTEGMRKPAFLS | |
| | GEQKKAIVDLLFKTNRKVTVKQLKEDYFKKIECFDSVEISGVEDRFNASLGTYHDLLKIIKDKDFLDNE | |
| | ENEDILEDIVLTLTLFEDREMIEERLKTYAHLFDDKVMKQLKRRRYTGWGRLSRKLINGIRDKQSGKTI | |
| | LDFLKSDGFANRNFMQLIHDDSLTFKEDIQKAQVSGQGDSLHEHIANLAGSPAIKKGILQTVKVVDELV | |
| | KVMGRHKPENIVIEMARENQTTQKGQKNSRERMKRIEEGIKELGSQILKEHPVENTQLQNEKLYLYYLQ | |
| | NGRDMYVDQELDINRLSDYDVDHIVPQSFLKDDSIDNKVLTRSDKARGKSDNVPSEEVVKKMKNYWRQL | |
| | LNAKLITQRKFDNLTKAERGGLSELDKAGFIKRQLVETRQITKHVAQILDSRMNTKYDENDKLIREVKV | |
| | ITLKSKLVSDFRKDFQFYKVREINNYHHAHDAYLNAVVGTALIKKYPKLESEFVYGDYKVYDVRKMIAK | |
| | SEQEIGKATAKYFFYSNIMNFFKTEITLANGEIRKRPLIETNGETGEIVWDKGRDFATVRKVLSMPQVN | |
| | IVKKTEVQTGGFSKESILPKRNSDKLIARKKDWDPKKYGGFDSPTVAYSVLVVAKVEKGKSKKLKSVKE | |
| | LLGITIMERSSFEKNPIDFLEAKGYKEVKKDLIIKLPKYSLFELENGRKRMLASAGELQKGNELALPSK | |
| | YVNFLYLASHYEKLKGSPEDNEQKQLFVEQHKHYLDEIIEQISEFSKRVILADANLDKVLSAYNKHRDK | |
| | PIREQAENIIHLFTLTNLGAPAAFKYFDTTIDRKRYTSTKEVLDATLIHQSITGLYETRIDLSQLGGDA | |
| | EAAAKEAAAKEAAAKEAAAKALEAEAAAKEAAAKEAAAKEAAAKATLNIEDEHRLHETSKEPDVSLGST | |
| | WLSDFPQAWAETGGMGLAVRQAPLIIPLKATSTPVSIKQYPMSQEARLGIKPHIQRLLDQGILVPCQSP | |
| | WNTPLLPVKKPGTNDYRPVQDLREVNKRVEDIHPTVPNPYNLLSGLPPSHQWYTVLDLKDAFFCLRLHP | |
| | TSQPLFAFEWRDPEMGISGQLTWTRLPQGFKNSPTLFNEALHRDLADFRIQHPDLILLQYVDDLLLAAT | |
| | SELDCQQGTRALLQTLGNLGYRASAKKAQICQKQVKYLGYLLKEGQRWLTEARKETVMGQPTPKTPRQL | |
| | REFLGKAGFCRLFIPGFAEMAAPLYPLTKPGTLFNWGPDQQKAYQEIKQALLTAPALGLPDLTKPFELF | |
| | VDEKQGYAKGVLTQKLGPWRRPVAYLSKKLDPVAAGWPPCLRMVAAIAVLTKDAGKLTMGQPLVILAPH | |
| | AVEALVKQPPDRWLSNARMTHYQALLLDTDRVQFGPVVALNPATLLPLPEEGLQHNCLDILAEAHGTRP | |
| | DLTDQPLPDADHTWYTDGSSLLQEGQRKAGAAVTTETEVIWAKALPAGTSAQRAELIALTQALKMAEGK | |
| | KLNVYTDSRYAFATAHIHGEIYRRRGWLTSEGKEIKNKDEILALLKALFLPKRLSIIHCPGHQKGHSAE | |
| | ARGNRMADQAARKAAITETPDTSTLLAEAAAKEAAAKEAAAKEAAAKALEAEAAAKEAAAKEAAAKEAA | |
| | AKAMASNFTQFVLVDNGGTGDVTVAPSNFANGIAEWISSNSRSQAYKVTCSVRQSSAQNRKYTIKVEVP | |
| | KGAWRSYLNMELTIPIFATNSDCELIVKAMQGLLKDGNPIPSAIAANSGIYGGSGGSMASNFTQFVLVD | |
| | NGGTGDVTVAPSNFANGIAEWISSNSRSQAYKVTCSVRQSSAQNRKYTIKVEVPKGAWRSYLNMELTIP | |
| | IFATNSDCELIVKAMQGLLKDGNPIPSAIAANSGIYKRTADGSEFESPKKKAKVE | |
| PL12099 | MPAAKRVKLDGGDKKYSIGLDIGTNSVGWAVITDEYKVPSKKFKVLGNTDRHSIKKNLIGALLFDSGET | 16,214 |
| | AEATRLKRTARRRYTRRKNRICYLQEIFSNEMAKVDDSFFHRLEESFLVEEDKKHERHPIFGNIVDEVA | |
| | YHEKYPTIYHLRKKLVDSTDKADLRLIYLALAHMIKFRGHFLIEGDLNPDNSDVDKLFIQLVQTYNQLF | |
| | EENPINASGVDAKAILSARLSKSRRLENLIAQLPGEKKNGLFGNLIALSLGLTPNFKSNFDLAEDAKLQ | |
| | LSKDTYDDDLDNLLAQIGDQYADLFLAAKNLSDAILLSDILRVNTEITKAPLSASMIKRYDEHHQDLTL | |
| | LKALVRQQLPEKYKEIFFDQSKNGYAGYIDGGASQEEFYKFIKPILEKMDGTEELLVKLNREDLLRKQR | |
| | TFDNGSIPHQIHLGELHAILRRQEDFYPFLKDNREKIEKILTFRIPYYVGPLARGNSRFAWMTRKSEET | |
| | ITPWNFEEVVDKGASAQSFIERMTNFDKNLPNEKVLPKHSLLYEYFTVYNELTKVKYVTEGMRKPAFLS | |
| | GEQKKAIVDLLFKTNRKVTVKQLKEDYFKKIECFDSVEISGVEDRFNASLGTYHDLLKIIKDKDFLDNE | |
| | ENEDILEDIVLTLTLFEDREMIEERLKTYAHLFDDKVMKQLKRRRYTGWGRLSRKLINGIRDKQSGKTI | |
| | LDFLKSDGFANRNFMQLIHDDSLTFKEDIQKAQVSGQGDSLHEHIANLAGSPAIKKGILQTVKVVDELV | |
| | KVMGRHKPENIVIEMARENQTTQKGQKNSRERMKRIEEGIKELGSQILKEHPVENTQLQNEKLYLYYLQ | |
| | NGRDMYVDQELDINRLSDYDVDHIVPQSFLKDDSIDNKVLTRSDKARGKSDNVPSEEVVKKMKNYWRQL | |
| | LNAKLITQRKFDNLTKAERGGLSELDKAGFIKRQLVETRQITKHVAQILDSRMNTKYDENDKLIREVKV | |
| | ITLKSKLVSDFRKDFQFYKVREINNYHHAHDAYLNAVVGTALIKKYPKLESEFVYGDYKVYDVRKMIAK | |
| | SEQEIGKATAKYFFYSNIMNFFKTEITLANGEIRKRPLIETNGETGEIVWDKGRDFATVRKVLSMPQVN | |
| | IVKKTEVQTGGFSKESILPKRNSDKLIARKKDWDPKKYGGFDSPTVAYSVLVVAKVEKGKSKKLKSVKE | |
| | LLGITIMERSSFEKNPIDFLEAKGYKEVKKDLIIKLPKYSLFELENGRKRMLASAGELQKGNELALPSK | |
| | YVNFLYLASHYEKLKGSPEDNEQKQLFVEQHKHYLDEIIEQISEFSKRVILADANLDKVLSAYNKHRDK | |
| | PIREQAENIIHLFTLTNLGAPAAFKYFDTTIDRKRYTSTKEVLDATLIHQSITGLYETRIDLSQLGGDA | |
| | EAAAKEAAAKEAAAKEAAAKALEAEAAAKEAAAKEAAAKEAAAKATLNIEDEHRLHETSKEPDVSLGST | |
| | WLSDFPQAWAETGGMGLAVRQAPLIIPLKATSTPVSIKQYPMSQEARLGIKPHIQRLLDQGILVPCQSP | |
| | WNTPLLPVKKPGTNDYRPVQDLREVNKRVEDIHPTVPNPYNLLSGLPPSHQWYTVLDLKDAFFCLRLHP | |
| | TSQPLFAFEWRDPEMGISGQLTWTRLPQGFKNSPTLFNEALHRDLADFRIQHPDLILLQYVDDLLLAAT | |
| | SELDCQQGTRALLQTLGNLGYRASAKKAQICQKQVKYLGYLLKEGQRWLTEARKETVMGQPTPKTPRQL | |
| | REFLGKAGFCRLFIPGFAEMAAPLYPLTKPGTLFNWGPDQQKAYQEIKQALLTAPALGLPDLTKPFELF | |
| | VDEKQGYAKGVLTQKLGPWRRPVAYLSKKLDPVAAGWPPCLRMVAAIAVLTKDAGKLTMGQPLVILAPH | |
| | AVEALVKQPPDRWLSNARMTHYQALLLDTDRVQFGPVVALNPATLLPLPEEGLQHNCLDILAEAHGTRP | |
| | DLTDQPLPDADHTWYTDGSSLLQEGQRKAGAAVTTETEVIWAKALPAGTSAQRAELIALTQALKMAEGK | |
| | KLNVYTDSRYAFATAHIHGEIYRRRGWLTSEGKEIKNKDEILALLKALFLPKRLSIIHCPGHQKGHSAE | |
| | ARGNRMADQAARKAAITETPDTSTLLAEAAAKEAAAKEAAAKEAAAKALEAEAAAKEAAAKEAAAKEAA | |
| | AKAMASNFTQFVLVDNGGTGDVTVAPSNFANGIAEWISSNSRSQAYKVTCSVRQSSAQNRKYTIKVEVP | |
| | KGAWRSYLNMELTIPIFATNSDCELIVKAMQGLLKDGNPIPSAIAANSGIYGGSGGSMASNFTQFVLVD | |
| | NGGTGDVTVAPSNFANGIAEWISSNSRSQAYKVTCSVRQSSAQNRKYTIKVEVPKGAWRSYLNMELTIP | |
| | IFATNSDCELIVKAMQGLLKDGNPIPSAIAANSGIYGGGSGGGSGGGSGGGSMASNFTQFVLVDNGGTG | |
| | DVTVAPSNFANGIAEWISSNSRSQAYKVTCSVRQSSAQNRKYTIKVEVPKGAWRSYLNMELTIPIFATN | |
| | SDCELIVKAMQGLLKDGNPIPSAIAANSGIYGGSGGSMASNFTQFVLVDNGGTGDVTVLNMELTIPIFA | |
| | APSNFANGIAEWISSNSRSQAYKVTCSVRQSSAQNRKYTIKVEVPKGAWRSYTNSDCELIVKAMQGLLK | |
| | DGNPIPSAIAANSGIYKRTADGSEFESPKKKAKVE | |
| PL12100 | MPAAKRVKLDGGDKKYSIGLDIGTNSVGWAVITDEYKVPSKKFKVLGNTDRHSIKKNLIGALLFDSGET | 16,215 |
| | AEATRLKRTARRRYTRRKNRICYLQEIFSNEMAKVDDSFFHRLEESFLVEEDKKHERHPIFGNIVDEVA | |
| | YHEKYPTIYHLRKKLVDSTDKADLRLIYLALAHMIKFRGHFLIEGDLNPDNSDVDKLFIQLVQTYNQLF | |
| | EENPINASGVDAKAILSARLSKSRRLENLIAQLPGEKKNGLFGNLIALSLGLTPNFKSNFDLAEDAKLQ | |
| | LSKDTYDDDLDNLLAQIGDQYADLFLAAKNLSDAILLSDILRVNTEITKAPLSASMIKRYDEHHQDLTL | |
| | LKALVRQQLPEKYKEIFFDQSKNGYAGYIDGGASQEEFYKFIKPILEKMDGTEELLVKLNREDLLRKQR | |
| | TFDNGSIPHQIHLGELHAILRRQEDFYPFLKDNREKIEKILTFRIPYYVGPLARGNSRFAWMTRKSEET | |
| | ITPWNFEEVVDKGASAQSFIERMTNFDKNLPNEKVLPKHSLLYEYFTVYNELTKVKYVTEGMRKPAFLS | |
| | GEQKKAIVDLLFKTNRKVTVKQLKEDYFKKIECFDSVEISGVEDRFNASLGTYHDLLKIIKDKDFLDNE | |
| | ENEDILEDIVLTLTLFEDREMIEERLKTYAHLFDDKVMKQLKRRRYTGWGRLSRKLINGIRDKQSGKTI | |
| | LDFLKSDGFANRNFMQLIHDDSLTFKEDIQKAQVSGQGDSLHEHIANLAGSPAIKKGILQTVKVVDELV | |
| | KVMGRHKPENIVIEMARENQTTQKGQKNSRERMKRIEEGIKELGSQILKEHPVENTQLQNEKLYLYYLQ | |
| | NGRDMYVDQELDINRLSDYDVDHIVPQSFLKDDSIDNKVLTRSDKARGKSDNVPSEEVVKKMKNYWRQL | |
| | LNAKLITQRKFDNLTKAERGGLSELDKAGFIKRQLVETRQITKHVAQILDSRMNTKYDENDKLIREVKV | |
| | ITLKSKLVSDFRKDFQFYKVREINNYHHAHDAYLNAVVGTALIKKYPKLESEFVYGDYKVYDVRKMIAK | |
| | SEQEIGKATAKYFFYSNIMNFFKTEITLANGEIRKRPLIETNGETGEIVWDKGRDFATVRKVLSMPQVN | |
| | IVKKTEVQTGGFSKESILPKRNSDKLIARKKDWDPKKYGGFDSPTVAYSVLVVAKVEKGKSKKLKSVKE | |
| | LLGITIMERSSFEKNPIDFLEAKGYKEVKKDLIIKLPKYSLFELENGRKRMLASAGELQKGNELALPSK | |
| | YVNFLYLASHYEKLKGSPEDNEQKQLFVEQHKHYLDEIIEQISEFSKRVILADANLDKVLSAYNKHRDK | |
| | PIREQAENIIHLFTLTNLGAPAAFKYFDTTIDRKRYTSTKEVLDATLIHQSITGLYETRIDLSQLGGDA | |
| | EAAAKEAAAKEAAAKEAAAKALEAEAAAKEAAAKEAAAKEAAAKATLNIEDEHRLHETSKEPDVSLGST | |
| | WLSDFPQAWAETGGMGLAVRQAPLIIPLKATSTPVSIKQYPMSQEARLGIKPHIQRLLDQGILVPCQSP | |
| | WNTPLLPVKKPGTNDYRPVQDLREVNKRVEDIHPTVPNPYNLLSGLPPSHQWYTVLDLKDAFFCLRLHP | |
| | TSQPLFAFEWRDPEMGISGQLTWTRLPQGFKNSPTLFNEALHRDLADFRIQHPDLILLQYVDDLLLAAT | |
| | SELDCQQGTRALLQTLGNLGYRASAKKAQICQKQVKYLGYLLKEGQRWLTEARKETVMGQPTPKTPRQL | |
| | REFLGKAGFCRLFIPGFAEMAAPLYPLTKPGTLFNWGPDQQKAYQEIKQALLTAPALGLPDLTKPFELF | |
| | VDEKQGYAKGVLTQKLGPWRRPVAYLSKKLDPVAAGWPPCLRMVAAIAVLTKDAGKLTMGQPLVILAPH | |
| | AVEALVKQPPDRWLSNARMTHYQALLLDTDRVQFGPVVALNPATLLPLPEEGLQHNCLDILAEAHGTRP | |
| | DLTDQPLPDADHTWYTDGSSLLQEGQRKAGAAVTTETEVIWAKALPAGTSAQRAELIALTQALKMAEGK | |
| | KLNVYTDSRYAFATAHIHGEIYRRRGWLTSEGKEIKNKDEILALLKALFLPKRLSIIHCPGHQKGHSAE | |
| | ARGNRMADQAARKAAITETPDTSTLLSGGSSGGSSGSETPGTSESATPESSGGSSGGSSMASNFTQFVL | |
| | VDNGGTGDVTVAPSNFANGIAEWISSNSRSQAYKVTCSVRQSSAQNRKYTIKVEVPKGAWRSYLNMELT | |
| | IPIFATNSDCELIVKAMQGLLKDGNPIPSAIAANSGIYKRTADGSEFESPKKKAKVE | |
| PL12101 | MPAAKRVKLDGGDKKYSIGLDIGTNSVGWAVITDEYKVPSKKFKVLGNTDRHSIKKNLIGALLFDSGET | 16,216 |
| | AEATRLKRTARRRYTRRKNRICYLQEIFSNEMAKVDDSFFHRLEESFLVEEDKKHERHPIFGNIVDEVA | |
| | YHEKYPTIYHLRKKLVDSTDKADLRLIYLALAHMIKFRGHFLIEGDLNPDNSDVDKLFIQLVQTYNQLF | |
| | EENPINASGVDAKAILSARLSKSRRLENLIAQLPGEKKNGLFGNLIALSLGLTPNFKSNFDLAEDAKLQ | |
| | LSKDTYDDDLDNLLAQIGDQYADLFLAAKNLSDAILLSDILRVNTEITKAPLSASMIKRYDEHHQDLTL | |
| | LKALVRQQLPEKYKEIFFDQSKNGYAGYIDGGASQEEFYKFIKPILEKMDGTEELLVKLNREDLLRKQR | |
| | TFDNGSIPHQIHLGELHAILRRQEDFYPFLKDNREKIEKILTFRIPYYVGPLARGNSRFAWMTRKSEET | |
| | ITPWNFEEVVDKGASAQSFIERMTNFDKNLPNEKVLPKHSLLYEYFTVYNELTKVKYVTEGMRKPAFLS | |
| | GEQKKAIVDLLFKTNRKVTVKQLKEDYFKKIECFDSVEISGVEDRFNASLGTYHDLLKIIKDKDFLDNE | |
| | ENEDILEDIVLTLTLFEDREMIEERLKTYAHLFDDKVMKQLKRRRYTGWGRLSRKLINGIRDKQSGKTI | |
| | LDFLKSDGFANRNFMQLIHDDSLTFKEDIQKAQVSGQGDSLHEHIANLAGSPAIKKGILQTVKVVDELV | |
| | KVMGRHKPENIVIEMARENQTTQKGQKNSRERMKRIEEGIKELGSQILKEHPVENTQLQNEKLYLYYLQ | |
| | NGRDMYVDQELDINRLSDYDVDHIVPQSFLKDDSIDNKVLTRSDKARGKSDNVPSEEVVKKMKNYWRQL | |
| | LNAKLITQRKFDNLTKAERGGLSELDKAGFIKRQLVETRQITKHVAQILDSRMNTKYDENDKLIREVKV | |
| | ITLKSKLVSDFRKDFQFYKVREINNYHHAHDAYLNAVVGTALIKKYPKLESEFVYGDYKVYDVRKMIAK | |
| | SEQEIGKATAKYFFYSNIMNFFKTEITLANGEIRKRPLIETNGETGEIVWDKGRDFATVRKVLSMPQVN | |
| | IVKKTEVQTGGFSKESILPKRNSDKLIARKKDWDPKKYGGFDSPTVAYSVLVVAKVEKGKSKKLKSVKE | |
| | LLGITIMERSSFEKNPIDFLEAKGYKEVKKDLIIKLPKYSLFELENGRKRMLASAGELQKGNELALPSK | |
| | YVNFLYLASHYEKLKGSPEDNEQKQLFVEQHKHYLDEIIEQISEFSKRVILADANLDKVLSAYNKHRDK | |
| | PIREQAENIIHLFTLTNLGAPAAFKYFDTTIDRKRYTSTKEVLDATLIHQSITGLYETRIDLSQLGGDA | |
| | EAAAKEAAAKEAAAKEAAAKALEAEAAAKEAAAKEAAAKEAAAKATLNIEDEHRLHETSKEPDVSLGST | |
| | WLSDFPQAWAETGGMGLAVRQAPLIIPLKATSTPVSIKQYPMSQEARLGIKPHIQRLLDQGILVPCQSP | |
| | WNTPLLPVKKPGTNDYRPVQDLREVNKRVEDIHPTVPNPYNLLSGLPPSHQWYTVLDLKDAFFCLRLHP | |
| | TSQPLFAFEWRDPEMGISGQLTWTRLPQGFKNSPTLFNEALHRDLADFRIQHPDLILLQYVDDLLLAAT | |
| | SELDCQQGTRALLQTLGNLGYRASAKKAQICQKQVKYLGYLLKEGQRWLTEARKETVMGQPTPKTPRQL | |
| | REFLGKAGFCRLFIPGFAEMAAPLYPLTKPGTLFNWGPDQQKAYQEIKQALLTAPALGLPDLTKPFELF | |
| | VDEKQGYAKGVLTQKLGPWRRPVAYLSKKLDPVAAGWPPCLRMVAAIAVLTKDAGKLTMGQPLVILAPH | |
| | AVEALVKQPPDRWLSNARMTHYQALLLDTDRVQFGPVVALNPATLLPLPEEGLQHNCLDILAEAHGTRP | |
| | DLTDQPLPDADHTWYTDGSSLLQEGQRKAGAAVTTETEVIWAKALPAGTSAQRAELIALTQALKMAEGK | |
| | KLNVYTDSRYAFATAHIHGEIYRRRGWLTSEGKEIKNKDEILALLKALFLPKRLSIIHCPGHQKGHSAE | |
| | ARGNRMADQAARKAAITETPDTSTLLSGGSSGGSSGSETPGTSESATPESSGGSSGGSSMASNFTQFVL | |
| | VDNGGTGDVTVAPSNFANGIAEWISSNSRSQAYKVTCSVRQSSAQNRKYTIKVEVPKGAWRSYLNMELT | |
| | IPIFATNSDCELIVKAMQGLLKDGNPIPSAIAANSGIYGGSGGSMASNFTQFVLVDNGGTGDVTVAPSN | |
| | FANGIAEWISSNSRSQAYKVTCSVRQSSAQNRKYTIKVEVPKGAWRSYLNMELTIPIFATNSDCELIVK | |
| | AMQGLLKDGNPIPSAIAANSGIYKRTADGSEFESPKKKAKVE | |
| PL12102 | MPAAKRVKLDGGDKKYSIGLDIGTNSVGWAVITDEYKVPSKKFKVLGNTDRHSIKKNLIGALLFDSGET | 16,217 |
| | AEATRLKRTARRRYTRRKNRICYLQEIFSNEMAKVDDSFFHRLEESFLVEEDKKHERHPIFGNIVDEVA | |
| | YHEKYPTIYHLRKKLVDSTDKADLRLIYLALAHMIKFRGHFLIEGDLNPDNSDVDKLFIQLVQTYNQLF | |
| | EENPINASGVDAKAILSARLSKSRRLENLIAQLPGEKKNGLFGNLIALSLGLTPNFKSNFDLAEDAKLQ | |
| | LSKDTYDDDLDNLLAQIGDQYADLFLAAKNLSDAILLSDILRVNTEITKAPLSASMIKRYDEHHQDLTL | |
| | LKALVRQQLPEKYKEIFFDQSKNGYAGYIDGGASQEEFYKFIKPILEKMDGTEELLVKLNREDLLRKQR | |
| | TFDNGSIPHQIHLGELHAILRRQEDFYPFLKDNREKIEKILTFRIPYYVGPLARGNSRFAWMTRKSEET | |
| | ITPWNFEEVVDKGASAQSFIERMTNFDKNLPNEKVLPKHSLLYEYFTVYNELTKVKYVTEGMRKPAFLS | |
| | GEQKKAIVDLLFKTNRKVTVKQLKEDYFKKIECFDSVEISGVEDRFNASLGTYHDLLKIIKDKDFLDNE | |
| | ENEDILEDIVLTLTLFEDREMIEERLKTYAHLFDDKVMKQLKRRRYTGWGRLSRKLINGIRDKQSGKTI | |
| | LDFLKSDGFANRNFMQLIHDDSLTFKEDIQKAQVSGQGDSLHEHIANLAGSPAIKKGILQTVKVVDELV | |
| | KVMGRHKPENIVIEMARENQTTQKGQKNSRERMKRIEEGIKELGSQILKEHPVENTQLQNEKLYLYYLQ | |
| | NGRDMYVDQELDINRLSDYDVDHIVPQSFLKDDSIDNKVLTRSDKARGKSDNVPSEEVVKKMKNYWRQL | |
| | LNAKLITQRKFDNLTKAERGGLSELDKAGFIKRQLVETRQITKHVAQILDSRMNTKYDENDKLIREVKV | |
| | ITLKSKLVSDFRKDFQFYKVREINNYHHAHDAYLNAVVGTALIKKYPKLESEFVYGDYKVYDVRKMIAK | |
| | SEQEIGKATAKYFFYSNIMNFFKTEITLANGEIRKRPLIETNGETGEIVWDKGRDFATVRKVLSMPQVN | |
| | IVKKTEVQTGGFSKESILPKRNSDKLIARKKDWDPKKYGGFDSPTVAYSVLVVAKVEKGKSKKLKSVKE | |
| | LLGITIMERSSFEKNPIDFLEAKGYKEVKKDLIIKLPKYSLFELENGRKRMLASAGELQKGNELALPSK | |
| | YVNFLYLASHYEKLKGSPEDNEQKQLFVEQHKHYLDEIIEQISEFSKRVILADANLDKVLSAYNKHRDK | |
| | PIREQAENIIHLFTLTNLGAPAAFKYFDTTIDRKRYTSTKEVLDATLIHQSITGLYETRIDLSQLGGDA | |
| | EAAAKEAAAKEAAAKEAAAKALEAEAAAKEAAAKEAAAKEAAAKATLNIEDEHRLHETSKEPDVSLGST | |
| | WLSDFPQAWAETGGMGLAVRQAPLIIPLKATSTPVSIKQYPMSQEARLGIKPHIQRLLDQGILVPCQSP | |
| | WNTPLLPVKKPGTNDYRPVQDLREVNKRVEDIHPTVPNPYNLLSGLPPSHQWYTVLDLKDAFFCLRLHP | |
| | TSQPLFAFEWRDPEMGISGQLTWTRLPQGFKNSPTLFNEALHRDLADFRIQHPDLILLQYVDDLLLAAT | |
| | SELDCQQGTRALLQTLGNLGYRASAKKAQICQKQVKYLGYLLKEGQRWLTEARKETVMGQPTPKTPRQL | |
| | REFLGKAGFCRLFIPGFAEMAAPLYPLTKPGTLFNWGPDQQKAYQEIKQALLTAPALGLPDLTKPFELF | |
| | VDEKQGYAKGVLTQKLGPWRRPVAYLSKKLDPVAAGWPPCLRMVAAIAVLTKDAGKLTMGQPLVILAPH | |
| | AVEALVKQPPDRWLSNARMTHYQALLLDTDRVQFGPVVALNPATLLPLPEEGLQHNCLDILAEAHGTRP | |
| | DLTDQPLPDADHTWYTDGSSLLQEGQRKAGAAVTTETEVIWAKALPAGTSAQRAELIALTQALKMAEGK | |
| | KLNVYTDSRYAFATAHIHGEIYRRRGWLTSEGKEIKNKDEILALLKALFLPKRLSIIHCPGHQKGHSAE | |
| | ARGNRMADQAARKAAITETPDTSTLLSGGSSGGSSGSETPGTSESATPESSGGSSGGSSMASNFTQFVL | |
| | VDNGGTGDVTVAPSNFANGIAEWISSNSRSQAYKVTCSVRQSSAQNRKYTIKVEVPKGAWRSYLNMELT | |
| | IPIFATNSDCELIVKAMQGLLKDGNPIPSAIAANSGIYGGSGGSMASNFTQFVLVDNGGTGDVTVAPSN | |
| | FANGIAEWISSNSRSQAYKVTCSVRQSSAQNRKYTIKVEVPKGAWRSYLNMELTIPIFATNSDCELIVK | |
| | AMQGLLKDGNPIPSAIAANSGIYGGGSGGGSGGGSGGGSMASNFTQFVLVDNGGTGDVTVAPSNFANGI | |
| | AEWISSNSRSQAYKVTCSVRQSSAQNRKYTIKVEVPKGAWRSYLNMELTIPIFATNSDCELIVKAMQGL | |
| | LKDGNPIPSAIAANSGIYGGSGGSMASNFTQFVLVDNGGTGDVTVAPSNFANGIAEWISSNSRSQAYKV | |
| | TCSVRQSSAQNRKYTIKVEVPKGAWRSYLNMELTIPIFATNSDCELIVKAMQGLLKDGNPIPSAIAANS | |
| | GIYKRTADGSEFESPKKKAKVE | |
| PL12103 | MPAAKRVKLDGGDKKYSIGLDIGTNSVGWAVITDEYKVPSKKFKVLGNTDRHSIKKNLIGALLFDSGET | 16,218 |
| | AEATRLKRTARRRYTRRKNRICYLQEIFSNEMAKVDDSFFHRLEESFLVEEDKKHERHPIFGNIVDEVA | |
| | YHEKYPTIYHLRKKLVDSTDKADLRLIYLALAHMIKFRGHFLIEGDLNPDNSDVDKLFIQLVQTYNQLF | |
| | EENPINASGVDAKAILSARLSKSRRLENLIAQLPGEKKNGLFGNLIALSLGLTPNFKSNFDLAEDAKLQ | |
| | LSKDTYDDDLDNLLAQIGDQYADLFLAAKNLSDAILLSDILRVNTEITKAPLSASMIKRYDEHHQDLTL | |
| | LKALVRQQLPEKYKEIFFDQSKNGYAGYIDGGASQEEFYKFIKPILEKMDGTEELLVKLNREDLLRKQR | |
| | TFDNGSIPHQIHLGELHAILRRQEDFYPFLKDNREKIEKILTFRIPYYVGPLARGNSRFAWMTRKSEET | |
| | ITPWNFEEVVDKGASAQSFIERMTNFDKNLPNEKVLPKHSLLYEYFTVYNELTKVKYVTEGMRKPAFLS | |
| | GEQKKAIVDLLFKTNRKVTVKQLKEDYFKKIECFDSVEISGVEDRFNASLGTYHDLLKIIKDKDFLDNE | |
| | ENEDILEDIVLTLTLFEDREMIEERLKTYAHLFDDKVMKQLKRRRYTGWGRLSRKLINGIRDKQSGKTI | |
| | LDFLKSDGFANRNFMQLIHDDSLTFKEDIQKAQVSGQGDSLHEHIANLAGSPAIKKGILQTVKVVDELV | |
| | KVMGRHKPENIVIEMARENQTTQKGQKNSRERMKRIEEGIKELGSQILKEHPVENTQLQNEKLYLYYLQ | |
| | NGRDMYVDQELDINRLSDYDVDHIVPQSFLKDDSIDNKVLTRSDKARGKSDNVPSEEVVKKMKNYWRQL | |
| | LNAKLITQRKFDNLTKAERGGLSELDKAGFIKRQLVETRQITKHVAQILDSRMNTKYDENDKLIREVKV | |
| | ITLKSKLVSDFRKDFQFYKVREINNYHHAHDAYLNAVVGTALIKKYPKLESEFVYGDYKVYDVRKMIAK | |
| | SEQEIGKATAKYFFYSNIMNFFKTEITLANGEIRKRPLIETNGETGEIVWDKGRDFATVRKVLSMPQVN | |
| | IVKKTEVQTGGFSKESILPKRNSDKLIARKKDWDPKKYGGFDSPTVAYSVLVVAKVEKGKSKKLKSVKE | |
| | LLGITIMERSSFEKNPIDFLEAKGYKEVKKDLIIKLPKYSLFELENGRKRMLASAGELQKGNELALPSK | |
| | YVNFLYLASHYEKLKGSPEDNEQKQLFVEQHKHYLDEIIEQISEFSKRVILADANLDKVLSAYNKHRDK | |
| | PIREQAENIIHLFTLTNLGAPAAFKYFDTTIDRKRYTSTKEVLDATLIHQSITGLYETRIDLSQLGGDA | |
| | EAAAKEAAAKEAAAKEAAAKALEAEAAAKEAAAKEAAAKEAAAKATLNIEDEHRLHETSKEPDVSLGST | |
| | WLSDFPQAWAETGGMGLAVRQAPLIIPLKATSTPVSIKQYPMSQEARLGIKPHIQRLLDQGILVPCQSP | |
| | WNTPLLPVKKPGTNDYRPVQDLREVNKRVEDIHPTVPNPYNLLSGLPPSHQWYTVLDLKDAFFCLRLHP | |
| | TSQPLFAFEWRDPEMGISGQLTWTRLPQGFKNSPTLFNEALHRDLADFRIQHPDLILLQYVDDLLLAAT | |
| | SELDCQQGTRALLQTLGNLGYRASAKKAQICQKQVKYLGYLLKEGQRWLTEARKETVMGQPTPKTPRQL | |
| | REFLGKAGFCRLFIPGFAEMAAPLYPLTKPGTLFNWGPDQQKAYQEIKQALLTAPALGLPDLTKPFELF | |
| | VDEKQGYAKGVLTQKLGPWRRPVAYLSKKLDPVAAGWPPCLRMVAAIAVLTKDAGKLTMGQPLVILAPH | |
| | AVEALVKQPPDRWLSNARMTHYQALLLDTDRVQFGPVVALNPATLLPLPEEGLQHNCLDILAEAHGTRP | |
| | DLTDQPLPDADHTWYTDGSSLLQEGQRKAGAAVTTETEVIWAKALPAGTSAQRAELIALTQALKMAEGK | |
| | KLNVYTDSRYAFATAHIHGEIYRRRGWLTSEGKEIKNKDEILALLKALFLPKRLSIIHCPGHQKGHSAE | |
| | ARGNRMADQAARKAAITETPDTSTLLGSSGSSGSSGSSGSSGSSMASNFTQFVLVDNGGTGDVTVAPSN | |
| | FANGIAEWISSNSRSQAYKVTCSVRQSSAQNRKYTIKVEVPKGAWRSYLNMELTIPIFATNSDCELIVK | |
| | AMQGLLKDGNPIPSAIAANSGIYKRTADGSEFESPKKKAKVE | |
| PL12104 | MPAAKRVKLDGGDKKYSIGLDIGTNSVGWAVITDEYKVPSKKFKVLGNTDRHSIKKNLIGALLFDSGET | 16,219 |
| | AEATRLKRTARRRYTRRKNRICYLQEIFSNEMAKVDDSFFHRLEESFLVEEDKKHERHPIFGNIVDEVA | |
| | YHEKYPTIYHLRKKLVDSTDKADLRLIYLALAHMIKFRGHFLIEGDLNPDNSDVDKLFIQLVQTYNQLF | |
| | EENPINASGVDAKAILSARLSKSRRLENLIAQLPGEKKNGLFGNLIALSLGLTPNFKSNFDLAEDAKLQ | |
| | LSKDTYDDDLDNLLAQIGDQYADLFLAAKNLSDAILLSDILRVNTEITKAPLSASMIKRYDEHHQDLTL | |
| | LKALVRQQLPEKYKEIFFDQSKNGYAGYIDGGASQEEFYKFIKPILEKMDGTEELLVKLNREDLLRKQR | |
| | TFDNGSIPHQIHLGELHAILRRQEDFYPFLKDNREKIEKILTFRIPYYVGPLARGNSRFAWMTRKSEET | |
| | ITPWNFEEVVDKGASAQSFIERMTNFDKNLPNEKVLPKHSLLYEYFTVYNELTKVKYVTEGMRKPAFLS | |
| | GEQKKAIVDLLFKTNRKVTVKQLKEDYFKKIECFDSVEISGVEDRFNASLGTYHDLLKIIKDKDFLDNE | |
| | ENEDILEDIVLTLTLFEDREMIEERLKTYAHLFDDKVMKQLKRRRYTGWGRLSRKLINGIRDKQSGKTI | |
| | LDFLKSDGFANRNFMQLIHDDSLTFKEDIQKAQVSGQGDSLHEHIANLAGSPAIKKGILQTVKVVDELV | |
| | KVMGRHKPENIVIEMARENQTTQKGQKNSRERMKRIEEGIKELGSQILKEHPVENTQLQNEKLYLYYLQ | |
| | NGRDMYVDQELDINRLSDYDVDHIVPQSFLKDDSIDNKVLTRSDKARGKSDNVPSEEVVKKMKNYWRQL | |
| | LNAKLITQRKFDNLTKAERGGLSELDKAGFIKRQLVETRQITKHVAQILDSRMNTKYDENDKLIREVKV | |
| | ITLKSKLVSDFRKDFQFYKVREINNYHHAHDAYLNAVVGTALIKKYPKLESEFVYGDYKVYDVRKMIAK | |
| | SEQEIGKATAKYFFYSNIMNFFKTEITLANGEIRKRPLIETNGETGEIVWDKGRDFATVRKVLSMPQVN | |
| | IVKKTEVQTGGFSKESILPKRNSDKLIARKKDWDPKKYGGFDSPTVAYSVLVVAKVEKGKSKKLKSVKE | |
| | LLGITIMERSSFEKNPIDFLEAKGYKEVKKDLIIKLPKYSLFELENGRKRMLASAGELQKGNELALPSK | |
| | YVNFLYLASHYEKLKGSPEDNEQKQLFVEQHKHYLDEIIEQISEFSKRVILADANLDKVLSAYNKHRDK | |
| | PIREQAENIIHLFTLTNLGAPAAFKYFDTTIDRKRYTSTKEVLDATLIHQSITGLYETRIDLSQLGGDA | |
| | EAAAKEAAAKEAAAKEAAAKALEAEAAAKEAAAKEAAAKEAAAKATLNIEDEHRLHETSKEPDVSLGST | |
| | WLSDFPQAWAETGGMGLAVRQAPLIIPLKATSTPVSIKQYPMSQEARLGIKPHIQRLLDQGILVPCQSP | |
| | WNTPLLPVKKPGTNDYRPVQDLREVNKRVEDIHPTVPNPYNLLSGLPPSHQWYTVLDLKDAFFCLRLHP | |
| | TSQPLFAFEWRDPEMGISGQLTWTRLPQGFKNSPTLFNEALHRDLADFRIQHPDLILLQYVDDLLLAAT | |
| | SELDCQQGTRALLQTLGNLGYRASAKKAQICQKQVKYLGYLLKEGQRWLTEARKETVMGQPTPKTPRQL | |
| | REFLGKAGFCRLFIPGFAEMAAPLYPLTKPGTLFNWGPDQQKAYQEIKQALLTAPALGLPDLTKPFELF | |
| | VDEKQGYAKGVLTQKLGPWRRPVAYLSKKLDPVAAGWPPCLRMVAAIAVLTKDAGKLTMGQPLVILAPH | |
| | AVEALVKQPPDRWLSNARMTHYQALLLDTDRVQFGPVVALNPATLLPLPEEGLQHNCLDILAEAHGTRP | |
| | DLTDQPLPDADHTWYTDGSSLLQEGQRKAGAAVTTETEVIWAKALPAGTSAQRAELIALTQALKMAEGK | |
| | KLNVYTDSRYAFATAHIHGEIYRRRGWLTSEGKEIKNKDEILALLKALFLPKRLSIIHCPGHQKGHSAE | |
| | ARGNRMADQAARKAAITETPDTSTLLGSSGSSGSSGSSGSSGSSMASNFTQFVLVDNGGTGDVTVAPSN | |
| | FANGIAEWISSNSRSQAYKVTCSVRQSSAQNRKYTIKVEVPKGAWRSYLNMELTIPIFATNSDCELIVK | |
| | AMQGLLKDGNPIPSAIAANSGIYGGSGGSMASNFTQFVLVDNGGTGDVTVAPSNFANGIAEWISSNSRS | |
| | QAYKVTCSVRQSSAQNRKYTIKVEVPKGAWRSYLNMELTIPIFATNSDCELIVKAMQGLLKDGNPIP | |
| | IAANSGIYKRTADGSEFESPKKKAKVESA | |
| PL12105 | MPAAKRVKLDGGDKKYSIGLDIGTNSVGWAVITDEYKVPSKKFKVLGNTDRHSIKKNLIGALLFDSGET | 16,220 |
| | AEATRLKRTARRRYTRRKNRICYLQEIFSNEMAKVDDSFFHRLEESFLVEEDKKHERHPIFGNIVDEVA | |
| | YHEKYPTIYHLRKKLVDSTDKADLRLIYLALAHMIKFRGHFLIEGDLNPDNSDVDKLFIQLVQTYNQLF | |
| | EENPINASGVDAKAILSARLSKSRRLENLIAQLPGEKKNGLFGNLIALSLGLTPNFKSNFDLAEDAKLQ | |
| | LSKDTYDDDLDNLLAQIGDQYADLFLAAKNLSDAILLSDILRVNTEITKAPLSASMIKRYDEHHQDLTL | |
| | LKALVRQQLPEKYKEIFFDQSKNGYAGYIDGGASQEEFYKFIKPILEKMDGTEELLVKLNREDLLRKQR | |
| | TFDNGSIPHQIHLGELHAILRRQEDFYPFLKDNREKIEKILTFRIPYYVGPLARGNSRFAWMTRKSEET | |
| | ITPWNFEEVVDKGASAQSFIERMTNFDKNLPNEKVLPKHSLLYEYFTVYNELTKVKYVTEGMRKPAFLS | |
| | GEQKKAIVDLLFKTNRKVTVKQLKEDYFKKIECFDSVEISGVEDRFNASLGTYHDLLKIIKDKDFLDNE | |
| | ENEDILEDIVLTLTLFEDREMIEERLKTYAHLFDDKVMKQLKRRRYTGWGRLSRKLINGIRDKQSGKTI | |
| | LDFLKSDGFANRNFMQLIHDDSLTFKEDIQKAQVSGQGDSLHEHIANLAGSPAIKKGILQTVKVVDELV | |
| | KVMGRHKPENIVIEMARENQTTQKGQKNSRERMKRIEEGIKELGSQILKEHPVENTQLQNEKLYLYYLQ | |
| | NGRDMYVDQELDINRLSDYDVDHIVPQSFLKDDSIDNKVLTRSDKARGKSDNVPSEEVVKKMKNYWRQL | |
| | LNAKLITQRKFDNLTKAERGGLSELDKAGFIKRQLVETRQITKHVAQILDSRMNTKYDENDKLIREVKV | |
| | ITLKSKLVSDFRKDFQFYKVREINNYHHAHDAYLNAVVGTALIKKYPKLESEFVYGDYKVYDVRKMIAK | |
| | SEQEIGKATAKYFFYSNIMNFFKTEITLANGEIRKRPLIETNGETGEIVWDKGRDFATVRKVLSMPQVN | |
| | IVKKTEVQTGGFSKESILPKRNSDKLIARKKDWDPKKYGGFDSPTVAYSVLVVAKVEKGKSKKLKSVKE | |
| | LLGITIMERSSFEKNPIDFLEAKGYKEVKKDLIIKLPKYSLFELENGRKRMLASAGELQKGNELALPSK | |
| | YVNFLYLASHYEKLKGSPEDNEQKQLFVEQHKHYLDEIIEQISEFSKRVILADANLDKVLSAYNKHRDK | |
| | PIREQAENIIHLFTLTNLGAPAAFKYFDTTIDRKRYTSTKEVLDATLIHQSITGLYETRIDLSQLGGDA | |
| | EAAAKEAAAKEAAAKEAAAKALEAEAAAKEAAAKEAAAKEAAAKATLNIEDEHRLHETSKEPDVSLGST | |
| | WLSDFPQAWAETGGMGLAVRQAPLIIPLKATSTPVSIKQYPMSQEARLGIKPHIQRLLDQGILVPCQSP | |
| | WNTPLLPVKKPGTNDYRPVQDLREVNKRVEDIHPTVPNPYNLLSGLPPSHQWYTVLDLKDAFFCLRLHP | |
| | TSQPLFAFEWRDPEMGISGQLTWTRLPQGFKNSPTLFNEALHRDLADFRIQHPDLILLQYVDDLLLAAT | |
| | SELDCQQGTRALLQTLGNLGYRASAKKAQICQKQVKYLGYLLKEGQRWLTEARKETVMGQPTPKTPRQL | |
| | REFLGKAGFCRLFIPGFAEMAAPLYPLTKPGTLFNWGPDQQKAYQEIKQALLTAPALGLPDLTKPFELF | |
| | VDEKQGYAKGVLTQKLGPWRRPVAYLSKKLDPVAAGWPPCLRMVAAIAVLTKDAGKLTMGQPLVILAPH | |
| | AVEALVKQPPDRWLSNARMTHYQALLLDTDRVQFGPVVALNPATLLPLPEEGLQHNCLDILAEAHGTRP | |
| | DLTDQPLPDADHTWYTDGSSLLQEGQRKAGAAVTTETEVIWAKALPAGTSAQRAELIALTQALKMAEGK | |
| | KLNVYTDSRYAFATAHIHGEIYRRRGWLTSEGKEIKNKDEILALLKALFLPKRLSIIHCPGHQKGHSAE | |
| | ARGNRMADQAARKAAITETPDTSTLLGSSGSSGSSGSSGSSGSSMASNFTQFVLVDNGGTGDVTVAPSN | |
| | FANGIAEWISSNSRSQAYKVTCSVRQSSAQNRKYTIKVEVPKGAWRSYLNMELTIPIFATNSDCELIVK | |
| | AMQGLLKDGNPIPSAIAANSGIYGGSGGSMASNFTQFVLVDNGGTGDVTVAPSNFANGIAEWISSNSRS | |
| | QAYKVTCSVRQSSAQNRKYTIKVEVPKGAWRSYLNMELTIPIFATNSDCELIVKAMQGLLKDGNPIPSA | |
| | IAANSGIYGGGSGGGSGGGSGGGSMASNFTQFVLVDNGGTGDVTVAPSNFANGIAEWISSNSRSQAYKV | |
| | TCSVRQSSAQNRKYTIKVEVPKGAWRSYLNMELTIPIFATNSDCELIVKAMQGLLKDGNPIPSAIAANS | |
| | GIYGGSGGSMASNFTQFVLVDNGGTGDVTVAPSNFANGIAEWISSNSRSQAYKVTCSVRQSSAQNRKYT | |
| | IKVEVPKGAWRSYLNMELTIPIFATNSDCELIVKAMQGLLKDGNPIPSAIAANSGIYKRTADGSEFESP | |
| | KKKAKVE | |
| PL12106 | MPAAKRVKLDGGDKKYSIGLDIGTNSVGWAVITDEYKVPSKKFKVLGNTDRHSIKKNLIGALLFDSGET | 16,221 |
| | AEATRLKRTARRRYTRRKNRICYLQEIFSNEMAKVDDSFFHRLEESFLVEEDKKHERHPIFGNIVDEVA | |
| | YHEKYPTIYHLRKKLVDSTDKADLRLIYLALAHMIKFRGHFLIEGDLNPDNSDVDKLFIQLVQTYNQLF | |
| | EENPINASGVDAKAILSARLSKSRRLENLIAQLPGEKKNGLFGNLIALSLGLTPNFKSNFDLAEDAKLQ | |
| | LSKDTYDDDLDNLLAQIGDQYADLFLAAKNLSDAILLSDILRVNTEITKAPLSASMIKRYDEHHQDLTL | |
| | LKALVRQQLPEKYKEIFFDQSKNGYAGYIDGGASQEEFYKFIKPILEKMDGTEELLVKLNREDLLRKQR | |
| | TFDNGSIPHQIHLGELHAILRRQEDFYPFLKDNREKIEKILTFRIPYYVGPLARGNSRFAWMTRKSEET | |
| | ITPWNFEEVVDKGASAQSFIERMTNFDKNLPNEKVLPKHSLLYEYFTVYNELTKVKYVTEGMRKPAFLS | |
| | GEQKKAIVDLLFKTNRKVTVKQLKEDYFKKIECFDSVEISGVEDRFNASLGTYHDLLKIIKDKDFLDNE | |
| | ENEDILEDIVLTLTLFEDREMIEERLKTYAHLFDDKVMKQLKRRRYTGWGRLSRKLINGIRDKQSGKTI | |
| | LDFLKSDGFANRNFMQLIHDDSLTFKEDIQKAQVSGQGDSLHEHIANLAGSPAIKKGILQTVKVVDELV | |
| | KVMGRHKPENIVIEMARENQTTQKGQKNSRERMKRIEEGIKELGSQILKEHPVENTQLQNEKLYLYYLQ | |
| | NGRDMYVDQELDINRLSDYDVDHIVPQSFLKDDSIDNKVLTRSDKARGKSDNVPSEEVVKKMKNYWRQL | |
| | LNAKLITQRKFDNLTKAERGGLSELDKAGFIKRQLVETRQITKHVAQILDSRMNTKYDENDKLIREVKV | |
| | ITLKSKLVSDFRKDFQFYKVREINNYHHAHDAYLNAVVGTALIKKYPKLESEFVYGDYKVYDVRKMIAK | |
| | SEQEIGKATAKYFFYSNIMNFFKTEITLANGEIRKRPLIETNGETGEIVWDKGRDFATVRKVLSMPQVN | |
| | IVKKTEVQTGGFSKESILPKRNSDKLIARKKDWDPKKYGGFDSPTVAYSVLVVAKVEKGKSKKLKSVKE | |
| | LLGITIMERSSFEKNPIDFLEAKGYKEVKKDLIIKLPKYSLFELENGRKRMLASAGELQKGNELALPSK | |
| | YVNFLYLASHYEKLKGSPEDNEQKQLFVEQHKHYLDEIIEQISEFSKRVILADANLDKVLSAYNKHRDK | |
| | PIREQAENIIHLFTLTNLGAPAAFKYFDTTIDRKRYTSTKEVLDATLIHQSITGLYETRIDLSQLGGDA | |
| | EAAAKEAAAKEAAAKEAAAKALEAEAAAKEAAAKEAAAKEAAAKATLNIEDEHRLHETSKEPDVSLGST | |
| | WLSDFPQAWAETGGMGLAVRQAPLIIPLKATSTPVSIKQYPMSQEARLGIKPHIQRLLDQGILVPCQSP | |
| | WNTPLLPVKKPGTNDYRPVQDLREVNKRVEDIHPTVPNPYNLLSGLPPSHQWYTVLDLKDAFFCLRLHP | |
| | TSQPLFAFEWRDPEMGISGQLTWTRLPQGFKNSPTLFNEALHRDLADFRIQHPDLILLQYVDDLLLAAT | |
| | SELDCQQGTRALLQTLGNLGYRASAKKAQICQKQVKYLGYLLKEGQRWLTEARKETVMGQPTPKTPRQL | |
| | REFLGKAGFCRLFIPGFAEMAAPLYPLTKPGTLFNWGPDQQKAYQEIKQALLTAPALGLPDLTKPFELF | |
| | VDEKQGYAKGVLTQKLGPWRRPVAYLSKKLDPVAAGWPPCLRMVAAIAVLTKDAGKLTMGQPLVILAPH | |
| | AVEALVKQPPDRWLSNARMTHYQALLLDTDRVQFGPVVALNPATLLPLPEEGLQHNCLDILAEAHGTRP | |
| | DLTDQPLPDADHTWYTDGSSLLQEGQRKAGAAVTTETEVIWAKALPAGTSAQRAELIALTQALKMAEGK | |
| | KLNVYTDSRYAFATAHIHGEIYRRRGWLTSEGKEIKNKDEILALLKALFLPKRLSIIHCPGHQKGHSAE | |
| | ARGNRMADQAARKAAITETPDTSTLLGSSGGGEAAAKMASNFTQFVLVDNGGTGDVTVAPSNFANGIAE | |
| | WISSNSRSQAYKVTCSVRQSSAQNRKYTIKVEVPKGAWRSYLNMELTIPIFATNSDCELIVKAMQGLLK | |
| | DGNPIPSAIAANSGIYKRTADGSEFESPKKKAKVE | |
| PL12107 | MPAAKRVKLDGGDKKYSIGLDIGTNSVGWAVITDEYKVPSKKFKVLGNTDRHSIKKNLIGALLFDSGET | 16,222 |
| | AEATRLKRTARRRYTRRKNRICYLQEIFSNEMAKVDDSFFHRLEESFLVEEDKKHERHPIFGNIVDEVA | |
| | YHEKYPTIYHLRKKLVDSTDKADLRLIYLALAHMIKFRGHFLIEGDLNPDNSDVDKLFIQLVQTYNQLF | |
| | EENPINASGVDAKAILSARLSKSRRLENLIAQLPGEKKNGLFGNLIALSLGLTPNFKSNFDLAEDAKLQ | |
| | LSKDTYDDDLDNLLAQIGDQYADLFLAAKNLSDAILLSDILRVNTEITKAPLSASMIKRYDEHHQDLTL | |
| | LKALVRQQLPEKYKEIFFDQSKNGYAGYIDGGASQEEFYKFIKPILEKMDGTEELLVKLNREDLLRKQR | |
| | TFDNGSIPHQIHLGELHAILRRQEDFYPFLKDNREKIEKILTFRIPYYVGPLARGNSRFAWMTRKSEET | |
| | ITPWNFEEVVDKGASAQSFIERMTNFDKNLPNEKVLPKHSLLYEYFTVYNELTKVKYVTEGMRKPAFLS | |
| | GEQKKAIVDLLFKTNRKVTVKQLKEDYFKKIECFDSVEISGVEDRFNASLGTYHDLLKIIKDKDFLDNE | |
| | ENEDILEDIVLTLTLFEDREMIEERLKTYAHLFDDKVMKQLKRRRYTGWGRLSRKLINGIRDKQSGKTI | |
| | LDFLKSDGFANRNFMQLIHDDSLTFKEDIQKAQVSGQGDSLHEHIANLAGSPAIKKGILQTVKVVDELV | |
| | KVMGRHKPENIVIEMARENQTTQKGQKNSRERMKRIEEGIKELGSQILKEHPVENTQLQNEKLYLYYLQ | |
| | NGRDMYVDQELDINRLSDYDVDHIVPQSFLKDDSIDNKVLTRSDKARGKSDNVPSEEVVKKMKNYWRQL | |
| | LNAKLITQRKFDNLTKAERGGLSELDKAGFIKRQLVETRQITKHVAQILDSRMNTKYDENDKLIREVKV | |
| | ITLKSKLVSDFRKDFQFYKVREINNYHHAHDAYLNAVVGTALIKKYPKLESEFVYGDYKVYDVRKMIAK | |
| | SEQEIGKATAKYFFYSNIMNFFKTEITLANGEIRKRPLIETNGETGEIVWDKGRDFATVRKVLSMPQVN | |
| | IVKKTEVQTGGFSKESILPKRNSDKLIARKKDWDPKKYGGFDSPTVAYSVLVVAKVEKGKSKKLKSVKE | |
| | LLGITIMERSSFEKNPIDFLEAKGYKEVKKDLIIKLPKYSLFELENGRKRMLASAGELQKGNELALPSK | |
| | YVNFLYLASHYEKLKGSPEDNEQKQLFVEQHKHYLDEIIEQISEFSKRVILADANLDKVLSAYNKHRDK | |
| | PIREQAENIIHLFTLTNLGAPAAFKYFDTTIDRKRYTSTKEVLDATLIHQSITGLYETRIDLSQLGGDA | |
| | EAAAKEAAAKEAAAKEAAAKALEAEAAAKEAAAKEAAAKEAAAKATLNIEDEHRLHETSKEPDVSLGST | |
| | WLSDFPQAWAETGGMGLAVRQAPLIIPLKATSTPVSIKQYPMSQEARLGIKPHIQRLLDQGILVPCQSP | |
| | WNTPLLPVKKPGTNDYRPVQDLREVNKRVEDIHPTVPNPYNLLSGLPPSHQWYTVLDLKDAFFCLRLHP | |
| | TSQPLFAFEWRDPEMGISGQLTWTRLPQGFKNSPTLFNEALHRDLADFRIQHPDLILLQYVDDLLLAAT | |
| | SELDCQQGTRALLQTLGNLGYRASAKKAQICQKQVKYLGYLLKEGQRWLTEARKETVMGQPTPKTPRQL | |
| | REFLGKAGFCRLFIPGFAEMAAPLYPLTKPGTLFNWGPDQQKAYQEIKQALLTAPALGLPDLTKPFELF | |
| | VDEKQGYAKGVLTQKLGPWRRPVAYLSKKLDPVAAGWPPCLRMVAAIAVLTKDAGKLTMGQPLVILAPH | |
| | AVEALVKQPPDRWLSNARMTHYQALLLDTDRVQFGPVVALNPATLLPLPEEGLQHNCLDILAEAHGTRP | |
| | DLTDQPLPDADHTWYTDGSSLLQEGQRKAGAAVTTETEVIWAKALPAGTSAQRAELIALTQALKMAEGK | |
| | KLNVYTDSRYAFATAHIHGEIYRRRGWLTSEGKEIKNKDEILALLKALFLPKRLSIIHCPGHQKGHSAE | |
| | ARGNRMADQAARKAAITETPDTSTLLGSSGGGEAAAKMASNFTQFVLVDNGGTGDVTVAPSNFANGIAE | |
| | WISSNSRSQAYKVTCSVRQSSAQNRKYTIKVEVPKGAWRSYLNMELTIPIFATNSDCELIVKAMQGLLK | |
| | DGNPIPSAIAANSGIYGGSGGSMASNFTQFVLVDNGGTGDVTVAPSNFANGIAEWISSNSRSQAYKVTC | |
| | SVRQSSAQNRKYTIKVEVPKGAWRSYLNMELTIPIFATNSDCELIVKAMQGLLKDGNPIPSAIAANSGI | |
| | YKRTADGSEFESPKKKAKVE | |
| PL12108 | MPAAKRVKLDGGDKKYSIGLDIGTNSVGWAVITDEYKVPSKKFKVLGNTDRHSIKKNLIGALLFDSGET | 16,223 |
| | AEATRLKRTARRRYTRRKNRICYLQEIFSNEMAKVDDSFFHRLEESFLVEEDKKHERHPIFGNIVDEVA | |
| | YHEKYPTIYHLRKKLVDSTDKADLRLIYLALAHMIKFRGHFLIEGDLNPDNSDVDKLFIQLVQTYNQLF | |
| | EENPINASGVDAKAILSARLSKSRRLENLIAQLPGEKKNGLFGNLIALSLGLTPNFKSNFDLAEDAKLQ | |
| | LSKDTYDDDLDNLLAQIGDQYADLFLAAKNLSDAILLSDILRVNTEITKAPLSASMIKRYDEHHQDLTL | |
| | LKALVRQQLPEKYKEIFFDQSKNGYAGYIDGGASQEEFYKFIKPILEKMDGTEELLVKLNREDLLRKQR | |
| | TFDNGSIPHQIHLGELHAILRRQEDFYPFLKDNREKIEKILTFRIPYYVGPLARGNSRFAWMTRKSEET | |
| | ITPWNFEEVVDKGASAQSFIERMTNFDKNLPNEKVLPKHSLLYEYFTVYNELTKVKYVTEGMRKPAFLS | |
| | GEQKKAIVDLLFKTNRKVTVKQLKEDYFKKIECFDSVEISGVEDRFNASLGTYHDLLKIIKDKDFLDNE | |
| | ENEDILEDIVLTLTLFEDREMIEERLKTYAHLFDDKVMKQLKRRRYTGWGRLSRKLINGIRDKQSGKTI | |
| | LDFLKSDGFANRNFMQLIHDDSLTFKEDIQKAQVSGQGDSLHEHIANLAGSPAIKKGILQTVKVVDELV | |
| | KVMGRHKPENIVIEMARENQTTQKGQKNSRERMKRIEEGIKELGSQILKEHPVENTQLQNEKLYLYYLQ | |
| | NGRDMYVDQELDINRLSDYDVDHIVPQSFLKDDSIDNKVLTRSDKARGKSDNVPSEEVVKKMKNYWRQL | |
| | LNAKLITQRKFDNLTKAERGGLSELDKAGFIKRQLVETRQITKHVAQILDSRMNTKYDENDKLIREVKV | |
| | ITLKSKLVSDFRKDFQFYKVREINNYHHAHDAYLNAVVGTALIKKYPKLESEFVYGDYKVYDVRKMIAK | |
| | SEQEIGKATAKYFFYSNIMNFFKTEITLANGEIRKRPLIETNGETGEIVWDKGRDFATVRKVLSMPQVN | |
| | IVKKTEVQTGGFSKESILPKRNSDKLIARKKDWDPKKYGGFDSPTVAYSVLVVAKVEKGKSKKLKSVKE | |
| | LLGITIMERSSFEKNPIDFLEAKGYKEVKKDLIIKLPKYSLFELENGRKRMLASAGELQKGNELALPSK | |
| | YVNFLYLASHYEKLKGSPEDNEQKQLFVEQHKHYLDEIIEQISEFSKRVILADANLDKVLSAYNKHRDK | |
| | PIREQAENIIHLFTLTNLGAPAAFKYFDTTIDRKRYTSTKEVLDATLIHQSITGLYETRIDLSQLGGDA | |
| | EAAAKEAAAKEAAAKEAAAKALEAEAAAKEAAAKEAAAKEAAAKATLNIEDEHRLHETSKEPDVSLGST | |
| | WLSDFPQAWAETGGMGLAVRQAPLIIPLKATSTPVSIKQYPMSQEARLGIKPHIQRLLDQGILVPCQSP | |
| | WNTPLLPVKKPGTNDYRPVQDLREVNKRVEDIHPTVPNPYNLLSGLPPSHQWYTVLDLKDAFFCLRLHP | |
| | TSQPLFAFEWRDPEMGISGQLTWTRLPQGFKNSPTLFNEALHRDLADFRIQHPDLILLQYVDDLLLAAT | |
| | SELDCQQGTRALLQTLGNLGYRASAKKAQICQKQVKYLGYLLKEGQRWLTEARKETVMGQPTPKTPRQL | |
| | REFLGKAGFCRLFIPGFAEMAAPLYPLTKPGTLFNWGPDQQKAYQEIKQALLTAPALGLPDLTKPFELF | |
| | VDEKQGYAKGVLTQKLGPWRRPVAYLSKKLDPVAAGWPPCLRMVAAIAVLTKDAGKLTMGQPLVILAPH | |
| | AVEALVKQPPDRWLSNARMTHYQALLLDTDRVQFGPVVALNPATLLPLPEEGLQHNCLDILAEAHGTRP | |
| | DLTDQPLPDADHTWYTDGSSLLQEGQRKAGAAVTTETEVIWAKALPAGTSAQRAELIALTQALKMAEGK | |
| | KLNVYTDSRYAFATAHIHGEIYRRRGWLTSEGKEIKNKDEILALLKALFLPKRLSIIHCPGHQKGHSAE | |
| | ARGNRMADQAARKAAITETPDTSTLLGSSGGGEAAAKMASNFTQFVLVDNGGTGDVTVAPSNFANGIAE | |
| | WISSNSRSQAYKVTCSVRQSSAQNRKYTIKVEVPKGAWRSYLNMELTIPIFATNSDCELIVKAMQGLLK | |
| | DGNPIPSAIAANSGIYGGSGGSMASNFTQFVLVDNGGTGDVTVAPSNFANGIAEWISSNSRSQAYKVTC | |
| | SVRQSSAQNRKYTIKVEVPKGAWRSYLNMELTIPIFATNSDCELIVKAMQGLLKDGNPIPSAIAANSGI | |
| | YGGGSGGGSGGGSGGGSMASNFTQFVLVDNGGTGDVTVAPSNFANGIAEWISSNSRSQAYKVTCSVRQS | |
| | SAQNRKYTIKVEVPKGAWRSYLNMELTIPIFATNSDCELIVKAMQGLLKDGNPIPSAIAANSGIYGGSG | |
| | GSMASNFTQFVLVDNGGTGDVTVAPSNFANGIAEWISSNSRSQAYKVTCSVRQSSAQNRKYTIKVEVPK | |
| | GAWRSYLNMELTIPIFATNSDCELIVKAMQGLLKDGNPIPSAIAANSGIYKRTADGSEFESPKKKAKVE | |

### 2) Guide RNA:

[1255] The guide RNA (gRNA) molecule (5′-GCCGAAGCACTGCACGCCGTGTTTTAGAGCTAGAAATAGCAAGTTAAAATAAGGCTAGTCCGTT ATCAACTTGAAAAAGTGGCACCGAGTCGGTGC-3′; SEQ ID NO: 16,708) binds Cas9 and contains a spacer sequence complementary to the target locus, resulting in localization of the gene modifying complex to the target genomic locus.

### Example 4: Generation of Trans Templates for the Incorporation of Long Insertions

[1256] This example describes the generation of exemplary trans templates for use in the three, four, or five component RNA-based gene modifying systems described in Examples 1 and 2, and in Examples 1-5 of PCT Application PCT/US2022/076064, which Examples are herein incorporated by reference, for the insertion of long 150 base pair edits into the 150 bp GFP restoration reporter cell lines.

[1257] A series of 121 ttRNAs were constructed with each of the following regions:
[1258] 1. a primer binding site (PBS) that is 13 nucleotides in length that base pairs with the nicked DNA strand allowing primer extension of the nicked DNA, followed immediately by
[1259] 2. a homology 1 region with homology to the target GFP locus
[1260] 3. the exemplary desired modification: a 150 nucleotide insertion sequence which restores the coding sequence of the EGFP reporter gene, as well as a PAM-nullifying mutation to prevent multiple turnover cutting at the target site.
[1261] 4. a 12-102 nucleotide homology 2 region with homology to the target GFP locus.
[1262] 5. an RBD recruitment site (RRS) containing 1, or 4 MS2 sequences (lx, 2×, or 4× MS2) with intervening RNA linker sequences, or an ePEG control (a pseudoknot).
[1263] 6. either no 5′ end-protecting RNA secondary structure or one of the following 5′end-protecting RNA secondary structures:
   [1264] a. ePEG
   [1265] b. a Cas9 scaffold lacking a spacer sequence
   [1266] c. a Cas9 scaffold with a 15 nucleotide spacer sequence, which should result in binding but not nicking of the target strand, also referred to herein as shorter spacer sequence
   [1267] d. a Cas9 scaffold with a 20 nucleotide spacer sequence, which should result in nicking of the target strand, also referred to herein as longer spacer sequence
[1268] 7. either an 8 or 16 nucleotide linker between the RRS and PBS
   These components were assembled in the below configuration (if no 5′ end protecting structure was selected, then no such structure was included in that template RNA):
[1269] (RRS)ₙ-linker-PBS-template-5′ end block

[1270] The sequences of the exemplary ttRNAs generated are given in the below table.

TABLE E11
Exemplary ttRNA Sequences

| ttRNA | ttRNA | |
|---|---|---|
| name | description | Sequence |
| PL15332 | 1 | CGCGGTTCTATCTAGTTACGCGTTAAACCAACTAGAATGGTGCCCATCCTGGTCGAGCTG |
| | pseudoknot_RT12_ | GACGGCGACGTAAACGGCCACAAGTTCAGCGTGTCCGGCGAGGGCGAGGGCGATGCCACC |
| | L8_1xMS2 | TACGGCAAGCTGACCCTGAAGTTCATCTGCACCACCGGCAAGCTGCCCGTGCCCTGGCCC |
| | | ACCCTCGTGACCACCCTGACGTACGGCGTGCAGTGCTTACATACAAgcACATGAGGATCA |
| | | CCCATGTgc |
| | | (SEQ ID NO: 19267) |
| PL15333 | 2 | GTTTTAGAGCTAGAAATAGCAAGTTAAAATAAGGCTAGTCCGTTATCAACTTGAAAAAGT |
| | scaffold_ | GGCACCGAGTCGGTGCTGGTGCCCATCCTGGTCGAGCTGGACGGCGACGTAAACGGCCAC |
| | RT12_L8_ | AAGTTCAGCGTGTCCGGCGAGGGCGAGGGCGATGCCACCTACGGCAAGCTGACCCTGAAG |
| | 1xMS2 | TTCATCTGCACCACCGGCAAGCTGCCCGTGCCCTGGCCCACCCTCGTGACCACCCTGACG |
| | | TACGGCGTGCAGTGCTTACATACAAgcACATGAGGATCACCCATGTgc |
| | | (SEQ ID NO: 19268) |
| PL15334 | 3 gAS1- | AGCTGTTCACCGGGGGTTTTAGAGCTAGAAATAGCAAGTTAAAATAAGGCTAGTCCGTTA |
| | 15_RT12_L8_ | TCAACTTGAAAAAGTGGCACCGAGTCGGTGCTGGTGCCCATCCTGGTCGAGCTGGACGGC |
| | 1xMS2 | GACGTAAACGGCCACAAGTTCAGCGTGTCCGGCGAGGGCGAGGGCGATGCCACCTACGGC |
| | | AAGCTGACCCTGAAGTTCATCTGCACCACCGGCAAGCTGCCCGTGCCCTGGCCCACCCTC |
| | | GTGACCACCCTGACGTACGGCGTGCAGTGCTTACATACAAgcACATGAGGATCACCCATG |
| | | Tgc |
| | | (SEQ ID NO: 19269) |
| PL15335 | 4 gAS1- | CGAGGAGCTGTTCACCGGGGGTTTTAGAGCTAGAAATAGCAAGTTAAAATAAGGCTAGTC |
| | 20_RT12_L8_ | CGTTATCAACTTGAAAAAGTGGCACCGAGTCGGTGCTGGTGCCCATCCTGGTCGAGCTGG |
| | 1xMS2 | ACGGCGACGTAAACGGCCACAAGTTCAGCGTGTCCGGCGAGGGCGAGGGCGATGCCACCT |
| | | ACGGCAAGCTGACCCTGAAGTTCATCTGCACCACCGGCAAGCTGCCCGTGCCCTGGCCCA |
| | | CCCTCGTGACCACCCTGACGTACGGCGTGCAGTGCTTACATACAAgcACATGAGGATCAC |
| | | CCATGTgc |
| | | (SEQ ID NO: 19270) |
| PL15336 | 5 gAS2- | TGGTGAGCAAGGGCGGTTTTAGAGCTAGAAATAGCAAGTTAAAATAAGGCTAGTCCGTTA |
| | 15_RT12_L8_ | TCAACTTGAAAAAGTGGCACCGAGTCGGTGCTGGTGCCCATCCTGGTCGAGCTGGACGGC |
| | 1xMS2 | GACGTAAACGGCCACAAGTTCAGCGTGTCCGGCGAGGGCGAGGGCGATGCCACCTACGGC |
| | | AAGCTGACCCTGAAGTTCATCTGCACCACCGGCAAGCTGCCCGTGCCCTGGCCCACCCTC |
| | | GTGACCACCCTGACGTACGGCGTGCAGTGCTTACATACAAgcACATGAGGATCACCCATG |
| | | Tgc |
| | | (SEQ ID NO: 19271) |
| PL15337 | 6 gAS2- | CACCATGGTGAGCAAGGGCGGTTTTAGAGCTAGAAATAGCAAGTTAAAATAAGGCTAGTC |
| | 20_RT12_L8_ | CGTTATCAACTTGAAAAAGTGGCACCGAGTCGGTGCTGGTGCCCATCCTGGTCGAGCTGG |
| | 1xMS2 | ACGGCGACGTAAACGGCCACAAGTTCAGCGTGTCCGGCGAGGGCGAGGGCGATGCCACCT |
| | | ACGGCAAGCTGACCCTGAAGTTCATCTGCACCACCGGCAAGCTGCCCGTGCCCTGGCCCA |
| | | CCCTCGTGACCACCCTGACGTACGGCGTGCAGTGCTTACATACAAgcACATGAGGATCAC |
| | | CCATGTgc |
| | | (SEQ ID NO: 19272) |
| PL15338 | 7 gAS3- | CCACCGCCGCCACCAGTTTTAGAGCTAGAAATAGCAAGTTAAAATAAGGCTAGTCCGTTA |
| | 15_RT12_L8_ | TCAACTTGAAAAAGTGGCACCGAGTCGGTGCTGGTGCCCATCCTGGTCGAGCTGGACGGC |
| | 1xMS2 | GACGTAAACGGCCACAAGTTCAGCGTGTCCGGCGAGGGCGAGGGCGATGCCACCTACGGC |
| | | AAGCTGACCCTGAAGTTCATCTGCACCACCGGCAAGCTGCCCGTGCCCTGGCCCACCCTC |
| | | GTGACCACCCTGACGTACGGCGTGCAGTGCTTACATACAAgcACATGAGGATCACCCATG |
| | | Tgc |
| | | (SEQ ID NO: 19273) |
| PL15339 | 8 gAS3- | TCGAGCCACCGCCGCCACCAGTTTTAGAGCTAGAAATAGCAAGTTAAAATAAGGCTAGTC |
| | 20_RT12_L8_ | CGTTATCAACTTGAAAAAGTGGCACCGAGTCGGTGCTGGTGCCCATCCTGGTCGAGCTGG |
| | 1xMS2 | ACGGCGACGTAAACGGCCACAAGTTCAGCGTGTCCGGCGAGGGCGAGGGCGATGCCACCT |
| | | ACGGCAAGCTGACCCTGAAGTTCATCTGCACCACCGGCAAGCTGCCCGTGCCCTGGCCCA |
| | | CCCTCGTGACCACCCTGACGTACGGCGTGCAGTGCTTACATACAAgcACATGAGGATCAC |
| | | CCATGTgc |
| | | (SEQ ID NO: 19274) |
| PL15340 | 9 gS1- | CACGCCGTAGGGGATGTTTTAGAGCTAGAAATAGCAAGTTAAAATAAGGCTAGTCCGTTA |
| | 15_RT12_L8_ | TCAACTTGAAAAAGTGGCACCGAGTCGGTGCTGGTGCCCATCCTGGTCGAGCTGGACGGC |
| | 1xMS2 | GACGTAAACGGCCACAAGTTCAGCGTGTCCGGCGAGGGCGAGGGCGATGCCACCTACGGC |
| | | AAGCTGACCCTGAAGTTCATCTGCACCACCGGCAAGCTGCCCGTGCCCTGGCCCACCCTC |
| | | GTGACCACCCTGACGTACGGCGTGCAGTGCTTACATACAAgcACATGAGGATCACCCATG |
| | | Tgc |
| | | (SEQ ID NO: 19275) |
| PL15341 | 10 gS1- | CACTGCACGCCGTAGGGGATGTTTTAGAGCTAGAAATAGCAAGTTAAAATAAGGCTAGTC |
| | 20_RT12_L8_ | CGTTATCAACTTGAAAAAGTGGCACCGAGTCGGTGCTGGTGCCCATCCTGGTCGAGCTGG |
| | 1xMS2 | ACGGCGACGTAAACGGCCACAAGTTCAGCGTGTCCGGCGAGGGCGAGGGCGATGCCACCT |
| | | ACGGCAAGCTGACCCTGAAGTTCATCTGCACCACCGGCAAGCTGCCCGTGCCCTGGCCCA |
| | | CCCTCGTGACCACCCTGACGTACGGCGTGCAGTGCTTACATACAAgcACATGAGGATCAC |
| | | CCATGTgc |
| | | (SEQ ID NO: 19276) |
| PL15342 | 11 gS2- | GGATGGGCACCACCCGTTTTAGAGCTAGAAATAGCAAGTTAAAATAAGGCTAGTCCGTTA |
| | 15_RT12_L8_ | TCAACTTGAAAAAGTGGCACCGAGTCGGTGCTGGTGCCCATCCTGGTCGAGCTGGACGGC |
| | 1xMS2 | GACGTAAACGGCCACAAGTTCAGCGTGTCCGGCGAGGGCGAGGGCGATGCCACCTACGGC |
| | | AAGCTGACCCTGAAGTTCATCTGCACCACCGGCAAGCTGCCCGTGCCCTGGCCCACCCTC |
| | | GTGACCACCCTGACGTACGGCGTGCAGTGCTTACATACAAgcACATGAGGATCACCCATG |
| | | Tgc |
| | | (SEQ ID NO: 19277) |
| PL15343 | 12 gS2- | GTAGGGGATGGGCACCACCCGTTTTAGAGCTAGAAATAGCAAGTTAAAATAAGGCTAGTC |
| | 20_RT12_L8_ | CGTTATCAACTTGAAAAAGTGGCACCGAGTCGGTGCTGGTGCCCATCCTGGTCGAGCTGG |
| | 1xMS2 | ACGGCGACGTAAACGGCCACAAGTTCAGCGTGTCCGGCGAGGGCGAGGGCGATGCCACCT |
| | | ACGGCAAGCTGACCCTGAAGTTCATCTGCACCACCGGCAAGCTGCCCGTGCCCTGGCCCA |
| | | CCCTCGTGACCACCCTGACGTACGGCGTGCAGTGCTTACATACAAgcACATGAGGATCAC |
| | | CCATGTgc |
| | | (SEQ ID NO: 19278) |
| PL15344 | 13 gS3- | CGCCCTTGCTCACCAGTTTTAGAGCTAGAAATAGCAAGTTAAAATAAGGCTAGTCCGTTA |
| | 15_RT12_L8_ | TCAACTTGAAAAAGTGGCACCGAGTCGGTGCTGGTGCCCATCCTGGTCGAGCTGGACGGC |
| | 1xMS2 | GACGTAAACGGCCACAAGTTCAGCGTGTCCGGCGAGGGCGAGGGCGATGCCACCTACGGC |
| | | AAGCTGACCCTGAAGTTCATCTGCACCACCGGCAAGCTGCCCGTGCCCTGGCCCACCCTC |
| | | GTGACCACCCTGACGTACGGCGTGCAGTGCTTACATACAAgcACATGAGGATCACCCATG |
| | | Tgc |
| | | (SEQ ID NO: 19279) |
| PL15345 | 14 gS3- | CTCCTCGCCCTTGCTCACCAGTTTTAGAGCTAGAAATAGCAAGTTAAAATAAGGCTAGTC |
| | 20_RT12_L8_ | CGTTATCAACTTGAAAAAGTGGCACCGAGTCGGTGCTGGTGCCCATCCTGGTCGAGCTGG |
| | 1xMS2 | ACGGCGACGTAAACGGCCACAAGTTCAGCGTGTCCGGCGAGGGCGAGGGCGATGCCACCT |
| | | ACGGCAAGCTGACCCTGAAGTTCATCTGCACCACCGGCAAGCTGCCCGTGCCCTGGCCCA |
| | | CCCTCGTGACCACCCTGACGTACGGCGTGCAGTGCTTACATACAAgcACATGAGGATCAC |
| | | CCATGTgc |
| | | (SEQ ID NO: 19280) |
| PL15346 | 15 pseudoknot_ | CGCGGTTCTATCTAGTTACGCGTTAAACCAACTAGAAATGGTGAGCAAGGGCGAGGAGCT |
| | RT46_ | GTTCACCGGGGTGGTGCCCATCCTGGTCGAGCTGGACGGCGACGTAAACGGCCACAAGTT |
| | L8_1xMS2 | CAGCGTGTCCGGCGAGGGCGAGGGCGATGCCACCTACGGCAAGCTGACCCTGAAGTTCAT |
| | | CTGCACCACCGGCAAGCTGCCCGTGCCCTGGCCCACCCTCGTGACCACCCTGACGTACGG |
| | | CGTGCAGTGCTTACATACAAgcACATGAGGATCACCCATGTgc |
| | | (SEQ ID NO: 19281) |
| PL15347 | 16 | GTTTTAGAGCTAGAAATAGCAAGTTAAAATAAGGCTAGTCCGTTATCAACTTGAAAAAGT |
| | scaffold_RT46_ | GGCACCGAGTCGGTGCATGGTGAGCAAGGGCGAGGAGCTGTTCACCGGGGTGGTGCCCAT |
| | L8_1xMS2 | CCTGGTCGAGCTGGACGGCGACGTAAACGGCCACAAGTTCAGCGTGTCCGGCGAGGGCGA |
| | | GGGCGATGCCACCTACGGCAAGCTGACCCTGAAGTTCATCTGCACCACCGGCAAGCTGCC |
| | | CGTGCCCTGGCCCACCCTCGTGACCACCCTGACGTACGGCGTGCAGTGCTTACATACAAg |
| | | cACATGAGGATCACCCATGTgc |
| | | (SEQ ID NO: 19282) |
| PL15348 | 17 gAS1- | AGCTGTTCACCGGGGGTTTTAGAGCTAGAAATAGCAAGTTAAAATAAGGCTAGTCCGTTA |
| | 15_RT46_L8_ | TCAACTTGAAAAAGTGGCACCGAGTCGGTGCATGGTGAGCAAGGGCGAGGAGCTGTTCAC |
| | 1xMS2 | CGGGGTGGTGCCCATCCTGGTCGAGCTGGACGGCGACGTAAACGGCCACAAGTTCAGCGT |
| | | GTCCGGCGAGGGCGAGGGCGATGCCACCTACGGCAAGCTGACCCTGAAGTTCATCTGCAC |
| | | CACCGGCAAGCTGCCCGTGCCCTGGCCCACCCTCGTGACCACCCTGACGTACGGCGTGCA |
| | | GTGCTTACATACAAgCACATGAGGATCACCCATGTgc |
| | | (SEQ ID NO: 19283) |
| PL15349 | 18 gAS1- | CGAGGAGCTGTTCACCGGGGGTTTTAGAGCTAGAAATAGCAAGTTAAAATAAGGCTAGTC |
| | 20_RT46_L8_ | CGTTATCAACTTGAAAAAGTGGCACCGAGTCGGTGCATGGTGAGCAAGGGCGAGGAGCTG |
| | 1xMS2 | TTCACCGGGGTGGTGCCCATCCTGGTCGAGCTGGACGGCGACGTAAACGGCCACAAGTTC |
| | | AGCGTGTCCGGCGAGGGCGAGGGCGATGCCACCTACGGCAAGCTGACCCTGAAGTTCATC |
| | | TGCACCACCGGCAAGCTGCCCGTGCCCTGGCCCACCCTCGTGACCACCCTGACGTACGGC |
| | | GTGCAGTGCTTACATACAAgcACATGAGGATCACCCATGTgc |
| | | (SEQ ID NO: 19284) |
| PL15350 | 19 gAS2- | TGGTGAGCAAGGGCGGTTTTAGAGCTAGAAATAGCAAGTTAAAATAAGGCTAGTCCGTTA |
| | 15_RT46_L8_ | TCAACTTGAAAAAGTGGCACCGAGTCGGTGCATGGTGAGCAAGGGCGAGGAGCTGTTCAC |
| | 1xMS2 | CGGGGTGGTGCCCATCCTGGTCGAGCTGGACGGCGACGTAAACGGCCACAAGTTCAGCGT |
| | | GTCCGGCGAGGGCGAGGGCGATGCCACCTACGGCAAGCTGACCCTGAAGTTCATCTGCAC |
| | | CACCGGCAAGCTGCCCGTGCCCTGGCCCACCCTCGTGACCACCCTGACGTACGGCGTGCA |
| | | GTGCTTACATACAAgCACATGAGGATCACCCATGTgc |
| | | (SEQ ID NO: 19285) |
| PL15351 | 20 gAS2- | CACCATGGTGAGCAAGGGCGGTTTTAGAGCTAGAAATAGCAAGTTAAAATAAGGCTAGTC |
| | 20_RT46_L8_ | CGTTATCAACTTGAAAAAGTGGCACCGAGTCGGTGCATGGTGAGCAAGGGCGAGGAGCTG |
| | 1xMS2 | TTCACCGGGGTGGTGCCCATCCTGGTCGAGCTGGACGGCGACGTAAACGGCCACAAGTTC |
| | | AGCGTGTCCGGCGAGGGCGAGGGCGATGCCACCTACGGCAAGCTGACCCTGAAGTTCATC |
| | | TGCACCACCGGCAAGCTGCCCGTGCCCTGGCCCACCCTCGTGACCACCCTGACGTACGGC |
| | | GTGCAGTGCTTACATACAAgcACATGAGGATCACCCATGTgc |
| | | (SEQ ID NO: 19286) |
| PL15352 | 21 gAS3- | CCACCGCCGCCACCAGTTTTAGAGCTAGAAATAGCAAGTTAAAATAAGGCTAGTCCGTTA |
| | 15_RT46_L8_ | TCAACTTGAAAAAGTGGCACCGAGTCGGTGCATGGTGAGCAAGGGCGAGGAGCTGTTCAC |
| | 1xMS2 | CGGGGTGGTGCCCATCCTGGTCGAGCTGGACGGCGACGTAAACGGCCACAAGTTCAGCGT |
| | | GTCCGGCGAGGGCGAGGGCGATGCCACCTACGGCAAGCTGACCCTGAAGTTCATCTGCAC |
| | | CACCGGCAAGCTGCCCGTGCCCTGGCCCACCCTCGTGACCACCCTGACGTACGGCGTGCA |
| | | GTGCTTACATACAAgcACATGAGGATCACCCATGTgc |
| | | (SEQ ID NO: 19287) |
| PL15353 | 22 gAS3-20_ | TCGAGCCACCGCCGCCACCAGTTTTAGAGCTAGAAATAGCAAGTTAAAATAAGGCTAGTC |
| | RT46_L8_1xM | CGTTATCAACTTGAAAAAGTGGCACCGAGTCGGTGCATGGTGAGCAAGGGCGAGGAGCTG |
| | S2 | TTCACCGGGGTGGTGCCCATCCTGGTCGAGCTGGACGGCGACGTAAACGGCCACAAGTTC |
| | | AGCGTGTCCGGCGAGGGCGAGGGCGATGCCACCTACGGCAAGCTGACCCTGAAGTTCATC |
| | | TGCACCACCGGCAAGCTGCCCGTGCCCTGGCCCACCCTCGTGACCACCCTGACGTACGGC |
| | | GTGCAGTGCTTACATACAAgcACATGAGGATCACCCATGTgc |
| | | (SEQ ID NO: 19288) |
| PL15354 | 23 gS1- | CACGCCGTAGGGGATGTTTTAGAGCTAGAAATAGCAAGTTAAAATAAGGCTAGTCCGTTA |
| | 15_RT46_L8_ | TCAACTTGAAAAAGTGGCACCGAGTCGGTGCATGGTGAGCAAGGGCGAGGAGCTGTTCAC |
| | 1xMS2 | CGGGGTGGTGCCCATCCTGGTCGAGCTGGACGGCGACGTAAACGGCCACAAGTTCAGCGT |
| | | GTCCGGCGAGGGCGAGGGCGATGCCACCTACGGCAAGCTGACCCTGAAGTTCATCTGCAC |
| | | CACCGGCAAGCTGCCCGTGCCCTGGCCCACCCTCGTGACCACCCTGACGTACGGCGTGCA |
| | | GTGCTTACATACAAgcACATGAGGATCACCCATGTgc |
| | | (SEQ ID NO: 19289) |
| PL15355 | 24 gS1- | CACTGCACGCCGTAGGGGATGTTTTAGAGCTAGAAATAGCAAGTTAAAATAAGGCTAGTC |
| | 20_RT46_L8_1xM | CGTTATCAACTTGAAAAAGTGGCACCGAGTCGGTGCATGGTGAGCAAGGGCGAGGAGCTG |
| | S2 | TTCACCGGGGTGGTGCCCATCCTGGTCGAGCTGGACGGCGACGTAAACGGCCACAAGTTC |
| | | AGCGTGTCCGGCGAGGGCGAGGGCGATGCCACCTACGGCAAGCTGACCCTGAAGTTCATC |
| | | TGCACCACCGGCAAGCTGCCCGTGCCCTGGCCCACCCTCGTGACCACCCTGACGTACGGC |
| | | GTGCAGTGCTTACATACAAgcACATGAGGATCACCCATGTgc |
| | | (SEQ ID NO: 19290) |
| PL15356 | 25 gS2- | GGATGGGCACCACCCGTTTTAGAGCTAGAAATAGCAAGTTAAAATAAGGCTAGTCCGTTA |
| | 15_RT46_ | TCAACTTGAAAAAGTGGCACCGAGTCGGTGCATGGTGAGCAAGGGCGAGGAGCTGTTCAC |
| | L8_1xMS2 | CGGGGTGGTGCCCATCCTGGTCGAGCTGGACGGCGACGTAAACGGCCACAAGTTCAGCGT |
| | | GTCCGGCGAGGGCGAGGGCGATGCCACCTACGGCAAGCTGACCCTGAAGTTCATCTGCAC |
| | | CACCGGCAAGCTGCCCGTGCCCTGGCCCACCCTCGTGACCACCCTGACGTACGGCGTGCA |
| | | GTGCTTACATACAAgcACATGAGGATCACCCATGTgc |
| | | (SEQ ID NO: 19291) |
| PL15357 | 26 gS2- | GTAGGGGATGGGCACCACCCGTTTTAGAGCTAGAAATAGCAAGTTAAAATAAGGCTAGTC |
| | 20_RT46_L8_1xMS2 | CGTTATCAACTTGAAAAAGTGGCACCGAGTCGGTGCATGGTGAGCAAGGGCGAGGAGCTG |
| | | TTCACCGGGGTGGTGCCCATCCTGGTCGAGCTGGACGGCGACGTAAACGGCCACAAGTTC |
| | | AGCGTGTCCGGCGAGGGCGAGGGCGATGCCACCTACGGCAAGCTGACCCTGAAGTTCATC |
| | | TGCACCACCGGCAAGCTGCCCGTGCCCTGGCCCACCCTCGTGACCACCCTGACGTACGGC |
| | | GTGCAGTGCTTACATACAAgcACATGAGGATCACCCATGTgc |
| | | (SEQ ID NO: 19292) |
| PL15358 | 27 gS3-15_RT46_ | CGCCCTTGCTCACCAGTTTTAGAGCTAGAAATAGCAAGTTAAAATAAGGCTAGTCCGTTA |
| | L8_1xMS2 | TCAACTTGAAAAAGTGGCACCGAGTCGGTGCATGGTGAGCAAGGGCGAGGAGCTGTTCAC |
| | | CGGGGTGGTGCCCATCCTGGTCGAGCTGGACGGCGACGTAAACGGCCACAAGTTCAGCGT |
| | | GTCCGGCGAGGGCGAGGGCGATGCCACCTACGGCAAGCTGACCCTGAAGTTCATCTGCAC |
| | | CACCGGCAAGCTGCCCGTGCCCTGGCCCACCCTCGTGACCACCCTGACGTACGGCGTGCA |
| | | GTGCTTACATACAAgcACATGAGGATCACCCATGTgc |
| | | (SEQ ID NO: 19293) |
| PL15359 | 28 gS3- | CTCCTCGCCCTTGCTCACCAGTTTTAGAGCTAGAAATAGCAAGTTAAAATAAGGCTAGTC |
| | 20_RT46_L8_1xMS2 | CGTTATCAACTTGAAAAAGTGGCACCGAGTCGGTGCATGGTGAGCAAGGGCGAGGAGCTG |
| | | TTCACCGGGGTGGTGCCCATCCTGGTCGAGCTGGACGGCGACGTAAACGGCCACAAGTTC |
| | | AGCGTGTCCGGCGAGGGCGAGGGCGATGCCACCTACGGCAAGCTGACCCTGAAGTTCATC |
| | | TGCACCACCGGCAAGCTGCCCGTGCCCTGGCCCACCCTCGTGACCACCCTGACGTACGGC |
| | | GTGCAGTGCTTACATACAAgcACATGAGGATCACCCATGTgc |
| | | (SEQ ID NO: 19294) |
| PL15360 | 29 | CGCGGTTCTATCTAGTTACGCGTTAAACCAACTAGAATGGTGCCCATCCTGGTCGAGCTG |
| | pseudoknot_RT12_ | GACGGCGACGTAAACGGCCACAAGTTCAGCGTGTCCGGCGAGGGCGAGGGCGATGCCACC |
| | L16_4xMS2 | TACGGCAAGCTGACCCTGAAGTTCATCTGCACCACCGGCAAGCTGCCCGTGCCCTGGCCC |
| | | ACCCTCGTGACCACCCTGACGTACGGCGTGCAGTGCTTACATACAACTAACATAgggagc |
| | | ACATGAGGATCACCCATGTgcgactcCCACAGTCACTGGGgagtcttccctctctctctc |
| | | tctctctctcgggagcACATGAGGATCACCCATGTgcgactcCCACAGTCACTGGGgagt |
| | | cttccc |
| | | (SEQ ID NO: 19295) |
| PL15361 | 30 scaffold_ | GTTTTAGAGCTAGAAATAGCAAGTTAAAATAAGGCTAGTCCGTTATCAACTTGAAAAAGT |
| | RT12_L16_ | GGCACCGAGTCGGTGCTGGTGCCCATCCTGGTCGAGCTGGACGGCGACGTAAACGGCCAC |
| | _4xMS2 | AAGTTCAGCGTGTCCGGCGAGGGCGAGGGCGATGCCACCTACGGCAAGCTGACCCTGAAG |
| | | TTCATCTGCACCACCGGCAAGCTGCCCGTGCCCTGGCCCACCCTCGTGACCACCCTGACG |
| | | TACGGCGTGCAGTGCTTACATACAACTAACATAgggagcACATGAGGATCACCCATGTgc |
| | | gactcCCACAGTCACTGGGgagtcttccctctctctctctctctctctcgggagcACATG |
| | | AGGATCACCCATGTgcgactcCCACAGTCACTGGGgagtcttccc |
| | | (SEQ ID NO: 19296) |
| PL15362 | 31 gAS1- | AGCTGTTCACCGGGGGTTTTAGAGCTAGAAATAGCAAGTTAAAATAAGGCTAGTCCGTTA |
| | 15_RT12_L16_4x | TCAACTTGAAAAAGTGGCACCGAGTCGGTGCTGGTGCCCATCCTGGTCGAGCTGGACGGC |
| | MS2 | GACGTAAACGGCCACAAGTTCAGCGTGTCCGGCGAGGGCGAGGGCGATGCCACCTACGGC |
| | | AAGCTGACCCTGAAGTTCATCTGCACCACCGGCAAGCTGCCCGTGCCCTGGCCCACCCTC |
| | | GTGACCACCCTGACGTACGGCGTGCAGTGCTTACATACAACTAACATAgggagcACATGA |
| | | GGATCACCCATGTgcgactcCCACAGTCACTGGGgagtcttccctctctctctctctctc |
| | | tctcgggagcACATGAGGATCACCCATGTgcgactcCCACAGTCACTGGGgagtcttccc |
| | | (SEQ ID NO: 19297) |
| PL15363 | 32 gAS1- | CGAGGAGCTGTTCACCGGGGGTTTTAGAGCTAGAAATAGCAAGTTAAAATAAGGCTAGTC |
| | 20_RT12_L16_4x | CGTTATCAACTTGAAAAAGTGGCACCGAGTCGGTGCTGGTGCCCATCCTGGTCGAGCTGG |
| | MS2 | ACGGCGACGTAAACGGCCACAAGTTCAGCGTGTCCGGCGAGGGCGAGGGCGATGCCACCT |
| | | ACGGCAAGCTGACCCTGAAGTTCATCTGCACCACCGGCAAGCTGCCCGTGCCCTGGCCCA |
| | | CCCTCGTGACCACCCTGACGTACGGCGTGCAGTGCTTACATACAACTAACATAgggagcA |
| | | CATGAGGATCACCCATGTgcgactcCCACAGTCACTGGGgagtcttccctctctctctct |
| | | ctctctctcgggagcACATGAGGATCACCCATGTgcgactcCCACAGTCACTGGGgagtc |
| | | ttccc |
| | | (SEQ ID NO: 19298) |
| PL15364 | 33 gAS2- | TGGTGAGCAAGGGCGGTTTTAGAGCTAGAAATAGCAAGTTAAAATAAGGCTAGTCCGTTA |
| | 15_RT12_L16_4x | TCAACTTGAAAAAGTGGCACCGAGTCGGTGCTGGTGCCCATCCTGGTCGAGCTGGACGGC |
| | MS2 | GACGTAAACGGCCACAAGTTCAGCGTGTCCGGCGAGGGCGAGGGCGATGCCACCTACGGC |
| | | AAGCTGACCCTGAAGTTCATCTGCACCACCGGCAAGCTGCCCGTGCCCTGGCCCACCCTC |
| | | GTGACCACCCTGACGTACGGCGTGCAGTGCTTACATACAACTAACATAgggagcACATGA |
| | | GGATCACCCATGTgcgactcCCACAGTCACTGGGgagtcttccctctctctctctctctc |
| | | tctcgggagcACATGAGGATCACCCATGTgcgactcCCACAGTCACTGGGgagtcttccc |
| | | (SEQ ID NO: 19299) |
| PL15365 | 34 gAS2- | CACCATGGTGAGCAAGGGCGGTTTTAGAGCTAGAAATAGCAAGTTAAAATAAGGCTAGTC |
| | 20_RT12_L16_4x | CGTTATCAACTTGAAAAAGTGGCACCGAGTCGGTGCTGGTGCCCATCCTGGTCGAGCTGG |
| | MS2 | ACGGCGACGTAAACGGCCACAAGTTCAGCGTGTCCGGCGAGGGCGAGGGCGATGCCACCT |
| | | ACGGCAAGCTGACCCTGAAGTTCATCTGCACCACCGGCAAGCTGCCCGTGCCCTGGCCCA |
| | | CCCTCGTGACCACCCTGACGTACGGCGTGCAGTGCTTACATACAACTAACATAgggagcA |
| | | CATGAGGATCACCCATGTgcgactcCCACAGTCACTGGGgagtcttccctctctctctct |
| | | ctctctctcgggagcACATGAGGATCACCCATGTgcgactcCCACAGTCACTGGGgagtc |
| | | ttccc |
| | | (SEQ ID NO: 19300) |
| PL15366 | 35 gAS3- | CCACCGCCGCCACCAGTTTTAGAGCTAGAAATAGCAAGTTAAAATAAGGCTAGTCCGTTA |
| | 15_RT12_L16_4x | TCAACTTGAAAAAGTGGCACCGAGTCGGTGCTGGTGCCCATCCTGGTCGAGCTGGACGGC |
| | MS2 | GACGTAAACGGCCACAAGTTCAGCGTGTCCGGCGAGGGCGAGGGCGATGCCACCTACGGC |
| | | AAGCTGACCCTGAAGTTCATCTGCACCACCGGCAAGCTGCCCGTGCCCTGGCCCACCCTC |
| | | GTGACCACCCTGACGTACGGCGTGCAGTGCTTACATACAACTAACATAgggagcACATGA |
| | | GGATCACCCATGTgcgactcCCACAGTCACTGGGgagtcttccctctctctctctctctc |
| | | tctcgggagcACATGAGGATCACCCATGTgcgactcCCACAGTCACTGGGgagtcttccc |
| | | (SEQ ID NO: 19301) |
| PL15367 | 36 gAS3- | TCGAGCCACCGCCGCCACCAGTTTTAGAGCTAGAAATAGCAAGTTAAAATAAGGCTAGTC |
| | 20_RT12_L16_ | CGTTATCAACTTGAAAAAGTGGCACCGAGTCGGTGCTGGTGCCCATCCTGGTCGAGCTGG |
| | 4xMS2 | ACGGCGACGTAAACGGCCACAAGTTCAGCGTGTCCGGCGAGGGCGAGGGCGATGCCACCT |
| | | ACGGCAAGCTGACCCTGAAGTTCATCTGCACCACCGGCAAGCTGCCCGTGCCCTGGCCCA |
| | | CCCTCGTGACCACCCTGACGTACGGCGTGCAGTGCTTACATACAACTAACATAgggagcA |
| | | CATGAGGATCACCCATGTgcgactcCCACAGTCACTGGGgagtcttccctctctctctct |
| | | ctctctctcgggagcACATGAGGATCACCCATGTgcgactcCCACAGTCACTGGGgagtc |
| | | ttccc |
| | | (SEQ ID NO: 19302) |
| PL15368 | 37 gS1- | CACGCCGTAGGGGATGTTTTAGAGCTAGAAATAGCAAGTTAAAATAAGGCTAGTCCGTTA |
| | 15_RT12_L16_4x | TCAACTTGAAAAAGTGGCACCGAGTCGGTGCTGGTGCCCATCCTGGTCGAGCTGGACGGC |
| | MS2 | GACGTAAACGGCCACAAGTTCAGCGTGTCCGGCGAGGGCGAGGGCGATGCCACCTACGGC |
| | | AAGCTGACCCTGAAGTTCATCTGCACCACCGGCAAGCTGCCCGTGCCCTGGCCCACCCTC |
| | | GTGACCACCCTGACGTACGGCGTGCAGTGCTTACATACAACTAACATAgggagcACATGA |
| | | GGATCACCCATGTgcgactcCCACAGTCACTGGGgagtcttccctctctctctctctctc |
| | | tctcgggagcACATGAGGATCACCCATGTgcgactcCCACAGTCACTGGGgagtcttccc |
| | | (SEQ ID NO: 19303) |
| PL15369 | 38 gS1- | CACTGCACGCCGTAGGGGATGTTTTAGAGCTAGAAATAGCAAGTTAAAATAAGGCTAGTC |
| | 20_RT12_L16_4x | CGTTATCAACTTGAAAAAGTGGCACCGAGTCGGTGCTGGTGCCCATCCTGGTCGAGCTGG |
| | MS2 | ACGGCGACGTAAACGGCCACAAGTTCAGCGTGTCCGGCGAGGGCGAGGGCGATGCCACCT |
| | | ACGGCAAGCTGACCCTGAAGTTCATCTGCACCACCGGCAAGCTGCCCGTGCCCTGGCCCA |
| | | CCCTCGTGACCACCCTGACGTACGGCGTGCAGTGCTTACATACAACTAACATAgggagcA |
| | | CATGAGGATCACCCATGTgcgactcCCACAGTCACTGGGgagtcttccctctctctctct |
| | | ctctctctcgggagcACATGAGGATCACCCATGTgcgactcCCACAGTCACTGGGgagtc |
| | | ttccc |
| | | (SEQ ID NO: 19304) |
| PL15370 | 39 gS2- | GGATGGGCACCACCCGTTTTAGAGCTAGAAATAGCAAGTTAAAATAAGGCTAGTCCGTTA |
| | 15_RT12_L16_4x | TCAACTTGAAAAAGTGGCACCGAGTCGGTGCTGGTGCCCATCCTGGTCGAGCTGGACGGC |
| | MS2 | GACGTAAACGGCCACAAGTTCAGCGTGTCCGGCGAGGGCGAGGGCGATGCCACCTACGGC |
| | | AAGCTGACCCTGAAGTTCATCTGCACCACCGGCAAGCTGCCCGTGCCCTGGCCCACCCTC |
| | | GTGACCACCCTGACGTACGGCGTGCAGTGCTTACATACAACTAACATAgggagcACATGA |
| | | GGATCACCCATGTgcgactcCCACAGTCACTGGGgagtcttccctctctctctctctctc |
| | | tctcgggagcACATGAGGATCACCCATGTgcgactcCCACAGTCACTGGGgagtcttccc |
| | | (SEQ ID NO: 19305) |
| PL15371 | 40 gS2- | GTAGGGGATGGGCACCACCCGTTTTAGAGCTAGAAATAGCAAGTTAAAATAAGGCTAGTC |
| | 20_RT12_L16_4x | CGTTATCAACTTGAAAAAGTGGCACCGAGTCGGTGCTGGTGCCCATCCTGGTCGAGCTGG |
| | MS2 | ACGGCGACGTAAACGGCCACAAGTTCAGCGTGTCCGGCGAGGGCGAGGGCGATGCCACCT |
| | | ACGGCAAGCTGACCCTGAAGTTCATCTGCACCACCGGCAAGCTGCCCGTGCCCTGGCCCA |
| | | CCCTCGTGACCACCCTGACGTACGGCGTGCAGTGCTTACATACAACTAACATAgggagcA |
| | | CATGAGGATCACCCATGTgcgactcCCACAGTCACTGGGgagtcttccctctctctctct |
| | | ctctctctcgggagcACATGAGGATCACCCATGTgcgactcCCACAGTCACTGGGgagtc |
| | | ttccc |
| | | (SEQ ID NO: 19306) |
| PL15372 | 41 gS3- | CGCCCTTGCTCACCAGTTTTAGAGCTAGAAATAGCAAGTTAAAATAAGGCTAGTCCGTTA |
| | 15_RT12_L16_4x | TCAACTTGAAAAAGTGGCACCGAGTCGGTGCTGGTGCCCATCCTGGTCGAGCTGGACGGC |
| | MS2 | GACGTAAACGGCCACAAGTTCAGCGTGTCCGGCGAGGGCGAGGGCGATGCCACCTACGGC |
| | | AAGCTGACCCTGAAGTTCATCTGCACCACCGGCAAGCTGCCCGTGCCCTGGCCCACCCTC |
| | | GTGACCACCCTGACGTACGGCGTGCAGTGCTTACATACAACTAACATAgggagcACATGA |
| | | GGATCACCCATGTgcgactcCCACAGTCACTGGGgagtcttccctctctctctctctctc |
| | | tctcgggagcACATGAGGATCACCCATGTgcgactcCCACAGTCACTGGGgagtcttccc |
| | | (SEQ ID NO: 19307) |
| PL15373 | 42 gS3- | CTCCTCGCCCTTGCTCACCAGTTTTAGAGCTAGAAATAGCAAGTTAAAATAAGGCTAGTC |
| | 20_RT12_L16_4x | CGTTATCAACTTGAAAAAGTGGCACCGAGTCGGTGCTGGTGCCCATCCTGGTCGAGCTGG |
| | MS2 | ACGGCGACGTAAACGGCCACAAGTTCAGCGTGTCCGGCGAGGGCGAGGGCGATGCCACCT |
| | | ACGGCAAGCTGACCCTGAAGTTCATCTGCACCACCGGCAAGCTGCCCGTGCCCTGGCCCA |
| | | CCCTCGTGACCACCCTGACGTACGGCGTGCAGTGCTTACATACAACTAACATAgggagcA |
| | | CATGAGGATCACCCATGTgcgactcCCACAGTCACTGGGgagtcttccctctctctctct |
| | | ctctctctcgggagcACATGAGGATCACCCATGTgcgactcCCACAGTCACTGGGgagtc |
| | | ttccc |
| | | (SEQ ID NO: 19308) |
| PL15374 | 43 | CGCGGTTCTATCTAGTTACGCGTTAAACCAACTAGAAATGGTGAGCAAGGGCGAGGAGCT |
| | pseudoknot_RT46_ | GTTCACCGGGGTGGTGCCCATCCTGGTCGAGCTGGACGGCGACGTAAACGGCCACAAGTT |
| | L16_4xMS2 | CAGCGTGTCCGGCGAGGGCGAGGGCGATGCCACCTACGGCAAGCTGACCCTGAAGTTCAT |
| | | CTGCACCACCGGCAAGCTGCCCGTGCCCTGGCCCACCCTCGTGACCACCCTGACGTACGG |
| | | CGTGCAGTGCTTACATACAACTAACATAgggagcACATGAGGATCACCCATGTgcgactc |
| | | CCACAGTCACTGGGgagtcttccctctctctctctctctctctcgggagcACATGAGGAT |
| | | CACCCATGTgcgactcCCACAGTCACTGGGgagtcttccc |
| | | (SEQ ID NO: 19309) |
| PL15375 | 44 | GTTTTAGAGCTAGAAATAGCAAGTTAAAATAAGGCTAGTCCGTTATCAACTTGAAAAAGT |
| | scaffold_RT46_ | GGCACCGAGTCGGTGCATGGTGAGCAAGGGCGAGGAGCTGTTCACCGGGGTGGTGCCCAT |
| | L16_4xMS2 | CCTGGTCGAGCTGGACGGCGACGTAAACGGCCACAAGTTCAGCGTGTCCGGCGAGGGCGA |
| | | GGGCGATGCCACCTACGGCAAGCTGACCCTGAAGTTCATCTGCACCACCGGCAAGCTGCC |
| | | CGTGCCCTGGCCCACCCTCGTGACCACCCTGACGTACGGCGTGCAGTGCTTACATACAAC |
| | | TAACATAgggagcACATGAGGATCACCCATGTgcgactcCCACAGTCACTGGGgagtctt |
| | | ccctctctctctctctctctctcgggagcACATGAGGATCACCCATGTgcgactcCCACA |
| | | GTCACTGGGgagtcttccc |
| | | (SEQ ID NO: 19310) |
| PL15376 | 45 gAS1- | AGCTGTTCACCGGGGGTTTTAGAGCTAGAAATAGCAAGTTAAAATAAGGCTAGTCCGTTA |
| | 15_RT46_L16_4xMS2 | TCAACTTGAAAAAGTGGCACCGAGTCGGTGCATGGTGAGCAAGGGCGAGGAGCTGTTCAC |
| | | CGGGGTGGTGCCCATCCTGGTCGAGCTGGACGGCGACGTAAACGGCCACAAGTTCAGCGT |
| | | GTCCGGCGAGGGCGAGGGCGATGCCACCTACGGCAAGCTGACCCTGAAGTTCATCTGCAC |
| | | CACCGGCAAGCTGCCCGTGCCCTGGCCCACCCTCGTGACCACCCTGACGTACGGCGTGCA |
| | | GTGCTTACATACAACTAACATAgggagcACATGAGGATCACCCATGTgcgactcCCACAG |
| | | TCACTGGGgagtcttccctctctctctctctctctctcgggagcACATGAGGATCACCCA |
| | | TGTgcgactcCCACAGTCACTGGGgagtcttccc |
| | | (SEQ ID NO: 19311) |
| PL15377 | 46 gAS1- | CGAGGAGCTGTTCACCGGGGGTTTTAGAGCTAGAAATAGCAAGTTAAAATAAGGCTAGTC |
| | 20_RT46_L16_4xMS2 | CGTTATCAACTTGAAAAAGTGGCACCGAGTCGGTGCATGGTGAGCAAGGGCGAGGAGCTG |
| | | TTCACCGGGGTGGTGCCCATCCTGGTCGAGCTGGACGGCGACGTAAACGGCCACAAGTTC |
| | | AGCGTGTCCGGCGAGGGCGAGGGCGATGCCACCTACGGCAAGCTGACCCTGAAGTTCATC |
| | | TGCACCACCGGCAAGCTGCCCGTGCCCTGGCCCACCCTCGTGACCACCCTGACGTACGGC |
| | | GTGCAGTGCTTACATACAACTAACATAgggagcACATGAGGATCACCCATGTgcgactcC |
| | | CACAGTCACTGGGgagtcttccctctctctctctctctctctcgggagcACATGAGGATC |
| | | ACCCATGTgcgactcCCACAGTCACTGGGgagtcttccc |
| | | (SEQ ID NO: 19312) |
| PL15378 | 47 gAS2- | TGGTGAGCAAGGGCGGTTTTAGAGCTAGAAATAGCAAGTTAAAATAAGGCTAGTCCGTTA |
| | 15_RT46_L16_4x | TCAACTTGAAAAAGTGGCACCGAGTCGGTGCATGGTGAGCAAGGGCGAGGAGCTGTTCAC |
| | MS2 | CGGGGTGGTGCCCATCCTGGTCGAGCTGGACGGCGACGTAAACGGCCACAAGTTCAGCGT |
| | | GTCCGGCGAGGGCGAGGGCGATGCCACCTACGGCAAGCTGACCCTGAAGTTCATCTGCAC |
| | | CACCGGCAAGCTGCCCGTGCCCTGGCCCACCCTCGTGACCACCCTGACGTACGGCGTGCA |
| | | GTGCTTACATACAACTAACATAgggagcACATGAGGATCACCCATGTgcgactcCCACAG |
| | | TCACTGGGgagtcttccctctctctctctctctctctcgggagcACATGAGGATCACCCA |
| | | TGTgcgactcCCACAGTCACTGGGgagtcttccc |
| | | (SEQ ID NO: 19313) |
| PL15379 | 48 gAS2- | CACCATGGTGAGCAAGGGCGGTTTTAGAGCTAGAAATAGCAAGTTAAAATAAGGCTAGTC |
| | 20_RT46_L16_4x | CGTTATCAACTTGAAAAAGTGGCACCGAGTCGGTGCATGGTGAGCAAGGGCGAGGAGCTG |
| | MS2 | TTCACCGGGGTGGTGCCCATCCTGGTCGAGCTGGACGGCGACGTAAACGGCCACAAGTTC |
| | | AGCGTGTCCGGCGAGGGCGAGGGCGATGCCACCTACGGCAAGCTGACCCTGAAGTTCATC |
| | | TGCACCACCGGCAAGCTGCCCGTGCCCTGGCCCACCCTCGTGACCACCCTGACGTACGGC |
| | | GTGCAGTGCTTACATACAACTAACATAgggagcACATGAGGATCACCCATGTgcgactcC |
| | | CACAGTCACTGGGgagtcttccctctctctctctctctctctcgggagcACATGAGGATC |
| | | ACCCATGTgcgactcCCACAGTCACTGGGgagtcttccc |
| | | (SEQ ID NO: 19314) |
| PL15380 | 49 gAS3- | CCACCGCCGCCACCAGTTTTAGAGCTAGAAATAGCAAGTTAAAATAAGGCTAGTCCGTTA |
| | 15_RT46_L16_4x | TCAACTTGAAAAAGTGGCACCGAGTCGGTGCATGGTGAGCAAGGGCGAGGAGCTGTTCAC |
| | MS2 | CGGGGTGGTGCCCATCCTGGTCGAGCTGGACGGCGACGTAAACGGCCACAAGTTCAGCGT |
| | | GTCCGGCGAGGGCGAGGGCGATGCCACCTACGGCAAGCTGACCCTGAAGTTCATCTGCAC |
| | | CACCGGCAAGCTGCCCGTGCCCTGGCCCACCCTCGTGACCACCCTGACGTACGGCGTGCA |
| | | GTGCTTACATACAACTAACATAgggagcACATGAGGATCACCCATGTgcgactcCCACAG |
| | | TCACTGGGgagtcttccctctctctctctctctctctcgggagcACATGAGGATCACCCA |
| | | TGTgcgactcCCACAGTCACTGGGgagtcttccc |
| | | (SEQ ID NO: 19315) |
| PL15381 | 50 gAS3- | TCGAGCCACCGCCGCCACCAGTTTTAGAGCTAGAAATAGCAAGTTAAAATAAGGCTAGTC |
| | 20_RT46_L16_ | CGTTATCAACTTGAAAAAGTGGCACCGAGTCGGTGCATGGTGAGCAAGGGCGAGGAGCTG |
| | 4xMS2 | TTCACCGGGGTGGTGCCCATCCTGGTCGAGCTGGACGGCGACGTAAACGGCCACAAGTTC |
| | | AGCGTGTCCGGCGAGGGCGAGGGCGATGCCACCTACGGCAAGCTGACCCTGAAGTTCATC |
| | | TGCACCACCGGCAAGCTGCCCGTGCCCTGGCCCACCCTCGTGACCACCCTGACGTACGGC |
| | | GTGCAGTGCTTACATACAACTAACATAgggagcACATGAGGATCACCCATGTgcgactcC |
| | | CACAGTCACTGGGgagtcttccctctctctctctctctctctcgggagcACATGAGGATC |
| | | ACCCATGTgcgactcCCACAGTCACTGGGgagtcttccc |
| | | (SEQ ID NO: 19316) |
| PL15382 | 51 gS1- | CACGCCGTAGGGGATGTTTTAGAGCTAGAAATAGCAAGTTAAAATAAGGCTAGTCCGTTA |
| | 15_RT46_L16_ | TCAACTTGAAAAAGTGGCACCGAGTCGGTGCATGGTGAGCAAGGGCGAGGAGCTGTTCAC |
| | 4xMS2 | CGGGGTGGTGCCCATCCTGGTCGAGCTGGACGGCGACGTAAACGGCCACAAGTTCAGCGT |
| | | GTCCGGCGAGGGCGAGGGCGATGCCACCTACGGCAAGCTGACCCTGAAGTTCATCTGCAC |
| | | CACCGGCAAGCTGCCCGTGCCCTGGCCCACCCTCGTGACCACCCTGACGTACGGCGTGCA |
| | | GTGCTTACATACAACTAACATAgggagcACATGAGGATCACCCATGTgcgactcCCACAG |
| | | TCACTGGGgagtcttccctctctctctctctctctctcgggagcACATGAGGATCACCCA |
| | | TGTgcgactcCCACAGTCACTGGGgagtcttccc |
| | | (SEQ ID NO: 19317) |
| PL15383 | MS2 | CACTGCACGCCGTAGGGGATGTTTTAGAGCTAGAAATAGCAAGTTAAAATAAGGCTAGTC |
| | 52 gS1- | CGTTATCAACTTGAAAAAGTGGCACCGAGTCGGTGCATGGTGAGCAAGGGCGAGGAGCTG |
| | 20_RT46_L16_4x | TTCACCGGGGTGGTGCCCATCCTGGTCGAGCTGGACGGCGACGTAAACGGCCACAAGTTC |
| | | AGCGTGTCCGGCGAGGGCGAGGGCGATGCCACCTACGGCAAGCTGACCCTGAAGTTCATC |
| | | TGCACCACCGGCAAGCTGCCCGTGCCCTGGCCCACCCTCGTGACCACCCTGACGTACGGC |
| | | GTGCAGTGCTTACATACAACTAACATAgggagcACATGAGGATCACCCATGTgcgactcC |
| | | CACAGTCACTGGGgagtcttccctctctctctctctctctctcgggagcACATGAGGATC |
| | | ACCCATGTgcgactcCCACAGTCACTGGGgagtcttccc |
| | | (SEQ ID NO: 19318) |
| PL15384 | 53 gS2- | GGATGGGCACCACCCGTTTTAGAGCTAGAAATAGCAAGTTAAAATAAGGCTAGTCCGTTA |
| | 15_RT46_L16_4x | TCAACTTGAAAAAGTGGCACCGAGTCGGTGCATGGTGAGCAAGGGCGAGGAGCTGTTCAC |
| | MS2 | CGGGGTGGTGCCCATCCTGGTCGAGCTGGACGGCGACGTAAACGGCCACAAGTTCAGCGT |
| | | GTCCGGCGAGGGCGAGGGCGATGCCACCTACGGCAAGCTGACCCTGAAGTTCATCTGCAC |
| | | CACCGGCAAGCTGCCCGTGCCCTGGCCCACCCTCGTGACCACCCTGACGTACGGCGTGCA |
| | | GTGCTTACATACAACTAACATAgggagcACATGAGGATCACCCATGTgcgactcCCACAG |
| | | TCACTGGGgagtcttccctctctctctctctctctctcgggagcACATGAGGATCACCCA |
| | | TGTgcgactcCCACAGTCACTGGGgagtcttccc |
| | | (SEQ ID NO: 19319) |
| PL15385 | 54 gS2- | GTAGGGGATGGGCACCACCCGTTTTAGAGCTAGAAATAGCAAGTTAAAATAAGGCTAGTC |
| | 20_RT46_L16_4x | CGTTATCAACTTGAAAAAGTGGCACCGAGTCGGTGCATGGTGAGCAAGGGCGAGGAGCTG |
| | MS2 | TTCACCGGGGTGGTGCCCATCCTGGTCGAGCTGGACGGCGACGTAAACGGCCACAAGTTC |
| | | AGCGTGTCCGGCGAGGGCGAGGGCGATGCCACCTACGGCAAGCTGACCCTGAAGTTCATC |
| | | TGCACCACCGGCAAGCTGCCCGTGCCCTGGCCCACCCTCGTGACCACCCTGACGTACGGC |
| | | GTGCAGTGCTTACATACAACTAACATAgggagcACATGAGGATCACCCATGTgcgactcC |
| | | CACAGTCACTGGGgagtcttccctctctctctctctctctctcgggagcACATGAGGATC |
| | | ACCCATGTgcgactcCCACAGTCACTGGGgagtcttccc |
| | | (SEQ ID NO: 19320) |
| PL15386 | 55 gS3- | CGCCCTTGCTCACCAGTTTTAGAGCTAGAAATAGCAAGTTAAAATAAGGCTAGTCCGTTA |
| | 15_RT46_L16_4x | TCAACTTGAAAAAGTGGCACCGAGTCGGTGCATGGTGAGCAAGGGCGAGGAGCTGTTCAC |
| | MS2 | CGGGGTGGTGCCCATCCTGGTCGAGCTGGACGGCGACGTAAACGGCCACAAGTTCAGCGT |
| | | GTCCGGCGAGGGCGAGGGCGATGCCACCTACGGCAAGCTGACCCTGAAGTTCATCTGCAC |
| | | CACCGGCAAGCTGCCCGTGCCCTGGCCCACCCTCGTGACCACCCTGACGTACGGCGTGCA |
| | | GTGCTTACATACAACTAACATAgggagcACATGAGGATCACCCATGTgcgactcCCACAG |
| | | TCACTGGGgagtcttccctctctctctctctctctctcgggagcACATGAGGATCACCCA |
| | | TGTgcgactcCCACAGTCACTGGGgagtcttccc |
| | | (SEQ ID NO: 19321) |
| PL15387 | 56 gS3- | CTCCTCGCCCTTGCTCACCAGTTTTAGAGCTAGAAATAGCAAGTTAAAATAAGGCTAGTC |
| | 20_RT46_L16_4x | CGTTATCAACTTGAAAAAGTGGCACCGAGTCGGTGCATGGTGAGCAAGGGCGAGGAGCTG |
| | MS2 | TTCACCGGGGTGGTGCCCATCCTGGTCGAGCTGGACGGCGACGTAAACGGCCACAAGTTC |
| | | AGCGTGTCCGGCGAGGGCGAGGGCGATGCCACCTACGGCAAGCTGACCCTGAAGTTCATC |
| | | TGCACCACCGGCAAGCTGCCCGTGCCCTGGCCCACCCTCGTGACCACCCTGACGTACGGC |
| | | GTGCAGTGCTTACATACAACTAACATAgggagcACATGAGGATCACCCATGTgcgactcC |
| | | CACAGTCACTGGGgagtcttccctctctctctctctctctctcgggagcACATGAGGATC |
| | | ACCCATGTgcgactcCCACAGTCACTGGGgagtcttccc |
| | | (SEQ ID NO: 19322) |
| PL15388 | 57 pseudoknot(1)_ | CGCGGTTCTATCTAGTTACGCGTTAAACCAACTAGAATGGTGCCCATCCTGGTCGAGCTG |
| | RT12_L16_ | GACGGCGACGTAAACGGCCACAAGTTCAGCGTGTCCGGCGAGGGCGAGGGCGATGCCACC |
| | pseudoknot(2) | TACGGCAAGCTGACCCTGAAGTTCATCTGCACCACCGGCAAGCTGCCCGTGCCCTGGCCC |
| | | ACCCTCGTGACCACCCTGACGTACGGCGTGCAGTGCTTACATACAACTAACATAGGGTCA |
| | | GGAGCCCCCCCCTGAACCCAGGATAACCCTCAAAGTCGGGGGGC |
| | | (SEQ ID NO: 19323) |
| PL15389 | 58 scaffold_ | GTTTTAGAGCTAGAAATAGCAAGTTAAAATAAGGCTAGTCCGTTATCAACTTGAAAAAGT |
| | RT12_L16_ | GGCACCGAGTCGGTGCTGGTGCCCATCCTGGTCGAGCTGGACGGCGACGTAAACGGCCAC |
| | pseudoknot | AAGTTCAGCGTGTCCGGCGAGGGCGAGGGCGATGCCACCTACGGCAAGCTGACCCTGAAG |
| | | TTCATCTGCACCACCGGCAAGCTGCCCGTGCCCTGGCCCACCCTCGTGACCACCCTGACG |
| | | TACGGCGTGCAGTGCTTACATACAACTAACATAGGGTCAGGAGCCCCCCCCTGAACCCAG |
| | | GATAACCCTCAAAGTCGGGGGGC |
| | | (SEQ ID NO: 19324) |
| PL15390 | 59 gAS1- | AGCTGTTCACCGGGGGTTTTAGAGCTAGAAATAGCAAGTTAAAATAAGGCTAGTCCGTTA |
| | 15_RT12_L16_ | TCAACTTGAAAAAGTGGCACCGAGTCGGTGCTGGTGCCCATCCTGGTCGAGCTGGACGGC |
| | pseudoknot | GACGTAAACGGCCACAAGTTCAGCGTGTCCGGCGAGGGCGAGGGCGATGCCACCTACGGC |
| | | AAGCTGACCCTGAAGTTCATCTGCACCACCGGCAAGCTGCCCGTGCCCTGGCCCACCCTC |
| | | GTGACCACCCTGACGTACGGCGTGCAGTGCTTACATACAACTAACATAGGGTCAGGAGCC |
| | | CCCCCCTGAACCCAGGATAACCCTCAAAGTCGGGGGGC |
| | | (SEQ ID NO: 19325) |
| PL15391 | 60 gAS1-20_ | CGAGGAGCTGTTCACCGGGGGTTTTAGAGCTAGAAATAGCAAGTTAAAATAAGGCTAGTC |
| | RT12_L16_ | CGTTATCAACTTGAAAAAGTGGCACCGAGTCGGTGCTGGTGCCCATCCTGGTCGAGCTGG |
| | pseudoknot | ACGGCGACGTAAACGGCCACAAGTTCAGCGTGTCCGGCGAGGGCGAGGGCGATGCCACCT |
| | | ACGGCAAGCTGACCCTGAAGTTCATCTGCACCACCGGCAAGCTGCCCGTGCCCTGGCCCA |
| | | CCCTCGTGACCACCCTGACGTACGGCGTGCAGTGCTTACATACAACTAACATAGGGTCAG |
| | | GAGCCCCCCCCTGAACCCAGGATAACCCTCAAAGTCGGGGGGC |
| | | (SEQ ID NO: 19326) |
| PL15392 | 61 gAS2- | TGGTGAGCAAGGGCGGTTTTAGAGCTAGAAATAGCAAGTTAAAATAAGGCTAGTCCGTTA |
| | 15_RT12_L16_ | TCAACTTGAAAAAGTGGCACCGAGTCGGTGCTGGTGCCCATCCTGGTCGAGCTGGACGGC |
| | pseudoknot | GACGTAAACGGCCACAAGTTCAGCGTGTCCGGCGAGGGCGAGGGCGATGCCACCTACGGC |
| | | AAGCTGACCCTGAAGTTCATCTGCACCACCGGCAAGCTGCCCGTGCCCTGGCCCACCCTC |
| | | GTGACCACCCTGACGTACGGCGTGCAGTGCTTACATACAACTAACATAGGGTCAGGAGCC |
| | | CCCCCCTGAACCCAGGATAACCCTCAAAGTCGGGGGGC |
| | | (SEQ ID NO: 19327) |
| PL15393 | 62 gAS2- | CACCATGGTGAGCAAGGGCGGTTTTAGAGCTAGAAATAGCAAGTTAAAATAAGGCTAGTC |
| | 20_RT12_L16_ | CGTTATCAACTTGAAAAAGTGGCACCGAGTCGGTGCTGGTGCCCATCCTGGTCGAGCTGG |
| | pseudoknot | ACGGCGACGTAAACGGCCACAAGTTCAGCGTGTCCGGCGAGGGCGAGGGCGATGCCACCT |
| | | ACGGCAAGCTGACCCTGAAGTTCATCTGCACCACCGGCAAGCTGCCCGTGCCCTGGCCCA |
| | | CCCTCGTGACCACCCTGACGTACGGCGTGCAGTGCTTACATACAACTAACATAGGGTCAG |
| | | GAGCCCCCCCCTGAACCCAGGATAACCCTCAAAGTCGGGGGGC |
| | | (SEQ ID NO: 19328) |
| PL15394 | 63 gAS3- | CCACCGCCGCCACCAGTTTTAGAGCTAGAAATAGCAAGTTAAAATAAGGCTAGTCCGTTA |
| | 15_RT12_L16_ | TCAACTTGAAAAAGTGGCACCGAGTCGGTGCTGGTGCCCATCCTGGTCGAGCTGGACGGC |
| | pseudoknot | GACGTAAACGGCCACAAGTTCAGCGTGTCCGGCGAGGGCGAGGGCGATGCCACCTACGGC |
| | | AAGCTGACCCTGAAGTTCATCTGCACCACCGGCAAGCTGCCCGTGCCCTGGCCCACCCTC |
| | | GTGACCACCCTGACGTACGGCGTGCAGTGCTTACATACAACTAACATAGGGTCAGGAGCC |
| | | CCCCCCTGAACCCAGGATAACCCTCAAAGTCGGGGGGC |
| | | (SEQ ID NO: 19329) |
| PL15395 | 64 gAS3- | TCGAGCCACCGCCGCCACCAGTTTTAGAGCTAGAAATAGCAAGTTAAAATAAGGCTAGTC |
| | 20_RT12_L16_ | CGTTATCAACTTGAAAAAGTGGCACCACCCTGACGTACGGCGTGCAGTGCTTACATACAA |
| | pseudoknot | CTAACATAGGGTCAGGAGCCCCCCCCTGAACCCAGGATAACCCTCAAAGGGCGATGCCAC |
| | | CTACGGCAAGCTGACCCTGAAGTTCATCTGCACCACCGGCAAGCTGCCCGTGCCCTGGCC |
| | | CACCCTCGTGACCGAGTCGGTGCTGGTGCCCATCCTGGTCGAGCTGGACGGCGACGTAAA |
| | | CGGCCACAAGTTCAGCGTGTCCGGCGAGGGCGAGTCGGGGGGC |
| | | (SEQ ID NO: 19330) |
| PL15396 | 65 gS1- | CACGCCGTAGGGGATGTTTTAGAGCTAGAAATAGCAAGTTAAAATAAGGCTAGTCCGTTA |
| | 15_RT12_L16_ | TCAACTTGAAAAAGTGGCACCGAGTCGGTGCTGGTGCCCATCCTGGTCGAGCTGGACGGC |
| | pseudoknot | GACGTAAACGGCCACAAGTTCAGCGTGTCCGGCGAGGGCGAGGGCGATGCCACCTACGGC |
| | | AAGCTGACCCTGAAGTTCATCTGCACCACCGGCAAGCTGCCCGTGCCCTGGCCCACCCTC |
| | | GTGACCACCCTGACGTACGGCGTGCAGTGCTTACATACAACTAACATAGGGTCAGGAGCC |
| | | CCCCCCTGAACCCAGGATAACCCTCAAAGTCGGGGGGC |
| | | (SEQ ID NO: 19331) |
| PL15397 | 66 gS1- | CACTGCACGCCGTAGGGGATGTTTTAGAGCTAGAAATAGCAAGTTAAAATAAGGCTAGTC |
| | 20_RT12_L16_ | CGTTATCAACTTGAAAAAGTGGCACCGAGTCGGTGCTGGTGCCCATCCTGGTCGAGCTGG |
| | pseudoknot | ACGGCGACGTAAACGGCCACAAGTTCAGCGTGTCCGGCGAGGGCGAGGGCGATGCCACCT |
| | | ACGGCAAGCTGACCCTGAAGTTCATCTGCACCACCGGCAAGCTGCCCGTGCCCTGGCCCA |
| | | CCCTCGTGACCACCCTGACGTACGGCGTGCAGTGCTTACATACAACTAACATAGGGTCAG |
| | | GAGCCCCCCCCTGAACCCAGGATAACCCTCAAAGTCGGGGGGC |
| | | (SEQ ID NO: 19332) |
| PL15398 | 67 gS2- | GGATGGGCACCACCCGTTTTAGAGCTAGAAATAGCAAGTTAAAATAAGGCTAGTCCGTTA |
| | 15_RT12_L16_ | TCAACTTGAAAAAGTGGCACCGAGTCGGTGCTGGTGCCCATCCTGGTCGAGCTGGACGGC |
| | pseudoknot | GACGTAAACGGCCACAAGTTCAGCGTGTCCGGCGAGGGCGAGGGCGATGCCACCTACGGC |
| | | AAGCTGACCCTGAAGTTCATCTGCACCACCGGCAAGCTGCCCGTGCCCTGGCCCACCCTC |
| | | GTGACCACCCTGACGTACGGCGTGCAGTGCTTACATACAACTAACATAGGGTCAGGAGCC |
| | | CCCCCCTGAACCCAGGATAACCCTCAAAGTCGGGGGGC |
| | | (SEQ ID NO: 19333) |
| PL15399 | 68 gS2- | GTAGGGGATGGGCACCACCCGTTTTAGAGCTAGAAATAGCAAGTTAAAATAAGGCTAGTC |
| | 20_RT12_ | CGTTATCAACTTGAAAAAGTGGCACCACCCTGACGTACGGCGTGCAGTGCTTACATACAA |
| | L16_pseudoknot | CTAACATAGGGTCAGGAGCCCCCCCCTGAACCCAGGATAACCCTCAAAGGGCGATGCCAC |
| | | CTACGGCAAGCTGACCCTGAAGTTCATCTGCACCACCGGCAAGCTGCCCGTGCCCTGGCC |
| | | CACCCTCGTGACCGAGTCGGTGCTGGTGCCCATCCTGGTCGAGCTGGACGGCGACGTAAA |
| | | CGGCCACAAGTTCAGCGTGTCCGGCGAGGGCGAGTCGGGGGGC |
| | | (SEQ ID NO: 19334) |
| PL15400 | 69 gS3- | CGCCCTTGCTCACCAGTTTTAGAGCTAGAAATAGCAAGTTAAAATAAGGCTAGTCCGTTA |
| | 15_RT12_L16_ | TCAACTTGAAAAAGTGGCACCGAGTCGGTGCTGGTGCCCATCCTGGTCGAGCTGGACGGC |
| | pseudoknot | GACGTAAACGGCCACAAGTTCAGCGTGTCCGGCGAGGGCGAGGGCGATGCCACCTACGGC |
| | | AAGCTGACCCTGAAGTTCATCTGCACCACCGGCAAGCTGCCCGTGCCCTGGCCCACCCTC |
| | | GTGACCACCCTGACGTACGGCGTGCAGTGCTTACATACAACTAACATAGGGTCAGGAGCC |
| | | CCCCCCTGAACCCAGGATAACCCTCAAAGTCGGGGGGC |
| | | (SEQ ID NO: 19335) |
| PL15401 | 70 gS3- | CTCCTCGCCCTTGCTCACCAGTTTTAGAGCTAGAAATAGCAAGTTAAAATAAGGCTAGTC |
| | 20_RT12_L16_ | CGTTATCAACTTGAAAAAGTGGCACCGAGTCGGTGCTGGTGCCCATCCTGGTCGAGCTGG |
| | pseudoknot | ACGGCGACGTAAACGGCCACAAGTTCAGCGTGTCCGGCGAGGGCGAGGGCGATGCCACCT |
| | | ACGGCAAGCTGACCCTGAAGTTCATCTGCACCACCGGCAAGCTGCCCGTGCCCTGGCCCA |
| | | CCCTCGTGACCACCCTGACGTACGGCGTGCAGTGCTTACATACAACTAACATAGGGTCAG |
| | | GAGCCCCCCCCTGAACCCAGGATAACCCTCAAAGTCGGGGGGC |
| | | (SEQ ID NO: 19336) |
| PL15402 | 71 pseudoknot(1)_ | CGCGGTTCTATCTAGTTACGCGTTAAACCAACTAGAAATGGTGAGCAAGGGCGAGGAGCT |
| | RT46_L16_ | GTTCACCGGGGTGGTGCCCATCCTGGTCGAGCTGGACGGCGACGTAAACGGCCACAAGTT |
| | pseudoknot(2) | CAGCGTGTCCGGCGAGGGCGAGGGCGATGCCACCTACGGCAAGCTGACCCTGAAGTTCAT |
| | | CTGCACCACCGGCAAGCTGCCCGTGCCCTGGCCCACCCTCGTGACCACCCTGACGTACGG |
| | | CGTGCAGTGCTTACATACAACTAACATAGGGTCAGGAGCCCCCCCCTGAACCCAGGATAA |
| | | CCCTCAAAGTCGGGGGGC |
| | | (SEQ ID NO: 19337) |
| PL15403 | 72 | GTTTTAGAGCTAGAAATAGCAAGTTAAAATAAGGCTAGTCCGTTATCAACTTGAAAAAGT |
| | scaffold_ | GGCACCGAGTCGGTGCATGGTGAGCAAGGGCGAGGAGCTGTTCACCGGGGTGGTGCCCAT |
| | RT46_L16_ | CCTGGTCGAGCTGGACGGCGACGTAAACGGCCACAAGTTCAGCGTGTCCGGCGAGGGCGA |
| | pseudoknot | GGGCGATGCCACCTACGGCAAGCTGACCCTGAAGTTCATCTGCACCACCGGCAAGCTGCC |
| | | CGTGCCCTGGCCCACCCTCGTGACCACCCTGACGTACGGCGTGCAGTGCTTACATACAAC |
| | | TAACATAGGGTCAGGAGCCCCCCCCTGAACCCAGGATAACCCTCAAAGTCGGGGGGC |
| | | (SEQ ID NO: 19338) |
| PL15404 | 73 gAS1- | AGCTGTTCACCGGGGGTTTTAGAGCTAGAAATAGCAAGTTAAAATAAGGCTAGTCCGTTA |
| | 15_RT46_L16_ | TCAACTTGAAAAAGTGGCACCGAGTCGGTGCATGGTGAGCAAGGGCGAGGAGCTGTTCAC |
| | pseudoknot | CGGGGTGGTGCCCATCCTGGTCGAGCTGGACGGCGACGTAAACGGCCACAAGTTCAGCGT |
| | | GTCCGGCGAGGGCGAGGGCGATGCCACCTACGGCAAGCTGACCCTGAAGTTCATCTGCAC |
| | | CACCGGCAAGCTGCCCGTGCCCTGGCCCACCCTCGTGACCACCCTGACGTACGGCGTGCA |
| | | GTGCTTACATACAACTAACATAGGGTCAGGAGCCCCCCCCTGAACCCAGGATAACCCTCA |
| | | AAGTCGGGGGGC |
| | | (SEQ ID NO: 19339) |
| PL15405 | 74 gAS1- | CGAGGAGCTGTTCACCGGGGGTTTTAGAGCTAGAAATAGCAAGTTAAAATAAGGCTAGTC |
| | 20_RT46_L16_ | CGTTATCAACTTGAAAAAGTGGCACCGAGTCGGTGCATGGTGAGCAAGGGCGAGGAGCTG |
| | pseudoknot | TTCACCGGGGTGGTGCCCATCCTGGTCGAGCTGGACGGCGACGTAAACGGCCACAAGTTC |
| | | AGCGTGTCCGGCGAGGGCGAGGGCGATGCCACCTACGGCAAGCTGACCCTGAAGTTCATC |
| | | TGCACCACCGGCAAGCTGCCCGTGCCCTGGCCCACCCTCGTGACCACCCTGACGTACGGC |
| | | GTGCAGTGCTTACATACAACTAACATAGGGTCAGGAGCCCCCCCCTGAACCCAGGATAAC |
| | | CCTCAAAGTCGGGGGGC |
| | | (SEQ ID NO: 19340) |
| PL15406 | 75 gAS2- | TGGTGAGCAAGGGCGGTTTTAGAGCTAGAAATAGCAAGTTAAAATAAGGCTAGTCCGTTA |
| | 15_RT46_L16_ | TCAACTTGAAAAAGTGGCACCGAGTCGGTGCATGGTGAGCAAGGGCGAGGAGCTGTTCAC |
| | pseudoknot | CGGGGTGGTGCCCATCCTGGTCGAGCTGGACGGCGACGTAAACGGCCACAAGTTCAGCGT |
| | | GTCCGGCGAGGGCGAGGGCGATGCCACCTACGGCAAGCTGACCCTGAAGTTCATCTGCAC |
| | | CACCGGCAAGCTGCCCGTGCCCTGGCCCACCCTCGTGACCACCCTGACGTACGGCGTGCA |
| | | GTGCTTACATACAACTAACATAGGGTCAGGAGCCCCCCCCTGAACCCAGGATAACCCTCA |
| | | AAGTCGGGGGGC |
| | | (SEQ ID NO: 19341) |
| PL15407 | 76 gAS2- | CACCATGGTGAGCAAGGGCGGTTTTAGAGCTAGAAATAGCAAGTTAAAATAAGGCTAGTC |
| | 20_RT46_L16_ | CGTTATCAACTTGAAAAAGTGGCACCGAGTCGGTGCATGGTGAGCAAGGGCGAGGAGCTG |
| | pseudoknot | TTCACCGGGGTGGTGCCCATCCTGGTCGAGCTGGACGGCGACGTAAACGGCCACAAGTTC |
| | | AGCGTGTCCGGCGAGGGCGAGGGCGATGCCACCTACGGCAAGCTGACCCTGAAGTTCATC |
| | | TGCACCACCGGCAAGCTGCCCGTGCCCTGGCCCACCCTCGTGACCACCCTGACGTACGGC |
| | | GTGCAGTGCTTACATACAACTAACATAGGGTCAGGAGCCCCCCCCTGAACCCAGGATAAC |
| | | CCTCAAAGTCGGGGGGC |
| | | (SEQ ID NO: 19342) |
| PL15408 | 77 gAS3- | CCACCGCCGCCACCAGTTTTAGAGCTAGAAATAGCAAGTTAAAATAAGGCTAGTCCGTTA |
| | 15_RT46_L16_ | TCAACTTGAAAAAGTGGCACCGAGTCGGTGCATGGTGAGCAAGGGCGAGGAGCTGTTCAC |
| | pseudoknot | CGGGGTGGTGCCCATCCTGGTCGAGCTGGACGGCGACGTAAACGGCCACAAGTTCAGCGT |
| | | GTCCGGCGAGGGCGAGGGCGATGCCACCTACGGCAAGCTGACCCTGAAGTTCATCTGCAC |
| | | CACCGGCAAGCTGCCCGTGCCCTGGCCCACCCTCGTGACCACCCTGACGTACGGCGTGCA |
| | | GTGCTTACATACAACTAACATAGGGTCAGGAGCCCCCCCCTGAACCCAGGATAACCCTCA |
| | | AAGTCGGGGGGC |
| | | (SEQ ID NO: 19343) |
| PL15409 | 78 gAS3- | TCGAGCCACCGCCGCCACCAGTTTTAGAGCTAGAAATAGCAAGTTAAAATAAGGCTAGTC |
| | 20_RT46_L16_ | CGTTATCAACTTGAAAAAGTGGCACCGAGTCGGTGCATGGTGAGCAAGGGCGAGGAGCTG |
| | pseudoknot | TTCACCGGGGTGGTGCCCATCCTGGTCGAGCTGGACGGCGACGTAAACGGCCACAAGTTC |
| | | AGCGTGTCCGGCGAGGGCGAGGGCGATGCCACCTACGGCAAGCTGACCCTGAAGTTCATC |
| | | TGCACCACCGGCAAGCTGCCCGTGCCCTGGCCCACCCTCGTGACCACCCTGACGTACGGC |
| | | GTGCAGTGCTTACATACAACTAACATAGGGTCAGGAGCCCCCCCCTGAACCCAGGATAAC |
| | | CCTCAAAGTCGGGGGGC |
| | | (SEQ ID NO: 19344) |
| PL15410 | 79 gS1- | CACGCCGTAGGGGATGTTTTAGAGCTAGAAATAGCAAGTTAAAATAAGGCTAGTCCGTTA |
| | 15_RT46_L16_ | TCAACTTGAAAAAGTGGCACCGAGTCGGTGCATGGTGAGCAAGGGCGAGGAGCTGTTCAC |
| | pseudoknot | CGGGGTGGTGCCCATCCTGGTCGAGCTGGACGGCGACGTAAACGGCCACAAGTTCAGCGT |
| | | GTCCGGCGAGGGCGAGGGCGATGCCACCTACGGCAAGCTGACCCTGAAGTTCATCTGCAC |
| | | CACCGGCAAGCTGCCCGTGCCCTGGCCCACCCTCGTGACCACCCTGACGTACGGCGTGCA |
| | | GTGCTTACATACAACTAACATAGGGTCAGGAGCCCCCCCCTGAACCCAGGATAACCCTCA |
| | | AAGTCGGGGGGC |
| | | (SEQ ID NO: 19345) |
| PL15411 | 80 gS1-20_ | CACTGCACGCCGTAGGGGATGTTTTAGAGCTAGAAATAGCAAGTTAAAATAAGGCTAGTC |
| | RT46_L16_ | CGTTATCAACTTGAAAAAGTGGCACCGAGTCGGTGCATGGTGAGCAAGGGCGAGGAGCTG |
| | pseudoknot | TTCACCGGGGTGGTGCCCATCCTGGTCGAGCTGGACGGCGACGTAAACGGCCACAAGTTC |
| | | AGCGTGTCCGGCGAGGGCGAGGGCGATGCCACCTACGGCAAGCTGACCCTGAAGTTCATC |
| | | TGCACCACCGGCAAGCTGCCCGTGCCCTGGCCCACCCTCGTGACCACCCTGACGTACGGC |
| | | GTGCAGTGCTTACATACAACTAACATAGGGTCAGGAGCCCCCCCCTGAACCCAGGATAAC |
| | | CCTCAAAGTCGGGGGGC |
| | | (SEQ ID NO: 19346) |
| PL15412 | 81 gS2- | GGATGGGCACCACCCGTTTTAGAGCTAGAAATAGCAAGTTAAAATAAGGCTAGTCCGTTA |
| | 15_RT46_L16_ | TCAACTTGAAAAAGTGGCACCGAGTCGGTGCATGGTGAGCAAGGGCGAGGAGCTGTTCAC |
| | pseudoknot | CGGGGTGGTGCCCATCCTGGTCGAGCTGGACGGCGACGTAAACGGCCACAAGTTCAGCGT |
| | | GTCCGGCGAGGGCGAGGGCGATGCCACCTACGGCAAGCTGACCCTGAAGTTCATCTGCAC |
| | | CACCGGCAAGCTGCCCGTGCCCTGGCCCACCCTCGTGACCACCCTGACGTACGGCGTGCA |
| | | GTGCTTACATACAACTAACATAGGGTCAGGAGCCCCCCCCTGAACCCAGGATAACCCTCA |
| | | AAGTCGGGGGGC |
| | | (SEQ ID NO: 19347) |
| PL15413 | 82 gS2-20_ | GTAGGGGATGGGCACCACCCGTTTTAGAGCTAGAAATAGCAAGTTAAAATAAGGCTAGTC |
| | RT46_L16_ | CGTTATCAACTTGAAAAAGTGGCACCGGCAAGCTGCCCGTGCCCTGGCCCACCCTCGTGA |
| | pseudoknot | CCACCCTGACGTACGGCGTGCAGTGCTTACATACAACTAACATAGGACCGAGTCGGTGCA |
| | | TGGTGAGCAAGGGCGAGGAGCTGTTCACCGGGGTGGTGCCCATCCTGGTCGAGCTGGACG |
| | | GCGACGTAAACGGCCACAAGTTCAGCGTGTCCGGCGAGGGCGAGGGCGATGCCACCTACG |
| | | GCAAGCTGACCCTGAAGTTCATCTGCACCGTCAGGAGCCCCCCCCTGAACCCAGGATAAC |
| | | CCTCAAAGTCGGGGGGC |
| | | (SEQ ID NO: 19348) |
| PL15414 | 83 gS3-15_ | CGCCCTTGCTCACCAGTTTTAGAGCTAGAAATAGCAAGTTAAAATAAGGCTAGTCCGTTA |
| | RT46_L16_ | TCAACTTGAAAAAGTGGCACCGAGTCGGTGCATGGTGAGCAAGGGCGAGGAGCTGTTCAC |
| | pseudoknot | CGGGGTGGTGCCCATCCTGGTCGAGCTGGACGGCGACGTAAACGGCCACAAGTTCAGCGT |
| | | GTCCGGCGAGGGCGAGGGCGATGCCACCTACGGCAAGCTGACCCTGAAGTTCATCTGCAC |
| | | CACCGGCAAGCTGCCCGTGCCCTGGCCCACCCTCGTGACCACCCTGACGTACGGCGTGCA |
| | | GTGCTTACATACAACTAACATAGGGTCAGGAGCCCCCCCCTGAACCCAGGATAACCCTCA |
| | | AAGTCGGGGGGC |
| | | (SEQ ID NO: 19349) |
| PL15415 | 84 gS3- | CTCCTCGCCCTTGCTCACCAGTTTTAGAGCTAGAAATAGCAAGTTAAAATAAGGCTAGTC |
| | 20_RT46_L16_ | CGTTATCAACTTGAAAAAGTGGCACCGAGTCGGTGCATGGTGAGCAAGGGCGAGGAGCTG |
| | pseudoknot | TTCACCGGGGTGGTGCCCATCCTGGTCGAGCTGGACGGCGACGTAAACGGCCACAAGTTC |
| | | AGCGTGTCCGGCGAGGGCGAGGGCGATGCCACCTACGGCAAGCTGACCCTGAAGTTCATC |
| | | TGCACCACCGGCAAGCTGCCCGTGCCCTGGCCCACCCTCGTGACCACCCTGACGTACGGC |
| | | GTGCAGTGCTTACATACAACTAACATAGGGTCAGGAGCCCCCCCCTGAACCCAGGATAAC |
| | | CCTCAAAGTCGGGGGGC |
| | | (SEQ ID NO: 19350) |
| PL15416 | 85 gAS2- | TGGTGAGCAAGGGCGGTTTTAGAGCTAGAAATAGCAAGTTAAAATAAGGCTAGTCCGTTA |
| | 15_RT17_L8_1xM | TCAACTTGAAAAAGTGGCACCGAGTCGGTGCCGGGGTGGTGCCCATCCTGGTCGAGCTGG |
| | S2 | ACGGCGACGTAAACGGCCACAAGTTCAGCGTGTCCGGCGAGGGCGAGGGCGATGCCACCT |
| | | ACGGCAAGCTGACCCTGAAGTTCATCTGCACCACCGGCAAGCTGCCCGTGCCCTGGCCCA |
| | | CCCTCGTGACCACCCTGACGTACGGCGTGCAGTGCTTACATACAAgcACATGAGGATCAC |
| | | CCATGTgc |
| | | (SEQ ID NO: 19351) |
| PL15417 | 86 gAS2- | TGGTGAGCAAGGGCGGTTTTAGAGCTAGAAATAGCAAGTTAAAATAAGGCTAGTCCGTTA |
| | 15_RT22_L8_1xM | TCAACTTGAAAAAGTGGCACCGAGTCGGTGCTTCACCGGGGTGGTGCCCATCCTGGTCGA |
| | S2 | GCTGGACGGCGACGTAAACGGCCACAAGTTCAGCGTGTCCGGCGAGGGCGAGGGCGATGC |
| | | CACCTACGGCAAGCTGACCCTGAAGTTCATCTGCACCACCGGCAAGCTGCCCGTGCCCTG |
| | | GCCCACCCTCGTGACCACCCTGACGTACGGCGTGCAGTGCTTACATACAAgcACATGAGG |
| | | ATCACCCATGTgc |
| | | (SEQ ID NO: 19352) |
| PL15418 | 87 gAS2- | TGGTGAGCAAGGGCGGTTTTAGAGCTAGAAATAGCAAGTTAAAATAAGGCTAGTCCGTTA |
| | 15_RT27_L8_1xMS2 | TCAACTTGAAAAAGTGGCACCGAGTCGGTGCAGCTGTTCACCGGGGTGGTGCCCATCCTG |
| | | GTCGAGCTGGACGGCGACGTAAACGGCCACAAGTTCAGCGTGTCCGGCGAGGGCGAGGGC |
| | | GATGCCACCTACGGCAAGCTGACCCTGAAGTTCATCTGCACCACCGGCAAGCTGCCCGTG |
| | | CCCTGGCCCACCCTCGTGACCACCCTGACGTACGGCGTGCAGTGCTTACATACAAgcACA |
| | | TGAGGATCACCCATGTgc |
| | | (SEQ ID NO: 19353) |
| PL15419 | 88 gAS2- | TGGTGAGCAAGGGCGGTTTTAGAGCTAGAAATAGCAAGTTAAAATAAGGCTAGTCCGTTA |
| | 15_RT32_L8_1xM | TCAACTTGAAAAAGTGGCACCGAGTCGGTGCCGAGGAGCTGTTCACCGGGGTGGTGCCCA |
| | S2 | TCCTGGTCGAGCTGGACGGCGACGTAAACGGCCACAAGTTCAGCGTGTCCGGCGAGGGCG |
| | | AGGGCGATGCCACCTACGGCAAGCTGACCCTGAAGTTCATCTGCACCACCGGCAAGCTGC |
| | | CCGTGCCCTGGCCCACCCTCGTGACCACCCTGACGTACGGCGTGCAGTGCTTACATACAA |
| | | gcACATGAGGATCACCCATGTgc |
| | | (SEQ ID NO: 19354) |
| PL15420 | 89 gAS2- | TGGTGAGCAAGGGCGGTTTTAGAGCTAGAAATAGCAAGTTAAAATAAGGCTAGTCCGTTA |
| | 15_RT37_L8_1xM | TCAACTTGAAAAAGTGGCACCGAGTCGGTGCAAGGGCGAGGAGCTGTTCACCGGGGTGGT |
| | S2 | GCCCATCCTGGTCGAGCTGGACGGCGACGTAAACGGCCACAAGTTCAGCGTGTCCGGCGA |
| | | GGGCGAGGGCGATGCCACCTACGGCAAGCTGACCCTGAAGTTCATCTGCACCACCGGCAA |
| | | GCTGCCCGTGCCCTGGCCCACCCTCGTGACCACCCTGACGTACGGCGTGCAGTGCTTACA |
| | | TACAAgcACATGAGGATCACCCATGTgc |
| | | (SEQ ID NO: 19355) |
| PL15421 | 90 gAS2- | TGGTGAGCAAGGGCGGTTTTAGAGCTAGAAATAGCAAGTTAAAATAAGGCTAGTCCGTTA |
| | 15_RT42_L8_1xMS2 | TCAACTTGAAAAAGTGGCACCGAGTCGGTGCTGAGCAAGGGCGAGGAGCTGTTCACCGGG |
| | | GTGGTGCCCATCCTGGTCGAGCTGGACGGCGACGTAAACGGCCACAAGTTCAGCGTGTCC |
| | | GGCGAGGGCGAGGGCGATGCCACCTACGGCAAGCTGACCCTGAAGTTCATCTGCACCACC |
| | | GGCAAGCTGCCCGTGCCCTGGCCCACCCTCGTGACCACCCTGACGTACGGCGTGCAGTGC |
| | | TTACATACAAgcACATGAGGATCACCCATGTgc |
| | | (SEQ ID NO: 19356) |
| PL15422 | 91 gAS2- | TGGTGAGCAAGGGCGGTTTTAGAGCTAGAAATAGCAAGTTAAAATAAGGCTAGTCCGTTA |
| | 15_RT47_L8_1xM | TCAACTTGAAAAAGTGGCACCGAGTCGGTGCCATGGTGAGCAAGGGCGAGGAGCTGTTCA |
| | S2 | CCGGGGTGGTGCCCATCCTGGTCGAGCTGGACGGCGACGTAAACGGCCACAAGTTCAGCG |
| | | TGTCCGGCGAGGGCGAGGGCGATGCCACCTACGGCAAGCTGACCCTGAAGTTCATCTGCA |
| | | CCACCGGCAAGCTGCCCGTGCCCTGGCCCACCCTCGTGACCACCCTGACGTACGGCGTGC |
| | | AGTGCTTACATACAAgcACATGAGGATCACCCATGTgc |
| | | (SEQ ID NO: 19357) |
| PL15423 | 92 gAS2- | TGGTGAGCAAGGGCGGTTTTAGAGCTAGAAATAGCAAGTTAAAATAAGGCTAGTCCGTTA |
| | 15_RT52_L8_1xM | TCAACTTGAAAAAGTGGCACCGAGTCGGTGCGCCACCATGGTGAGCAAGGGCGAGGAGCT |
| | S2 | GTTCACCGGGGTGGTGCCCATCCTGGTCGAGCTGGACGGCGACGTAAACGGCCACAAGTT |
| | | CAGCGTGTCCGGCGAGGGCGAGGGCGATGCCACCTACGGCAAGCTGACCCTGAAGTTCAT |
| | | CTGCACCACCGGCAAGCTGCCCGTGCCCTGGCCCACCCTCGTGACCACCCTGACGTACGG |
| | | CGTGCAGTGCTTACATACAAgCACATGAGGATCACCCATGTgc |
| | | (SEQ ID NO: 19358) |
| PL15424 | 93 | TGGTGAGCAAGGGCGGTTTTAGAGCTAGAAATAGCAAGTTAAAATAAGGCTAGTCCGTTA |
| | gAS2- | TCAACTTGAAAAAGTGGCACCGAGTCGGTGCCCGCCGCCACCATGGTGAGCAAGGGCGAG |
| | 15_RT57_L8_1xMS2 | GAGCTGTTCACCGGGGTGGTGCCCATCCTGGTCGAGCTGGACGGCGACGTAAACGGCCAC |
| | | AAGTTCAGCGTGTCCGGCGAGGGCGAGGGCGATGCCACCTACGGCAAGCTGACCCTGAAG |
| | | TTCATCTGCACCACCGGCAAGCTGCCCGTGCCCTGGCCCACCCTCGTGACCACCCTGACG |
| | | TACGGCGTGCAGTGCTTACATACAAgCACATGAGGATCACCCATGTgc |
| | | (SEQ ID NO: 19359) |
| PL15425 | 94 gAS2- | TGGTGAGCAAGGGCGGTTTTAGAGCTAGAAATAGCAAGTTAAAATAAGGCTAGTCCGTTA |
| | 15_RT62_L8_1xM | TCAACTTGAAAAAGTGGCACCGAGTCGGTGCAGCCACCGCCGCCACCATGGTGAGCAAGG |
| | S2 | GCGAGGAGCTGTTCACCGGGGTGGTGCCCATCCTGGTCGAGCTGGACGGCGACGTAAACG |
| | | GCCACAAGTTCAGCGTGTCCGGCGAGGGCGAGGGCGATGCCACCTACGGCAAGCTGACCC |
| | | TGAAGTTCATCTGCACCACCGGCAAGCTGCCCGTGCCCTGGCCCACCCTCGTGACCACCC |
| | | TGACGTACGGCGTGCAGTGCTTACATACAAgCACATGAGGATCACCCATGTgc |
| | | (SEQ ID NO: 19360) |
| PL15426 | 95 gAS2- | TGGTGAGCAAGGGCGGTTTTAGAGCTAGAAATAGCAAGTTAAAATAAGGCTAGTCCGTTA |
| | 15_RT67_ | TCAACTTGAAAAAGTGGCACCGAGTCGGTGCCCTCGAGCCACCGCCGCCACCATGGTGAG |
| | L8_1xMS2 | CAAGGGCGAGGAGCTGTTCACCGGGGTGGTGCCCATCCTGGTCGAGCTGGACGGCGACGT |
| | | AAACGGCCACAAGTTCAGCGTGTCCGGCGAGGGCGAGGGCGATGCCACCTACGGCAAGCT |
| | | GACCCTGAAGTTCATCTGCACCACCGGCAAGCTGCCCGTGCCCTGGCCCACCCTCGTGAC |
| | | CACCCTGACGTACGGCGTGCAGTGCTTACATACAAgcACATGAGGATCACCCATGTgc |
| | | (SEQ ID NO: 19361) |
| PL15427 | 96 gAS2- | TGGTGAGCAAGGGCGGTTTTAGAGCTAGAAATAGCAAGTTAAAATAAGGCTAGTCCGTTA |
| | 15_RT72_ | TCAACTTGAAAAAGTGGCACCGAGTCGGTGCACGATCCTCGAGCCACCGCCGCCACCATG |
| | L8_1xMS2 | GTGAGCAAGGGCGAGGAGCTGTTCACCGGGGTGGTGCCCATCCTGGTCGAGCTGGACGGC |
| | | GACGTAAACGGCCACAAGTTCAGCGTGTCCGGCGAGGGCGAGGGCGATGCCACCTACGGC |
| | | AAGCTGACCCTGAAGTTCATCTGCACCACCGGCAAGCTGCCCGTGCCCTGGCCCACCCTC |
| | | GTGACCACCCTGACGTACGGCGTGCAGTGCTTACATACAAgcACATGAGGATCACCCATG |
| | | Tgc |
| | | (SEQ ID NO: 19362) |
| PL15428 | 97 gAS2- | TGGTGAGCAAGGGCGGTTTTAGAGCTAGAAATAGCAAGTTAAAATAAGGCTAGTCCGTTA |
| | 15_RT77_L8_1xM | TCAACTTGAAAAAGTGGCACCGAGTCGGTGCCGCCTACGATCCTCGAGCCACCGCCGCCA |
| | S2 | CCATGGTGAGCAAGGGCGAGGAGCTGTTCACCGGGGTGGTGCCCATCCTGGTCGAGCTGG |
| | | ACGGCGACGTAAACGGCCACAAGTTCAGCGTGTCCGGCGAGGGCGAGGGCGATGCCACCT |
| | | ACGGCAAGCTGACCCTGAAGTTCATCTGCACCACCGGCAAGCTGCCCGTGCCCTGGCCCA |
| | | CCCTCGTGACCACCCTGACGTACGGCGTGCAGTGCTTACATACAAgcACATGAGGATCAC |
| | | CCATGTgc |
| | | (SEQ ID NO: 19363) |
| PL15429 | 98 gAS2- | TGGTGAGCAAGGGCGGTTTTAGAGCTAGAAATAGCAAGTTAAAATAAGGCTAGTCCGTTA |
| | 15_RT82_L8_ | TCAACTTGAAAAAGTGGCACCGAGTCGGTGCACCGGCGCCTACGATCCTCGAGCCACCGC |
| | 1xMS2 | CGCCACCATGGTGAGCAAGGGCGAGGAGCTGTTCACCGGGGTGGTGCCCATCCTGGTCGA |
| | | GCTGGACGGCGACGTAAACGGCCACAAGTTCAGCGTGTCCGGCGAGGGCGAGGGCGATGC |
| | | CACCTACGGCAAGCTGACCCTGAAGTTCATCTGCACCACCGGCAAGCTGCCCGTGCCCTG |
| | | GCCCACCCTCGTGACCACCCTGACGTACGGCGTGCAGTGCTTACATACAAgcACATGAGG |
| | | ATCACCCATGTgc |
| | | (SEQ ID NO: 19364) |
| PL15430 | 99 gAS2-15_ | TGGTGAGCAAGGGCGGTTTTAGAGCTAGAAATAGCAAGTTAAAATAAGGCTAGTCCGTTA |
| | RT87_L8_1xM | TCAACTTGAAAAAGTGGCACCGAGTCGGTGCCTGTGACCGGCGCCTACGATCCTCGAGCC |
| | S2 | ACCGCCGCCACCATGGTGAGCAAGGGCGAGGAGCTGTTCACCGGGGTGGTGCCCATCCTG |
| | | GTCGAGCTGGACGGCGACGTAAACGGCCACAAGTTCAGCGTGTCCGGCGAGGGCGAGGGC |
| | | GATGCCACCTACGGCAAGCTGACCCTGAAGTTCATCTGCACCACCGGCAAGCTGCCCGTG |
| | | CCCTGGCCCACCCTCGTGACCACCCTGACGTACGGCGTGCAGTGCTTACATACAAgcACA |
| | | TGAGGATCACCCATGTgc |
| | | (SEQ ID NO: 19365) |
| PL15431 | 100 gAS2- | TGGTGAGCAAGGGCGGTTTTAGAGCTAGAAATAGCAAGTTAAAATAAGGCTAGTCCGTTA |
| | 15_RT92_L8_1xM | TCAACTTGAAAAAGTGGCACCGAGTCGGTGCCCAAGCTGTGACCGGCGCCTACGATCCTC |
| | S2 | GAGCCACCGCCGCCACCATGGTGAGCAAGGGCGAGGAGCTGTTCACCGGGGTGGTGCCCA |
| | | TCCTGGTCGAGCTGGACGGCGACGTAAACGGCCACAAGTTCAGCGTGTCCGGCGAGGGCG |
| | | AGGGCGATGCCACCTACGGCAAGCTGACCCTGAAGTTCATCTGCACCACCGGCAAGCTGC |
| | | CCGTGCCCTGGCCCACCCTCGTGACCACCCTGACGTACGGCGTGCAGTGCTTACATACAA |
| | | gcACATGAGGATCACCCATGTgc |
| | | (SEQ ID NO: 19366) |
| PL15432 | 101 gAS2- | TGGTGAGCAAGGGCGGTTTTAGAGCTAGAAATAGCAAGTTAAAATAAGGCTAGTCCGTTA |
| | 15_RT97_L8_ | TCAACTTGAAAAAGTGGCACCGAGTCGGTGCCAGATCCAAGCTGTGACCGGCGCCTACGA |
| | 1xMS2 | TCCTCGAGCCACCGCCGCCACCATGGTGAGCAAGGGCGAGGAGCTGTTCACCGGGGTGGT |
| | | GCCCATCCTGGTCGAGCTGGACGGCGACGTAAACGGCCACAAGTTCAGCGTGTCCGGCGA |
| | | GGGCGAGGGCGATGCCACCTACGGCAAGCTGACCCTGAAGTTCATCTGCACCACCGGCAA |
| | | GCTGCCCGTGCCCTGGCCCACCCTCGTGACCACCCTGACGTACGGCGTGCAGTGCTTACA |
| | | TACAAgcACATGAGGATCACCCATGTgc |
| | | (SEQ ID NO: 19367) |
| PL15433 | 102 gAS2- | TGGTGAGCAAGGGCGGTTTTAGAGCTAGAAATAGCAAGTTAAAATAAGGCTAGTCCGTTA |
| | 15_RT10_2_L8_1x | TCAACTTGAAAAAGTGGCACCGAGTCGGTGCCGTTACAGATCCAAGCTGTGACCGGCGCC |
| | MS2 | TACGATCCTCGAGCCACCGCCGCCACCATGGTGAGCAAGGGCGAGGAGCTGTTCACCGGG |
| | | GTGGTGCCCATCCTGGTCGAGCTGGACGGCGACGTAAACGGCCACAAGTTCAGCGTGTCC |
| | | GGCGAGGGCGAGGGCGATGCCACCTACGGCAAGCTGACCCTGAAGTTCATCTGCACCACC |
| | | GGCAAGCTGCCCGTGCCCTGGCCCACCCTCGTGACCACCCTGACGTACGGCGTGCAGTGC |
| | | TTACATACAAgcACATGAGGATCACCCATGTgc |
| | | (SEQ ID NO: 19368) |
| PL15434 | 103 gAS4- | GATCCAAGCTGTGACGTTTTAGAGCTAGAAATAGCAAGTTAAAATAAGGCTAGTCCGTTA |
| | 15_RT12_L8_1xM | TCAACTTGAAAAAGTGGCACCGAGTCGGTGCTGGTGCCCATCCTGGTCGAGCTGGACGGC |
| | IS2 | GACGTAAACGGCCACAAGTTCAGCGTGTCCGGCGAGGGCGAGGGCGATGCCACCTACGGC |
| | | AAGCTGACCCTGAAGTTCATCTGCACCACCGGCAAGCTGCCCGTGCCCTGGCCCACCCTC |
| | | GTGACCACCCTGACGTACGGCGTGCAGTGCTTACATACAAgcACATGAGGATCACCCATG |
| | | Tgc |
| | | (SEQ ID NO: 19369) |
| PL15435 | 104 gAS4- | GATCCAAGCTGTGACGTTTTAGAGCTAGAAATAGCAAGTTAAAATAAGGCTAGTCCGTTA |
| | 15_RT17_L8_1xM | TCAACTTGAAAAAGTGGCACCGAGTCGGTGCCGGGGTGGTGCCCATCCTGGTCGAGCTGG |
| | S2 | ACGGCGACGTAAACGGCCACAAGTTCAGCGTGTCCGGCGAGGGCGAGGGCGATGCCACCT |
| | | ACGGCAAGCTGACCCTGAAGTTCATCTGCACCACCGGCAAGCTGCCCGTGCCCTGGCCCA |
| | | CCCTCGTGACCACCCTGACGTACGGCGTGCAGTGCTTACATACAAgcACATGAGGATCAC |
| | | CCATGTgc |
| | | (SEQ ID NO: 19370) |
| PL15436 | 105 gAS4- | GATCCAAGCTGTGACGTTTTAGAGCTAGAAATAGCAAGTTAAAATAAGGCTAGTCCGTTA |
| | 15_RT22_L8_1xM | TCAACTTGAAAAAGTGGCACCGAGTCGGTGCTTCACCGGGGTGGTGCCCATCCTGGTCGA |
| | S2 | GCTGGACGGCGACGTAAACGGCCACAAGTTCAGCGTGTCCGGCGAGGGCGAGGGCGATGC |
| | | CACCTACGGCAAGCTGACCCTGAAGTTCATCTGCACCACCGGCAAGCTGCCCGTGCCCTG |
| | | GCCCACCCTCGTGACCACCCTGACGTACGGCGTGCAGTGCTTACATACAAgcACATGAGG |
| | | ATCACCCATGTgc |
| | | (SEQ ID NO: 19371) |
| PL15437 | 106 gAS4- | GATCCAAGCTGTGACGTTTTAGAGCTAGAAATAGCAAGTTAAAATAAGGCTAGTCCGTTA |
| | 15_RT27_L8_1xM | TCAACTTGAAAAAGTGGCACCGAGTCGGTGCAGCTGTTCACCGGGGTGGTGCCCATCCTG |
| | S2 | GTCGAGCTGGACGGCGACGTAAACGGCCACAAGTTCAGCGTGTCCGGCGAGGGCGAGGGC |
| | | GATGCCACCTACGGCAAGCTGACCCTGAAGTTCATCTGCACCACCGGCAAGCTGCCCGTG |
| | | CCCTGGCCCACCCTCGTGACCACCCTGACGTACGGCGTGCAGTGCTTACATACAAgcACA |
| | | TGAGGATCACCCATGTgc |
| | | (SEQ ID NO: 19372) |
| PL15438 | 107 gAS4- | GATCCAAGCTGTGACGTTTTAGAGCTAGAAATAGCAAGTTAAAATAAGGCTAGTCCGTTA |
| | 15_RT32_L8_1xM | TCAACTTGAAAAAGTGGCACCGAGTCGGTGCCGAGGAGCTGTTCACCGGGGTGGTGCCCA |
| | S2 | TCCTGGTCGAGCTGGACGGCGACGTAAACGGCCACAAGTTCAGCGTGTCCGGCGAGGGCG |
| | | AGGGCGATGCCACCTACGGCAAGCTGACCCTGAAGTTCATCTGCACCACCGGCAAGCTGC |
| | | CCGTGCCCTGGCCCACCCTCGTGACCACCCTGACGTACGGCGTGCAGTGCTTACATACAA |
| | | gcACATGAGGATCACCCATGTgc |
| | | (SEQ ID NO: 19373) |
| PL15439 | 108 gAS4- | GATCCAAGCTGTGACGTTTTAGAGCTAGAAATAGCAAGTTAAAATAAGGCTAGTCCGTTA |
| | 15_RT37_L8_ | TCAACTTGAAAAAGTGGCACCGAGTCGGTGCAAGGGCGAGGAGCTGTTCACCGGGGTGGT |
| | 1xMS2 | GCCCATCCTGGTCGAGCTGGACGGCGACGTAAACGGCCACAAGTTCAGCGTGTCCGGCGA |
| | | GGGCGAGGGCGATGCCACCTACGGCAAGCTGACCCTGAAGTTCATCTGCACCACCGGCAA |
| | | GCTGCCCGTGCCCTGGCCCACCCTCGTGACCACCCTGACGTACGGCGTGCAGTGCTTACA |
| | | TACAAgCACATGAGGATCACCCATGTgc |
| | | (SEQ ID NO: 19374) |
| PL15440 | 109 gAS4- | GATCCAAGCTGTGACGTTTTAGAGCTAGAAATAGCAAGTTAAAATAAGGCTAGTCCGTTA |
| | 15_RT42_L8_ | TCAACTTGAAAAAGTGGCACCGAGTCGGTGCTGAGCAAGGGCGAGGAGCTGTTCACCGGG |
| | 1xMS2 | GTGGTGCCCATCCTGGTCGAGCTGGACGGCGACGTAAACGGCCACAAGTTCAGCGTGTCC |
| | | GGCGAGGGCGAGGGCGATGCCACCTACGGCAAGCTGACCCTGAAGTTCATCTGCACCACC |
| | | GGCAAGCTGCCCGTGCCCTGGCCCACCCTCGTGACCACCCTGACGTACGGCGTGCAGTGC |
| | | TTACATACAAgcACATGAGGATCACCCATGTgc |
| | | (SEQ ID NO: 19375) |
| PL15441 | 110 gAS4-15_ | GATCCAAGCTGTGACGTTTTAGAGCTAGAAATAGCAAGTTAAAATAAGGCTAGTCCGTTA |
| | RT47_L8_1xM | TCAACTTGAAAAAGTGGCACCGAGTCGGTGCCATGGTGAGCAAGGGCGAGGAGCTGTTCA |
| | S2 | CCGGGGTGGTGCCCATCCTGGTCGAGCTGGACGGCGACGTAAACGGCCACAAGTTCAGCG |
| | | TGTCCGGCGAGGGCGAGGGCGATGCCACCTACGGCAAGCTGACCCTGAAGTTCATCTGCA |
| | | CCACCGGCAAGCTGCCCGTGCCCTGGCCCACCCTCGTGACCACCCTGACGTACGGCGTGC |
| | | AGTGCTTACATACAAgcACATGAGGATCACCCATGTgc |
| | | (SEQ ID NO: 19376) |
| PL15442 | 111 gAS4- | GATCCAAGCTGTGACGTTTTAGAGCTAGAAATAGCAAGTTAAAATAAGGCTAGTCCGTTA |
| | 15_RT52_ | TCAACTTGAAAAAGTGGCACCGAGTCGGTGCGCCACCATGGTGAGCAAGGGCGAGGAGCT |
| | L8_1xMS2 | GTTCACCGGGGTGGTGCCCATCCTGGTCGAGCTGGACGGCGACGTAAACGGCCACAAGTT |
| | | CAGCGTGTCCGGCGAGGGCGAGGGCGATGCCACCTACGGCAAGCTGACCCTGAAGTTCAT |
| | | CTGCACCACCGGCAAGCTGCCCGTGCCCTGGCCCACCCTCGTGACCACCCTGACGTACGG |
| | | CGTGCAGTGCTTACATACAAgcACATGAGGATCACCCATGTgc |
| | | (SEQ ID NO: 19377) |
| PL15443 | 112 gAS4-15_ | GATCCAAGCTGTGACGTTTTAGAGCTAGAAATAGCAAGTTAAAATAAGGCTAGTCCGTTA |
| | RT57_L8_1xM | TCAACTTGAAAAAGTGGCACCGAGTCGGTGCCCGCCGCCACCATGGTGAGCAAGGGCGAG |
| | S2 | GAGCTGTTCACCGGGGTGGTGCCCATCCTGGTCGAGCTGGACGGCGACGTAAACGGCCAC |
| | | AAGTTCAGCGTGTCCGGCGAGGGCGAGGGCGATGCCACCTACGGCAAGCTGACCCTGAAG |
| | | TTCATCTGCACCACCGGCAAGCTGCCCGTGCCCTGGCCCACCCTCGTGACCACCCTGACG |
| | | TACGGCGTGCAGTGCTTACATACAAgcACATGAGGATCACCCATGTgc |
| | | (SEQ ID NO: 19378) |
| PL15444 | 113 gAS4- | GATCCAAGCTGTGACGTTTTAGAGCTAGAAATAGCAAGTTAAAATAAGGCTAGTCCGTTA |
| | 15_RT62_L8_ | TCAACTTGAAAAAGTGGCACCGAGTCGGTGCAGCCACCGCCGCCACCATGGTGAGCAAGG |
| | 1xMS2 | GCGAGGAGCTGTTCACCGGGGTGGTGCCCATCCTGGTCGAGCTGGACGGCGACGTAAACG |
| | | GCCACAAGTTCAGCGTGTCCGGCGAGGGCGAGGGCGATGCCACCTACGGCAAGCTGACCC |
| | | TGAAGTTCATCTGCACCACCGGCAAGCTGCCCGTGCCCTGGCCCACCCTCGTGACCACCC |
| | | TGACGTACGGCGTGCAGTGCTTACATACAAgCACATGAGGATCACCCATGTgc |
| | | (SEQ ID NO: 19379) |
| PL15445 | 114 gAS4- | GATCCAAGCTGTGACGTTTTAGAGCTAGAAATAGCAAGTTAAAATAAGGCTAGTCCGTTA |
| | 15_RT67_L8_ | TCAACTTGAAAAAGTGGCACCGAGTCGGTGCCCTCGAGCCACCGCCGCCACCATGGTGAG |
| | 1xMS2 | CAAGGGCGAGGAGCTGTTCACCGGGGTGGTGCCCATCCTGGTCGAGCTGGACGGCGACGT |
| | | AAACGGCCACAAGTTCAGCGTGTCCGGCGAGGGCGAGGGCGATGCCACCTACGGCAAGCT |
| | | GACCCTGAAGTTCATCTGCACCACCGGCAAGCTGCCCGTGCCCTGGCCCACCCTCGTGAC |
| | | CACCCTGACGTACGGCGTGCAGTGCTTACATACAAgcACATGAGGATCACCCATGTgc |
| | | (SEQ ID NO: 19380) |
| PL15446 | 115 gAS4- | GATCCAAGCTGTGACGTTTTAGAGCTAGAAATAGCAAGTTAAAATAAGGCTAGTCCGTTA |
| | 15_RT72_L8_ | TCAACTTGAAAAAGTGGCACCGAGTCGGTGCACGATCCTCGAGCCACCGCCGCCACCATG |
| | 1xMS2 | GTGAGCAAGGGCGAGGAGCTGTTCACCGGGGTGGTGCCCATCCTGGTCGAGCTGGACGGC |
| | | GACGTAAACGGCCACAAGTTCAGCGTGTCCGGCGAGGGCGAGGGCGATGCCACCTACGGC |
| | | AAGCTGACCCTGAAGTTCATCTGCACCACCGGCAAGCTGCCCGTGCCCTGGCCCACCCTC |
| | | GTGACCACCCTGACGTACGGCGTGCAGTGCTTACATACAAgcACATGAGGATCACCCATG |
| | | Tgc |
| | | (SEQ ID NO: 19381) |
| PL15447 | 116 gAS4- | GATCCAAGCTGTGACGTTTTAGAGCTAGAAATAGCAAGTTAAAATAAGGCTAGTCCGTTA |
| | 15_RT77_L8_ | TCAACTTGAAAAAGTGGCACCGAGTCGGTGCCGCCTACGATCCTCGAGCCACCGCCGCCA |
| | 1xMS2 | CCATGGTGAGCAAGGGCGAGGAGCTGTTCACCGGGGTGGTGCCCATCCTGGTCGAGCTGG |
| | | ACGGCGACGTAAACGGCCACAAGTTCAGCGTGTCCGGCGAGGGCGAGGGCGATGCCACCT |
| | | ACGGCAAGCTGACCCTGAAGTTCATCTGCACCACCGGCAAGCTGCCCGTGCCCTGGCCCA |
| | | CCCTCGTGACCACCCTGACGTACGGCGTGCAGTGCTTACATACAAgcACATGAGGATCAC |
| | | CCATGTgc |
| | | (SEQ ID NO: 19382) |
| PL15448 | 117 gAS4- | GATCCAAGCTGTGACGTTTTAGAGCTAGAAATAGCAAGTTAAAATAAGGCTAGTCCGTTA |
| | 15_RT82_L8_ | TCAACTTGAAAAAGTGGCACCGAGTCGGTGCACCGGCGCCTACGATCCTCGAGCCACCGC |
| | 1xMS2 | CGCCACCATGGTGAGCAAGGGCGAGGAGCTGTTCACCGGGGTGGTGCCCATCCTGGTCGA |
| | | GCTGGACGGCGACGTAAACGGCCACAAGTTCAGCGTGTCCGGCGAGGGCGAGGGCGATGC |
| | | CACCTACGGCAAGCTGACCCTGAAGTTCATCTGCACCACCGGCAAGCTGCCCGTGCCCTG |
| | | GCCCACCCTCGTGACCACCCTGACGTACGGCGTGCAGTGCTTACATACAAgcACATGAGG |
| | | ATCACCCATGTgc |
| | | (SEQ ID NO: 19383) |
| PL15449 | 118 gAS4- | GATCCAAGCTGTGACGTTTTAGAGCTAGAAATAGCAAGTTAAAATAAGGCTAGTCCGTTA |
| | 15_RT87_L8_ | TCAACTTGAAAAAGTGGCACCGAGTCGGTGCCTGTGACCGGCGCCTACGATCCTCGAGCC |
| | 1xMS2 | ACCGCCGCCACCATGGTGAGCAAGGGCGAGGAGCTGTTCACCGGGGTGGTGCCCATCCTG |
| | | GTCGAGCTGGACGGCGACGTAAACGGCCACAAGTTCAGCGTGTCCGGCGAGGGCGAGGGC |
| | | GATGCCACCTACGGCAAGCTGACCCTGAAGTTCATCTGCACCACCGGCAAGCTGCCCGTG |
| | | CCCTGGCCCACCCTCGTGACCACCCTGACGTACGGCGTGCAGTGCTTACATACAAgcACA |
| | | TGAGGATCACCCATGTgc |
| | | (SEQ ID NO: 19384) |
| PL15450 | 119 gAS4- | GATCCAAGCTGTGACGTTTTAGAGCTAGAAATAGCAAGTTAAAATAAGGCTAGTCCGTTA |
| | 15_RT92_L8_1xMS2 | TCAACTTGAAAAAGTGGCACCGAGTCGGTGCCCAAGCTGTGACCGGCGCCTACGATCCTC |
| | | GAGCCACCGCCGCCACCATGGTGAGCAAGGGCGAGGAGCTGTTCACCGGGGTGGTGCCCA |
| | | TCCTGGTCGAGCTGGACGGCGACGTAAACGGCCACAAGTTCAGCGTGTCCGGCGAGGGCG |
| | | AGGGCGATGCCACCTACGGCAAGCTGACCCTGAAGTTCATCTGCACCACCGGCAAGCTGC |
| | | CCGTGCCCTGGCCCACCCTCGTGACCACCCTGACGTACGGCGTGCAGTGCTTACATACAA |
| | | gcACATGAGGATCACCCATGTgc |
| | | (SEQ ID NO: 19385) |
| PL15451 | 120 gAS4- | GATCCAAGCTGTGACGTTTTAGAGCTAGAAATAGCAAGTTAAAATAAGGCTAGTCCGTTA |
| | 15_RT97_L8_1xM | TCAACTTGAAAAAGTGGCACCGAGTCGGTGCCAGATCCAAGCTGTGACCGGCGCCTACGA |
| | S2 | TCCTCGAGCCACCGCCGCCACCATGGTGAGCAAGGGCGAGGAGCTGTTCACCGGGGTGGT |
| | | GCCCATCCTGGTCGAGCTGGACGGCGACGTAAACGGCCACAAGTTCAGCGTGTCCGGCGA |
| | | GGGCGAGGGCGATGCCACCTACGGCAAGCTGACCCTGAAGTTCATCTGCACCACCGGCAA |
| | | GCTGCCCGTGCCCTGGCCCACCCTCGTGACCACCCTGACGTACGGCGTGCAGTGCTTACA |
| | | TACAAgcACATGAGGATCACCCATGTgc |
| | | (SEQ ID NO: 19386) |
| PL15452 | 121 gAS4- | GATCCAAGCTGTGACGTTTTAGAGCTAGAAATAGCAAGTTAAAATAAGGCTAGTCCGTTA |
| | 15_RT10_2_L8_1x | TCAACTTGAAAAAGTGGCACCGAGTCGGTGCCGTTACAGATCCAAGCTGTGACCGGCGCC |
| | MS2 | TACGATCCTCGAGCCACCGCCGCCACCATGGTGAGCAAGGGCGAGGAGCTGTTCACCGGG |
| | | GTGGTGCCCATCCTGGTCGAGCTGGACGGCGACGTAAACGGCCACAAGTTCAGCGTGTCC |
| | | GGCGAGGGCGAGGGCGATGCCACCTACGGCAAGCTGACCCTGAAGTTCATCTGCACCACC |
| | | GGCAAGCTGCCCGTGCCCTGGCCCACCCTCGTGACCACCCTGACGTACGGCGTGCAGTGC |
| | | TTACATACAAgcACATGAGGATCACCCATGTgc |
| | | (SEQ ID NO: 19387) |

### Example 5: Evaluation of Long Insertion Activity of Exemplary Gene Modifying Polypeptides Using Trans Template RNAs with a 3-Component System

[1271] This example describes the evaluation of exemplary three (3)-component gene modifying systems in the targeted insertion of a 150 nt sequence in the human genome. The gene modifying systems, each comprised of (1) a gene modifying polypeptide generated in Example 3 (and demonstrated to have trans-recruitment and rewrite activity in Examples 7 and 9 of PCT Application PCT/US2022/076064, which Examples are herein incorporated by reference), (2) a trans template RNA (ttRNA) generated in Example 4, and (3) exemplary gRNA PLV4165.

[1272] A pool of the following gene modifying polypeptides was used: PL12113, PL12109, and PL12096, the amino acid sequences of which are provided in Example 3.

[1273] The ttRNA used are given in Table E12 below, the nucleic acid sequences of which are provided in Example 4.

TABLE E12
Exemplary ttRNA Sequences Used in This Example
(Sequences Provided in Example 4)

| | | | RRS or | |
|---|---|---|---|---|
| ttRNA | | 5′ end | substitute | Homology 2 |
| Name | Template Type | block contents | sequence | region length |
| PL15335 | Test (also used in | Scaffold + | 1XMS2 | 12 |
| | “control 2” samples) | longer spacer | | |
| PL15349 | Test (also used in | Scaffold + | 1XMS2 | 46 |
| | “control 4” samples) | longer spacer | | |
| PL15363 | Test | Scaffold + | 4XMS2 | 12 |
| | | longer spacer | | |
| PL15377 | Test | Scaffold + | 4XMS2 | 46 |
| | | longer spacer | | |
| PL15391 | No RRS control | Scaffold + | Pseudoknot | 12 |
| | | longer spacer | | |
| PL15405 | No RRS control | Scaffold + | Pseudoknot | 46 |
| | | longer spacer | | |
| PL15334 | Test (also used in | Scaffold + | 1XMS2 | 12 |
| | “control 1” samples) | longer spacer | | |
| PL15348 | Test (also used in | Scaffold + | 1XMS2 | 46 |
| | “control 3” samples) | longer spacer | | |
| PL15362 | Test | Scaffold + | 4XMS2 | 12 |
| | | longer spacer | | |
| PL15376 | Test | Scaffold + | 4XMS2 | 46 |
| | | longer spacer | | |
| PL15390 | No RRS control | Scaffold + | Pseudoknot | 12 |
| | | longer spacer | | |
| PL15404 | No RRS control | Scaffold + | Pseudoknot | 46 |
| | | longer spacer | | |
| PL15332 | No Cas9 binding control | Pseudoknot | 1XMS2 | 12 |
| PL15346 | No Cas9 binding control | Pseudoknot | 1XMS2 | 46 |
| PL15333 | Cas9 binding but no DNA | Scaffold | 1XMS2 | 12 |
| | binding control | | | |
| PL15347 | Cas9 binding but no DNA | Scaffold | 1XMS2 | 46 |
| | binding control | | | |
| PL15360 | No Cas9 binding control | Pseudoknot | 4XMS2 | 12 |
| PL15374 | No Cas9 binding control | Pseudoknot | 4XMS2 | 46 |
| PL15361 | Cas9 binding but no DNA | Scaffold | 4XMS2 | 12 |
| | binding control | | | |
| PL15375 | Cas9 binding but no DNA | Scaffold | 4XMS2 | 46 |
| | binding control | | | |
| PL15388 | No Cas9 binding control + | Pseudoknot | Pseudoknot | 12 |
| | No MS2 control | | | |
| PL15402 | No Cas9 binding control + | Pseudoknot | Pseudoknot | 46 |
| | No MS2 control | | | |
| PL15389 | Cas9 binding but no DNA binding | Scaffold | Pseudoknot | 12 |
| | control + No MS2 control | | | |
| PL15403 | Cas9 binding but no DNA binding | Scaffold | Pseudoknot | 46 |
| | control + No MS2 control | | | |

[1274] “Pseudoknot” in the “5′ end block contents” field indicates that ttRNAs comprised a 5′ end block that, while assuming a secondary/tertiary structure thought to protect the 5′ end of the ttRNA from degradation, is not capable of binding to a Cas domain, e.g., the Cas domain of the gene modifying polypeptide. Similarly, “Pseudoknot” in the “RRS or substitute sequence” field indicates that ttRNAs comprised (proximal to the 3′ end and in place of an RRS) a secondary/tertiary structure thought to protect the 3′ end of the ttRNA from degradation, and that is not capable of binding to an RBD, e.g., the RBD of the gene modifying polypeptide. Cas9 scaffold ttRNAs (“Scaffold”) comprise a 5′ end block containing a gRNA scaffold sequence compatible with the Cas9 domain of the gene modifying polypeptide, but the 5′ end block lacks a gRNA spacer sequence. Cas9 scaffold+spacer ttRNAs comprise a 5′ end block and a gRNA scaffold sequence compatible with the Cas9 domain of the gene modifying polypeptide and a shorter (“Scaffold+Shorter Spacer”) or longer (“Scaffold+Longer Spacer”) gRNA spacer sequence. It is thought that a shorter gRNA spacer is sufficient for binding of a Cas9 domain but insufficient for nicking of the target DNA, whereas a longer gRNA spacer is sufficient for both binding and nicking.

[1275] ttRNAs contained a 12 nucleotide homology 2 region or a 46 nucleotide homology 2 region.

[1276] The sequence of the gRNA that comprises the 3^{rd} component of the gene modifying system is as below

PLV4165:
(SEQ ID NO: 16,714)
GCCGAAGCACTGCACGCCGTGTTTTAGAGCTAGAAATAGCAAGTTAAA
ATAAGGCTAGTCCGTTATCAACTTGAAAAAGTGGCACCGAGTCGGTGC

[1277] To assess the capacity of the trans-gene modifying system to write long insertions into the genome, 150 nt restoration reporter cell lines (U2OS) were analyzed by flow cytometry 4 days post-nucleofection of the gene modifying systems.

[1278] The 3-component gene modifying system was nucleofected into the U2OS 150 bp truncated GFP reporter-expressing cell line. All 3 components of the gene modifying system were delivered by nucleofection of plasmids expressing each of the 3 components. Specifically, 600 ng of gene modifying polypeptide plasmid DNA is combined with 150 ng ttRNA- and 150 ng gRNA-expressing plasmids. The modifying polypeptide, ttRNA and gRNA in plasmid DNA format were added to 20 μL SE buffer containing 250,000 U2OS 150 bp truncated GFP reporter-expressing cells, and the cells were nucleofected using program DN-100. After nucleofection, cells were grown at 37° C., 5% CO₂ for at least 4 days prior to fluorescence readout by flow cytometry. GFP expression is indicative of cells in which the 150 nucleotide insertion was accurately written into the genome.

[1279] FIG. 5 shows a graph of % GFP positive cells after treating the GFP reporter-expressing cell line with a gene modifying system comprising a ttRNA having the characteristics indicated on the X-axis or with a control gene modifying system. The results showed that very low levels (background) of GFP positive cells were observed when cells were treated with control gene modifying systems lacking one or more components. The results further showed that no GFP positive cell level above background was observed when cells were treated with gene modifying systems comprising ttRNAs having a pseudoknot-containing 5′ end block or a Cas9 scaffold-containing 5′ end block, regardless of the presence or absence of an RRS or the number of RRS repeats in the template RNA. These results suggest that ttRNAs comprising 5′ end blocks lacking a means to associate a gene modifying polypeptide and/or ttRNA to a genomic target, or lacking a means to stably associate with a gene modifying polypeptide, are unable to facilitate rewriting of 150 nucleotide long insertions into the genome, regardless of the presence or strength of the interaction between RBD and RRS. In contrast, approximately 1.5% GFP positive cells (indicative of successful insertion) were observed when cells were treated with gene modifying systems comprising ttRNAs having 5′ end blocks comprising a Cas9 gRNA scaffold and 15 nucleotide gRNA spacer wherein the ttRNA comprised an RRS. This result suggests that the ability of the 5′ end block to associate the gene modifying polypeptide (e.g., via the Cas9 domain) and/or the ttRNA to the genomic target, or to stably associate with the gene modifying polypeptide, enables the ttRNA to facilitate insertion of a 150 nucleotide sequence into the genome when the ttRNA is capable of associating with the RBD via an RRS. The results further show that approximately 1.6-2.8% GFP positive cells were observed when cells were treated with gene modifying systems comprising ttRNAs having 5′ end blocks comprising a Cas9 gRNA scaffold and 20 nucleotide gRNA spacer wherein the ttRNA comprised an RRS. This result suggests that the ability of the 5′ end block to associate the gene modifying polypeptide and/or ttRNA to the genomic target (or to stably associate with the gene modifying polypeptide) and induce nicking of the target DNA enables the ttRNA to facilitate insertion of a 150 nucleotide sequence into the genome when the ttRNA is capable of associating with the RBD via an RRS. The result further suggests that the ability of the 5′ end block to induce nicking of the target DNA via its association with a gene modifying polypeptide increases the rewriting rate for 150 nucleotide insertions. The % GFP positive cells was somewhat lower when a ttRNA contained a 5′ end block comprising a Cas9 gRNA scaffold and 20 nucleotide gRNA spacer and lacked an RRS.

[1280] The results together support the interpretation that a ttRNA anchored to a target genomic DNA site (e.g., the complex of the target genomic DNA site, a first gene modifying polypeptide, and a gRNA) by two different associations (e.g., here an RBD:RRS interaction with the first gene modifying polypeptide, and a 5′ end block gRNA scaffold/spacer interaction with the target genomic DNA (e.g., mediated by a second gene modifying polypeptide)) enables a gene modifying system to site-specifically insert a 150 nucleotide long sequence into genomic DNA. The results further support the interpretation that a 5′ end block that facilitates nicking (e.g., by comprising a gRNA spacer of suitable length and sequence identity) improves the efficiency of insertion of the 150 nucleotide long sequence.

[1281] Additionally, the results showed that a 12 nucleotide long homology 2 region was not sufficient for a ttRNA to facilitate insertion of the 150 nucleotide long sequence, regardless of the features of the 5′ end block sequence and RRS. The results showed that a 46 nucleotide long homology 2 region was sufficient, when present with an RRS (either 1× MS2 or 4× MS2) and a 5′ end block sequence containing a gRNA scaffold and a gRNA spacer (either 15 or 20 nucleotides in length), to facilitate insertion of the 150 nucleotide long sequence. These results suggest that a longer homology 2 region is needed to successfully insert longer (e.g., 150 nucleotide long) nucleotide sequences, and that the benefit of the longer homology 2 region can be combined with that of a 20 nucleotide 5′ end block gRNA spacer to increase the editing efficiency of the gene modifying system.

### Example 6: Evaluating the Roles of ttRNA Components and Different Gene Modifying Polypeptide Domain Configurations in Long Insertion Activity

[1282] This example describes the evaluation of exemplary three (3)-component gene modifying systems in the targeted insertion of a 150 nt sequence in the human genome. The gene modifying systems each comprised (1) a gene modifying polypeptide generated in Example 3 (and demonstrated to have trans-recruitment and rewrite activity in Examples 7 and 9 of PCT Application PCT/US2022/076064, which Examples are herein incorporated by reference), (2) a trans template RNA (ttRNA) comprising either of two different homology region lengths and with or without RRSs, and (3) exemplary gRNA PLV4165.

[1283] Four different individual gene modifying polypeptides were used in this Example; amino acid sequences of which are provided in Example 3.

| Name | Configuration and RBD |
|---|---|
| PL12113 | RT-RBD-DBD; Two MCP domains |
| PL12109 | RT-RBD-DBD; One MCP domain |
| PL11945 | DBD-RBD-RT; Two MCP domains |
| PL12096 | DBD-RT-RBD; Four MCP domains |

[1284] The ttRNA used are given in Table E13 below. ttRNAs contained:
[1285] An RRS containing either 1 or 4 MS2 repeats, or a secondary structure-containing nucleic acid sequence that does not bind to an RBD (Pseudoknot).
[1286] A 5′ end block sequence containing a gRNA scaffold sequence compatible with the Cas9 domain of the gene modifying polypeptides and a gRNA spacer containing either 15 nucleotides or 20 nucleotides.

TABLE E13
Exemplary ttRNA Sequences Used in This Example
(Sequences Provided in Example 4)

| | | | RRS or | |
|---|---|---|---|---|
| ttRNA | Template | 5′ end | substitute | Homology 2 |
| Name | Type | block contents | sequence | region length |
| PL15349 | Test | Scaffold + | 1XMS2 | 46 |
| | | longer spacer | | |
| PL15377 | Test | Scaffold + | 4XMS2 | 46 |
| | | longer spacer | | |
| PL15405 | No RRS | Scaffold + | Pseudoknot | 46 |
| | control | longer spacer | | |
| PL15348 | Test | Scaffold + | 1XMS2 | 46 |
| | | shorter spacer | | |
| PL15376 | Test | Scaffold + | 4XMS2 | 46 |
| | | shorter spacer | | |
| PL15404 | No RRS | Scaffold + | Pseudoknot | 46 |
| | control | shorter spacer | | |

[1287] “Pseudoknot” in the “5′ end block contents” field indicates that ttRNAs comprised a 5′ end block that, while assuming a secondary/tertiary structure thought to protect the 5′ end of the ttRNA from degradation, is not capable of binding to a Cas domain, e.g., the Cas domain of the gene modifying polypeptide. Similarly, “Pseudoknot” in the “RRS or substitute sequence” field indicates that ttRNAs comprised (proximal to the 3′ end and in place of an RRS) a secondary/tertiary structure thought to protect the 3′ end of the ttRNA from degradation, and that is not capable of binding to an RBD, e.g., the RBD domain of the gene modifying polypeptide. Cas9 scaffold ttRNAs (“Scaffold”) comprise a 5′ end block containing a gRNA scaffold sequence compatible with the Cas9 domain of the gene modifying polypeptide, but the 5′ end block lacks a gRNA spacer sequence. Cas9 scaffold+spacer ttRNAs comprise a 5′ end block and a gRNA scaffold sequence compatible with the Cas9 domain of the gene modifying polypeptide and a shorter (“Scaffold+Shorter Spacer”) or longer (“Scaffold+Longer Spacer”) gRNA spacer sequence. It is thought that a shorter gRNA spacer is sufficient for RNA-directed binding of a Cas9 domain to the genomic target but insufficient for nicking of the target DNA, whereas a longer gRNA spacer is sufficient for both binding and nicking. The sequence of the gRNA that comprises the 3^{rd} component of the gene modifying system is as below

PLV4165:
(SEQ ID NO: 16,714)
GCCGAAGCACTGCACGCCGTGTTTTAGAGCTAGAAATAGCAAGTTAAA
ATAAGGCTAGTCCGTTATCAACTTGAAAAAGTGGCACCGAGTCGGTGC

[1288] To assess the capacity of the trans-gene modifying system to write long insertions into the genome, 150 nt restoration reporter cell lines (U2OS) were analyzed by flow cytometry and amplicon sequencing 4-days post-transfection/electroporation of the gene modifying systems.

[1289] The 3-component gene modifying system was nucleofected into the U2OS 150 bp insertion GFP reporter-expressing cell line. All 3 components of the gene modifying system were delivered by nucleofection in DNA format. Specifically, 300 ng of gene modifying polypeptide plasmid DNA is combined with 300 ng of ttRNA- and 150 ng of gRNA-expressing plasmids. The modifying polypeptide, ttRNA and gRNA in plasmid DNA format were added to 20 μL SE buffer containing 270,000 U2OS 150 bp insertion GFP reporter-expressing cells, and the cells were nucleofected using program DN-100. After nucleofection, cells were grown at 37° C., 5% CO₂ for at least 4 days prior to harvest and (1) fluorescence readout of GFP restoration by flow cytometry or (2) sequencing readout of accurate sequence insertion by amplicon sequencing. GFP expression or sequencing reads containing the desired 150 nucleotides at the target site within the GFP locus is indicative of the insertion having been accurately written into the genome.

[1290] FIG. 6A-6D show graphs of % GFP positive cells after treating the 150 bp insertion GFP reporter-expressing cell line with a gene modifying system comprising a ttRNA having the characteristics indicated on the X-axis and above the graph (PL15349, PL15377, and PL15405 for longer spacer; PL15348, PL15376, or PL15404 for shorter spacer) or with H2O only or a no-ttRNA and no-gRNA control gene modifying system (left 3 bars of each graph; the ttRNAs in the no-ttRNA and no-gRNA conditions were PL15349 and PL15348). The results showed that three different configurations of gene modifying polypeptide were capable of facilitating insertion of the 150 nucleotide fragment into the genome of the cell: Cas9-RBD-RT, Cas9-RT-RBD, and RT-RBD-Cas9. Of these, RT-RBD-Cas9 configuration gene modifying polypeptides achieved the highest % GFP positive cells, suggesting that this configuration has the highest editing activity for 150 nucleotide insertions.

[1291] The results also show that, in the presence of a 5′ end block sequence containing a gRNA scaffold and gRNA spacer of either 15 (short spacer; binding capable) or 20 (long spacer; binding and nicking capable) nucleotides in length, either 1× MS2 or 4× MS2 RRS was sufficient to facilitate insertion of the 150 nucleotide fragment. However, an RRS containing 4 repeats of the MS2 sequence yielded a higher editing rate than an RRS containing a single MS2 sequence, suggesting that a longer RRS (e.g., a stronger or longer-lived RRS:RBD interaction) improves 150 nucleotide editing in the presence of an anchoring 5′ end block sequence. The results also show that substituting a sequence having secondary structure (pseudoknot) but incapable of binding to an RBD in place of the RRS produced a ttRNA that facilitated 150 nucleotide fragment insertion. This suggests that in the presence of an anchoring 5′ end block sequence (comprising a gRNA scaffold and gRNA spacer), the RRS-RBD interaction is not necessary for 150 nucleotide fragment insertion but when present may improve editing efficiency. The results further demonstrate that ttRNAs comprising a 5′ end block that facilitates Cas domain nicking of the target site (e.g., by comprising a gRNA scaffold and a gRNA spacer of sufficient length, e.g., 20 nucleotides) may facilitate higher rates of 150 nucleotide insertion than ttRNAs comprising 5′ end block sequences that do not facilitate nicking (e.g., by comprising a gRNA scaffold and a gRNA spacer of a shorter length insufficient for Cas domain nicking).

[1292] FIGS. 7A-7D show graphs of % perfect editing at the GFP locus as seen by next-generation sequencing data from amplicon sequencing. Perfectly edited reads were defined as any reads that perfectly matched the expected edited sequence, as well as reads that contained the correct insertion size and included one or more “N” base calls (i.e. no clear base identification at certain sequence positions) due to limitations of the sequencing technology at these read lengths. The results largely corroborated the observation and interpretation of the flow cytometry results of FIGS. 6A-6D. Briefly, the results showed that three different configurations of gene modifying polypeptide were capable of facilitating insertion of the 150 nucleotide fragment into the GFP locus: Cas9-RBD-RT, Cas9-RT-RBD, and RT-RBD-Cas9. Over 4% and up to 8% perfect editing was observed with the RT-RBD-Cas9 configuration of the gene modifying polypeptide. The amplicon sequencing results also confirmed that ttRNAs comprising a 5′ end block that may facilitate Cas domain nicking of the target site (e.g., by comprising a gRNA scaffold and a gRNA spacer of sufficient length, e.g., 20 nucleotides) promotes higher rates of 150 nucleotide insertion than ttRNAs comprising 5′ end block sequences that do not facilitate nicking (e.g., by comprising a gRNA scaffold and a gRNA spacer of a shorter length insufficient for Cas domain nicking). Finally, the results from amplicon sequencing readout also support the interpretation that an RRS containing 4 repeats may have a higher editing rate than an RRS containing a single MS2 sequence, suggesting that a longer RRS (e.g., a stronger or longer-lived RRS:RBD interaction) assists in 150 nucleotide insertion in the presence of an anchoring 5′ end block sequence. Furthermore and in agreement with the flow cytometry results, the RRS-RBD interaction is secondary to the anchoring 5′ end block in its ability to insert a 150 nucleotide sequence in the genome.

[1293] To assess the capacity of additional trans-gene modifying systems (described in Example 9 and having different gene modifying polypeptide configurations) to write long insertions into the genome, 150 nt restoration reporter cell lines (U2OS) were analyzed by flow cytometry 4-days post-electroporation of the gene modifying systems.

TABLE N1
Exemplary driver amino acid sequences.

| Identifier | Amino acid sequence |
|---|---|
| PL24668 | MPAAKRVKLDGGTAPLEEEYRLFLEAPIQNVTLLEQWKREIPKVWAEINPPGLASTQAPIHVQLLS |
| | TALPVRVRQYPITLEAKRSLRETIRKFRAAGILRPVHSPWNTPLLPVRKSGTSEYRMVQDLREVNK |
| | RVETIHPTVPNPYTLLSLLPPDRIWYSVLDLKDAFFCIPLAPESQLIFAFEWADAEEGESGQLTWT |
| | RLPQGFKNSPTLFNEALNRDLQGFRLDHPSVSLLQYVDDLLIAADTQAACLSATRDLLMTLAELGY |
| | RVSGKKAQLCQEEVTYLGFKIHKGSRSLSNSRTQAILQIPVPKTKRQVREFLGKIGYCRLFIPGFA |
| | ELAQPLYAATRPGNDPLVWGEKEEEAFQSLKLALTQPPALALPSLDKPFQLFVEETSGAAKGVLTQ |
| | ALGPWKRPVAYLSKRLDPVAAGWPRCLRAIAAAALLTREASKLTFGQDIEITSSHNLESLLRSPPD |
| | KWLTNARITQYQVLLLDPPRVRFKQTAALNPATLLPETDDTLPIHHCLDTLDSLTSTRPDLTDQPL |
| | AQAEATLFTDGSSYIRDGKRYAGAAVVTLDSVIWAEPLPIGTSAQKAELIALTKALEWSKDKSVNI |
| | YTDSRYAFATLHVHGMIYRERGWLTAGGKAIKNAPEILALLTAVWLPKRVAVMHCKGHQKDDAPTS |
| | TGNRRADEVAREVAIRPLSTQATISAEAAAKEAAAKEAAAKEAAAKALEAEAAAKEAAAKEAAAKE |
| | AAAKADKKYSIGLDIGTNSVGWAVITDEYKVPSKKFKVLGNTDRHSIKKNLIGALLFDSGETAEAT |
| | RLKRTARRRYTRRKNRICYLQEIFSNEMAKVDDSFFHRLEESFLVEEDKKHERHPIFGNIVDEVAY |
| | HEKYPTIYHLRKKLVDSTDKADLRLIYLALAHMIKFRGHFLIEGDLNPDNSDVDKLFIQLVQTYNQ |
| | LFEENPINASGVDAKAILSARLSKSRRLENLIAQLPGEKKNGLFGNLIALSLGLTPNFKSNFDLAE |
| | DAKLQLSKDTYDDDLDNLLAQIGDQYADLFLAAKNLSDAILLSDILRVNTEITKAPLSASMIKRYD |
| | EHHQDLTLLKALVRQQLPEKYKEIFFDQSKNGYAGYIDGGASQEEFYKFIKPILEKMDGTEELLVK |
| | LNREDLLRKQRTFDNGSIPHQIHLGELHAILRRQEDFYPFLKDNREKIEKILTFRIPYYVGPLARG |
| | NSRFAWMTRKSEETITPWNFEEVVDKGASAQSFIERMTNFDKNLPNEKVLPKHSLLYEYFTVYNEL |
| | TKVKYVTEGMRKPAFLSGEQKKAIVDLLFKTNRKVTVKQLKEDYFKKIECFDSVEISGVEDRFNAS |
| | LGTYHDLLKIIKDKDFLDNEENEDILEDIVLTLTLFEDREMIEERLKTYAHLFDDKVMKQLKRRRY |
| | TGWGRLSRKLINGIRDKQSGKTILDFLKSDGFANRNFMQLIHDDSLTFKEDIQKAQVSGQGDSLHE |
| | HIANLAGSPAIKKGILQTVKVVDELVKVMGRHKPENIVIEMARENQTTQKGQKNSRERMKRIEEGI |
| | KELGSQILKEHPVENTQLQNEKLYLYYLQNGRDMYVDQELDINRLSDYDVDHIVPQSFLKDDSIDN |
| | KVLTRSDKARGKSDNVPSEEVVKKMKNYWRQLLNAKLITQRKFDNLTKAERGGLSELDKAGFIKRQ |
| | LVETRQITKHVAQILDSRMNTKYDENDKLIREVKVITLKSKLVSDFRKDFQFYKVREINNYHHAHD |
| | AYLNAVVGTALIKKYPKLESEFVYGDYKVYDVRKMIAKSEQEIGKATAKYFFYSNIMNFFKTEITL |
| | ANGEIRKRPLIETNGETGEIVWDKGRDFATVRKVLSMPQVNIVKKTEVQTGGFSKESILPKRNSDK |
| | LIARKKDWDPKKYGGFDSPTVAYSVLVVAKVEKGKSKKLKSVKELLGITIMERSSFEKNPIDFLEA |
| | KGYKEVKKDLIIKLPKYSLFELENGRKRMLASAGELQKGNELALPSKYVNFLYLASHYEKLKGSPE |
| | DNEQKQLFVEQHKHYLDEIIEQISEFSKRVILADANLDKVLSAYNKHRDKPIREQAENIIHLFTLT |
| | NLGAPAAFKYFDTTIDRKRYTSTKEVLDATLIHQSITGLYETRIDLSQLGGDAEAAAKEAAAKEAA |
| | AKEAAAKALEAEAAAKEAAAKEAAAKEAAAKAMASNFTQFVLVDNGGTGDVTVAPSNFANGIAEWI |
| | SSNSRSQAYKVTCSVRQSSAQNRKYTIKVEVPKGAWRSYLNMELTIPIFATNSDCELIVKAMQGLL |
| | KDGNPIPSAIAANSGIYKRTADGSEFESPKKKAKVE (SEQ ID NO: 17001) |
| PL24669 | MPAAKRVKLDGGTAPLEEEYRLFLEAPIQNVTLLEQWKREIPKVWAEINPPGLASTQAPIHVQLLS |
| | TALPVRVRQYPITLEAKRSLRETIRKFRAAGILRPVHSPWNTPLLPVRKSGTSEYRMVQDLREVNK |
| | RVETIHPTVPNPYTLLSLLPPDRIWYSVLDLKDAFFCIPLAPESQLIFAFEWADAEEGESGQLTWT |
| | RLPQGFKNSPTLFNEALNRDLQGFRLDHPSVSLLQYVDDLLIAADTQAACLSATRDLLMTLAELGY |
| | RVSGKKAQLCQEEVTYLGFKIHKGSRSLSNSRTQAILQIPVPKTKRQVREFLGKIGYCRLFIPGFA |
| | ELAQPLYAATRPGNDPLVWGEKEEEAFQSLKLALTQPPALALPSLDKPFQLFVEETSGAAKGVLTQ |
| | ALGPWKRPVAYLSKRLDPVAAGWPRCLRAIAAAALLTREASKLTFGQDIEITSSHNLESLLRSPPD |
| | KWLTNARITQYQVLLLDPPRVRFKQTAALNPATLLPETDDTLPIHHCLDTLDSLTSTRPDLTDQPL |
| | AQAEATLFTDGSSYIRDGKRYAGAAVVTLDSVIWAEPLPIGTSAQKAELIALTKALEWSKDKSVNI |
| | YTDSRYAFATLHVHGMIYRERGWLTAGGKAIKNAPEILALLTAVWLPKRVAVMHCKGHQKDDAPTS |
| | TGNRRADEVAREVAIRPLSTQATISAEAAAKEAAAKEAAAKEAAAKALEAEAAAKEAAAKEAAAKE |
| | AAAKADKKYSIGLDIGTNSVGWAVITDEYKVPSKKFKVLGNTDRHSIKKNLIGALLFDSGETAEAT |
| | RLKRTARRRYTRRKNRICYLQEIFSNEMAKVDDSFFHRLEESFLVEEDKKHERHPIFGNIVDEVAY |
| | HEKYPTIYHLRKKLVDSTDKADLRLIYLALAHMIKFRGHFLIEGDLNPDNSDVDKLFIQLVQTYNQ |
| | LFEENPINASGVDAKAILSARLSKSRRLENLIAQLPGEKKNGLFGNLIALSLGLTPNFKSNFDLAE |
| | DAKLQLSKDTYDDDLDNLLAQIGDQYADLFLAAKNLSDAILLSDILRVNTEITKAPLSASMIKRYD |
| | EHHQDLTLLKALVRQQLPEKYKEIFFDQSKNGYAGYIDGGASQEEFYKFIKPILEKMDGTEELLVK |
| | LNREDLLRKQRTFDNGSIPHQIHLGELHAILRRQEDFYPFLKDNREKIEKILTFRIPYYVGPLARG |
| | NSRFAWMTRKSEETITPWNFEEVVDKGASAQSFIERMTNFDKNLPNEKVLPKHSLLYEYFTVYNEL |
| | TKVKYVTEGMRKPAFLSGEQKKAIVDLLFKTNRKVTVKQLKEDYFKKIECFDSVEISGVEDRFNAS |
| | LGTYHDLLKIIKDKDFLDNEENEDILEDIVLTLTLFEDREMIEERLKTYAHLFDDKVMKQLKRRRY |
| | TGWGRLSRKLINGIRDKQSGKTILDFLKSDGFANRNFMQLIHDDSLTFKEDIQKAQVSGQGDSLHE |
| | HIANLAGSPAIKKGILQTVKVVDELVKVMGRHKPENIVIEMARENQTTQKGQKNSRERMKRIEEGI |
| | KELGSQILKEHPVENTQLQNEKLYLYYLQNGRDMYVDQELDINRLSDYDVDHIVPQSFLKDDSIDN |
| | KVLTRSDKARGKSDNVPSEEVVKKMKNYWRQLLNAKLITQRKFDNLTKAERGGLSELDKAGFIKRQ |
| | LVETRQITKHVAQILDSRMNTKYDENDKLIREVKVITLKSKLVSDFRKDFQFYKVREINNYHHAHD |
| | AYLNAVVGTALIKKYPKLESEFVYGDYKVYDVRKMIAKSEQEIGKATAKYFFYSNIMNFFKTEITL |
| | ANGEIRKRPLIETNGETGEIVWDKGRDFATVRKVLSMPQVNIVKKTEVQTGGFSKESILPKRNSDK |
| | LIARKKDWDPKKYGGFDSPTVAYSVLVVAKVEKGKSKKLKSVKELLGITIMERSSFEKNPIDFLEA |
| | KGYKEVKKDLIIKLPKYSLFELENGRKRMLASAGELQKGNELALPSKYVNFLYLASHYEKLKGSPE |
| | DNEQKQLFVEQHKHYLDEIIEQISEFSKRVILADANLDKVLSAYNKHRDKPIREQAENIIHLFTLT |
| | NLGAPAAFKYFDTTIDRKRYTSTKEVLDATLIHQSITGLYETRIDLSQLGGDAEAAAKEAAAKEAA |
| | AKEAAAKALEAEAAAKEAAAKEAAAKEAAAKAMASNFTQFVLVDNGGTGDVTVAPSNFANGIAEWI |
| | SSNSRSQAYKVTCSVRQSSAQNRKYTIKVEVPKGAWRSYLNMELTIPIFATNSDCELIVKAMQGLL |
| | KDGNPIPSAIAANSGIYGGSGGSMASNFTQFVLVDNGGTGDVTVAPSNFANGIAEWISSNSRSQAY |
| | KVTCSVRQSSAQNRKYTIKVEVPKGAWRSYLNMELTIPIFATNSDCELIVKAMQGLLKDGNPIPSA |
| | IAANSGIYKRTADGSEFESPKKKAKVE (SEQ ID NO: 17002) |
| PL24670 | MPAAKRVKLDGGTAPLEEEYRLFLEAPIQNVTLLEQWKREIPKVWAEINPPGLASTQAPIHVQLLS |
| | TALPVRVRQYPITLEAKRSLRETIRKFRAAGILRPVHSPWNTPLLPVRKSGTSEYRMVQDLREVNK |
| | RVETIHPTVPNPYTLLSLLPPDRIWYSVLDLKDAFFCIPLAPESQLIFAFEWADAEEGESGQLTWT |
| | RLPQGFKNSPTLFNEALNRDLQGFRLDHPSVSLLQYVDDLLIAADTQAACLSATRDLLMTLAELGY |
| | RVSGKKAQLCQEEVTYLGFKIHKGSRSLSNSRTQAILQIPVPKTKRQVREFLGKIGYCRLFIPGFA |
| | ELAQPLYAATRPGNDPLVWGEKEEEAFQSLKLALTQPPALALPSLDKPFQLFVEETSGAAKGVLTQ |
| | ALGPWKRPVAYLSKRLDPVAAGWPRCLRAIAAAALLTREASKLTFGQDIEITSSHNLESLLRSPPD |
| | KWLTNARITQYQVLLLDPPRVRFKQTAALNPATLLPETDDTLPIHHCLDTLDSLTSTRPDLTDQPL |
| | AQAEATLFTDGSSYIRDGKRYAGAAVVTLDSVIWAEPLPIGTSAQKAELIALTKALEWSKDKSVNI |
| | YTDSRYAFATLHVHGMIYRERGWLTAGGKAIKNAPEILALLTAVWLPKRVAVMHCKGHQKDDAPTS |
| | TGNRRADEVAREVAIRPLSTQATISAEAAAKEAAAKEAAAKEAAAKALEAEAAAKEAAAKEAAAKE |
| | AAAKADKKYSIGLDIGTNSVGWAVITDEYKVPSKKFKVLGNTDRHSIKKNLIGALLFDSGETAEAT |
| | RLKRTARRRYTRRKNRICYLQEIFSNEMAKVDDSFFHRLEESFLVEEDKKHERHPIFGNIVDEVAY |
| | HEKYPTIYHLRKKLVDSTDKADLRLIYLALAHMIKFRGHFLIEGDLNPDNSDVDKLFIQLVQTYNQ |
| | LFEENPINASGVDAKAILSARLSKSRRLENLIAQLPGEKKNGLFGNLIALSLGLTPNFKSNFDLAE |
| | DAKLQLSKDTYDDDLDNLLAQIGDQYADLFLAAKNLSDAILLSDILRVNTEITKAPLSASMIKRYD |
| | EHHQDLTLLKALVRQQLPEKYKEIFFDQSKNGYAGYIDGGASQEEFYKFIKPILEKMDGTEELLVK |
| | LNREDLLRKQRTFDNGSIPHQIHLGELHAILRRQEDFYPFLKDNREKIEKILTFRIPYYVGPLARG |
| | NSRFAWMTRKSEETITPWNFEEVVDKGASAQSFIERMTNFDKNLPNEKVLPKHSLLYEYFTVYNEL |
| | TKVKYVTEGMRKPAFLSGEQKKAIVDLLFKTNRKVTVKQLKEDYFKKIECFDSVEISGVEDRFNAS |
| | LGTYHDLLKIIKDKDFLDNEENEDILEDIVLTLTLFEDREMIEERLKTYAHLFDDKVMKQLKRRRY |
| | TGWGRLSRKLINGIRDKQSGKTILDFLKSDGFANRNFMQLIHDDSLTFKEDIQKAQVSGQGDSLHE |
| | HIANLAGSPAIKKGILQTVKVVDELVKVMGRHKPENIVIEMARENQTTQKGQKNSRERMKRIEEGI |
| | KELGSQILKEHPVENTQLQNEKLYLYYLQNGRDMYVDQELDINRLSDYDVDHIVPQSFLKDDSIDN |
| | KVLTRSDKARGKSDNVPSEEVVKKMKNYWRQLLNAKLITQRKFDNLTKAERGGLSELDKAGFIKRQ |
| | LVETRQITKHVAQILDSRMNTKYDENDKLIREVKVITLKSKLVSDFRKDFQFYKVREINNYHHAHD |
| | AYLNAVVGTALIKKYPKLESEFVYGDYKVYDVRKMIAKSEQEIGKATAKYFFYSNIMNFFKTEITL |
| | ANGEIRKRPLIETNGETGEIVWDKGRDFATVRKVLSMPQVNIVKKTEVQTGGFSKESILPKRNSDK |
| | LIARKKDWDPKKYGGFDSPTVAYSVLVVAKVEKGKSKKLKSVKELLGITIMERSSFEKNPIDFLEA |
| | KGYKEVKKDLIIKLPKYSLFELENGRKRMLASAGELQKGNELALPSKYVNFLYLASHYEKLKGSPE |
| | DNEQKQLFVEQHKHYLDEIIEQISEFSKRVILADANLDKVLSAYNKHRDKPIREQAENIIHLFTLT |
| | NLGAPAAFKYFDTTIDRKRYTSTKEVLDATLIHQSITGLYETRIDLSQLGGDAEAAAKEAAAKEAA |
| | AKEAAAKALEAEAAAKEAAAKEAAAKEAAAKAMASNFTQFVLVDNGGTGDVTVAPSNFANGIAEWI |
| | SSNSRSQAYKVTCSVRQSSAQNRKYTIKVEVPKGAWRSYLNMELTIPIFATNSDCELIVKAMQGLL |
| | KDGNPIPSAIAANSGIYANFTQFVLVDNGGTGDVTVAPSNFANGIAEWISSNSRSQAYKVTCSVRQ |
| | SSAQNRKYTIKVEVPKGAWRSYLNMELTIPIFATNSDCELIVKAMQGLLKDGNPIPSAIAANSGIY |
| | KRTADGSEFESPKKKAKVE (SEQ ID NO: 17003) |
| PL24671 | MPAAKRVKLDGGTAPLEEEYRLFLEAPIQNVTLLEQWKREIPKVWAEINPPGLASTQAPIHVQLLS |
| | TALPVRVRQYPITLEAKRSLRETIRKFRAAGILRPVHSPWNTPLLPVRKSGTSEYRMVQDLREVNK |
| | RVETIHPTVPNPYTLLSLLPPDRIWYSVLDLKDAFFCIPLAPESQLIFAFEWADAEEGESGQLTWT |
| | RLPQGFKNSPTLFNEALNRDLQGFRLDHPSVSLLQYVDDLLIAADTQAACLSATRDLLMTLAELGY |
| | RVSGKKAQLCQEEVTYLGFKIHKGSRSLSNSRTQAILQIPVPKTKRQVREFLGKIGYCRLFIPGFA |
| | ELAQPLYAATRPGNDPLVWGEKEEEAFQSLKLALTQPPALALPSLDKPFQLFVEETSGAAKGVLTQ |
| | ALGPWKRPVAYLSKRLDPVAAGWPRCLRAIAAAALLTREASKLTFGQDIEITSSHNLESLLRSPPD |
| | KWLTNARITQYQVLLLDPPRVRFKQTAALNPATLLPETDDTLPIHHCLDTLDSLTSTRPDLTDQPL |
| | AQAEATLFTDGSSYIRDGKRYAGAAVVTLDSVIWAEPLPIGTSAQKAELIALTKALEWSKDKSVNI |
| | YTDSRYAFATLHVHGMIYRERGWLTAGGKAIKNAPEILALLTAVWLPKRVAVMHCKGHQKDDAPTS |
| | TGNRRADEVAREVAIRPLSTQATISAEAAAKEAAAKEAAAKEAAAKALEAEAAAKEAAAKEAAAKE |
| | AAAKADKKYSIGLDIGTNSVGWAVITDEYKVPSKKFKVLGNTDRHSIKKNLIGALLFDSGETAEAT |
| | RLKRTARRRYTRRKNRICYLQEIFSNEMAKVDDSFFHRLEESFLVEEDKKHERHPIFGNIVDEVAY |
| | HEKYPTIYHLRKKLVDSTDKADLRLIYLALAHMIKFRGHFLIEGDLNPDNSDVDKLFIQLVQTYNQ |
| | LFEENPINASGVDAKAILSARLSKSRRLENLIAQLPGEKKNGLFGNLIALSLGLTPNFKSNFDLAE |
| | DAKLQLSKDTYDDDLDNLLAQIGDQYADLFLAAKNLSDAILLSDILRVNTEITKAPLSASMIKRYD |
| | EHHQDLTLLKALVRQQLPEKYKEIFFDQSKNGYAGYIDGGASQEEFYKFIKPILEKMDGTEELLVK |
| | LNREDLLRKQRTFDNGSIPHQIHLGELHAILRRQEDFYPFLKDNREKIEKILTFRIPYYVGPLARG |
| | NSRFAWMTRKSEETITPWNFEEVVDKGASAQSFIERMTNFDKNLPNEKVLPKHSLLYEYFTVYNEL |
| | TKVKYVTEGMRKPAFLSGEQKKAIVDLLFKTNRKVTVKQLKEDYFKKIECFDSVEISGVEDRFNAS |
| | LGTYHDLLKIIKDKDFLDNEENEDILEDIVLTLTLFEDREMIEERLKTYAHLFDDKVMKQLKRRRY |
| | TGWGRLSRKLINGIRDKQSGKTILDFLKSDGFANRNFMQLIHDDSLTFKEDIQKAQVSGQGDSLHE |
| | HIANLAGSPAIKKGILQTVKVVDELVKVMGRHKPENIVIEMARENQTTQKGQKNSRERMKRIEEGI |
| | KELGSQILKEHPVENTQLQNEKLYLYYLQNGRDMYVDQELDINRLSDYDVDHIVPQSFLKDDSIDN |
| | KVLTRSDKARGKSDNVPSEEVVKKMKNYWRQLLNAKLITQRKFDNLTKAERGGLSELDKAGFIKRQ |
| | LVETRQITKHVAQILDSRMNTKYDENDKLIREVKVITLKSKLVSDFRKDFQFYKVREINNYHHAHD |
| | AYLNAVVGTALIKKYPKLESEFVYGDYKVYDVRKMIAKSEQEIGKATAKYFFYSNIMNFFKTEITL |
| | ANGEIRKRPLIETNGETGEIVWDKGRDFATVRKVLSMPQVNIVKKTEVQTGGFSKESILPKRNSDK |
| | LIARKKDWDPKKYGGFDSPTVAYSVLVVAKVEKGKSKKLKSVKELLGITIMERSSFEKNPIDFLEA |
| | KGYKEVKKDLIIKLPKYSLFELENGRKRMLASAGELQKGNELALPSKYVNFLYLASHYEKLKGSPE |
| | DNEQKQLFVEQHKHYLDEIIEQISEFSKRVILADANLDKVLSAYNKHRDKPIREQAENIIHLFTLT |
| | NLGAPAAFKYFDTTIDRKRYTSTKEVLDATLIHQSITGLYETRIDLSQLGGDAEAAAKEAAAKEAA |
| | AKEAAAKALEAEAAAKEAAAKEAAAKEAAAKAMASNFTQFVLVDNGGTGDVTVAPSNFANGIAEWI |
| | SSNSRSQAYKVTCSVRQSSAQNRKYTIKVEVPKGAWRSYLNMELTIPIFATNSDCELIVKAMQGLL |
| | KDGNPIPSAIAANSGIYGGSGGSMASNFTQFVLVDNGGTGDVTVAPSNFANGIAEWISSNSRSQAY |
| | KVTCSVRQSSAQNRKYTIKVEVPKGAWRSYLNMELTIPIFATNSDCELIVKAMQGLLKDGNPIPSA |
| | IAANSGIYGGGSGGGSGGGSGGGSMASNFTQFVLVDNGGTGDVTVAPSNFANGIAEWISSNSRSQA |
| | YKVTCSVRQSSAQNRKYTIKVEVPKGAWRSYLNMELTIPIFATNSDCELIVKAMQGLLKDGNPIPS |
| | AIAANSGIYGGSGGSMASNFTQFVLVDNGGTGDVTVAPSNFANGIAEWISSNSRSQAYKVTCSVRQ |
| | SSAQNRKYTIKVEVPKGAWRSYLNMELTIPIFATNSDCELIVKAMQGLLKDGNPIPSAIAANSGIY |
| | KRTADGSEFESPKKKAKVE (SEQ ID NO: 17004) |
| PL24672 | MPAAKRVKLDGGTAPLEEEYRLFLEAPIQNVTLLEQWKREIPKVWAEINPPGLASTQAPIHVQLLS |
| | TALPVRVRQYPITLEAKRSLRETIRKFRAAGILRPVHSPWNTPLLPVRKSGTSEYRMVQDLREVNK |
| | RVETIHPTVPNPYTLLSLLPPDRIWYSVLDLKDAFFCIPLAPESQLIFAFEWADAEEGESGQLTWT |
| | RLPQGFKNSPTLFNEALNRDLQGFRLDHPSVSLLQYVDDLLIAADTQAACLSATRDLLMTLAELGY |
| | RVSGKKAQLCQEEVTYLGFKIHKGSRSLSNSRTQAILQIPVPKTKRQVREFLGKIGYCRLFIPGFA |
| | ELAQPLYAATRPGNDPLVWGEKEEEAFQSLKLALTQPPALALPSLDKPFQLFVEETSGAAKGVLTQ |
| | ALGPWKRPVAYLSKRLDPVAAGWPRCLRAIAAAALLTREASKLTFGQDIEITSSHNLESLLRSPPD |
| | KWLTNARITQYQVLLLDPPRVRFKQTAALNPATLLPETDDTLPIHHCLDTLDSLTSTRPDLTDQPL |
| | AQAEATLFTDGSSYIRDGKRYAGAAVVTLDSVIWAEPLPIGTSAQKAELIALTKALEWSKDKSVNI |
| | YTDSRYAFATLHVHGMIYRERGWLTAGGKAIKNAPEILALLTAVWLPKRVAVMHCKGHQKDDAPTS |
| | TGNRRADEVAREVAIRPLSTQATISAEAAAKEAAAKEAAAKEAAAKALEAEAAAKEAAAKEAAAKE |
| | AAAKADKKYSIGLDIGTNSVGWAVITDEYKVPSKKFKVLGNTDRHSIKKNLIGALLFDSGETAEAT |
| | RLKRTARRRYTRRKNRICYLQEIFSNEMAKVDDSFFHRLEESFLVEEDKKHERHPIFGNIVDEVAY |
| | HEKYPTIYHLRKKLVDSTDKADLRLIYLALAHMIKFRGHFLIEGDLNPDNSDVDKLFIQLVQTYNQ |
| | LFEENPINASGVDAKAILSARLSKSRRLENLIAQLPGEKKNGLFGNLIALSLGLTPNFKSNFDLAE |
| | DAKLQLSKDTYDDDLDNLLAQIGDQYADLFLAAKNLSDAILLSDILRVNTEITKAPLSASMIKRYD |
| | EHHQDLTLLKALVRQQLPEKYKEIFFDQSKNGYAGYIDGGASQEEFYKFIKPILEKMDGTEELLVK |
| | LNREDLLRKQRTFDNGSIPHQIHLGELHAILRRQEDFYPFLKDNREKIEKILTFRIPYYVGPLARG |
| | NSRFAWMTRKSEETITPWNFEEVVDKGASAQSFIERMTNFDKNLPNEKVLPKHSLLYEYFTVYNEL |
| | TKVKYVTEGMRKPAFLSGEQKKAIVDLLFKTNRKVTVKQLKEDYFKKIECFDSVEISGVEDRFNAS |
| | LGTYHDLLKIIKDKDFLDNEENEDILEDIVLTLTLFEDREMIEERLKTYAHLFDDKVMKQLKRRRY |
| | TGWGRLSRKLINGIRDKQSGKTILDFLKSDGFANRNFMQLIHDDSLTFKEDIQKAQVSGQGDSLHE |
| | HIANLAGSPAIKKGILQTVKVVDELVKVMGRHKPENIVIEMARENQTTQKGQKNSRERMKRIEEGI |
| | KELGSQILKEHPVENTQLQNEKLYLYYLQNGRDMYVDQELDINRLSDYDVDHIVPQSFLKDDSIDN |
| | KVLTRSDKARGKSDNVPSEEVVKKMKNYWRQLLNAKLITQRKFDNLTKAERGGLSELDKAGFIKRQ |
| | LVETRQITKHVAQILDSRMNTKYDENDKLIREVKVITLKSKLVSDFRKDFQFYKVREINNYHHAHD |
| | AYLNAVVGTALIKKYPKLESEFVYGDYKVYDVRKMIAKSEQEIGKATAKYFFYSNIMNFFKTEITL |
| | ANGEIRKRPLIETNGETGEIVWDKGRDFATVRKVLSMPQVNIVKKTEVQTGGFSKESILPKRNSDK |
| | LIARKKDWDPKKYGGFDSPTVAYSVLVVAKVEKGKSKKLKSVKELLGITIMERSSFEKNPIDFLEA |
| | KGYKEVKKDLIIKLPKYSLFELENGRKRMLASAGELQKGNELALPSKYVNFLYLASHYEKLKGSPE |
| | DNEQKQLFVEQHKHYLDEIIEQISEFSKRVILADANLDKVLSAYNKHRDKPIREQAENIIHLFTLT |
| | NLGAPAAFKYFDTTIDRKRYTSTKEVLDATLIHQSITGLYETRIDLSQLGGDAEAAAKEAAAKEAA |
| | AKEAAAKALEAEAAAKEAAAKEAAAKEAAAKAMASNFTQFVLVDNGGTGDVTVAPSNFANGIAEWI |
| | SSNSRSQAYKVTCSVRQSSAQNRKYTIKVEVPKGAWRSYLNMELTIPIFATNSDCELIVKAMQGLL |
| | KDGNPIPSAIAANSGIYANFTQFVLVDNGGTGDVTVAPSNFANGIAEWISSNSRSQAYKVTCSVRQ |
| | SSAQNRKYTIKVEVPKGAWRSYLNMELTIPIFATNSDCELIVKAMQGLLKDGNPIPSAIAANSGIY |
| | GGGSGGGSGGGSGGGSMASNFTQFVLVDNGGTGDVTVAPSNFANGIAEWISSNSRSQAYKVTCSVR |
| | QSSAQNRKYTIKVEVPKGAWRSYLNMELTIPIFATNSDCELIVKAMQGLLKDGNPIPSAIAANSGI |
| | YANFTQFVLVDNGGTGDVTVAPSNFANGIAEWISSNSRSQAYKVTCSVRQSSAQNRKYTIKVEVPK |
| | GAWRSYLNMELTIPIFATNSDCELIVKAMQGLLKDGNPIPSAIAANSGIYKRTADGSEFESPKKKA |
| | KVE (SEQ ID NO: 17005) |
| PL24673 | MPAAKRVKLDGGMASNFTQFVLVDNGGTGDVTVAPSNFANGIAEWISSNSRSQAYKVTCSVRQSSA |
| | QNRKYTIKVEVPKGAWRSYLNMELTIPIFATNSDCELIVKAMQGLLKDGNPIPSAIAANSGIYAEA |
| | AAKEAAAKEAAAKEAAAKALEAEAAAKEAAAKEAAAKEAAAKATAPLEEEYRLFLEAPIQNVTLLE |
| | QWKREIPKVWAEINPPGLASTQAPIHVQLLSTALPVRVRQYPITLEAKRSLRETIRKFRAAGILRP |
| | VHSPWNTPLLPVRKSGTSEYRMVQDLREVNKRVETIHPTVPNPYTLLSLLPPDRIWYSVLDLKDAF |
| | FCIPLAPESQLIFAFEWADAEEGESGQLTWTRLPQGFKNSPTLFNEALNRDLQGFRLDHPSVSLLQ |
| | YVDDLLIAADTQAACLSATRDLLMTLAELGYRVSGKKAQLCQEEVTYLGFKIHKGSRSLSNSRTQA |
| | ILQIPVPKTKRQVREFLGKIGYCRLFIPGFAELAQPLYAATRPGNDPLVWGEKEEEAFQSLKLALT |
| | QPPALALPSLDKPFQLFVEETSGAAKGVLTQALGPWKRPVAYLSKRLDPVAAGWPRCLRAIAAAAL |
| | LTREASKLTFGQDIEITSSHNLESLLRSPPDKWLTNARITQYQVLLLDPPRVRFKQTAALNPATLL |
| | PETDDTLPIHHCLDTLDSLTSTRPDLTDQPLAQAEATLFTDGSSYIRDGKRYAGAAVVTLDSVIWA |
| | EPLPIGTSAQKAELIALTKALEWSKDKSVNIYTDSRYAFATLHVHGMIYRERGWLTAGGKAIKNAP |
| | EILALLTAVWLPKRVAVMHCKGHQKDDAPTSTGNRRADEVAREVAIRPLSTQATISAEAAAKEAAA |
| | KEAAAKEAAAKALEAEAAAKEAAAKEAAAKEAAAKADKKYSIGLDIGTNSVGWAVITDEYKVPSKK |
| | FKVLGNTDRHSIKKNLIGALLFDSGETAEATRLKRTARRRYTRRKNRICYLQEIFSNEMAKVDDSF |
| | FHRLEESFLVEEDKKHERHPIFGNIVDEVAYHEKYPTIYHLRKKLVDSTDKADLRLIYLALAHMIK |
| | FRGHFLIEGDLNPDNSDVDKLFIQLVQTYNQLFEENPINASGVDAKAILSARLSKSRRLENLIAQL |
| | PGEKKNGLFGNLIALSLGLTPNFKSNFDLAEDAKLQLSKDTYDDDLDNLLAQIGDQYADLFLAAKN |
| | LSDAILLSDILRVNTEITKAPLSASMIKRYDEHHQDLTLLKALVRQQLPEKYKEIFFDQSKNGYAG |
| | YIDGGASQEEFYKFIKPILEKMDGTEELLVKLNREDLLRKQRTFDNGSIPHQIHLGELHAILRRQE |
| | DFYPFLKDNREKIEKILTFRIPYYVGPLARGNSRFAWMTRKSEETITPWNFEEVVDKGASAQSFIE |
| | RMTNFDKNLPNEKVLPKHSLLYEYFTVYNELTKVKYVTEGMRKPAFLSGEQKKAIVDLLFKTNRKV |
| | TVKQLKEDYFKKIECFDSVEISGVEDRFNASLGTYHDLLKIIKDKDFLDNEENEDILEDIVLTLTL |
| | FEDREMIEERLKTYAHLFDDKVMKQLKRRRYTGWGRLSRKLINGIRDKQSGKTILDFLKSDGFANR |
| | NFMQLIHDDSLTFKEDIQKAQVSGQGDSLHEHIANLAGSPAIKKGILQTVKVVDELVKVMGRHKPE |
| | NIVIEMARENQTTQKGQKNSRERMKRIEEGIKELGSQILKEHPVENTQLQNEKLYLYYLQNGRDMY |
| | VDQELDINRLSDYDVDHIVPQSFLKDDSIDNKVLTRSDKARGKSDNVPSEEVVKKMKNYWRQLLNA |
| | KLITQRKFDNLTKAERGGLSELDKAGFIKRQLVETRQITKHVAQILDSRMNTKYDENDKLIREVKV |
| | ITLKSKLVSDFRKDFQFYKVREINNYHHAHDAYLNAVVGTALIKKYPKLESEFVYGDYKVYDVRKM |
| | IAKSEQEIGKATAKYFFYSNIMNFFKTEITLANGEIRKRPLIETNGETGEIVWDKGRDFATVRKVL |
| | SMPQVNIVKKTEVQTGGFSKESILPKRNSDKLIARKKDWDPKKYGGFDSPTVAYSVLVVAKVEKGK |
| | SKKLKSVKELLGITIMERSSFEKNPIDFLEAKGYKEVKKDLIIKLPKYSLFELENGRKRMLASAGE |
| | LQKGNELALPSKYVNFLYLASHYEKLKGSPEDNEQKQLFVEQHKHYLDEIIEQISEFSKRVILADA |
| | NLDKVLSAYNKHRDKPIREQAENIIHLFTLTNLGAPAAFKYFDTTIDRKRYTSTKEVLDATLIHQS |
| | ITGLYETRIDLSQLGGDKRTADGSEFESPKKKAKVE (SEQ ID NO: 17006) |
| PL24674 | MPAAKRVKLDGGMASNFTQFVLVDNGGTGDVTVAPSNFANGIAEWISSNSRSQAYKVTCSVRQSSA |
| | QNRKYTIKVEVPKGAWRSYLNMELTIPIFATNSDCELIVKAMQGLLKDGNPIPSAIAANSGIYGGS |
| | GGSMASNFTQFVLVDNGGTGDVTVAPSNFANGIAEWISSNSRSQAYKVTCSVRQSSAQNRKYTIKV |
| | EVPKGAWRSYLNMELTIPIFATNSDCELIVKAMQGLLKDGNPIPSAIAANSGIYAEAAAKEAAAKE |
| | AAAKEAAAKALEAEAAAKEAAAKEAAAKEAAAKATAPLEEEYRLFLEAPIQNVTLLEQWKREIPKV |
| | WAEINPPGLASTQAPIHVQLLSTALPVRVRQYPITLEAKRSLRETIRKFRAAGILRPVHSPWNTPL |
| | LPVRKSGTSEYRMVQDLREVNKRVETIHPTVPNPYTLLSLLPPDRIWYSVLDLKDAFFCIPLAPES |
| | QLIFAFEWADAEEGESGQLTWTRLPQGFKNSPTLFNEALNRDLQGFRLDHPSVSLLQYVDDLLIAA |
| | DTQAACLSATRDLLMTLAELGYRVSGKKAQLCQEEVTYLGFKIHKGSRSLSNSRTQAILQIPVPKT |
| | KRQVREFLGKIGYCRLFIPGFAELAQPLYAATRPGNDPLVWGEKEEEAFQSLKLALTQPPALALPS |
| | LDKPFQLFVEETSGAAKGVLTQALGPWKRPVAYLSKRLDPVAAGWPRCLRAIAAAALLTREASKLT |
| | FGQDIEITSSHNLESLLRSPPDKWLTNARITQYQVLLLDPPRVRFKQTAALNPATLLPETDDTLPI |
| | HHCLDTLDSLTSTRPDLTDQPLAQAEATLFTDGSSYIRDGKRYAGAAVVTLDSVIWAEPLPIGTSA |
| | QKAELIALTKALEWSKDKSVNIYTDSRYAFATLHVHGMIYRERGWLTAGGKAIKNAPEILALLTAV |
| | WLPKRVAVMHCKGHQKDDAPTSTGNRRADEVAREVAIRPLSTQATISAEAAAKEAAAKEAAAKEAA |
| | AKALEAEAAAKEAAAKEAAAKEAAAKADKKYSIGLDIGTNSVGWAVITDEYKVPSKKFKVLGNTDR |
| | HSIKKNLIGALLFDSGETAEATRLKRTARRRYTRRKNRICYLQEIFSNEMAKVDDSFFHRLEESFL |
| | VEEDKKHERHPIFGNIVDEVAYHEKYPTIYHLRKKLVDSTDKADLRLIYLALAHMIKFRGHFLIEG |
| | DLNPDNSDVDKLFIQLVQTYNQLFEENPINASGVDAKAILSARLSKSRRLENLIAQLPGEKKNGLF |
| | GNLIALSLGLTPNFKSNFDLAEDAKLQLSKDTYDDDLDNLLAQIGDQYADLFLAAKNLSDAILLSD |
| | ILRVNTEITKAPLSASMIKRYDEHHQDLTLLKALVRQQLPEKYKEIFFDQSKNGYAGYIDGGASQE |
| | EFYKFIKPILEKMDGTEELLVKLNREDLLRKQRTFDNGSIPHQIHLGELHAILRRQEDFYPFLKDN |
| | REKIEKILTFRIPYYVGPLARGNSRFAWMTRKSEETITPWNFEEVVDKGASAQSFIERMTNFDKNL |
| | PNEKVLPKHSLLYEYFTVYNELTKVKYVTEGMRKPAFLSGEQKKAIVDLLFKTNRKVTVKQLKEDY |
| | FKKIECFDSVEISGVEDRFNASLGTYHDLLKIIKDKDFLDNEENEDILEDIVLTLTLFEDREMIEE |
| | RLKTYAHLFDDKVMKQLKRRRYTGWGRLSRKLINGIRDKQSGKTILDFLKSDGFANRNFMQLIHDD |
| | SLTFKEDIQKAQVSGQGDSLHEHIANLAGSPAIKKGILQTVKVVDELVKVMGRHKPENIVIEMARE |
| | NQTTQKGQKNSRERMKRIEEGIKELGSQILKEHPVENTQLQNEKLYLYYLQNGRDMYVDQELDINR |
| | LSDYDVDHIVPQSFLKDDSIDNKVLTRSDKARGKSDNVPSEEVVKKMKNYWRQLLNAKLITQRKFD |
| | NLTKAERGGLSELDKAGFIKRQLVETRQITKHVAQILDSRMNTKYDENDKLIREVKVITLKSKLVS |
| | DFRKDFQFYKVREINNYHHAHDAYLNAVVGTALIKKYPKLESEFVYGDYKVYDVRKMIAKSEQEIG |
| | KATAKYFFYSNIMNFFKTEITLANGEIRKRPLIETNGETGEIVWDKGRDFATVRKVLSMPQVNIVK |
| | KTEVQTGGFSKESILPKRNSDKLIARKKDWDPKKYGGFDSPTVAYSVLVVAKVEKGKSKKLKSVKE |
| | LLGITIMERSSFEKNPIDFLEAKGYKEVKKDLIIKLPKYSLFELENGRKRMLASAGELQKGNELAL |
| | PSKYVNFLYLASHYEKLKGSPEDNEQKQLFVEQHKHYLDEIIEQISEFSKRVILADANLDKVLSAY |
| | NKHRDKPIREQAENIIHLFTLTNLGAPAAFKYFDTTIDRKRYTSTKEVLDATLIHQSITGLYETRI |
| | DLSQLGGDKRTADGSEFESPKKKAKVE (SEQ ID NO: 17007) |
| PL24675 | MPAAKRVKLDGGMASNFTQFVLVDNGGTGDVTVAPSNFANGIAEWISSNSRSQAYKVTCSVRQSSA |
| | QNRKYTIKVEVPKGAWRSYLNMELTIPIFATNSDCELIVKAMQGLLKDGNPIPSAIAANSGIYANF |
| | TQFVLVDNGGTGDVTVAPSNFANGIAEWISSNSRSQAYKVTCSVRQSSAQNRKYTIKVEVPKGAWR |
| | SYLNMELTIPIFATNSDCELIVKAMQGLLKDGNPIPSAIAANSGIYAEAAAKEAAAKEAAAKEAAA |
| | KALEAEAAAKEAAAKEAAAKEAAAKATAPLEEEYRLFLEAPIQNVTLLEQWKREIPKVWAEINPPG |
| | LASTQAPIHVQLLSTALPVRVRQYPITLEAKRSLRETIRKFRAAGILRPVHSPWNTPLLPVRKSGT |
| | SEYRMVQDLREVNKRVETIHPTVPNPYTLLSLLPPDRIWYSVLDLKDAFFCIPLAPESQLIFAFEW |
| | ADAEEGESGQLTWTRLPQGFKNSPTLFNEALNRDLQGFRLDHPSVSLLQYVDDLLIAADTQAACLS |
| | ATRDLLMTLAELGYRVSGKKAQLCQEEVTYLGFKIHKGSRSLSNSRTQAILQIPVPKTKRQVREFL |
| | GKIGYCRLFIPGFAELAQPLYAATRPGNDPLVWGEKEEEAFQSLKLALTQPPALALPSLDKPFQLF |
| | VEETSGAAKGVLTQALGPWKRPVAYLSKRLDPVAAGWPRCLRAIAAAALLTREASKLTFGQDIEIT |
| | SSHNLESLLRSPPDKWLTNARITQYQVLLLDPPRVRFKQTAALNPATLLPETDDTLPIHHCLDTLD |
| | SLTSTRPDLTDQPLAQAEATLFTDGSSYIRDGKRYAGAAVVTLDSVIWAEPLPIGTSAQKAELIAL |
| | TKALEWSKDKSVNIYTDSRYAFATLHVHGMIYRERGWLTAGGKAIKNAPEILALLTAVWLPKRVAV |
| | MHCKGHQKDDAPTSTGNRRADEVAREVAIRPLSTQATISAEAAAKEAAAKEAAAKEAAAKALEAEA |
| | AAKEAAAKEAAAKEAAAKADKKYSIGLDIGTNSVGWAVITDEYKVPSKKFKVLGNTDRHSIKKNLI |
| | GALLFDSGETAEATRLKRTARRRYTRRKNRICYLQEIFSNEMAKVDDSFFHRLEESFLVEEDKKHE |
| | RHPIFGNIVDEVAYHEKYPTIYHLRKKLVDSTDKADLRLIYLALAHMIKFRGHFLIEGDLNPDNSD |
| | VDKLFIQLVQTYNQLFEENPINASGVDAKAILSARLSKSRRLENLIAQLPGEKKNGLFGNLIALSL |
| | GLTPNFKSNFDLAEDAKLQLSKDTYDDDLDNLLAQIGDQYADLFLAAKNLSDAILLSDILRVNTEI |
| | TKAPLSASMIKRYDEHHQDLTLLKALVRQQLPEKYKEIFFDQSKNGYAGYIDGGASQEEFYKFIKP |
| | ILEKMDGTEELLVKLNREDLLRKQRTFDNGSIPHQIHLGELHAILRRQEDFYPFLKDNREKIEKIL |
| | TFRIPYYVGPLARGNSRFAWMTRKSEETITPWNFEEVVDKGASAQSFIERMTNFDKNLPNEKVLPK |
| | HSLLYEYFTVYNELTKVKYVTEGMRKPAFLSGEQKKAIVDLLFKTNRKVTVKQLKEDYFKKIECFD |
| | SVEISGVEDRFNASLGTYHDLLKIIKDKDFLDNEENEDILEDIVLTLTLFEDREMIEERLKTYAHL |
| | FDDKVMKQLKRRRYTGWGRLSRKLINGIRDKQSGKTILDFLKSDGFANRNFMQLIHDDSLTFKEDI |
| | QKAQVSGQGDSLHEHIANLAGSPAIKKGILQTVKVVDELVKVMGRHKPENIVIEMARENQTTQKGQ |
| | KNSRERMKRIEEGIKELGSQILKEHPVENTQLQNEKLYLYYLQNGRDMYVDQELDINRLSDYDVDH |
| | IVPQSFLKDDSIDNKVLTRSDKARGKSDNVPSEEVVKKMKNYWRQLLNAKLITQRKFDNLTKAERG |
| | GLSELDKAGFIKRQLVETRQITKHVAQILDSRMNTKYDENDKLIREVKVITLKSKLVSDFRKDFQF |
| | YKVREINNYHHAHDAYLNAVVGTALIKKYPKLESEFVYGDYKVYDVRKMIAKSEQEIGKATAKYFF |
| | YSNIMNFFKTEITLANGEIRKRPLIETNGETGEIVWDKGRDFATVRKVLSMPQVNIVKKTEVQTGG |
| | FSKESILPKRNSDKLIARKKDWDPKKYGGFDSPTVAYSVLVVAKVEKGKSKKLKSVKELLGITIME |
| | RSSFEKNPIDFLEAKGYKEVKKDLIIKLPKYSLFELENGRKRMLASAGELQKGNELALPSKYVNFL |
| | YLASHYEKLKGSPEDNEQKQLFVEQHKHYLDEIIEQISEFSKRVILADANLDKVLSAYNKHRDKPI |
| | REQAENIIHLFTLTNLGAPAAFKYFDTTIDRKRYTSTKEVLDATLIHQSITGLYETRIDLSQLGGD |
| | KRTADGSEFESPKKKAKVE (SEQ ID NO: 17008) |
| PL24676 | MPAAKRVKLDGGMASNFTQFVLVDNGGTGDVTVAPSNFANGIAEWISSNSRSQAYKVTCSVRQSSA |
| | QNRKYTIKVEVPKGAWRSYLNMELTIPIFATNSDCELIVKAMQGLLKDGNPIPSAIAANSGIYGGS |
| | GGSMASNFTQFVLVDNGGTGDVTVAPSNFANGIAEWISSNSRSQAYKVTCSVRQSSAQNRKYTIKV |
| | EVPKGAWRSYLNMELTIPIFATNSDCELIVKAMQGLLKDGNPIPSAIAANSGIYGGGSGGGSGGGS |
| | GGGSMASNFTQFVLVDNGGTGDVTVAPSNFANGIAEWISSNSRSQAYKVTCSVRQSSAQNRKYTIK |
| | VEVPKGAWRSYLNMELTIPIFATNSDCELIVKAMQGLLKDGNPIPSAIAANSGIYGGSGGSMASNF |
| | TQFVLVDNGGTGDVTVAPSNFANGIAEWISSNSRSQAYKVTCSVRQSSAQNRKYTIKVEVPKGAWR |
| | SYLNMELTIPIFATNSDCELIVKAMQGLLKDGNPIPSAIAANSGIYAEAAAKEAAAKEAAAKEAAA |
| | KALEAEAAAKEAAAKEAAAKEAAAKATAPLEEEYRLFLEAPIQNVTLLEQWKREIPKVWAEINPPG |
| | LASTQAPIHVQLLSTALPVRVRQYPITLEAKRSLRETIRKFRAAGILRPVHSPWNTPLLPVRKSGT |
| | SEYRMVQDLREVNKRVETIHPTVPNPYTLLSLLPPDRIWYSVLDLKDAFFCIPLAPESQLIFAFEW |
| | ADAEEGESGQLTWTRLPQGFKNSPTLFNEALNRDLQGFRLDHPSVSLLQYVDDLLIAADTQAACLS |
| | ATRDLLMTLAELGYRVSGKKAQLCQEEVTYLGFKIHKGSRSLSNSRTQAILQIPVPKTKRQVREFL |
| | GKIGYCRLFIPGFAELAQPLYAATRPGNDPLVWGEKEEEAFQSLKLALTQPPALALPSLDKPFQLF |
| | VEETSGAAKGVLTQALGPWKRPVAYLSKRLDPVAAGWPRCLRAIAAAALLTREASKLTFGQDIEIT |
| | SSHNLESLLRSPPDKWLTNARITQYQVLLLDPPRVRFKQTAALNPATLLPETDDTLPIHHCLDTLD |
| | SLTSTRPDLTDQPLAQAEATLFTDGSSYIRDGKRYAGAAVVTLDSVIWAEPLPIGTSAQKAELIAL |
| | TKALEWSKDKSVNIYTDSRYAFATLHVHGMIYRERGWLTAGGKAIKNAPEILALLTAVWLPKRVAV |
| | MHCKGHQKDDAPTSTGNRRADEVAREVAIRPLSTQATISAEAAAKEAAAKEAAAKEAAAKALEAEA |
| | AAKEAAAKEAAAKEAAAKADKKYSIGLDIGTNSVGWAVITDEYKVPSKKFKVLGNTDRHSIKKNLI |
| | GALLFDSGETAEATRLKRTARRRYTRRKNRICYLQEIFSNEMAKVDDSFFHRLEESFLVEEDKKHE |
| | RHPIFGNIVDEVAYHEKYPTIYHLRKKLVDSTDKADLRLIYLALAHMIKFRGHFLIEGDLNPDNSD |
| | VDKLFIQLVQTYNQLFEENPINASGVDAKAILSARLSKSRRLENLIAQLPGEKKNGLFGNLIALSL |
| | GLTPNFKSNFDLAEDAKLQLSKDTYDDDLDNLLAQIGDQYADLFLAAKNLSDAILLSDILRVNTEI |
| | TKAPLSASMIKRYDEHHQDLTLLKALVRQQLPEKYKEIFFDQSKNGYAGYIDGGASQEEFYKFIKP |
| | ILEKMDGTEELLVKLNREDLLRKQRTFDNGSIPHQIHLGELHAILRRQEDFYPFLKDNREKIEKIL |
| | TFRIPYYVGPLARGNSRFAWMTRKSEETITPWNFEEVVDKGASAQSFIERMTNFDKNLPNEKVLPK |
| | HSLLYEYFTVYNELTKVKYVTEGMRKPAFLSGEQKKAIVDLLFKTNRKVTVKQLKEDYFKKIECFD |
| | SVEISGVEDRFNASLGTYHDLLKIIKDKDFLDNEENEDILEDIVLTLTLFEDREMIEERLKTYAHL |
| | FDDKVMKQLKRRRYTGWGRLSRKLINGIRDKQSGKTILDFLKSDGFANRNFMQLIHDDSLTFKEDI |
| | QKAQVSGQGDSLHEHIANLAGSPAIKKGILQTVKVVDELVKVMGRHKPENIVIEMARENQTTQKGQ |
| | KNSRERMKRIEEGIKELGSQILKEHPVENTQLQNEKLYLYYLQNGRDMYVDQELDINRLSDYDVDH |
| | IVPQSFLKDDSIDNKVLTRSDKARGKSDNVPSEEVVKKMKNYWRQLLNAKLITQRKFDNLTKAERG |
| | GLSELDKAGFIKRQLVETRQITKHVAQILDSRMNTKYDENDKLIREVKVITLKSKLVSDFRKDFQF |
| | YKVREINNYHHAHDAYLNAVVGTALIKKYPKLESEFVYGDYKVYDVRKMIAKSEQEIGKATAKYFF |
| | YSNIMNFFKTEITLANGEIRKRPLIETNGETGEIVWDKGRDFATVRKVLSMPQVNIVKKTEVQTGG |
| | FSKESILPKRNSDKLIARKKDWDPKKYGGFDSPTVAYSVLVVAKVEKGKSKKLKSVKELLGITIME |
| | RSSFEKNPIDFLEAKGYKEVKKDLIIKLPKYSLFELENGRKRMLASAGELQKGNELALPSKYVNFL |
| | YLASHYEKLKGSPEDNEQKQLFVEQHKHYLDEIIEQISEFSKRVILADANLDKVLSAYNKHRDKPI |
| | REQAENIIHLFTLTNLGAPAAFKYFDTTIDRKRYTSTKEVLDATLIHQSITGLYETRIDLSQLGGD |
| | KRTADGSEFESPKKKAKVE (SEQ ID NO: 17009) |
| PL24677 | MPAAKRVKLDGGMASNFTQFVLVDNGGTGDVTVAPSNFANGIAEWISSNSRSQAYKVTCSVRQSSA |
| | QNRKYTIKVEVPKGAWRSYLNMELTIPIFATNSDCELIVKAMQGLLKDGNPIPSAIAANSGIYANF |
| | TQFVLVDNGGTGDVTVAPSNFANGIAEWISSNSRSQAYKVTCSVRQSSAQNRKYTIKVEVPKGAWR |
| | SYLNMELTIPIFATNSDCELIVKAMQGLLKDGNPIPSAIAANSGIYGGGSGGGSGGGSGGGSMASN |
| | FTQFVLVDNGGTGDVTVAPSNFANGIAEWISSNSRSQAYKVTCSVRQSSAQNRKYTIKVEVPKGAW |
| | RSYLNMELTIPIFATNSDCELIVKAMQGLLKDGNPIPSAIAANSGIYANFTQFVLVDNGGTGDVTV |
| | APSNFANGIAEWISSNSRSQAYKVTCSVRQSSAQNRKYTIKVEVPKGAWRSYLNMELTIPIFATNS |
| | DCELIVKAMQGLLKDGNPIPSAIAANSGIYAEAAAKEAAAKEAAAKEAAAKALEAEAAAKEAAAKE |
| | AAAKEAAAKATAPLEEEYRLFLEAPIQNVTLLEQWKREIPKVWAEINPPGLASTQAPIHVQLLSTA |
| | LPVRVRQYPITLEAKRSLRETIRKFRAAGILRPVHSPWNTPLLPVRKSGTSEYRMVQDLREVNKRV |
| | ETIHPTVPNPYTLLSLLPPDRIWYSVLDLKDAFFCIPLAPESQLIFAFEWADAEEGESGQLTWTRL |
| | PQGFKNSPTLFNEALNRDLQGFRLDHPSVSLLQYVDDLLIAADTQAACLSATRDLLMTLAELGYRV |
| | SGKKAQLCQEEVTYLGFKIHKGSRSLSNSRTQAILQIPVPKTKRQVREFLGKIGYCRLFIPGFAEL |
| | AQPLYAATRPGNDPLVWGEKEEEAFQSLKLALTQPPALALPSLDKPFQLFVEETSGAAKGVLTQAL |
| | GPWKRPVAYLSKRLDPVAAGWPRCLRAIAAAALLTREASKLTFGQDIEITSSHNLESLLRSPPDKW |
| | LTNARITQYQVLLLDPPRVRFKQTAALNPATLLPETDDTLPIHHCLDTLDSLTSTRPDLTDQPLAQ |
| | AEATLFTDGSSYIRDGKRYAGAAVVTLDSVIWAEPLPIGTSAQKAELIALTKALEWSKDKSVNIYT |
| | DSRYAFATLHVHGMIYRERGWLTAGGKAIKNAPEILALLTAVWLPKRVAVMHCKGHQKDDAPTSTG |
| | NRRADEVAREVAIRPLSTQATISAEAAAKEAAAKEAAAKEAAAKALEAEAAAKEAAAKEAAAKEAA |
| | AKADKKYSIGLDIGTNSVGWAVITDEYKVPSKKFKVLGNTDRHSIKKNLIGALLFDSGETAEATRL |
| | KRTARRRYTRRKNRICYLQEIFSNEMAKVDDSFFHRLEESFLVEEDKKHERHPIFGNIVDEVAYHE |
| | KYPTIYHLRKKLVDSTDKADLRLIYLALAHMIKFRGHFLIEGDLNPDNSDVDKLFIQLVQTYNQLF |
| | EENPINASGVDAKAILSARLSKSRRLENLIAQLPGEKKNGLFGNLIALSLGLTPNFKSNFDLAEDA |
| | KLQLSKDTYDDDLDNLLAQIGDQYADLFLAAKNLSDAILLSDILRVNTEITKAPLSASMIKRYDEH |
| | HQDLTLLKALVRQQLPEKYKEIFFDQSKNGYAGYIDGGASQEEFYKFIKPILEKMDGTEELLVKLN |
| | REDLLRKQRTFDNGSIPHQIHLGELHAILRRQEDFYPFLKDNREKIEKILTFRIPYYVGPLARGNS |
| | RFAWMTRKSEETITPWNFEEVVDKGASAQSFIERMTNFDKNLPNEKVLPKHSLLYEYFTVYNELTK |
| | VKYVTEGMRKPAFLSGEQKKAIVDLLFKTNRKVTVKQLKEDYFKKIECFDSVEISGVEDRFNASLG |
| | TYHDLLKIIKDKDFLDNEENEDILEDIVLTLTLFEDREMIEERLKTYAHLFDDKVMKQLKRRRYTG |
| | WGRLSRKLINGIRDKQSGKTILDFLKSDGFANRNFMQLIHDDSLTFKEDIQKAQVSGQGDSLHEHI |
| | ANLAGSPAIKKGILQTVKVVDELVKVMGRHKPENIVIEMARENQTTQKGQKNSRERMKRIEEGIKE |
| | LGSQILKEHPVENTQLQNEKLYLYYLQNGRDMYVDQELDINRLSDYDVDHIVPQSFLKDDSIDNKV |
| | LTRSDKARGKSDNVPSEEVVKKMKNYWRQLLNAKLITQRKFDNLTKAERGGLSELDKAGFIKRQLV |
| | ETRQITKHVAQILDSRMNTKYDENDKLIREVKVITLKSKLVSDFRKDFQFYKVREINNYHHAHDAY |
| | LNAVVGTALIKKYPKLESEFVYGDYKVYDVRKMIAKSEQEIGKATAKYFFYSNIMNFFKTEITLAN |
| | GEIRKRPLIETNGETGEIVWDKGRDFATVRKVLSMPQVNIVKKTEVQTGGFSKESILPKRNSDKLI |
| | ARKKDWDPKKYGGFDSPTVAYSVLVVAKVEKGKSKKLKSVKELLGITIMERSSFEKNPIDFLEAKG |
| | YKEVKKDLIIKLPKYSLFELENGRKRMLASAGELQKGNELALPSKYVNFLYLASHYEKLKGSPEDN |
| | EQKQLFVEQHKHYLDEIIEQISEFSKRVILADANLDKVLSAYNKHRDKPIREQAENIIHLFTLTNL |
| | GAPAAFKYFDTTIDRKRYTSTKEVLDATLIHQSITGLYETRIDLSQLGGDKRTADGSEFESPKKKA |
| | KVE (SEQ ID NO: 17010) |
| PL12113- | MPAAKRVKLDGGTAPLEEEYRLFLEAPIQNVTLLEQWKREIPKVWAEINPPGLASTQAPIHVQLLS |
| N55K | TALPVRVRQYPITLEAKRSLRETIRKFRAAGILRPVHSPWNTPLLPVRKSGTSEYRMVQDLREVNK |
| | RVETIHPTVPNPYTLLSLLPPDRIWYSVLDLKDAFFCIPLAPESQLIFAFEWADAEEGESGQLTWT |
| | RLPQGFKNSPTLFNEALNRDLQGFRLDHPSVSLLQYVDDLLIAADTQAACLSATRDLLMTLAELGY |
| | RVSGKKAQLCQEEVTYLGFKIHKGSRSLSNSRTQAILQIPVPKTKRQVREFLGKIGYCRLFIPGFA |
| | ELAQPLYAATRPGNDPLVWGEKEEEAFQSLKLALTQPPALALPSLDKPFQLFVEETSGAAKGVLTQ |
| | ALGPWKRPVAYLSKRLDPVAAGWPRCLRAIAAAALLTREASKLTFGQDIEITSSHNLESLLRSPPD |
| | KWLTNARITQYQVLLLDPPRVRFKQTAALNPATLLPETDDTLPIHHCLDTLDSLTSTRPDLTDQPL |
| | AQAEATLFTDGSSYIRDGKRYAGAAVVTLDSVIWAEPLPIGTSAQKAELIALTKALEWSKDKSVNI |
| | YTDSRYAFATLHVHGMIYRERGWLTAGGKAIKNAPEILALLTAVWLPKRVAVMHCKGHQKDDAPTS |
| | TGNRRADEVAREVAIRPLSTQATISAEAAAKEAAAKEAAAKEAAAKALEAEAAAKEAAAKEAAAKE |
| | AAAKAMASNFTQFVLVDNGGTGDVTVAPSNFANGIAEWISSNSRSQAYKVTCSVRQSSAQKRKYTI |
| | KVEVPKGAWRSYLNMELTIPIFATNSDCELIVKAMQGLLKDGNPIPSAIAANSGIYGGSGGSMASN |
| | FTQFVLVDNGGTGDVTVAPSNFANGIAEWISSNSRSQAYKVTCSVRQSSAQKRKYTIKVEVPKGAW |
| | RSYLNMELTIPIFATNSDCELIVKAMQGLLKDGNPIPSAIAANSGIYAEAAAKEAAAKEAAAKEAA |
| | AKALEAEAAAKEAAAKEAAAKEAAAKADKKYSIGLDIGTNSVGWAVITDEYKVPSKKFKVLGNTDR |
| | HSIKKNLIGALLFDSGETAEATRLKRTARRRYTRRKNRICYLQEIFSNEMAKVDDSFFHRLEESFL |
| | VEEDKKHERHPIFGNIVDEVAYHEKYPTIYHLRKKLVDSTDKADLRLIYLALAHMIKFRGHFLIEG |
| | DLNPDNSDVDKLFIQLVQTYNQLFEENPINASGVDAKAILSARLSKSRRLENLIAQLPGEKKNGLF |
| | GNLIALSLGLTPNFKSNFDLAEDAKLQLSKDTYDDDLDNLLAQIGDQYADLFLAAKNLSDAILLSD |
| | ILRVNTEITKAPLSASMIKRYDEHHQDLTLLKALVRQQLPEKYKEIFFDQSKNGYAGYIDGGASQE |
| | EFYKFIKPILEKMDGTEELLVKLNREDLLRKQRTFDNGSIPHQIHLGELHAILRRQEDFYPFLKDN |
| | REKIEKILTFRIPYYVGPLARGNSRFAWMTRKSEETITPWNFEEVVDKGASAQSFIERMTNFDKNL |
| | PNEKVLPKHSLLYEYFTVYNELTKVKYVTEGMRKPAFLSGEQKKAIVDLLFKTNRKVTVKQLKEDY |
| | FKKIECFDSVEISGVEDRFNASLGTYHDLLKIIKDKDFLDNEENEDILEDIVLTLTLFEDREMIEE |
| | RLKTYAHLFDDKVMKQLKRRRYTGWGRLSRKLINGIRDKQSGKTILDFLKSDGFANRNFMQLIHDD |
| | SLTFKEDIQKAQVSGQGDSLHEHIANLAGSPAIKKGILQTVKVVDELVKVMGRHKPENIVIEMARE |
| | NQTTQKGQKNSRERMKRIEEGIKELGSQILKEHPVENTQLQNEKLYLYYLQNGRDMYVDQELDINR |
| | LSDYDVDHIVPQSFLKDDSIDNKVLTRSDKARGKSDNVPSEEVVKKMKNYWRQLLNAKLITQRKFD |
| | NLTKAERGGLSELDKAGFIKRQLVETRQITKHVAQILDSRMNTKYDENDKLIREVKVITLKSKLVS |
| | DFRKDFQFYKVREINNYHHAHDAYLNAVVGTALIKKYPKLESEFVYGDYKVYDVRKMIAKSEQEIG |
| | KATAKYFFYSNIMNFFKTEITLANGEIRKRPLIETNGETGEIVWDKGRDFATVRKVLSMPQVNIVK |
| | KTEVQTGGFSKESILPKRNSDKLIARKKDWDPKKYGGFDSPTVAYSVLVVAKVEKGKSKKLKSVKE |
| | LLGITIMERSSFEKNPIDFLEAKGYKEVKKDLIIKLPKYSLFELENGRKRMLASAGELQKGNELAL |
| | PSKYVNFLYLASHYEKLKGSPEDNEQKQLFVEQHKHYLDEIIEQISEFSKRVILADANLDKVLSAY |
| | NKHRDKPIREQAENIIHLFTLTNLGAPAAFKYFDTTIDRKRYTSTKEVLDATLIHQSITGLYETRI |
| | DLSQLGGDKRTADGSEFESPKKKAKVE (SEQ ID NO: 19388) |

[1294] The 3-component gene modifying system was nucleofected into the U2OS 150 bp insertion GFP reporter-expressing cell line. All 3 components of the gene modifying system were delivered by nucleofection in DNA format. Specifically, 300 ng of gene modifying polypeptide plasmid DNA is combined with 500 ng of ttRNA- and 150 ng of gRNA-expressing plasmids. The modifying polypeptide, ttRNA and gRNA in plasmid DNA format were added to 20 μL SE buffer containing 250,000 U2OS 150 bp insertion GFP reporter-expressing cells, and the cells were nucleofected using program DN-100. After nucleofection, cells were grown at 37° C., 5% CO₂ for at least 4 days prior to harvest and fluorescence readout of GFP restoration by flow cytometry. GFP expression is indicative of the insertion having been accurately written into the genome.

[1295] FIG. 14 shows a graph of % GFP positive cells after treating the 150 bp insertion GFP reporter-expressing cell line with a gene modifying system comprising a ttRNA having 4 MS2 repeats (PL15377) or 1 MS2 repeat (PL15349). The gene modifying polypeptide is indicated in X-axis labels. X-axis labels also indicate the nature of control samples, e.g., the presence or absence of gRNA plasmid, H2O only, no-driver (no gene modifying polypeptide), or no-template (ttRNA) control gene modifying system, or an inactive gene modifying system in which the RT domain of the polypeptide is mutated (RT mutant). The results showed that the additional two configurations of gene modifying polypeptide (RT-Cas9-MCP, and MCP-RT-Cas9) were capable of facilitating insertion of the 150 nucleotide fragment into the genome of the cell. Of these, MCP-RT-Cas9 configuration gene modifying polypeptides achieved similar levels of % GFP positive cells relative to RT-RBD-Cas9, suggesting that this configuration also has the highest editing activity observed for 150 nucleotide insertions. Also tested was a N55K of the MCP region, which also showed strong editing activity in this assay.

[1296] Additional trans-gene modifying systems containing alternative RBP domains (as compared to the MCP-containing drivers) were generated as described herein and evaluated for their ability to write long insertions into the genome when paired with their cognate RRS sequences (as in Table ##, e.g. MCP variants with MS2 variants; PCP variants with PP7 variants; Com variants with com variants). 150 nt restoration reporter cell lines (U2OS) were analyzed by flow cytometry and amplicon sequencing 4-days post-electroporation of the gene modifying systems containing the alternative RBP domains with cognate RRS sequences.

TABLE N2
Amino acid sequences for exemplary RBP/RRS pairing drivers

| Identifier | Amino acid sequence |
|---|---|
| PL24659 | MPAAKRVKLDGGDKKYSIGLDIGTNSVGWAVITDEYKVPSKKFKVLGNTDRHSIKKNLIGALLFDSG |
| | ETAEATRLKRTARRRYTRRKNRICYLQEIFSNEMAKVDDSFFHRLEESFLVEEDKKHERHPIFGNIV |
| | DEVAYHEKYPTIYHLRKKLVDSTDKADLRLIYLALAHMIKFRGHFLIEGDLNPDNSDVDKLFIQLVQ |
| | TYNQLFEENPINASGVDAKAILSARLSKSRRLENLIAQLPGEKKNGLFGNLIALSLGLTPNFKSNFD |
| | LAEDAKLQLSKDTYDDDLDNLLAQIGDQYADLFLAAKNLSDAILLSDILRVNTEITKAPLSASMIKR |
| | YDEHHQDLTLLKALVRQQLPEKYKEIFFDQSKNGYAGYIDGGASQEEFYKFIKPILEKMDGTEELLV |
| | KLNREDLLRKQRTFDNGSIPHQIHLGELHAILRRQEDFYPFLKDNREKIEKILTFRIPYYVGPLARG |
| | NSRFAWMTRKSEETITPWNFEEVVDKGASAQSFIERMTNFDKNLPNEKVLPKHSLLYEYFTVYNELT |
| | KVKYVTEGMRKPAFLSGEQKKAIVDLLFKTNRKVTVKQLKEDYFKKIECFDSVEISGVEDRFNASLG |
| | TYHDLLKIIKDKDFLDNEENEDILEDIVLTLTLFEDREMIEERLKTYAHLFDDKVMKQLKRRRYTGW |
| | GRLSRKLINGIRDKQSGKTILDFLKSDGFANRNFMQLIHDDSLTFKEDIQKAQVSGQGDSLHEHIAN |
| | LAGSPAIKKGILQTVKVVDELVKVMGRHKPENIVIEMARENQTTQKGQKNSRERMKRIEEGIKELGS |
| | QILKEHPVENTQLQNEKLYLYYLQNGRDMYVDQELDINRLSDYDVDHIVPQSFLKDDSIDNKVLTRS |
| | DKARGKSDNVPSEEVVKKMKNYWRQLLNAKLITQRKFDNLTKAERGGLSELDKAGFIKRQLVETRQI |
| | TKHVAQILDSRMNTKYDENDKLIREVKVITLKSKLVSDFRKDFQFYKVREINNYHHAHDAYLNAVVG |
| | TALIKKYPKLESEFVYGDYKVYDVRKMIAKSEQEIGKATAKYFFYSNIMNFFKTEITLANGEIRKRP |
| | LIETNGETGEIVWDKGRDFATVRKVLSMPQVNIVKKTEVQTGGFSKESILPKRNSDKLIARKKDWDP |
| | KKYGGFDSPTVAYSVLVVAKVEKGKSKKLKSVKELLGITIMERSSFEKNPIDFLEAKGYKEVKKDLI |
| | IKLPKYSLFELENGRKRMLASAGELQKGNELALPSKYVNFLYLASHYEKLKGSPEDNEQKQLFVEQH |
| | KHYLDEIIEQISEFSKRVILADANLDKVLSAYNKHRDKPIREQAENIIHLFTLTNLGAPAAFKYFDT |
| | TIDRKRYTSTKEVLDATLIHQSITGLYETRIDLSQLGGDAEAAAKEAAAKEAAAKEAAAKALEAEAA |
| | AKEAAAKEAAAKEAAAKAMSKTIVLSVGEATRTLTEIQSTADRQIFEEKVGPLVGRLRLTASLRQNG |
| | AKTAYRVNLKLDQADVVDSGLPKVRYTQVWSHDVTIVANSTEASRKSLYDLTKSLVATSQVEDLVVN |
| | LVPLGRGSGRAGGSGGSMSKTIVLSVGEATRTLTEIQSTADRQIFEEKVGPLVGRLRLTASLRQNGA |
| | KTAYRVNLKLDQADVVDSGLPKVRYTQVWSHDVTIVANSTEASRKSLYDLTKSLVATSQVEDLVVNL |
| | VPLGRGSGRAAEAAAKEAAAKEAAAKEAAAKALEAEAAAKEAAAKEAAAKEAAAKATAPLEEEYRLF |
| | LEAPIQNVTLLEQWKREIPKVWAEINPPGLASTQAPIHVQLLSTALPVRVRQYPITLEAKRSLRETI |
| | RKFRAAGILRPVHSPWNTPLLPVRKSGTSEYRMVQDLREVNKRVETIHPTVPNPYTLLSLLPPDRIW |
| | YSVLDLKDAFFCIPLAPESQLIFAFEWADAEEGESGQLTWTRLPQGFKNSPTLFNEALNRDLQGFRL |
| | DHPSVSLLQYVDDLLIAADTQAACLSATRDLLMTLAELGYRVSGKKAQLCQEEVTYLGFKIHKGSRS |
| | LSNSRTQAILQIPVPKTKRQVREFLGKIGYCRLFIPGFAELAQPLYAATRPGNDPLVWGEKEEEAFQ |
| | SLKLALTQPPALALPSLDKPFQLFVEETSGAAKGVLTQALGPWKRPVAYLSKRLDPVAAGWPRCLRA |
| | IAAAALLTREASKLTFGQDIEITSSHNLESLLRSPPDKWLTNARITQYQVLLLDPPRVRFKQTAALN |
| | PATLLPETDDTLPIHHCLDTLDSLTSTRPDLTDQPLAQAEATLFTDGSSYIRDGKRYAGAAVVTLDS |
| | VIWAEPLPIGTSAQKAELIALTKALEWSKDKSVNIYTDSRYAFATLHVHGMIYRERGWLTAGGKAIK |
| | NAPEILALLTAVWLPKRVAVMHCKGHQKDDAPTSTGNRRADEVAREVAIRPLSTQATISKRTADGSE |
| | FESPKKKAKVE (SEQ ID NO: 19389) |
| PL24661 | MPAAKRVKLDGGTAPLEEEYRLFLEAPIQNVTLLEQWKREIPKVWAEINPPGLASTQAPIHVQLLST |
| | ALPVRVRQYPITLEAKRSLRETIRKFRAAGILRPVHSPWNTPLLPVRKSGTSEYRMVQDLREVNKRV |
| | ETIHPTVPNPYTLLSLLPPDRIWYSVLDLKDAFFCIPLAPESQLIFAFEWADAEEGESGQLTWTRLP |
| | QGFKNSPTLFNEALNRDLQGFRLDHPSVSLLQYVDDLLIAADTQAACLSATRDLLMTLAELGYRVSG |
| | KKAQLCQEEVTYLGFKIHKGSRSLSNSRTQAILQIPVPKTKRQVREFLGKIGYCRLFIPGFAELAQP |
| | LYAATRPGNDPLVWGEKEEEAFQSLKLALTQPPALALPSLDKPFQLFVEETSGAAKGVLTQALGPWK |
| | RPVAYLSKRLDPVAAGWPRCLRAIAAAALLTREASKLTFGQDIEITSSHNLESLLRSPPDKWLTNAR |
| | ITQYQVLLLDPPRVRFKQTAALNPATLLPETDDTLPIHHCLDTLDSLTSTRPDLTDQPLAQAEATLF |
| | TDGSSYIRDGKRYAGAAVVTLDSVIWAEPLPIGTSAQKAELIALTKALEWSKDKSVNIYTDSRYAFA |
| | TLHVHGMIYRERGWLTAGGKAIKNAPEILALLTAVWLPKRVAVMHCKGHQKDDAPTSTGNRRADEVA |
| | REVAIRPLSTQATISAEAAAKEAAAKEAAAKEAAAKALEAEAAAKEAAAKEAAAKEAAAKAMSKTIV |
| | LSVGEATRTLTEIQSTADRQIFEEKVGPLVGRLRLTASLRQNGAKTAYRVNLKLDQADVVDSGLPKV |
| | RYTQVWSHDVTIVANSTEASRKSLYDLTKSLVATSQVEDLVVNLVPLGRGSGRAGGSGGSMSKTIVL |
| | SVGEATRTLTEIQSTADRQIFEEKVGPLVGRLRLTASLRQNGAKTAYRVNLKLDQADVVDSGLPKVR |
| | YTQVWSHDVTIVANSTEASRKSLYDLTKSLVATSQVEDLVVNLVPLGRGSGRAAEAAAKEAAAKEAA |
| | AKEAAAKALEAEAAAKEAAAKEAAAKEAAAKADKKYSIGLDIGTNSVGWAVITDEYKVPSKKFKVLG |
| | NTDRHSIKKNLIGALLFDSGETAEATRLKRTARRRYTRRKNRICYLQEIFSNEMAKVDDSFFHRLEE |
| | SFLVEEDKKHERHPIFGNIVDEVAYHEKYPTIYHLRKKLVDSTDKADLRLIYLALAHMIKFRGHFLI |
| | EGDLNPDNSDVDKLFIQLVQTYNQLFEENPINASGVDAKAILSARLSKSRRLENLIAQLPGEKKNGL |
| | FGNLIALSLGLTPNFKSNFDLAEDAKLQLSKDTYDDDLDNLLAQIGDQYADLFLAAKNLSDAILLSD |
| | ILRVNTEITKAPLSASMIKRYDEHHQDLTLLKALVRQQLPEKYKEIFFDQSKNGYAGYIDGGASQEE |
| | FYKFIKPILEKMDGTEELLVKLNREDLLRKQRTFDNGSIPHQIHLGELHAILRRQEDFYPFLKDNRE |
| | KIEKILTFRIPYYVGPLARGNSRFAWMTRKSEETITPWNFEEVVDKGASAQSFIERMTNFDKNLPNE |
| | KVLPKHSLLYEYFTVYNELTKVKYVTEGMRKPAFLSGEQKKAIVDLLFKTNRKVTVKQLKEDYFKKI |
| | ECFDSVEISGVEDRFNASLGTYHDLLKIIKDKDFLDNEENEDILEDIVLTLTLFEDREMIEERLKTY |
| | AHLFDDKVMKQLKRRRYTGWGRLSRKLINGIRDKQSGKTILDFLKSDGFANRNFMQLIHDDSLTFKE |
| | DIQKAQVSGQGDSLHEHIANLAGSPAIKKGILQTVKVVDELVKVMGRHKPENIVIEMARENQTTQKG |
| | QKNSRERMKRIEEGIKELGSQILKEHPVENTQLQNEKLYLYYLQNGRDMYVDQELDINRLSDYDVDH |
| | IVPQSFLKDDSIDNKVLTRSDKARGKSDNVPSEEVVKKMKNYWRQLLNAKLITQRKFDNLTKAERGG |
| | LSELDKAGFIKRQLVETRQITKHVAQILDSRMNTKYDENDKLIREVKVITLKSKLVSDFRKDFQFYK |
| | VREINNYHHAHDAYLNAVVGTALIKKYPKLESEFVYGDYKVYDVRKMIAKSEQEIGKATAKYFFYSN |
| | IMNFFKTEITLANGEIRKRPLIETNGETGEIVWDKGRDFATVRKVLSMPQVNIVKKTEVQTGGFSKE |
| | SILPKRNSDKLIARKKDWDPKKYGGFDSPTVAYSVLVVAKVEKGKSKKLKSVKELLGITIMERSSFE |
| | KNPIDFLEAKGYKEVKKDLIIKLPKYSLFELENGRKRMLASAGELQKGNELALPSKYVNFLYLASHY |
| | EKLKGSPEDNEQKQLFVEQHKHYLDEIIEQISEFSKRVILADANLDKVLSAYNKHRDKPIREQAENI |
| | IHLFTLTNLGAPAAFKYFDTTIDRKRYTSTKEVLDATLIHQSITGLYETRIDLSQLGGDKRTADGSE |
| | FESPKKKAKVE (SEQ ID NO: 19390) |
| PL24664 | MPAAKRVKLDGGTAPLEEEYRLFLEAPIQNVILLEQWKREIPKVWAEINPPGLASTQAPIHVQLLST |
| | ALPVRVRQYPITLEAKRSLRETIRKFRAAGILRPVHSPWNTPLLPVRKSGTSEYRMVQDLREVNKRV |
| | ETIHPTVPNPYTLLSLLPPDRIWYSVLDLKDAFFCIPLAPESQLIFAFEWADAEEGESGQLTWTRLP |
| | QGFKNSPTLFNEALNRDLQGFRLDHPSVSLLQYVDDLLIAADTQAACLSATRDLLMTLAELGYRVSG |
| | KKAQLCQEEVTYLGFKIHKGSRSLSNSRTQAILQIPVPKTKRQVREFLGKIGYCRLFIPGFAELAQP |
| | LYAATRPGNDPLVWGEKEEEAFQSLKLALTQPPALALPSLDKPFQLFVEETSGAAKGVLTQALGPWK |
| | RPVAYLSKRLDPVAAGWPRCLRAIAAAALLTREASKLTFGQDIEITSSHNLESLLRSPPDKWLTNAR |
| | ITQYQVLLLDPPRVRFKQTAALNPATLLPETDDTLPIHHCLDTLDSLTSTRPDLTDQPLAQAEATLF |
| | TDGSSYIRDGKRYAGAAVVTLDSVIWAEPLPIGTSAQKAELIALTKALEWSKDKSVNIYTDSRYAFA |
| | TLHVHGMIYRERGWLTAGGKAIKNAPEILALLTAVWLPKRVAVMHCKGHQKDDAPTSTGNRRADEVA |
| | REVAIRPLSTQATISAEAAAKEAAAKEAAAKEAAAKALEAEAAAKEAAAKEAAAKEAAAKAMKSIRC |
| | KNCNKLLFKADSFDHIEIRCPRCKRHIIMLNACEHPTEKHCGKREKITHSDETVRYGSGRAAEAAAK |
| | EAAAKEAAAKEAAAKALEAEAAAKEAAAKEAAAKEAAAKADKKYSIGLDIGTNSVGWAVITDEYKVP |
| | SKKFKVLGNTDRHSIKKNLIGALLFDSGETAEATRLKRTARRRYTRRKNRICYLQEIFSNEMAKVDD |
| | SFFHRLEESFLVEEDKKHERHPIFGNIVDEVAYHEKYPTIYHLRKKLVDSTDKADLRLIYLALAHMI |
| | KFRGHFLIEGDLNPDNSDVDKLFIQLVQTYNQLFEENPINASGVDAKAILSARLSKSRRLENLIAQL |
| | PGEKKNGLFGNLIALSLGLTPNFKSNFDLAEDAKLQLSKDTYDDDLDNLLAQIGDQYADLFLAAKNL |
| | SDAILLSDILRVNTEITKAPLSASMIKRYDEHHQDLTLLKALVRQQLPEKYKEIFFDQSKNGYAGYI |
| | DGGASQEEFYKFIKPILEKMDGTEELLVKLNREDLLRKQRTFDNGSIPHQIHLGELHAILRRQEDFY |
| | PFLKDNREKIEKILTFRIPYYVGPLARGNSRFAWMTRKSEETITPWNFEEVVDKGASAQSFIERMTN |
| | FDKNLPNEKVLPKHSLLYEYFTVYNELTKVKYVTEGMRKPAFLSGEQKKAIVDLLFKTNRKVTVKQL |
| | KEDYFKKIECFDSVEISGVEDRFNASLGTYHDLLKIIKDKDFLDNEENEDILEDIVLTLTLFEDREM |
| | IEERLKTYAHLFDDKVMKQLKRRRYTGWGRLSRKLINGIRDKQSGKTILDFLKSDGFANRNFMQLIH |
| | DDSLTFKEDIQKAQVSGQGDSLHEHIANLAGSPAIKKGILQTVKVVDELVKVMGRHKPENIVIEMAR |
| | ENQTTQKGQKNSRERMKRIEEGIKELGSQILKEHPVENTQLQNEKLYLYYLQNGRDMYVDQELDINR |
| | LSDYDVDHIVPQSFLKDDSIDNKVLTRSDKARGKSDNVPSEEVVKKMKNYWRQLLNAKLITQRKFDN |
| | LTKAERGGLSELDKAGFIKRQLVETRQITKHVAQILDSRMNTKYDENDKLIREVKVITLKSKLVSDF |
| | RKDFQFYKVREINNYHHAHDAYLNAVVGTALIKKYPKLESEFVYGDYKVYDVRKMIAKSEQEIGKAT |
| | AKYFFYSNIMNFFKTEITLANGEIRKRPLIETNGETGEIVWDKGRDFATVRKVLSMPQVNIVKKTEV |
| | QTGGFSKESILPKRNSDKLIARKKDWDPKKYGGFDSPTVAYSVLVVAKVEKGKSKKLKSVKELLGIT |
| | IMERSSFEKNPIDFLEAKGYKEVKKDLIIKLPKYSLFELENGRKRMLASAGELQKGNELALPSKYVN |
| | FLYLASHYEKLKGSPEDNEQKQLFVEQHKHYLDEIIEQISEFSKRVILADANLDKVLSAYNKHRDKP |
| | IREQAENIIHLFTLTNLGAPAAFKYFDTTIDRKRYTSTKEVLDATLIHQSITGLYETRIDLSQLGGD |
| | KRTADGSEFESPKKKAKVE (SEQ ID NO: 19391) |
| PL24665 | MPAAKRVKLDGGDKKYSIGLDIGTNSVGWAVITDEYKVPSKKFKVLGNTDRHSIKKNLIGALLFDSG |
| | ETAEATRLKRTARRRYTRRKNRICYLQEIFSNEMAKVDDSFFHRLEESFLVEEDKKHERHPIFGNIV |
| | DEVAYHEKYPTIYHLRKKLVDSTDKADLRLIYLALAHMIKFRGHFLIEGDLNPDNSDVDKLFIQLVQ |
| | TYNQLFEENPINASGVDAKAILSARLSKSRRLENLIAQLPGEKKNGLFGNLIALSLGLTPNFKSNFD |
| | LAEDAKLQLSKDTYDDDLDNLLAQIGDQYADLFLAAKNLSDAILLSDILRVNTEITKAPLSASMIKR |
| | YDEHHQDLTLLKALVRQQLPEKYKEIFFDQSKNGYAGYIDGGASQEEFYKFIKPILEKMDGTEELLV |
| | KLNREDLLRKQRTFDNGSIPHQIHLGELHAILRRQEDFYPFLKDNREKIEKILTFRIPYYVGPLARG |
| | NSRFAWMTRKSEETITPWNFEEVVDKGASAQSFIERMTNFDKNLPNEKVLPKHSLLYEYFTVYNELT |
| | KVKYVTEGMRKPAFLSGEQKKAIVDLLFKTNRKVTVKQLKEDYFKKIECFDSVEISGVEDRFNASLG |
| | TYHDLLKIIKDKDFLDNEENEDILEDIVLTLTLFEDREMIEERLKTYAHLFDDKVMKQLKRRRYTGW |
| | GRLSRKLINGIRDKQSGKTILDFLKSDGFANRNFMQLIHDDSLTFKEDIQKAQVSGQGDSLHEHIAN |
| | LAGSPAIKKGILQTVKVVDELVKVMGRHKPENIVIEMARENQTTQKGQKNSRERMKRIEEGIKELGS |
| | QILKEHPVENTQLQNEKLYLYYLQNGRDMYVDQELDINRLSDYDVDHIVPQSFLKDDSIDNKVLTRS |
| | DKARGKSDNVPSEEVVKKMKNYWRQLLNAKLITQRKFDNLTKAERGGLSELDKAGFIKRQLVETRQI |
| | TKHVAQILDSRMNTKYDENDKLIREVKVITLKSKLVSDFRKDFQFYKVREINNYHHAHDAYLNAVVG |
| | TALIKKYPKLESEFVYGDYKVYDVRKMIAKSEQEIGKATAKYFFYSNIMNFFKTEITLANGEIRKRP |
| | LIETNGETGEIVWDKGRDFATVRKVLSMPQVNIVKKTEVQTGGFSKESILPKRNSDKLIARKKDWDP |
| | KKYGGFDSPTVAYSVLVVAKVEKGKSKKLKSVKELLGITIMERSSFEKNPIDFLEAKGYKEVKKDLI |
| | IKLPKYSLFELENGRKRMLASAGELQKGNELALPSKYVNFLYLASHYEKLKGSPEDNEQKQLFVEQH |
| | KHYLDEIIEQISEFSKRVILADANLDKVLSAYNKHRDKPIREQAENIIHLFTLTNLGAPAAFKYFDT |
| | TIDRKRYTSTKEVLDATLIHQSITGLYETRIDLSQLGGDAEAAAKEAAAKEAAAKEAAAKALEAEAA |
| | AKEAAAKEAAAKEAAAKATAPLEEEYRLFLEAPIQNVTLLEQWKREIPKVWAEINPPGLASTQAPIH |
| | VQLLSTALPVRVRQYPITLEAKRSLRETIRKFRAAGILRPVHSPWNTPLLPVRKSGTSEYRMVQDLR |
| | EVNKRVETIHPTVPNPYTLLSLLPPDRIWYSVLDLKDAFFCIPLAPESQLIFAFEWADAEEGESGQL |
| | TWTRLPQGFKNSPTLFNEALNRDLQGFRLDHPSVSLLQYVDDLLIAADTQAACLSATRDLLMTLAEL |
| | GYRVSGKKAQLCQEEVTYLGFKIHKGSRSLSNSRTQAILQIPVPKTKRQVREFLGKIGYCRLFIPGF |
| | AELAQPLYAATRPGNDPLVWGEKEEEAFQSLKLALTQPPALALPSLDKPFQLFVEETSGAAKGVLTQ |
| | ALGPWKRPVAYLSKRLDPVAAGWPRCLRAIAAAALLTREASKLTFGQDIEITSSHNLESLLRSPPDK |
| | WLTNARITQYQVLLLDPPRVRFKQTAALNPATLLPETDDTLPIHHCLDTLDSLTSTRPDLTDQPLAQ |
| | AEATLFTDGSSYIRDGKRYAGAAVVTLDSVIWAEPLPIGTSAQKAELIALTKALEWSKDKSVNIYTD |
| | SRYAFATLHVHGMIYRERGWLTAGGKAIKNAPEILALLTAVWLPKRVAVMHCKGHQKDDAPTSTGNR |
| | RADEVAREVAIRPLSTQATISGSSGGGEAAAKMSKTIVLSVGEATRTLTEIQSTADRQIFEEKVGPL |
| | VGRLRLTASLRQNGAKTAYRVNLKLDQADVVDSGLPKVRYTQVWSHDVTIVANSTEASRKSLYDLTK |
| | SLVATSQVEDLVVNLVPLGRGSGRAGGSGGSMSKTIVLSVGEATRTLTEIQSTADRQIFEEKVGPLV |
| | GRLRLTASLRQNGAKTAYRVNLKLDQADVVDSGLPKVRYTQVWSHDVTIVANSTEASRKSLYDLTKS |
| | LVATSQVEDLVVNLVPLGRGSGRAKRTADGSEFESPKKKAKVE (SEQ ID NO: 19392) |
| PL24667 | MPAAKRVKLDGGDKKYSIGLDIGTNSVGWAVITDEYKVPSKKFKVLGNTDRHSIKKNLIGALLFDSG |
| | ETAEATRLKRTARRRYTRRKNRICYLQEIFSNEMAKVDDSFFHRLEESFLVEEDKKHERHPIFGNIV |
| | DEVAYHEKYPTIYHLRKKLVDSTDKADLRLIYLALAHMIKFRGHFLIEGDLNPDNSDVDKLFIQLVQ |
| | TYNQLFEENPINASGVDAKAILSARLSKSRRLENLIAQLPGEKKNGLFGNLIALSLGLTPNFKSNFD |
| | LAEDAKLQLSKDTYDDDLDNLLAQIGDQYADLFLAAKNLSDAILLSDILRVNTEITKAPLSASMIKR |
| | YDEHHQDLTLLKALVRQQLPEKYKEIFFDQSKNGYAGYIDGGASQEEFYKFIKPILEKMDGTEELLV |
| | KLNREDLLRKQRTFDNGSIPHQIHLGELHAILRRQEDFYPFLKDNREKIEKILTFRIPYYVGPLARG |
| | NSRFAWMTRKSEETITPWNFEEVVDKGASAQSFIERMTNFDKNLPNEKVLPKHSLLYEYFTVYNELT |
| | KVKYVTEGMRKPAFLSGEQKKAIVDLLFKTNRKVTVKQLKEDYFKKIECFDSVEISGVEDRFNASLG |
| | TYHDLLKIIKDKDFLDNEENEDILEDIVLTLTLFEDREMIEERLKTYAHLFDDKVMKQLKRRRYTGW |
| | GRLSRKLINGIRDKQSGKTILDFLKSDGFANRNFMQLIHDDSLTFKEDIQKAQVSGQGDSLHEHIAN |
| | LAGSPAIKKGILQTVKVVDELVKVMGRHKPENIVIEMARENQTTQKGQKNSRERMKRIEEGIKELGS |
| | QILKEHPVENTQLQNEKLYLYYLQNGRDMYVDQELDINRLSDYDVDHIVPQSFLKDDSIDNKVLTRS |
| | DKARGKSDNVPSEEVVKKMKNYWRQLLNAKLITQRKFDNLTKAERGGLSELDKAGFIKRQLVETRQI |
| | TKHVAQILDSRMNTKYDENDKLIREVKVITLKSKLVSDFRKDFQFYKVREINNYHHAHDAYLNAVVG |
| | TALIKKYPKLESEFVYGDYKVYDVRKMIAKSEQEIGKATAKYFFYSNIMNFFKTEITLANGEIRKRP |
| | LIETNGETGEIVWDKGRDFATVRKVLSMPQVNIVKKTEVQTGGFSKESILPKRNSDKLIARKKDWDP |
| | KKYGGFDSPTVAYSVLVVAKVEKGKSKKLKSVKELLGITIMERSSFEKNPIDFLEAKGYKEVKKDLI |
| | IKLPKYSLFELENGRKRMLASAGELQKGNELALPSKYVNFLYLASHYEKLKGSPEDNEQKQLFVEQH |
| | KHYLDEIIEQISEFSKRVILADANLDKVLSAYNKHRDKPIREQAENIIHLFTLTNLGAPAAFKYFDT |
| | TIDRKRYTSTKEVLDATLIHQSITGLYETRIDLSQLGGDAEAAAKEAAAKEAAAKEAAAKALEAEAA |
| | AKEAAAKEAAAKEAAAKATAPLEEEYRLFLEAPIQNVTLLEQWKREIPKVWAEINPPGLASTQAPIH |
| | VQLLSTALPVRVRQYPITLEAKRSLRETIRKFRAAGILRPVHSPWNTPLLPVRKSGTSEYRMVQDLR |
| | EVNKRVETIHPTVPNPYTLLSLLPPDRIWYSVLDLKDAFFCIPLAPESQLIFAFEWADAEEGESGQL |
| | TWTRLPQGFKNSPTLFNEALNRDLQGFRLDHPSVSLLQYVDDLLIAADTQAACLSATRDLLMTLAEL |
| | GYRVSGKKAQLCQEEVTYLGFKIHKGSRSLSNSRTQAILQIPVPKTKRQVREFLGKIGYCRLFIPGF |
| | AELAQPLYAATRPGNDPLVWGEKEEEAFQSLKLALTQPPALALPSLDKPFQLFVEETSGAAKGVLTQ |
| | ALGPWKRPVAYLSKRLDPVAAGWPRCLRAIAAAALLTREASKLTFGQDIEITSSHNLESLLRSPPDK |
| | WLTNARITQYQVLLLDPPRVRFKQTAALNPATLLPETDDTLPIHHCLDTLDSLTSTRPDLTDQPLAQ |
| | AEATLFTDGSSYIRDGKRYAGAAVVTLDSVIWAEPLPIGTSAQKAELIALTKALEWSKDKSVNIYTD |
| | SRYAFATLHVHGMIYRERGWLTAGGKAIKNAPEILALLTAVWLPKRVAVMHCKGHQKDDAPTSTGNR |
| | RADEVAREVAIRPLSTQATISGSSGGGEAAAKMKSIRCKNCNKLLFKADSFDHIEIRCPRCKRHIIM |
| | LNACEHPTEKHCGKREKITHSDETVRYGSGRAKRTADGSEFESPKKKAKVE |
| | (SEQ ID NO: 19393) |

TABLE N3
Exemplary template RNA sequences

| Identifier | Nucleotide sequence |
|---|---|
| PL23999 | CGAGGAGCTGTTCACCGGGGGTTTTAGAGC |
| | TAGAAATAGCAAGTTAAAATAAGGCTAGTC |
| | CGTTATCAACTTGAAAAAGTGGCACCGAGT |
| | CGGTGCATGGTGAGCAAGGGCGAGGAGCTG |
| | TTCACCGGGGTGGTGCCCATCCTGGTCGAG |
| | CTGGACGGCGACGTAAACGGCCACAAGTTC |
| | AGCGTGTCCGGCGAGGGCGAGGGCGATGCC |
| | ACCTACGGCAAGCTGACCCTGAAGTTCATC |
| | TGCACCACCGGCAAGCTGCCCGTGCCCTGG |
| | CCCACCCTCGTGACCACCCTGACGTACGGC |
| | GTGCAGTGCTTACATACAACTAACATAGGG |
| | AGCTAAGGAGTTTATATGGAAACCCTTAGC |
| | CTGCTGCGTAAGGAGTTTATATGGAAACCC |
| | TTACGCAGCAGTTCCC |
| | (SEQ ID NO: 19394) |
| PL24001 | CGAGGAGCTGTTCACCGGGGGTTTTAGAGC |
| | TAGAAATAGCAAGTTAAAATAAGGCTAGTC |
| | CGTTATCAACTTGAAAAAGTGGCACCGAGT |
| | CGGTGCATGGTGAGCAAGGGCGAGGAGCTG |
| | TTCACCGGGGTGGTGCCCATCCTGGTCGAG |
| | CTGGACGGCGACGTAAACGGCCACAAGTTC |
| | AGCGTGTCCGGCGAGGGCGAGGGCGATGCC |
| | ACCTACGGCAAGCTGACCCTGAAGTTCATC |
| | TGCACCACCGGCAAGCTGCCCGTGCCCTGG |
| | CCCACCCTCGTGACCACCCTGACGTACGGC |
| | GTGCAGTGCTTACATACAACTGAATGCCTG |
| | CGAGCATC |
| | (SEQ ID NO: 19395) |

[1297] The 3-component gene modifying system was nucleofected into the U2OS 150 bp insertion GFP reporter-expressing cell line. All 3 components of the gene modifying system were delivered by nucleofection in DNA format. Specifically, 300 ng of gene modifying polypeptide plasmid DNA is combined with 500 ng of ttRNA- and 150 ng of gRNA-expressing plasmids. The modifying polypeptide, ttRNA and gRNA in plasmid DNA format were added to 20 μL SE buffer containing 250,000 U2OS 150 bp insertion GFP reporter-expressing cells, and the cells were nucleofected using program DN-100. After nucleofection, cells were grown at 37° C., 5% CO₂ for at least 4 days prior to harvest and (1) fluorescence readout of GFP restoration by flow cytometry or (2) sequencing readout of accurate sequence insertion by amplicon sequencing. GFP expression or sequencing reads containing the desired 150 nucleotides at the target site within the GFP locus is indicative of the insertion having been accurately written into the genome.

[1298] FIG. 15A shows a graph of % GFP positive cells after treating the 150 bp insertion GFP reporter-expressing cell line with a gene modifying system comprising a gRNA, and a gene modifying polypeptide and ttRNA encoding cognate RBP/RRS pairs (e.g. MCP variants with MS2 variants; PCP variants with PP7 variants; Com variants with com variants) as indicated in X-axis labels. Controls are also indicated by X-axis labels: H2O only, no-driver (gene modifying polypeptide), no gRNA or no-template (ttRNA) control gene modifying system, or an inactive gene modifying system in which the RT domain of the polypeptide is mutated (left 5 bars of the graph). The results showed that all 3 cognate RBP/RRS pairs (MCP/MS2, PCP/PP7, Com/com) in 3 tested polypeptide configurations, were capable of facilitating insertion of the 150 nucleotide fragment into the genome of the cell. Gene modifying polypeptides paired with non-cognate RRS-comprising ttRNAs had lower % GFP positive cells (data not shown). These results indicate that the gene modifying system is capable of inserting 150 bp into the genome with various RBP/RRS pairs, and the increased % GFP positive cells for cognate pairs for efficient insertion activity indicates that the specific interaction between cognate RBPs and RRSs enhance the efficiency of 150 nt insertion.

[1299] FIG. 15B shows a graph of % perfect editing at the GFP locus as seen by next-generation sequencing data from amplicon sequencing. Perfectly edited reads were defined as any reads that perfectly matched the expected edited sequence, as well as reads that contained the correct insertion size and included one or more “N” base calls (i.e. no clear base identification at certain sequence positions) due to limitations of the sequencing technology at these read lengths. The results largely corroborated the observation and interpretation of the flow cytometry results of FIG. 15A. Briefly, the results showed that the three tested RBP/RRS pairs (MCP/MS2, PCP/PP7, and Com/com) were capable of facilitating insertion of the 150 nucleotide fragment into the GFP locus in all tested configurations of the polypeptide (FIG. 15B). Over 12% and up to 26% perfect editing was observed for all tested configurations and RBP/RRS pairs. The amplicon sequencing results also confirmed that cognate pairing of RBPs and RRSs enhances the % perfect edit above non-cognate pairs (data not shown). Finally, the results from amplicon sequencing readout also show higher % perfect editing for PCP/PP7 or Com/com than for MCP/MS2 in some cases, indicating that these RBP/RRS pairs are as effective or more effective in these gene modifying systems.

[1300] An additional trans-gene modifying system was generated with a gene modifying polypeptide containing an alternative exemplary RT domain, Marathon, derived from a group II intron. The capacity of the additional trans-gene modifying systems to write long insertions into the 150 nt restoration reporter cell lines (U2OS) was assessed and compared to systems containing the AVIRE RT-containing drivers examined above using flow cytometry and amplicon sequencing 4-days post-electroporation of the gene modifying systems.

TABLE N4
Exemplary Marathon driver sequences

| Identifier | Amino acid sequence |
|---|---|
| PL27902 | MPAAKRVKLDGGDKKYSIGLDIGTNSVGWAVITDEYKVPSKKFKVLGNTDRHSIKKNLIGALLFDSG |
| | ETAEATRLKRTARRRYTRRKNRICYLQEIFSNEMAKVDDSFFHRLEESFLVEEDKKHERHPIFGNIV |
| | DEVAYHEKYPTIYHLRKKLVDSTDKADLRLIYLALAHMIKFRGHFLIEGDLNPDNSDVDKLFIQLVQ |
| | TYNQLFEENPINASGVDAKAILSARLSKSRRLENLIAQLPGEKKNGLFGNLIALSLGLTPNFKSNFD |
| | LAEDAKLQLSKDTYDDDLDNLLAQIGDQYADLFLAAKNLSDAILLSDILRVNTEITKAPLSASMIKR |
| | YDEHHQDLTLLKALVRQQLPEKYKEIFFDQSKNGYAGYIDGGASQEEFYKFIKPILEKMDGTEELLV |
| | KLNREDLLRKQRTFDNGSIPHQIHLGELHAILRRQEDFYPFLKDNREKIEKILTFRIPYYVGPLARG |
| | NSRFAWMTRKSEETITPWNFEEVVDKGASAQSFIERMTNFDKNLPNEKVLPKHSLLYEYFTVYNELT |
| | KVKYVTEGMRKPAFLSGEQKKAIVDLLFKTNRKVTVKQLKEDYFKKIECFDSVEISGVEDRFNASLG |
| | TYHDLLKIIKDKDFLDNEENEDILEDIVLTLTLFEDREMIEERLKTYAHLFDDKVMKQLKRRRYTGW |
| | GRLSRKLINGIRDKQSGKTILDFLKSDGFANRNFMQLIHDDSLTFKEDIQKAQVSGQGDSLHEHIAN |
| | LAGSPAIKKGILQTVKVVDELVKVMGRHKPENIVIEMARENQTTQKGQKNSRERMKRIEEGIKELGS |
| | QILKEHPVENTQLQNEKLYLYYLQNGRDMYVDQELDINRLSDYDVDHIVPQSFLKDDSIDNKVLTRS |
| | DKARGKSDNVPSEEVVKKMKNYWRQLLNAKLITQRKFDNLTKAERGGLSELDKAGFIKRQLVETRQI |
| | TKHVAQILDSRMNTKYDENDKLIREVKVITLKSKLVSDFRKDFQFYKVREINNYHHAHDAYLNAVVG |
| | TALIKKYPKLESEFVYGDYKVYDVRKMIAKSEQEIGKATAKYFFYSNIMNFFKTEITLANGEIRKRP |
| | LIETNGETGEIVWDKGRDFATVRKVLSMPQVNIVKKTEVQTGGFSKESILPKRNSDKLIARKKDWDP |
| | KKYGGFDSPTVAYSVLVVAKVEKGKSKKLKSVKELLGITIMERSSFEKNPIDFLEAKGYKEVKKDLI |
| | IKLPKYSLFELENGRKRMLASAGELQKGNELALPSKYVNFLYLASHYEKLKGSPEDNEQKQLFVEQH |
| | KHYLDEIIEQISEFSKRVILADANLDKVLSAYNKHRDKPIREQAENIIHLFTLTNLGAPAAFKYFDT |
| | TIDRKRYTSTKEVLDATLIHQSITGLYETRIDLSQLGGDAEAAAKEAAAKEAAAKEAAAKALEAEAA |
| | AKEAAAKEAAAKEAAAKAMASNFTQFVLVDNGGTGDVTVAPSNFANGIAEWISSNSRSQAYKVTCSV |
| | RQSSAQNRKYTIKVEVPKGAWRSYLNMELTIPIFATNSDCELIVKAMQGLLKDGNPIPSAIAANSGI |
| | YAEAAAKEAAAKEAAAKEAAAKALEAEAAAKEAAAKEAAAKEAAAKADTSNLMEQILSSDNLNRAYL |
| | QVVRNKGAEGVDGMKYTELKEHLAKNGETIKGQLRTRKYKPQPARRVEIPKPDGGVRNLGVPTVTDR |
| | FIQQAIAQVLTPIYEEQFHDHSYGFRPNRCAQQAILTALNIMNDGNDWIVDIDLEKFFDTVNHDKLM |
| | TLIGRTIKDGDVISIVRKYLVSGIMIDDEYEDSIVGTPQGGNLSPLLANIMLNELDKEMEKRGLNFV |
| | RYADDCIIMVGSEMSANRVMRNISRFIEEKLGLKVNMTKSKVDRPSGLKYLGFGFYFDPRAHQFKAK |
| | PHAKSVAKFKKRMKELTCRSWGVSNSYKVEKLNQLIRGWINYFKIGSMKTLCKELDSRIRYRLRMCI |
| | WKQWKTPQNQEKNLVKLGIDRNTARRVAYTGKRIAYVCNKGAVNVAISNKRLASFGLISMLDYYIEK |
| | CVTCKRTADGSEFESPKKKAKVE (SEQ ID NO: 19396) |
| PL27903 | MPAAKRVKLDGGDTSNLMEQILSSDNLNRAYLQVVRNKGAEGVDGMKYTELKEHLAKNGETIKGQLR |
| | TRKYKPQPARRVEIPKPDGGVRNLGVPTVTDRFIQQAIAQVLTPIYEEQFHDHSYGFRPNRCAQQAI |
| | LTALNIMNDGNDWIVDIDLEKFFDTVNHDKLMTLIGRTIKDGDVISIVRKYLVSGIMIDDEYEDSIV |
| | GTPQGGNLSPLLANIMLNELDKEMEKRGLNFVRYADDCIIMVGSEMSANRVMRNISRFIEEKLGLKV |
| | NMTKSKVDRPSGLKYLGFGFYFDPRAHQFKAKPHAKSVAKFKKRMKELTCRSWGVSNSYKVEKLNQL |
| | IRGWINYFKIGSMKTLCKELDSRIRYRLRMCIWKQWKTPQNQEKNLVKLGIDRNTARRVAYTGKRIA |
| | YVCNKGAVNVAISNKRLASFGLISMLDYYIEKCVTCAEAAAKEAAAKEAAAKEAAAKALEAEAAAKE |
| | AAAKEAAAKEAAAKAMASNFTQFVLVDNGGTGDVTVAPSNFANGIAEWISSNSRSQAYKVTCSVRQS |
| | SAQNRKYTIKVEVPKGAWRSYLNMELTIPIFATNSDCELIVKAMQGLLKDGNPIPSAIAANSGIYAE |
| | AAAKEAAAKEAAAKEAAAKALEAEAAAKEAAAKEAAAKEAAAKADKKYSIGLDIGTNSVGWAVITDE |
| | YKVPSKKFKVLGNTDRHSIKKNLIGALLFDSGETAEATRLKRTARRRYTRRKNRICYLQEIFSNEMA |
| | KVDDSFFHRLEESFLVEEDKKHERHPIFGNIVDEVAYHEKYPTIYHLRKKLVDSTDKADLRLIYLAL |
| | AHMIKFRGHFLIEGDLNPDNSDVDKLFIQLVQTYNQLFEENPINASGVDAKAILSARLSKSRRLENL |
| | IAQLPGEKKNGLFGNLIALSLGLTPNFKSNFDLAEDAKLQLSKDTYDDDLDNLLAQIGDQYADLFLA |
| | AKNLSDAILLSDILRVNTEITKAPLSASMIKRYDEHHQDLTLLKALVRQQLPEKYKEIFFDQSKNGY |
| | AGYIDGGASQEEFYKFIKPILEKMDGTEELLVKLNREDLLRKQRTFDNGSIPHQIHLGELHAILRRQ |
| | EDFYPFLKDNREKIEKILTFRIPYYVGPLARGNSRFAWMTRKSEETITPWNFEEVVDKGASAQSFIE |
| | RMTNFDKNLPNEKVLPKHSLLYEYFTVYNELTKVKYVTEGMRKPAFLSGEQKKAIVDLLFKTNRKVT |
| | VKQLKEDYFKKIECFDSVEISGVEDRFNASLGTYHDLLKIIKDKDFLDNEENEDILEDIVLTLTLFE |
| | DREMIEERLKTYAHLFDDKVMKQLKRRRYTGWGRLSRKLINGIRDKQSGKTILDFLKSDGFANRNFM |
| | QLIHDDSLTFKEDIQKAQVSGQGDSLHEHIANLAGSPAIKKGILQTVKVVDELVKVMGRHKPENIVI |
| | EMARENQTTQKGQKNSRERMKRIEEGIKELGSQILKEHPVENTQLQNEKLYLYYLQNGRDMYVDQEL |
| | DINRLSDYDVDHIVPQSFLKDDSIDNKVLTRSDKARGKSDNVPSEEVVKKMKNYWRQLLNAKLITQR |
| | KFDNLTKAERGGLSELDKAGFIKRQLVETRQITKHVAQILDSRMNTKYDENDKLIREVKVITLKSKL |
| | VSDFRKDFQFYKVREINNYHHAHDAYLNAVVGTALIKKYPKLESEFVYGDYKVYDVRKMIAKSEQEI |
| | GKATAKYFFYSNIMNFFKTEITLANGEIRKRPLIETNGETGEIVWDKGRDFATVRKVLSMPQVNIVK |
| | KTEVQTGGFSKESILPKRNSDKLIARKKDWDPKKYGGFDSPTVAYSVLVVAKVEKGKSKKLKSVKEL |
| | LGITIMERSSFEKNPIDFLEAKGYKEVKKDLIIKLPKYSLFELENGRKRMLASAGELQKGNELALPS |
| | KYVNFLYLASHYEKLKGSPEDNEQKQLFVEQHKHYLDEIIEQISEFSKRVILADANLDKVLSAYNKH |
| | RDKPIREQAENIIHLFTLTNLGAPAAFKYFDTTIDRKRYTSTKEVLDATLIHQSITGLYETRIDLSQ |
| | LGGDKRTADGSEFESPKKKAKVE (SEQ ID NO: 19397) |
| PL27908 | MPAAKRVKLDGGDKKYSIGLDIGTNSVGWAVITDEYKVPSKKFKVLGNTDRHSIKKNLIGALLFDSG |
| | ETAEATRLKRTARRRYTRRKNRICYLQEIFSNEMAKVDDSFFHRLEESFLVEEDKKHERHPIFGNIV |
| | DEVAYHEKYPTIYHLRKKLVDSTDKADLRLIYLALAHMIKFRGHFLIEGDLNPDNSDVDKLFIQLVQ |
| | TYNQLFEENPINASGVDAKAILSARLSKSRRLENLIAQLPGEKKNGLFGNLIALSLGLTPNFKSNFD |
| | LAEDAKLQLSKDTYDDDLDNLLAQIGDQYADLFLAAKNLSDAILLSDILRVNTEITKAPLSASMIKR |
| | YDEHHQDLTLLKALVRQQLPEKYKEIFFDQSKNGYAGYIDGGASQEEFYKFIKPILEKMDGTEELLV |
| | KLNREDLLRKQRTFDNGSIPHQIHLGELHAILRRQEDFYPFLKDNREKIEKILTFRIPYYVGPLARG |
| | NSRFAWMTRKSEETITPWNFEEVVDKGASAQSFIERMTNFDKNLPNEKVLPKHSLLYEYFTVYNELT |
| | KVKYVTEGMRKPAFLSGEQKKAIVDLLFKTNRKVTVKQLKEDYFKKIECFDSVEISGVEDRFNASLG |
| | TYHDLLKIIKDKDFLDNEENEDILEDIVLTLTLFEDREMIEERLKTYAHLFDDKVMKQLKRRRYTGW |
| | GRLSRKLINGIRDKQSGKTILDFLKSDGFANRNFMQLIHDDSLTFKEDIQKAQVSGQGDSLHEHIAN |
| | LAGSPAIKKGILQTVKVVDELVKVMGRHKPENIVIEMARENQTTQKGQKNSRERMKRIEEGIKELGS |
| | QILKEHPVENTQLQNEKLYLYYLQNGRDMYVDQELDINRLSDYDVDHIVPQSFLKDDSIDNKVLTRS |
| | DKARGKSDNVPSEEVVKKMKNYWRQLLNAKLITQRKFDNLTKAERGGLSELDKAGFIKRQLVETRQI |
| | TKHVAQILDSRMNTKYDENDKLIREVKVITLKSKLVSDFRKDFQFYKVREINNYHHAHDAYLNAVVG |
| | TALIKKYPKLESEFVYGDYKVYDVRKMIAKSEQEIGKATAKYFFYSNIMNFFKTEITLANGEIRKRP |
| | LIETNGETGEIVWDKGRDFATVRKVLSMPQVNIVKKTEVQTGGFSKESILPKRNSDKLIARKKDWDP |
| | KKYGGFDSPTVAYSVLVVAKVEKGKSKKLKSVKELLGITIMERSSFEKNPIDFLEAKGYKEVKKDLI |
| | IKLPKYSLFELENGRKRMLASAGELQKGNELALPSKYVNFLYLASHYEKLKGSPEDNEQKQLFVEQH |
| | KHYLDEIIEQISEFSKRVILADANLDKVLSAYNKHRDKPIREQAENIIHLFTLTNLGAPAAFKYFDT |
| | TIDRKRYTSTKEVLDATLIHQSITGLYETRIDLSQLGGDAEAAAKEAAAKEAAAKEAAAKALEAEAA |
| | AKEAAAKEAAAKEAAAKADTSNLMEQILSSDNLNRAYLQVVRNKGAEGVDGMKYTELKEHLAKNGET |
| | IKGQLRTRKYKPQPARRVEIPKPDGGVRNLGVPTVTDRFIQQAIAQVLTPIYEEQFHDHSYGFRPNR |
| | CAQQAILTALNIMNDGNDWIVDIDLEKFFDTVNHDKLMTLIGRTIKDGDVISIVRKYLVSGIMIDDE |
| | YEDSIVGTPQGGNLSPLLANIMLNELDKEMEKRGLNFVRYADDCIIMVGSEMSANRVMRNISRFIEE |
| | KLGLKVNMTKSKVDRPSGLKYLGFGFYFDPRAHQFKAKPHAKSVAKFKKRMKELTCRSWGVSNSYKV |
| | EKLNQLIRGWINYFKIGSMKTLCKELDSRIRYRLRMCIWKQWKTPQNQEKNLVKLGIDRNTARRVAY |
| | TGKRIAYVCNKGAVNVAISNKRLASFGLISMLDYYIEKCVTCGSSGGGEAAAKMASNFTQFVLVDNG |
| | GTGDVTVAPSNFANGIAEWISSNSRSQAYKVTCSVRQSSAQNRKYTIKVEVPKGAWRSYLNMELTIP |
| | IFATNSDCELIVKAMQGLLKDGNPIPSAIAANSGIYGGSGGSMASNFTQFVLVDNGGTGDVTVAPSN |
| | FANGIAEWISSNSRSQAYKVTCSVRQSSAQNRKYTIKVEVPKGAWRSYLNMELTIPIFATNSDCELI |
| | VKAMQGLLKDGNPIPSAIAANSGIYGGGSGGGSGGGSGGGSMASNFTQFVLVDNGGTGDVTVAPSNF |
| | ANGIAEWISSNSRSQAYKVTCSVRQSSAQNRKYTIKVEVPKGAWRSYLNMELTIPIFATNSDCELIV |
| | KAMQGLLKDGNPIPSAIAANSGIYGGSGGSMASNFTQFVLVDNGGTGDVTVAPSNFANGIAEWISSN |
| | SRSQAYKVTCSVRQSSAQNRKYTIKVEVPKGAWRSYLNMELTIPIFATNSDCELIVKAMQGLLKDGN |
| | PIPSAIAANSGIYKRTADGSEFESPKKKAKVE (SEQ ID NO: 19398) |
| PL27909 | PAAKRVKLDGGDTSNLMEQILSSDNLNRAYLQVVRNKGAEGVDGMKYTELKEHLAKNGETIKGQLRT |
| | RKYKPQPARRVEIPKPDGGVRNLGVPTVTDRFIQQAIAQVLTPIYEEQFHDHSYGFRPNRCAQQAIL |
| | TALNIMNDGNDWIVDIDLEKFFDTVNHDKLMTLIGRTIKDGDVISIVRKYLVSGIMIDDEYEDSIVG |
| | TPQGGNLSPLLANIMLNELDKEMEKRGLNFVRYADDCIIMVGSEMSANRVMRNISRFIEEKLGLKVN |
| | MTKSKVDRPSGLKYLGFGFYFDPRAHQFKAKPHAKSVAKFKKRMKELTCRSWGVSNSYKVEKLNQLI |
| | RGWINYFKIGSMKTLCKELDSRIRYRLRMCIWKQWKTPQNQEKNLVKLGIDRNTARRVAYTGKRIAY |
| | VCNKGAVNVAISNKRLASFGLISMLDYYIEKCVTCAEAAAKEAAAKEAAAKEAAAKALEAEAAAKEA |
| | AAKEAAAKEAAAKAMASNFTQFVLVDNGGTGDVTVAPSNFANGIAEWISSNSRSQAYKVTCSVRQSS |
| | AQNRKYTIKVEVPKGAWRSYLNMELTIPIFATNSDCELIVKAMQGLLKDGNPIPSAIAANSGIYGGS |
| | GGSMASNFTQFVLVDNGGTGDVTVAPSNFANGIAEWISSNSRSQAYKVTCSVRQSSAQNRKYTIKVE |
| | VPKGAWRSYLNMELTIPIFATNSDCELIVKAMQGLLKDGNPIPSAIAANSGIYGGGSGGGSGGGSGG |
| | GSMASNFTQFVLVDNGGTGDVTVAPSNFANGIAEWISSNSRSQAYKVTCSVRQSSAQNRKYTIKVEV |
| | PKGAWRSYLNMELTIPIFATNSDCELIVKAMQGLLKDGNPIPSAIAANSGIYGGSGGSMASNFTQFV |
| | LVDNGGTGDVTVAPSNFANGIAEWISSNSRSQAYKVTCSVRQSSAQNRKYTIKVEVPKGAWRSYLNM |
| | ELTIPIFATNSDCELIVKAMQGLLKDGNPIPSAIAANSGIYGSSGGGEAAAKDKKYSIGLDIGTNSV |
| | GWAVITDEYKVPSKKFKVLGNTDRHSIKKNLIGALLFDSGETAEATRLKRTARRRYTRRKNRICYLQ |
| | EIFSNEMAKVDDSFFHRLEESFLVEEDKKHERHPIFGNIVDEVAYHEKYPTIYHLRKKLVDSTDKAD |
| | LRLIYLALAHMIKFRGHFLIEGDLNPDNSDVDKLFIQLVQTYNQLFEENPINASGVDAKAILSARLS |
| | KSRRLENLIAQLPGEKKNGLFGNLIALSLGLTPNFKSNFDLAEDAKLQLSKDTYDDDLDNLLAQIGD |
| | QYADLFLAAKNLSDAILLSDILRVNTEITKAPLSASMIKRYDEHHQDLTLLKALVRQQLPEKYKEIF |
| | FDQSKNGYAGYIDGGASQEEFYKFIKPILEKMDGTEELLVKLNREDLLRKQRTFDNGSIPHQIHLGE |
| | LHAILRRQEDFYPFLKDNREKIEKILTFRIPYYVGPLARGNSRFAWMTRKSEETITPWNFEEVVDKG |
| | ASAQSFIERMTNFDKNLPNEKVLPKHSLLYEYFTVYNELTKVKYVTEGMRKPAFLSGEQKKAIVDLL |
| | FKTNRKVTVKQLKEDYFKKIECFDSVEISGVEDRFNASLGTYHDLLKIIKDKDFLDNEENEDILEDI |
| | VLTLTLFEDREMIEERLKTYAHLFDDKVMKQLKRRRYTGWGRLSRKLINGIRDKQSGKTILDFLKSD |
| | GFANRNFMQLIHDDSLTFKEDIQKAQVSGQGDSLHEHIANLAGSPAIKKGILQTVKVVDELVKVMGR |
| | HKPENIVIEMARENQTTQKGQKNSRERMKRIEEGIKELGSQILKEHPVENTQLQNEKLYLYYLQNGR |
| | DMYVDQELDINRLSDYDVDHIVPQSFLKDDSIDNKVLTRSDKARGKSDNVPSEEVVKKMKNYWRQLL |
| | NAKLITQRKFDNLTKAERGGLSELDKAGFIKRQLVETRQITKHVAQILDSRMNTKYDENDKLIREVK |
| | VITLKSKLVSDFRKDFQFYKVREINNYHHAHDAYLNAVVGTALIKKYPKLESEFVYGDYKVYDVRKM |
| | IAKSEQEIGKATAKYFFYSNIMNFFKTEITLANGEIRKRPLIETNGETGEIVWDKGRDFATVRKVLS |
| | MPQVNIVKKTEVQTGGFSKESILPKRNSDKLIARKKDWDPKKYGGFDSPTVAYSVLVVAKVEKGKSK |
| | KLKSVKELLGITIMERSSFEKNPIDFLEAKGYKEVKKDLIIKLPKYSLFELENGRKRMLASAGELQK |
| | GNELALPSKYVNFLYLASHYEKLKGSPEDNEQKQLFVEQHKHYLDEIIEQISEFSKRVILADANLDK |
| | VLSAYNKHRDKPIREQAENIIHLFTLTNLGAPAAFKYFDTTIDRKRYTSTKEVLDATLIHQSITGLY |
| | ETRIDLSQLGGDKRTADGSEFESPKKKAKVE (SEQ ID NO: 19399) |

[1301] An exemplary Marathon RT domain sequence is provided below as SEQ ID NO: 17,101:

(SEQ ID NO: 17,101)
DTSNLMEQILSSDNLNRAYLQVVRNKGAEGVDGMKYTELKEHLAKN
GETIKGQLRTRKYKPQPARRVEIPKPDGGVRNLGVPTVTDRFIQQ
AIAQVLTPIYEEQFHDHSYGFRPNRCAQQAILTALNIMNDGNDWI
VDIDLEKFFDTVNHDKLMTLIGRTIKDGDVISIVRKYLVSGIMID
DEYEDSIVGTPQGGNLSPLLANIMLNELDKEMEKRGLNFVRYADD
CIIMVGSEMSANRVMRNISRFIEEKLGLKVNMTKSKVDRPSGLKY
LGFGFYFDPRAHQFKAKPHAKSVAKFKKRMKELTCRSWGVSNSYK
VEKLNQLIRGWINYFKIGSMKTLCKELDSRIRYRLRMCIWKQWKT
PQNQEKNLVKLGIDRNTARRVAYTGKRIAYVCNKGAVNVAISNKR
LASFGLISMLDYYIEKCVTC

The 3-component gene modifying system was nucleofected into the U2OS 150 bp insertion GFP reporter-expressing cell line. All 3 components of the gene modifying system were delivered by nucleofection in DNA format. Specifically, 100 ng of gene modifying polypeptide plasmid DNA is combined with 500 ng of ttRNA- and 150 ng of gRNA-expressing plasmids. The modifying polypeptide, ttRNA and gRNA in plasmid DNA format were added to 20 L SE buffer containing 250,000 U2OS 150 bp insertion GFP reporter-expressing cells, and the cells were nucleofected using program DN-100. After nucleofection, cells were grown at 37° C., 5% CO₂ for at least 4 days prior to harvest and fluorescence readout of GFP restoration by flow cytometry. GFP expression is indicative of the insertion having been accurately written into the genome.

[1302] FIG. 16 shows a graph of % GFP positive cells after treating the 150 bp insertion GFP reporter-expressing cell line with a gene modifying system comprising a gRNA, ttRNA and a gene modifying polypeptide comprising an exemplary Marathon RT in various polypeptide configurations as indicated in X-axis labels (Config 1, Config 2, and Config 3 are as described in Example 3), or with H2O only or no-gRNA negative control gene modifying systems. The results showed that gene modifying polypeptides comprising the Marathon RT were capable of inserting the 150 bp sequence to restore the GFP locus in any of the 3 tested polypeptide configurations when co-delivered with a full gene modifying system (i.e. not in the absence of the gRNA). Several additional point mutants of the Marathon RT domain were generated that have not yielded effective editing in this system (data not shown). The results show that trans gene modifying systems utilizing a variety of different RT domains are capable of facilitating inserting long (e.g., 150 nucleotide) sequences into target DNA.

[1303] Taken together, these data further support the interpretation that the system has a degree of modularity, and that alternate RBP/RRS pairs or RTs may be functional in this system for insertion of sequences into the genome.

### Example 7: Evaluation of Long Insertion Activity of an Exemplary Gene Modifying Polypeptide Using a Range of Trans Template RNA Dosages with a 3-Component System

[1304] This example describes the evaluation of exemplary three (3)-component gene modifying systems in the targeted insertion of a 150 nt sequence in the human genome. The gene modifying systems each comprised (1) a gene modifying polypeptide generated in Example 3 (and demonstrated to have trans-recruitment and rewrite activity in Examples 7 and 9 of PCT Application PCT/US2022/076064, which Examples are herein incorporated by reference), (2) varying levels of a trans template RNA (ttRNA) comprising 4 RRSs, and (3) exemplary gRNA PLV4165.

[1305] Two gene modifying polypeptides were used in this Example; amino acid sequences of which are provided in Example 3.
[1306] PL12109: RT-RBD-DBD; One MCP domain
[1307] PL12113: RT-RBD-DBD; Two MCP domains

[1308] The ttRNAs used in this Example are PL15376 and PL15377 and nucleotide sequences are provided in Example 4. The ttRNAs contained:
[1309] An RRS containing 4 MS2 repeats.
[1310] A 5′ end block sequence containing a gRNA scaffold sequence compatible with the Cas9 domain of the gene modifying polypeptides and a gRNA spacer containing either 15 nucleotides or 20 nucleotides.
[1311] A 15 nucleotide long gRNA spacer can bind Cas9 and the target DNA but is not expected to nick the DNA. A longer 20 nucleotide gRNA spacer is sufficient for both binding and nicking. The sequence of the gRNA that comprises the 3^{rd} component of the gene modifying system is as below

PLV4165:
(SEQ ID NO: 16,714)
GCCGAAGCACTGCACGCCGTGTTTTAGAGCTAGAAATAGCAAGTT
AAAATAAGGCTAGTCCGTTATCAACTTGAAAAAGTGGCACCGAGT
CGGTGC

[1312] To assess the capacity of the trans-gene modifying system to write long insertions into the genome, 150 nt restoration reporter cell lines (U2OS) were analyzed by flow cytometry and amplicon sequencing 4-days post-transfection/electroporation of the gene modifying systems.

[1313] The 3-component gene modifying system was nucleofected into the U2OS 150 bp insertion GFP reporter-expressing cell line. All 3 components of the gene modifying system were delivered by nucleofection in DNA format. Specifically, 300 ng of gene modifying polypeptide plasmid DNA was combined with 50, 150, 300, or 500 ng of ttRNA-expressing plasmid DNA ( ) and 150 ng of gRNA-expressing plasmid DNA. The modifying polypeptide, ttRNA and gRNA in plasmid DNA format were added to 20 μL SE buffer containing 270,000 U2OS 150 bp insertion GFP reporter-expressing cells, and the cells were nucleofected using program DN-100. After nucleofection, cells were grown at 37° C., 5% CO2 for at least 4 days prior to harvest and (1) fluorescence readout of GFP restoration by flow cytometry or (2) sequencing readout of accurate sequence insertion by amplicon sequencing. GFP expression or sequencing reads containing the desired 150 nucleotides at the target site within the GFP locus is indicative of the insertion having been accurately written into the genome.

[1314] FIGS. 8A-8B show graphs of % GFP positive cells after treating the GFP reporter-expressing cell line with gene modifying systems comprising varying levels of exemplary ttRNA PL15376 or PL15377 comprising 4 MS2 sequences and a 5′ end block sequence containing a gRNA scaffold sequence and a gRNA spacer of either 15 (short) or 20 (long) nucleotides (ttRNA plasmid level indicated on the X-axis, boxes 4-7 from left) or with H2O only (box 1 from left) or a missing component control (boxes 2 and 3 from left, missing polypeptide and missing gRNA controls, ttRNAs used are indicated above the graphs). Dotted line marks the background level of signal observed from the “no polypeptide” control. The results showed that increasing amounts of the ttRNA can improve editing efficiency. The highest dose of the ttRNA-expressing plasmid (500 ng) with 5′ end block sequence containing a gRNA scaffold sequence and a 20 nucleotide spacer sequence capable of nicking yielded the highest editing at 11% GFP positive cells above background (using signal from the “no polypeptide” control as background), suggesting that editing efficiency of 150 nucleotide insertions can be further increased by increasing the level of ttRNA with which a cell is treated. Furthermore, the results indicate that increasing amounts of the ttRNA with 5′ end block sequence containing a gRNA scaffold sequence and a 15 nucleotide spacer sequence incapable of nicking but capable of binding DNA can yield up to 5% GFP positive cells above background. This result suggests that although a secondary nick is more efficient, titrating the non-nicking template can yield higher 150 nucleotide insertions and substantial editing.

[1315] FIGS. 9A-9B shows a graph of % perfect editing at the GFP locus as seen by next-generation sequencing data from amplicon sequencing. The results followed a pattern similar to the flow cytometry results shown in FIGS. 8A-8B. Briefly, the results showed that increasing amounts of the ttRNA can improve editing efficiency. At the highest dose of the ttRNA-expressing plasmid (500 ng) with 5′ end block sequence containing a gRNA scaffold sequence and a 20-nucleotide spacer sequence capable of nicking, as high as 37% mean perfect editing/rewrite was observed, suggesting that editing efficiency of 150 nucleotide insertions can be further increased by increasing the level of ttRNA with which a cell is treated. Furthermore, the results indicate that increasing amounts of the ttRNA with 5′ end block sequence containing a gRNA scaffold sequence and a 15-nucleotide spacer sequence incapable of nicking but capable of binding DNA can yield up to 24% mean perfect editing/rewrite. As observed from the flow cytometry data, this result suggests that although a secondary nick is more efficient, titrating the non-nicking template can also yield 150 nucleotide insertions and substantial editing.

[1316] Of note, the 150 bp insertion GFP-reporter cell line contains 2 copies of the target locus. Without wishing to be bound by theory, when these cells are transfected with higher amounts of ttRNA-expressing plasmids (as in this example), it is possible that both copies of the reporter gene get edited by the gene-modifying system. In this experiment we observe a higher editing % from amplicon sequencing (FIG. 9), which quantifies the number of edited genomes than from flow cytometry (FIG. 8), which quantifies the number of cells containing at least 1 copy of the desired edit. This suggests that both copies of the reporter are perfectly edited in the majority of GFP-expressing cells by the gene modifying system.

### Example 8: Evaluation of Long Insertion Activity of Exemplary Gene Modifying Polypeptides Using Trans Template RNAs with a 5-Component System

[1317] This example describes the evaluation of exemplary gene modifying systems having up to five components in the targeted insertion of a 150 nt sequence in the human genome. The gene modifying systems each comprise (1) a gene modifying polypeptide generated in Example 3 (and demonstrated to have trans-recruitment and rewrite activity in Examples 7 and 9 of PCT Application PCT/US2022/076064, which is herein incorporated by reference in its entirety), (2) a trans template RNA (ttRNA) generated in Example 4, (3) exemplary gRNA PLV4165, an additional (4) Cas9 or different gene modifying polypeptide molecule recruited to the nicked DNA strand by the trans-template RNA (e.g., by an 5′ end block containing a gRNA spacer), or by (5) its species-matched gRNA.

[1318] More specifically, a gene modifying polypeptide binds the guide RNA molecule and a ttRNA molecule, together forming a gene modifying complex, which binds and nicks the target locus and performs template-directed incorporation of the desired edit in one strand of the genomic DNA. The additional Cas9 or different gene modifying polypeptide molecule is recruited to the nicked DNA strand by ttRNA (e.g., by a 5′ end block containing a gRNA spacer), or by its species-matched gRNA, forming the second complex. The second complex may extend the bubble of unwound/single-stranded DNA and facilitate large insertions, and may also be used to introduce a nick on the second strand to initiate second strand synthesis, and/or signal to the cell's endogenous repair system that the edited strand should be copied and maintained.

[1319] To assess the genome-editing capacity of the gene modifying system, a 5-component gene modifying system is transfected/electroporated into the HEK293T/U2OS 150 bp insertion GFP reporter-expressing cell line. All components of the gene modifying system are delivered by nucleofection in DNA format. Specifically, 200-800 ng of gene modifying polypeptide plasmid DNA is combined with 50-200 ng ttRNA and 50-200 ng gRNA in plasmid format. An additional 50-200 ng of Cas9- or different gene modifying polypeptide-encoding plasmid DNA and/or 25-100 ng of a second gRNA-encoding plasmid are also transfected/nucleofected together with the gene modifying system. The 4-5 plasmids encoding the gene modifying system are added to 25 μL SF/SE buffer containing 250,000 HEK293T/U2OS 150 bp insertion GFP reporter-expressing cells, and the cells are nucleofected using program DS-150/DN-100. After nucleofection, cells are grown at 37° C., 5% CO₂ for at least 3 days prior to cell lysis and genomic DNA extraction, or fluorescence readout by flow cytometry. To analyze gene editing activity, primers flanking the GFP locus can be used to amplify across the locus. Amplicons are analyzed via short read sequencing using an Illumina MiSeq. Conversion of the GFP-150 bp deletion gene sequence to a fully restored GFP coding sequence indicate successful editing. In some embodiments, the assay will indicate that at least 10%, 20%, 30%, 40%, 50%, 60%, or 70% of copies of the GFP-150 bp deletion sequence in the sample are converted to the fully restored GFP sequence.

### Example 9: Generation of Additional Exemplary Drivers

[1320] This example describes the generation of exemplary drivers and trans templates for use in the three, four, or five component RNA-based gene modifying systems described in Examples herein.

[1321] An additional set of 10 exemplary gene modifying polypeptides was generated containing:
[1322] 1. a Cas-nuclease with one endonuclease domain inactivated (in this example, Spy N863A Cas9),
[1323] 2. a reverse transcriptase (RT) (in this example, the RT of the gene modifying polypeptide encoded by: PLV10990/RNAIVT338 as in Example 3), and
[1324] 3. an RNA binding domain (RBD) containing 1, 2, or 4 RBP repeats (in this example, 1, 2, or 4 MCPv2 repeats as provided in Table 31), with each repeat connected to the other RBP repeats by one of 4 linker peptides from Table 10, or with an alternate dimer junction as described in Peabody & Lim (1996) NAR.

[1325] The alternate MCPv2 dimer junction described in #3, removes the 3 N-terminal amino acids (M, A, S) of the second MCPv2 repeat in the dimer, and replaces it with an alanine, e.g., as shown in the following sequences:

MASNFTQFVLVDNGGTGDVTVAPSNFANGIAEWISSNSRSQAYKV
TCSVRQSSAQNRKYTIKVEVPKGAWRSYLNMELTIPIFATNSDCE
LIVKAMQGLLKDGNPIPSAIAANSGIY-[linker]-MASNFTQF
VLVDNGGTGDVTVAPSNFANGIAEWISSNSRSQAYKVTCSVRQSS
AQNRKYTIKVEVPKGAWRSYLNMELTIPIFATNSDCELIVKAMQG
LLKDGNPIPSAIAANSGIY
(SEQ ID NOS 19400 and 19401, respectively),

the [linker] is replaces with an alanine, and the bolded/underlined sequence in the second copy of MCPv2 (above) is removed, to produce the below sequence:

(SEQ ID NO: 19402)
MASNFTQFVLVDNGGTGDVTVAPSNFANGIAEWISSNSRSQAYKV
TCSVRQSSAQNRKYTIKVEVPKGAWRSYLNMELTIPIFATNSDCE
LIVKAMQGLLKDGNPIPSAIAANSGIY-ANFTQFVLVDNGGTGDV
TVAPSNFANGIAEWISSNSRSQAYKVTCSVRQSSAQNRKYTIKVE
VPKGAWRSYLNMELTIPIFATNSDCELIVKAMQGLLKDGNPIPSA
IAANSGIY.

[1326] These 3 domains are connected using peptide linkers, e.g., as found in Table 10, (in this example by SEQ ID: (217)).

[1327] The set of 10 exemplary gene modifying polypeptides encompassed a subset of the configurations set forth in Examples 1 and 2:
[1328] RT-linker-Cas9-linker-(RBP repeat),
[1329] (RBP repeat)ₙ-linker-RT-linker-Cas9

[1330] The sequences of the exemplary gene modifying polypeptides are given in Table S5 and Table S6 below:

TABLE S5
Exemplary gene modifying sequences for Configuration 1
(i.e., RT - linker - Cas9 - linker - (RBP repeat)ₙ)

| | | SEQ |
|---|---|---|
| | | ID |
| Identifier | Full Amino Acid Sequence | NO: |
| PL24668 | MPAAKRVKLDGGTAPLEEEYRLFLEAPIQNVTLLEQWKREIPKVWAEINPPGLASTQAPI | 17,001 |
| | HVQLLSTALPVRVRQYPITLEAKRSLRETIRKFRAAGILRPVHSPWNTPLLPVRKSGTSE | |
| | YRMVQDLREVNKRVETIHPTVPNPYTLLSLLPPDRIWYSVLDLKDAFFCIPLAPESQLIF | |
| | AFEWADAEEGESGQLTWTRLPQGFKNSPTLFNEALNRDLQGFRLDHPSVSLLQYVDDLLI | |
| | AADTQAACLSATRDLLMTLAELGYRVSGKKAQLCQEEVTYLGFKIHKGSRSLSNSRTQAI | |
| | LQIPVPKTKRQVREFLGKIGYCRLFIPGFAELAQPLYAATRPGNDPLVWGEKEEEAFQSL | |
| | KLALTQPPALALPSLDKPFQLFVEETSGAAKGVLTQALGPWKRPVAYLSKRLDPVAAGWP | |
| | RCLRAIAAAALLTREASKLTFGQDIEITSSHNLESLLRSPPDKWLTNARITQYQVLLLDP | |
| | PRVRFKQTAALNPATLLPETDDTLPIHHCLDTLDSLTSTRPDLTDQPLAQAEATLFTDGS | |
| | SYIRDGKRYAGAAVVTLDSVIWAEPLPIGTSAQKAELIALTKALEWSKDKSVNIYTDSRY | |
| | AFATLHVHGMIYRERGWLTAGGKAIKNAPEILALLTAVWLPKRVAVMHCKGHQKDDAPTS | |
| | TGNRRADEVAREVAIRPLSTQATISAEAAAKEAAAKEAAAKEAAAKALEAEAAAKEAAAK | |
| | EAAAKEAAAKADKKYSIGLDIGTNSVGWAVITDEYKVPSKKFKVLGNTDRHSIKKNLIGA | |
| | LLFDSGETAEATRLKRTARRRYTRRKNRICYLQEIFSNEMAKVDDSFFHRLEESFLVEED | |
| | KKHERHPIFGNIVDEVAYHEKYPTIYHLRKKLVDSTDKADLRLIYLALAHMIKFRGHFLI | |
| | EGDLNPDNSDVDKLFIQLVQTYNQLFEENPINASGVDAKAILSARLSKSRRLENLIAQLP | |
| | GEKKNGLFGNLIALSLGLTPNFKSNFDLAEDAKLQLSKDTYDDDLDNLLAQIGDQYADLF | |
| | LAAKNLSDAILLSDILRVNTEITKAPLSASMIKRYDEHHQDLTLLKALVRQQLPEKYKEI | |
| | FFDQSKNGYAGYIDGGASQEEFYKFIKPILEKMDGTEELLVKLNREDLLRKQRTFDNGSI | |
| | PHQIHLGELHAILRRQEDFYPFLKDNREKIEKILTFRIPYYVGPLARGNSRFAWMTRKSE | |
| | ETITPWNFEEVVDKGASAQSFIERMTNFDKNLPNEKVLPKHSLLYEYFTVYNELTKVKYV | |
| | TEGMRKPAFLSGEQKKAIVDLLFKTNRKVTVKQLKEDYFKKIECFDSVEISGVEDRFNAS | |
| | LGTYHDLLKIIKDKDFLDNEENEDILEDIVLTLTLFEDREMIEERLKTYAHLFDDKVMKQ | |
| | LKRRRYTGWGRLSRKLINGIRDKQSGKTILDFLKSDGFANRNFMQLIHDDSLTFKEDIQK | |
| | AQVSGQGDSLHEHIANLAGSPAIKKGILQTVKVVDELVKVMGRHKPENIVIEMARENQTT | |
| | QKGQKNSRERMKRIEEGIKELGSQILKEHPVENTQLQNEKLYLYYLQNGRDMYVDQELDI | |
| | NRLSDYDVDHIVPQSFLKDDSIDNKVLTRSDKARGKSDNVPSEEVVKKMKNYWRQLLNAK | |
| | LITQRKFDNLTKAERGGLSELDKAGFIKRQLVETRQITKHVAQILDSRMNTKYDENDKLI | |
| | REVKVITLKSKLVSDFRKDFQFYKVREINNYHHAHDAYLNAVVGTALIKKYPKLESEFVY | |
| | GDYKVYDVRKMIAKSEQEIGKATAKYFFYSNIMNFFKTEITLANGEIRKRPLIETNGETG | |
| | EIVWDKGRDFATVRKVLSMPQVNIVKKTEVQTGGFSKESILPKRNSDKLIARKKDWDPKK | |
| | YGGFDSPTVAYSVLVVAKVEKGKSKKLKSVKELLGITIMERSSFEKNPIDFLEAKGYKEV | |
| | KKDLIIKLPKYSLFELENGRKRMLASAGELQKGNELALPSKYVNFLYLASHYEKLKGSPE | |
| | DNEQKQLFVEQHKHYLDEIIEQISEFSKRVILADANLDKVLSAYNKHRDKPIREQAENII | |
| | HLFTLTNLGAPAAFKYFDTTIDRKRYTSTKEVLDATLIHQSITGLYETRIDLSQLGGDAE | |
| | AAAKEAAAKEAAAKEAAAKALEAEAAAKEAAAKEAAAKEAAAKAMASNFTQFVLVDNGGT | |
| | GDVTVAPSNFANGIAEWISSNSRSQAYKVTCSVRQSSAQNRKYTIKVEVPKGAWRSYLNM | |
| | ELTIPIFATNSDCELIVKAMQGLLKDGNPIPSAIAANSGIYKRTADGSEFESPKKKAKVE | |
| PL24669 | MPAAKRVKLDGGTAPLEEEYRLFLEAPIQNVTLLEQWKREIPKVWAEINPPGLASTQAPI | 17002 |
| | HVQLLSTALPVRVRQYPITLEAKRSLRETIRKFRAAGILRPVHSPWNTPLLPVRKSGTSE | |
| | YRMVQDLREVNKRVETIHPTVPNPYTLLSLLPPDRIWYSVLDLKDAFFCIPLAPESQLIF | |
| | AFEWADAEEGESGQLTWTRLPQGFKNSPTLFNEALNRDLQGFRLDHPSVSLLQYVDDLLI | |
| | AADTQAACLSATRDLLMTLAELGYRVSGKKAQLCQEEVTYLGFKIHKGSRSLSNSRTQAI | |
| | LQIPVPKTKRQVREFLGKIGYCRLFIPGFAELAQPLYAATRPGNDPLVWGEKEEEAFQSL | |
| | KLALTQPPALALPSLDKPFQLFVEETSGAAKGVLTQALGPWKRPVAYLSKRLDPVAAGWP | |
| | RCLRAIAAAALLTREASKLTFGQDIEITSSHNLESLLRSPPDKWLTNARITQYQVLLLDP | |
| | PRVRFKQTAALNPATLLPETDDTLPIHHCLDTLDSLTSTRPDLTDQPLAQAEATLFTDGS | |
| | SYIRDGKRYAGAAVVTLDSVIWAEPLPIGTSAQKAELIALTKALEWSKDKSVNIYTDSRY | |
| | AFATLHVHGMIYRERGWLTAGGKAIKNAPEILALLTAVWLPKRVAVMHCKGHQKDDAPTS | |
| | TGNRRADEVAREVAIRPLSTQATISAEAAAKEAAAKEAAAKEAAAKALEAEAAAKEAAAK | |
| | EAAAKEAAAKADKKYSIGLDIGTNSVGWAVITDEYKVPSKKFKVLGNTDRHSIKKNLIGA | |
| | LLFDSGETAEATRLKRTARRRYTRRKNRICYLQEIFSNEMAKVDDSFFHRLEESFLVEED | |
| | KKHERHPIFGNIVDEVAYHEKYPTIYHLRKKLVDSTDKADLRLIYLALAHMIKFRGHFLI | |
| | EGDLNPDNSDVDKLFIQLVQTYNQLFEENPINASGVDAKAILSARLSKSRRLENLIAQLP | |
| | GEKKNGLFGNLIALSLGLTPNFKSNFDLAEDAKLQLSKDTYDDDLDNLLAQIGDQYADLF | |
| | LAAKNLSDAILLSDILRVNTEITKAPLSASMIKRYDEHHQDLTLLKALVRQQLPEKYKEI | |
| | FFDQSKNGYAGYIDGGASQEEFYKFIKPILEKMDGTEELLVKLNREDLLRKQRTFDNGSI | |
| | PHQIHLGELHAILRRQEDFYPFLKDNREKIEKILTFRIPYYVGPLARGNSRFAWMTRKSE | |
| | ETITPWNFEEVVDKGASAQSFIERMTNFDKNLPNEKVLPKHSLLYEYFTVYNELTKVKYV | |
| | TEGMRKPAFLSGEQKKAIVDLLFKTNRKVTVKQLKEDYFKKIECFDSVEISGVEDRFNAS | |
| | LGTYHDLLKIIKDKDFLDNEENEDILEDIVLTLTLFEDREMIEERLKTYAHLFDDKVMKQ | |
| | LKRRRYTGWGRLSRKLINGIRDKQSGKTILDFLKSDGFANRNFMQLIHDDSLTFKEDIQK | |
| | AQVSGQGDSLHEHIANLAGSPAIKKGILQTVKVVDELVKVMGRHKPENIVIEMARENQTT | |
| | QKGQKNSRERMKRIEEGIKELGSQILKEHPVENTQLQNEKLYLYYLQNGRDMYVDQELDI | |
| | NRLSDYDVDHIVPQSFLKDDSIDNKVLTRSDKARGKSDNVPSEEVVKKMKNYWRQLLNAK | |
| | LITQRKFDNLTKAERGGLSELDKAGFIKRQLVETRQITKHVAQILDSRMNTKYDENDKLI | |
| | REVKVITLKSKLVSDFRKDFQFYKVREINNYHHAHDAYLNAVVGTALIKKYPKLESEFVY | |
| | GDYKVYDVRKMIAKSEQEIGKATAKYFFYSNIMNFFKTEITLANGEIRKRPLIETNGETG | |
| | EIVWDKGRDFATVRKVLSMPQVNIVKKTEVQTGGFSKESILPKRNSDKLIARKKDWDPKK | |
| | YGGFDSPTVAYSVLVVAKVEKGKSKKLKSVKELLGITIMERSSFEKNPIDFLEAKGYKEV | |
| | KKDLIIKLPKYSLFELENGRKRMLASAGELQKGNELALPSKYVNFLYLASHYEKLKGSPE | |
| | DNEQKQLFVEQHKHYLDEIIEQISEFSKRVILADANLDKVLSAYNKHRDKPIREQAENII | |
| | HLFTLTNLGAPAAFKYFDTTIDRKRYTSTKEVLDATLIHQSITGLYETRIDLSQLGGDAE | |
| | AAAKEAAAKEAAAKEAAAKALEAEAAAKEAAAKEAAAKEAAAKAMASNFTQFVLVDNGGT | |
| | GDVTVAPSNFANGIAEWISSNSRSQAYKVTCSVRQSSAQNRKYTIKVEVPKGAWRSYLNM | |
| | ELTIPIFATNSDCELIVKAMQGLLKDGNPIPSAIAANSGIYGGSGGSMASNFTQFVLVDN | |
| | GGTGDVTVAPSNFANGIAEWISSNSRSQAYKVTCSVRQSSAQNRKYTIKVEVPKGAWRSY | |
| | LNMELTIPIFATNSDCELIVKAMQGLLKDGNPIPSAIAANSGIYKRTADGSEFESPKKKA | |
| | KVE | |
| PL24670 | MPAAKRVKLDGGTAPLEEEYRLFLEAPIQNVTLLEQWKREIPKVWAEINPPGLASTQAPI | 17003 |
| | HVQLLSTALPVRVRQYPITLEAKRSLRETIRKFRAAGILRPVHSPWNTPLLPVRKSGTSE | |
| | YRMVQDLREVNKRVETIHPTVPNPYTLLSLLPPDRIWYSVLDLKDAFFCIPLAPESQLIF | |
| | AFEWADAEEGESGQLTWTRLPQGFKNSPTLFNEALNRDLQGFRLDHPSVSLLQYVDDLLI | |
| | AADTQAACLSATRDLLMTLAELGYRVSGKKAQLCQEEVTYLGFKIHKGSRSLSNSRTQAI | |
| | LQIPVPKTKRQVREFLGKIGYCRLFIPGFAELAQPLYAATRPGNDPLVWGEKEEEAFQSL | |
| | KLALTQPPALALPSLDKPFQLFVEETSGAAKGVLTQALGPWKRPVAYLSKRLDPVAAGWP | |
| | RCLRAIAAAALLTREASKLTFGQDIEITSSHNLESLLRSPPDKWLTNARITQYQVLLLDP | |
| | PRVRFKQTAALNPATLLPETDDTLPIHHCLDTLDSLTSTRPDLTDQPLAQAEATLFTDGS | |
| | SYIRDGKRYAGAAVVTLDSVIWAEPLPIGTSAQKAELIALTKALEWSKDKSVNIYTDSRY | |
| | AFATLHVHGMIYRERGWLTAGGKAIKNAPEILALLTAVWLPKRVAVMHCKGHQKDDAPTS | |
| | TGNRRADEVAREVAIRPLSTQATISAEAAAKEAAAKEAAAKEAAAKALEAEAAAKEAAAK | |
| | EAAAKEAAAKADKKYSIGLDIGTNSVGWAVITDEYKVPSKKFKVLGNTDRHSIKKNLIGA | |
| | LLFDSGETAEATRLKRTARRRYTRRKNRICYLQEIFSNEMAKVDDSFFHRLEESFLVEED | |
| | KKHERHPIFGNIVDEVAYHEKYPTIYHLRKKLVDSTDKADLRLIYLALAHMIKFRGHFLI | |
| | EGDLNPDNSDVDKLFIQLVQTYNQLFEENPINASGVDAKAILSARLSKSRRLENLIAQLP | |
| | GEKKNGLFGNLIALSLGLTPNFKSNFDLAEDAKLQLSKDTYDDDLDNLLAQIGDQYADLF | |
| | LAAKNLSDAILLSDILRVNTEITKAPLSASMIKRYDEHHQDLTLLKALVRQQLPEKYKEI | |
| | FFDQSKNGYAGYIDGGASQEEFYKFIKPILEKMDGTEELLVKLNREDLLRKQRTFDNGSI | |
| | PHQIHLGELHAILRRQEDFYPFLKDNREKIEKILTFRIPYYVGPLARGNSRFAWMTRKSE | |
| | ETITPWNFEEVVDKGASAQSFIERMTNFDKNLPNEKVLPKHSLLYEYFTVYNELTKVKYV | |
| | TEGMRKPAFLSGEQKKAIVDLLFKTNRKVTVKQLKEDYFKKIECFDSVEISGVEDRFNAS | |
| | LGTYHDLLKIIKDKDFLDNEENEDILEDIVLTLTLFEDREMIEERLKTYAHLFDDKVMKQ | |
| | LKRRRYTGWGRLSRKLINGIRDKQSGKTILDFLKSDGFANRNFMQLIHDDSLTFKEDIQK | |
| | AQVSGQGDSLHEHIANLAGSPAIKKGILQTVKVVDELVKVMGRHKPENIVIEMARENQTT | |
| | QKGQKNSRERMKRIEEGIKELGSQILKEHPVENTQLQNEKLYLYYLQNGRDMYVDQELDI | |
| | NRLSDYDVDHIVPQSFLKDDSIDNKVLTRSDKARGKSDNVPSEEVVKKMKNYWRQLLNAK | |
| | LITQRKFDNLTKAERGGLSELDKAGFIKRQLVETRQITKHVAQILDSRMNTKYDENDKLI | |
| | REVKVITLKSKLVSDFRKDFQFYKVREINNYHHAHDAYLNAVVGTALIKKYPKLESEFVY | |
| | GDYKVYDVRKMIAKSEQEIGKATAKYFFYSNIMNFFKTEITLANGEIRKRPLIETNGETG | |
| | EIVWDKGRDFATVRKVLSMPQVNIVKKTEVQTGGFSKESILPKRNSDKLIARKKDWDPKK | |
| | YGGFDSPTVAYSVLVVAKVEKGKSKKLKSVKELLGITIMERSSFEKNPIDFLEAKGYKEV | |
| | KKDLIIKLPKYSLFELENGRKRMLASAGELQKGNELALPSKYVNFLYLASHYEKLKGSPE | |
| | DNEQKQLFVEQHKHYLDEIIEQISEFSKRVILADANLDKVLSAYNKHRDKPIREQAENII | |
| | HLFTLTNLGAPAAFKYFDTTIDRKRYTSTKEVLDATLIHQSITGLYETRIDLSQLGGDAE | |
| | AAAKEAAAKEAAAKEAAAKALEAEAAAKEAAAKEAAAKEAAAKAMASNFTQFVLVDNGGT | |
| | GDVTVAPSNFANGIAEWISSNSRSQAYKVTCSVRQSSAQNRKYTIKVEVPKGAWRSYLNM | |
| | ELTIPIFATNSDCELIVKAMQGLLKDGNPIPSAIAANSGIYANFTQFVLVDNGGTGDVTV | |
| | APSNFANGIAEWISSNSRSQAYKVTCSVRQSSAQNRKYTIKVEVPKGAWRSYLNMELTIP | |
| | IFATNSDCELIVKAMQGLLKDGNPIPSAIAANSGIYKRTADGSEFESPKKKAKVE | |
| PL24671 | MPAAKRVKLDGGTAPLEEEYRLFLEAPIQNVTLLEQWKREIPKVWAEINPPGLASTQAPI | 17004 |
| | HVQLLSTALPVRVRQYPITLEAKRSLRETIRKFRAAGILRPVHSPWNTPLLPVRKSGTSE | |
| | YRMVQDLREVNKRVETIHPTVPNPYTLLSLLPPDRIWYSVLDLKDAFFCIPLAPESQLIF | |
| | AFEWADAEEGESGQLTWTRLPQGFKNSPTLFNEALNRDLQGFRLDHPSVSLLQYVDDLLI | |
| | AADTQAACLSATRDLLMTLAELGYRVSGKKAQLCQEEVTYLGFKIHKGSRSLSNSRTQAI | |
| | LQIPVPKTKRQVREFLGKIGYCRLFIPGFAELAQPLYAATRPGNDPLVWGEKEEEAFQSL | |
| | KLALTQPPALALPSLDKPFQLFVEETSGAAKGVLTQALGPWKRPVAYLSKRLDPVAAGWP | |
| | RCLRAIAAAALLTREASKLTFGQDIEITSSHNLESLLRSPPDKWLTNARITQYQVLLLDP | |
| | PRVRFKQTAALNPATLLPETDDTLPIHHCLDTLDSLTSTRPDLTDQPLAQAEATLFTDGS | |
| | SYIRDGKRYAGAAVVTLDSVIWAEPLPIGTSAQKAELIALTKALEWSKDKSVNIYTDSRY | |
| | AFATLHVHGMIYRERGWLTAGGKAIKNAPEILALLTAVWLPKRVAVMHCKGHQKDDAPTS | |
| | TGNRRADEVAREVAIRPLSTQATISAEAAAKEAAAKEAAAKEAAAKALEAEAAAKEAAAK | |
| | EAAAKEAAAKADKKYSIGLDIGTNSVGWAVITDEYKVPSKKFKVLGNTDRHSIKKNLIGA | |
| | LLFDSGETAEATRLKRTARRRYTRRKNRICYLQEIFSNEMAKVDDSFFHRLEESFLVEED | |
| | KKHERHPIFGNIVDEVAYHEKYPTIYHLRKKLVDSTDKADLRLIYLALAHMIKFRGHFLI | |
| | EGDLNPDNSDVDKLFIQLVQTYNQLFEENPINASGVDAKAILSARLSKSRRLENLIAQLP | |
| | GEKKNGLFGNLIALSLGLTPNFKSNFDLAEDAKLQLSKDTYDDDLDNLLAQIGDQYADLF | |
| | LAAKNLSDAILLSDILRVNTEITKAPLSASMIKRYDEHHQDLTLLKALVRQQLPEKYKEI | |
| | FFDQSKNGYAGYIDGGASQEEFYKFIKPILEKMDGTEELLVKLNREDLLRKQRTFDNGSI | |
| | PHQIHLGELHAILRRQEDFYPFLKDNREKIEKILTFRIPYYVGPLARGNSRFAWMTRKSE | |
| | ETITPWNFEEVVDKGASAQSFIERMTNFDKNLPNEKVLPKHSLLYEYFTVYNELTKVKYV | |
| | TEGMRKPAFLSGEQKKAIVDLLFKTNRKVTVKQLKEDYFKKIECFDSVEISGVEDRFNAS | |
| | LGTYHDLLKIIKDKDFLDNEENEDILEDIVLTLTLFEDREMIEERLKTYAHLFDDKVMKQ | |
| | LKRRRYTGWGRLSRKLINGIRDKQSGKTILDFLKSDGFANRNFMQLIHDDSLTFKEDIQK | |
| | AQVSGQGDSLHEHIANLAGSPAIKKGILQTVKVVDELVKVMGRHKPENIVIEMARENQTT | |
| | QKGQKNSRERMKRIEEGIKELGSQILKEHPVENTQLQNEKLYLYYLQNGRDMYVDQELDI | |
| | NRLSDYDVDHIVPQSFLKDDSIDNKVLTRSDKARGKSDNVPSEEVVKKMKNYWRQLLNAK | |
| | LITQRKFDNLTKAERGGLSELDKAGFIKRQLVETRQITKHVAQILDSRMNTKYDENDKLI | |
| | REVKVITLKSKLVSDFRKDFQFYKVREINNYHHAHDAYLNAVVGTALIKKYPKLESEFVY | |
| | GDYKVYDVRKMIAKSEQEIGKATAKYFFYSNIMNFFKTEITLANGEIRKRPLIETNGETG | |
| | EIVWDKGRDFATVRKVLSMPQVNIVKKTEVQTGGFSKESILPKRNSDKLIARKKDWDPKK | |
| | YGGFDSPTVAYSVLVVAKVEKGKSKKLKSVKELLGITIMERSSFEKNPIDFLEAKGYKEV | |
| | KKDLIIKLPKYSLFELENGRKRMLASAGELQKGNELALPSKYVNFLYLASHYEKLKGSPE | |
| | DNEQKQLFVEQHKHYLDEIIEQISEFSKRVILADANLDKVLSAYNKHRDKPIREQAENII | |
| | HLFTLTNLGAPAAFKYFDTTIDRKRYTSTKEVLDATLIHQSITGLYETRIDLSQLGGDAE | |
| | AAAKEAAAKEAAAKEAAAKALEAEAAAKEAAAKEAAAKEAAAKAMASNFTQFVLVDNGGT | |
| | GDVTVAPSNFANGIAEWISSNSRSQAYKVTCSVRQSSAQNRKYTIKVEVPKGAWRSYLNM | |
| | ELTIPIFATNSDCELIVKAMQGLLKDGNPIPSAIAANSGIYGGSGGSMASNFTQFVLVDN | |
| | GGTGDVTVAPSNFANGIAEWISSNSRSQAYKVTCSVRQSSAQNRKYTIKVEVPKGAWRSY | |
| | LNMELTIPIFATNSDCELIVKAMQGLLKDGNPIPSAIAANSGIYGGGSGGGSGGGSGGGS | |
| | MASNFTQFVLVDNGGTGDVTVAPSNFANGIAEWISSNSRSQAYKVTCSVRQSSAQNRKYT | |
| | IKVEVPKGAWRSYLNMELTIPIFATNSDCELIVKAMQGLLKDGNPIPSAIAANSGIYGGS | |
| | GGSMASNFTQFVLVDNGGTGDVTVAPSNFANGIAEWISSNSRSQAYKVTCSVRQSSAQNR | |
| | KYTIKVEVPKGAWRSYLNMELTIPIFATNSDCELIVKAMQGLLKDGNPIPSAIAANSGIY | |
| | KRTADGSEFESPKKKAKVE | |
| PL24672 | MPAAKRVKLDGGTAPLEEEYRLFLEAPIQNVTLLEQWKREIPKVWAEINPPGLASTQAPI | 17005 |
| | HVQLLSTALPVRVRQYPITLEAKRSLRETIRKFRAAGILRPVHSPWNTPLLPVRKSGTSE | |
| | YRMVQDLREVNKRVETIHPTVPNPYTLLSLLPPDRIWYSVLDLKDAFFCIPLAPESQLIF | |
| | AFEWADAEEGESGQLTWTRLPQGFKNSPTLFNEALNRDLQGFRLDHPSVSLLQYVDDLLI | |
| | AADTQAACLSATRDLLMTLAELGYRVSGKKAQLCQEEVTYLGFKIHKGSRSLSNSRTQAI | |
| | LQIPVPKTKRQVREFLGKIGYCRLFIPGFAELAQPLYAATRPGNDPLVWGEKEEEAFQSL | |
| | KLALTQPPALALPSLDKPFQLFVEETSGAAKGVLTQALGPWKRPVAYLSKRLDPVAAGWP | |
| | RCLRAIAAAALLTREASKLTFGQDIEITSSHNLESLLRSPPDKWLTNARITQYQVLLLDP | |
| | PRVRFKQTAALNPATLLPETDDTLPIHHCLDTLDSLTSTRPDLTDQPLAQAEATLFTDGS | |
| | SYIRDGKRYAGAAVVTLDSVIWAEPLPIGTSAQKAELIALTKALEWSKDKSVNIYTDSRY | |
| | AFATLHVHGMIYRERGWLTAGGKAIKNAPEILALLTAVWLPKRVAVMHCKGHQKDDAPTS | |
| | TGNRRADEVAREVAIRPLSTQATISAEAAAKEAAAKEAAAKEAAAKALEAEAAAKEAAAK | |
| | EAAAKEAAAKADKKYSIGLDIGTNSVGWAVITDEYKVPSKKFKVLGNTDRHSIKKNLIGA | |
| | LLFDSGETAEATRLKRTARRRYTRRKNRICYLQEIFSNEMAKVDDSFFHRLEESFLVEED | |
| | KKHERHPIFGNIVDEVAYHEKYPTIYHLRKKLVDSTDKADLRLIYLALAHMIKFRGHFLI | |
| | EGDLNPDNSDVDKLFIQLVQTYNQLFEENPINASGVDAKAILSARLSKSRRLENLIAQLP | |
| | GEKKNGLFGNLIALSLGLTPNFKSNFDLAEDAKLQLSKDTYDDDLDNLLAQIGDQYADLF | |
| | LAAKNLSDAILLSDILRVNTEITKAPLSASMIKRYDEHHQDLTLLKALVRQQLPEKYKEI | |
| | FFDQSKNGYAGYIDGGASQEEFYKFIKPILEKMDGTEELLVKLNREDLLRKQRTFDNGSI | |
| | PHQIHLGELHAILRRQEDFYPFLKDNREKIEKILTFRIPYYVGPLARGNSRFAWMTRKSE | |
| | ETITPWNFEEVVDKGASAQSFIERMTNFDKNLPNEKVLPKHSLLYEYFTVYNELTKVKYV | |
| | TEGMRKPAFLSGEQKKAIVDLLFKTNRKVTVKQLKEDYFKKIECFDSVEISGVEDRFNAS | |
| | LGTYHDLLKIIKDKDFLDNEENEDILEDIVLTLTLFEDREMIEERLKTYAHLFDDKVMKQ | |
| | LKRRRYTGWGRLSRKLINGIRDKQSGKTILDFLKSDGFANRNFMQLIHDDSLTFKEDIQK | |
| | AQVSGQGDSLHEHIANLAGSPAIKKGILQTVKVVDELVKVMGRHKPENIVIEMARENQTT | |
| | QKGQKNSRERMKRIEEGIKELGSQILKEHPVENTQLQNEKLYLYYLQNGRDMYVDQELDI | |
| | NRLSDYDVDHIVPQSFLKDDSIDNKVLTRSDKARGKSDNVPSEEVVKKMKNYWRQLLNAK | |
| | LITQRKFDNLTKAERGGLSELDKAGFIKRQLVETRQITKHVAQILDSRMNTKYDENDKLI | |
| | REVKVITLKSKLVSDFRKDFQFYKVREINNYHHAHDAYLNAVVGTALIKKYPKLESEFVY | |
| | GDYKVYDVRKMIAKSEQEIGKATAKYFFYSNIMNFFKTEITLANGEIRKRPLIETNGETG | |
| | EIVWDKGRDFATVRKVLSMPQVNIVKKTEVQTGGFSKESILPKRNSDKLIARKKDWDPKK | |
| | YGGFDSPTVAYSVLVVAKVEKGKSKKLKSVKELLGITIMERSSFEKNPIDFLEAKGYKEV | |
| | KKDLIIKLPKYSLFELENGRKRMLASAGELQKGNELALPSKYVNFLYLASHYEKLKGSPE | |
| | DNEQKQLFVEQHKHYLDEIIEQISEFSKRVILADANLDKVLSAYNKHRDKPIREQAENII | |
| | HLFTLTNLGAPAAFKYFDTTIDRKRYTSTKEVLDATLIHQSITGLYETRIDLSQLGGDAE | |
| | AAAKEAAAKEAAAKEAAAKALEAEAAAKEAAAKEAAAKEAAAKAMASNFTQFVLVDNGGT | |
| | GDVTVAPSNFANGIAEWISSNSRSQAYKVTCSVRQSSAQNRKYTIKVEVPKGAWRSYLNM | |
| | ELTIPIFATNSDCELIVKAMQGLLKDGNPIPSAIAANSGIYANFTQFVLVDNGGTGDVTV | |
| | APSNFANGIAEWISSNSRSQAYKVTCSVRQSSAQNRKYTIKVEVPKGAWRSYLNMELTIP | |
| | IFATNSDCELIVKAMQGLLKDGNPIPSAIAANSGIYGGGSGGGSGGGSGGGSMASNFTQF | |
| | VLVDNGGTGDVTVAPSNFANGIAEWISSNSRSQAYKVTCSVRQSSAQNRKYTIKVEVPKG | |
| | AWRSYLNMELTIPIFATNSDCELIVKAMQGLLKDGNPIPSAIAANSGIYANFTQFVLVDN | |
| | GGTGDVTVAPSNFANGIAEWISSNSRSQAYKVTCSVRQSSAQNRKYTIKVEVPKGAWRSY | |
| | LNMELTIPIFATNSDCELIVKAMQGLLKDGNPIPSAIAANSGIYKRTADGSEFESPKKKA | |
| | KVE | |

TABLE S6
Exemplary gene modifying sequences for Configuration 2
(i.e., (RBP repeat)ₙ - linker - RT - linker - Cas9)

| | | SEQ |
|---|---|---|
| | | ID |
| Identifier | Full Amino Acid Sequence | NO: |
| PL24673 | MPAAKRVKLDGGMASNFTQFVLVDNGGTGDVTVAPSNFANGIAEWISSNSRSQAY | 17006 |
| | KVTCSVRQSSAQNRKYTIKVEVPKGAWRSYLNMELTIPIFATNSDCELIVKAMQG | |
| | LLKDGNPIPSAIAANSGIYAEAAAKEAAAKEAAAKEAAAKALEAEAAAKEAAAKE | |
| | AAAKEAAAKATAPLEEEYRLFLEAPIQNVTLLEQWKREIPKVWAEINPPGLASTQ | |
| | APIHVQLLSTALPVRVRQYPITLEAKRSLRETIRKFRAAGILRPVHSPWNTPLLP | |
| | VRKSGTSEYRMVQDLREVNKRVETIHPTVPNPYTLLSLLPPDRIWYSVLDLKDAF | |
| | FCIPLAPESQLIFAFEWADAEEGESGQLTWTRLPQGFKNSPTLFNEALNRDLQGF | |
| | RLDHPSVSLLQYVDDLLIAADTQAACLSATRDLLMTLAELGYRVSGKKAQLCQEE | |
| | VTYLGFKIHKGSRSLSNSRTQAILQIPVPKTKRQVREFLGKIGYCRLFIPGFAEL | |
| | AQPLYAATRPGNDPLVWGEKEEEAFQSLKLALTQPPALALPSLDKPFQLFVEETS | |
| | GAAKGVLTQALGPWKRPVAYLSKRLDPVAAGWPRCLRAIAAAALLTREASKLTFG | |
| | QDIEITSSHNLESLLRSPPDKWLTNARITQYQVLLLDPPRVRFKQTAALNPATLL | |
| | PETDDTLPIHHCLDTLDSLTSTRPDLTDQPLAQAEATLFTDGSSYIRDGKRYAGA | |
| | AVVTLDSVIWAEPLPIGTSAQKAELIALTKALEWSKDKSVNIYTDSRYAFATLHV | |
| | HGMIYRERGWLTAGGKAIKNAPEILALLTAVWLPKRVAVMHCKGHQKDDAPTSTG | |
| | NRRADEVAREVAIRPLSTQATISAEAAAKEAAAKEAAAKEAAAKALEAEAAAKEA | |
| | AAKEAAAKEAAAKADKKYSIGLDIGTNSVGWAVITDEYKVPSKKFKVLGNTDRHS | |
| | IKKNLIGALLFDSGETAEATRLKRTARRRYTRRKNRICYLQEIFSNEMAKVDDSF | |
| | FHRLEESFLVEEDKKHERHPIFGNIVDEVAYHEKYPTIYHLRKKLVDSTDKADLR | |
| | LIYLALAHMIKFRGHFLIEGDLNPDNSDVDKLFIQLVQTYNQLFEENPINASGVD | |
| | AKAILSARLSKSRRLENLIAQLPGEKKNGLFGNLIALSLGLTPNFKSNFDLAEDA | |
| | KLQLSKDTYDDDLDNLLAQIGDQYADLFLAAKNLSDAILLSDILRVNTEITKAPL | |
| | SASMIKRYDEHHQDLTLLKALVRQQLPEKYKEIFFDQSKNGYAGYIDGGASQEEF | |
| | YKFIKPILEKMDGTEELLVKLNREDLLRKQRTFDNGSIPHQIHLGELHAILRRQE | |
| | DFYPFLKDNREKIEKILTFRIPYYVGPLARGNSRFAWMTRKSEETITPWNFEEVV | |
| | DKGASAQSFIERMTNFDKNLPNEKVLPKHSLLYEYFTVYNELTKVKYVTEGMRKP | |
| | AFLSGEQKKAIVDLLFKTNRKVTVKQLKEDYFKKIECFDSVEISGVEDRFNASLG | |
| | TYHDLLKIIKDKDFLDNEENEDILEDIVLTLTLFEDREMIEERLKTYAHLFDDKV | |
| | MKQLKRRRYTGWGRLSRKLINGIRDKQSGKTILDFLKSDGFANRNFMQLIHDDSL | |
| | TFKEDIQKAQVSGQGDSLHEHIANLAGSPAIKKGILQTVKVVDELVKVMGRHKPE | |
| | NIVIEMARENQTTQKGQKNSRERMKRIEEGIKELGSQILKEHPVENTQLQNEKLY | |
| | LYYLQNGRDMYVDQELDINRLSDYDVDHIVPQSFLKDDSIDNKVLTRSDKARGKS | |
| | DNVPSEEVVKKMKNYWRQLLNAKLITQRKFDNLTKAERGGLSELDKAGFIKRQLV | |
| | ETRQITKHVAQILDSRMNTKYDENDKLIREVKVITLKSKLVSDFRKDFQFYKVRE | |
| | INNYHHAHDAYLNAVVGTALIKKYPKLESEFVYGDYKVYDVRKMIAKSEQEIGKA | |
| | TAKYFFYSNIMNFFKTEITLANGEIRKRPLIETNGETGEIVWDKGRDFATVRKVL | |
| | SMPQVNIVKKTEVQTGGFSKESILPKRNSDKLIARKKDWDPKKYGGFDSPTVAYS | |
| | VLVVAKVEKGKSKKLKSVKELLGITIMERSSFEKNPIDFLEAKGYKEVKKDLIIK | |
| | LPKYSLFELENGRKRMLASAGELQKGNELALPSKYVNFLYLASHYEKLKGSPEDN | |
| | EQKQLFVEQHKHYLDEIIEQISEFSKRVILADANLDKVLSAYNKHRDKPIREQAE | |
| | NIIHLFTLTNLGAPAAFKYFDTTIDRKRYTSTKEVLDATLIHQSITGLYETRIDL | |
| | SQLGGDKRTADGSEFESPKKKAKVE | |
| PL24674 | MPAAKRVKLDGGMASNFTQFVLVDNGGTGDVTVAPSNFANGIAEWISSNSRSQAY | 17007 |
| | KVTCSVRQSSAQNRKYTIKVEVPKGAWRSYLNMELTIPIFATNSDCELIVKAMQG | |
| | LLKDGNPIPSAIAANSGIYGGSGGSMASNFTQFVLVDNGGTGDVTVAPSNFANGI | |
| | AEWISSNSRSQAYKVTCSVRQSSAQNRKYTIKVEVPKGAWRSYLNMELTIPIFAT | |
| | NSDCELIVKAMQGLLKDGNPIPSAIAANSGIYAEAAAKEAAAKEAAAKEAAAKAL | |
| | EAEAAAKEAAAKEAAAKEAAAKATAPLEEEYRLFLEAPIQNVTLLEQWKREIPKV | |
| | WAEINPPGLASTQAPIHVQLLSTALPVRVRQYPITLEAKRSLRETIRKFRAAGIL | |
| | RPVHSPWNTPLLPVRKSGTSEYRMVQDLREVNKRVETIHPTVPNPYTLLSLLPPD | |
| | RIWYSVLDLKDAFFCIPLAPESQLIFAFEWADAEEGESGQLTWTRLPQGFKNSPT | |
| | LFNEALNRDLQGFRLDHPSVSLLQYVDDLLIAADTQAACLSATRDLLMTLAELGY | |
| | RVSGKKAQLCQEEVTYLGFKIHKGSRSLSNSRTQAILQIPVPKTKRQVREFLGKI | |
| | GYCRLFIPGFAELAQPLYAATRPGNDPLVWGEKEEEAFQSLKLALTQPPALALPS | |
| | LDKPFQLFVEETSGAAKGVLTQALGPWKRPVAYLSKRLDPVAAGWPRCLRAIAAA | |
| | ALLTREASKLTFGQDIEITSSHNLESLLRSPPDKWLTNARITQYQVLLLDPPRVR | |
| | FKQTAALNPATLLPETDDTLPIHHCLDTLDSLTSTRPDLTDQPLAQAEATLFTDG | |
| | SSYIRDGKRYAGAAVVTLDSVIWAEPLPIGTSAQKAELIALTKALEWSKDKSVNI | |
| | YTDSRYAFATLHVHGMIYRERGWLTAGGKAIKNAPEILALLTAVWLPKRVAVMHC | |
| | KGHQKDDAPTSTGNRRADEVAREVAIRPLSTQATISAEAAAKEAAAKEAAAKEAA | |
| | AKALEAEAAAKEAAAKEAAAKEAAAKADKKYSIGLDIGTNSVGWAVITDEYKVPS | |
| | KKFKVLGNTDRHSIKKNLIGALLFDSGETAEATRLKRTARRRYTRRKNRICYLQE | |
| | IFSNEMAKVDDSFFHRLEESFLVEEDKKHERHPIFGNIVDEVAYHEKYPTIYHLR | |
| | KKLVDSTDKADLRLIYLALAHMIKFRGHFLIEGDLNPDNSDVDKLFIQLVQTYNQ | |
| | LFEENPINASGVDAKAILSARLSKSRRLENLIAQLPGEKKNGLFGNLIALSLGLT | |
| | PNFKSNFDLAEDAKLQLSKDTYDDDLDNLLAQIGDQYADLFLAAKNLSDAILLSD | |
| | ILRVNTEITKAPLSASMIKRYDEHHQDLTLLKALVRQQLPEKYKEIFFDQSKNGY | |
| | AGYIDGGASQEEFYKFIKPILEKMDGTEELLVKLNREDLLRKQRTFDNGSIPHQI | |
| | HLGELHAILRRQEDFYPFLKDNREKIEKILTFRIPYYVGPLARGNSRFAWMTRKS | |
| | EETITPWNFEEVVDKGASAQSFIERMTNFDKNLPNEKVLPKHSLLYEYFTVYNEL | |
| | TKVKYVTEGMRKPAFLSGEQKKAIVDLLFKTNRKVTVKQLKEDYFKKIECFDSVE | |
| | ISGVEDRFNASLGTYHDLLKIIKDKDFLDNEENEDILEDIVLTLTLFEDREMIEE | |
| | RLKTYAHLFDDKVMKQLKRRRYTGWGRLSRKLINGIRDKQSGKTILDFLKSDGFA | |
| | NRNFMQLIHDDSLTFKEDIQKAQVSGQGDSLHEHIANLAGSPAIKKGILQTVKVV | |
| | DELVKVMGRHKPENIVIEMARENQTTQKGQKNSRERMKRIEEGIKELGSQILKEH | |
| | PVENTQLQNEKLYLYYLQNGRDMYVDQELDINRLSDYDVDHIVPQSFLKDDSIDN | |
| | KVLTRSDKARGKSDNVPSEEVVKKMKNYWRQLLNAKLITQRKFDNLTKAERGGLS | |
| | ELDKAGFIKRQLVETRQITKHVAQILDSRMNTKYDENDKLIREVKVITLKSKLVS | |
| | DFRKDFQFYKVREINNYHHAHDAYLNAVVGTALIKKYPKLESEFVYGDYKVYDVR | |
| | KMIAKSEQEIGKATAKYFFYSNIMNFFKTEITLANGEIRKRPLIETNGETGEIVW | |
| | DKGRDFATVRKVLSMPQVNIVKKTEVQTGGFSKESILPKRNSDKLIARKKDWDPK | |
| | KYGGFDSPTVAYSVLVVAKVEKGKSKKLKSVKELLGITIMERSSFEKNPIDFLEA | |
| | KGYKEVKKDLIIKLPKYSLFELENGRKRMLASAGELQKGNELALPSKYVNFLYLA | |
| | SHYEKLKGSPEDNEQKQLFVEQHKHYLDEIIEQISEFSKRVILADANLDKVLSAY | |
| | NKHRDKPIREQAENIIHLFTLTNLGAPAAFKYFDTTIDRKRYTSTKEVLDATLIH | |
| | QSITGLYETRIDLSQLGGDKRTADGSEFESPKKKAKVE | |
| PL24675 | MPAAKRVKLDGGMASNFTQFVLVDNGGTGDVTVAPSNFANGIAEWISSNSRSQAY | 17008 |
| | KVTCSVRQSSAQNRKYTIKVEVPKGAWRSYLNMELTIPIFATNSDCELIVKAMQG | |
| | LLKDGNPIPSAIAANSGIYANFTQFVLVDNGGTGDVTVAPSNFANGIAEWISSNS | |
| | RSQAYKVTCSVRQSSAQNRKYTIKVEVPKGAWRSYLNMELTIPIFATNSDCELIV | |
| | KAMQGLLKDGNPIPSAIAANSGIYAEAAAKEAAAKEAAAKEAAAKALEAEAAAKE | |
| | AAAKEAAAKEAAAKATAPLEEEYRLFLEAPIQNVTLLEQWKREIPKVWAEINPPG | |
| | LASTQAPIHVQLLSTALPVRVRQYPITLEAKRSLRETIRKFRAAGILRPVHSPWN | |
| | TPLLPVRKSGTSEYRMVQDLREVNKRVETIHPTVPNPYTLLSLLPPDRIWYSVLD | |
| | LKDAFFCIPLAPESQLIFAFEWADAEEGESGQLTWTRLPQGFKNSPTLFNEALNR | |
| | DLQGFRLDHPSVSLLQYVDDLLIAADTQAACLSATRDLLMTLAELGYRVSGKKAQ | |
| | LCQEEVTYLGFKIHKGSRSLSNSRTQAILQIPVPKTKRQVREFLGKIGYCRLFIP | |
| | GFAELAQPLYAATRPGNDPLVWGEKEEEAFQSLKLALTQPPALALPSLDKPFQLF | |
| | VEETSGAAKGVLTQALGPWKRPVAYLSKRLDPVAAGWPRCLRAIAAAALLTREAS | |
| | KLTFGQDIEITSSHNLESLLRSPPDKWLTNARITQYQVLLLDPPRVRFKQTAALN | |
| | PATLLPETDDTLPIHHCLDTLDSLTSTRPDLTDQPLAQAEATLFTDGSSYIRDGK | |
| | RYAGAAVVTLDSVIWAEPLPIGTSAQKAELIALTKALEWSKDKSVNIYTDSRYAF | |
| | ATLHVHGMIYRERGWLTAGGKAIKNAPEILALLTAVWLPKRVAVMHCKGHQKDDA | |
| | PTSTGNRRADEVAREVAIRPLSTQATISAEAAAKEAAAKEAAAKEAAAKALEAEA | |
| | AAKEAAAKEAAAKEAAAKADKKYSIGLDIGTNSVGWAVITDEYKVPSKKFKVLGN | |
| | TDRHSIKKNLIGALLFDSGETAEATRLKRTARRRYTRRKNRICYLQEIFSNEMAK | |
| | VDDSFFHRLEESFLVEEDKKHERHPIFGNIVDEVAYHEKYPTIYHLRKKLVDSTD | |
| | KADLRLIYLALAHMIKFRGHFLIEGDLNPDNSDVDKLFIQLVQTYNQLFEENPIN | |
| | ASGVDAKAILSARLSKSRRLENLIAQLPGEKKNGLFGNLIALSLGLTPNFKSNFD | |
| | LAEDAKLQLSKDTYDDDLDNLLAQIGDQYADLFLAAKNLSDAILLSDILRVNTEI | |
| | TKAPLSASMIKRYDEHHQDLTLLKALVRQQLPEKYKEIFFDQSKNGYAGYIDGGA | |
| | SQEEFYKFIKPILEKMDGTEELLVKLNREDLLRKQRTFDNGSIPHQIHLGELHAI | |
| | LRRQEDFYPFLKDNREKIEKILTFRIPYYVGPLARGNSRFAWMTRKSEETITPWN | |
| | FEEVVDKGASAQSFIERMTNFDKNLPNEKVLPKHSLLYEYFTVYNELTKVKYVTE | |
| | GMRKPAFLSGEQKKAIVDLLFKTNRKVTVKQLKEDYFKKIECFDSVEISGVEDRF | |
| | NASLGTYHDLLKIIKDKDFLDNEENEDILEDIVLTLTLFEDREMIEERLKTYAHL | |
| | FDDKVMKQLKRRRYTGWGRLSRKLINGIRDKQSGKTILDFLKSDGFANRNFMQLI | |
| | HDDSLTFKEDIQKAQVSGQGDSLHEHIANLAGSPAIKKGILQTVKVVDELVKVMG | |
| | RHKPENIVIEMARENQTTQKGQKNSRERMKRIEEGIKELGSQILKEHPVENTQLQ | |
| | NEKLYLYYLQNGRDMYVDQELDINRLSDYDVDHIVPQSFLKDDSIDNKVLTRSDK | |
| | ARGKSDNVPSEEVVKKMKNYWRQLLNAKLITQRKFDNLTKAERGGLSELDKAGFI | |
| | KRQLVETRQITKHVAQILDSRMNTKYDENDKLIREVKVITLKSKLVSDFRKDFQF | |
| | YKVREINNYHHAHDAYLNAVVGTALIKKYPKLESEFVYGDYKVYDVRKMIAKSEQ | |
| | EIGKATAKYFFYSNIMNFFKTEITLANGEIRKRPLIETNGETGEIVWDKGRDFAT | |
| | VRKVLSMPQVNIVKKTEVQTGGFSKESILPKRNSDKLIARKKDWDPKKYGGFDSP | |
| | TVAYSVLVVAKVEKGKSKKLKSVKELLGITIMERSSFEKNPIDFLEAKGYKEVKK | |
| | DLIIKLPKYSLFELENGRKRMLASAGELQKGNELALPSKYVNFLYLASHYEKLKG | |
| | SPEDNEQKQLFVEQHKHYLDEIIEQISEFSKRVILADANLDKVLSAYNKHRDKPI | |
| | REQAENIIHLFTLTNLGAPAAFKYFDTTIDRKRYTSTKEVLDATLIHQSITGLYE | |
| | TRIDLSQLGGDKRTADGSEFESPKKKAKVE | |
| PL24676 | MPAAKRVKLDGGMASNFTQFVLVDNGGTGDVTVAPSNFANGIAEWISSNSRSQAY | 17009 |
| | KVTCSVRQSSAQNRKYTIKVEVPKGAWRSYLNMELTIPIFATNSDCELIVKAMQG | |
| | LLKDGNPIPSAIAANSGIYGGSGGSMASNFTQFVLVDNGGTGDVTVAPSNFANGI | |
| | AEWISSNSRSQAYKVTCSVRQSSAQNRKYTIKVEVPKGAWRSYLNMELTIPIFAT | |
| | NSDCELIVKAMQGLLKDGNPIPSAIAANSGIYGGGSGGGSGGGSGGGSMASNFTQ | |
| | FVLVDNGGTGDVTVAPSNFANGIAEWISSNSRSQAYKVTCSVRQSSAQNRKYTIK | |
| | VEVPKGAWRSYLNMELTIPIFATNSDCELIVKAMQGLLKDGNPIPSAIAANSGIY | |
| | GGSGGSMASNFTQFVLVDNGGTGDVTVAPSNFANGIAEWISSNSRSQAYKVTCSV | |
| | RQSSAQNRKYTIKVEVPKGAWRSYLNMELTIPIFATNSDCELIVKAMQGLLKDGN | |
| | PIPSAIAANSGIYAEAAAKEAAAKEAAAKEAAAKALEAEAAAKEAAAKEAAAKEA | |
| | AAKATAPLEEEYRLFLEAPIQNVTLLEQWKREIPKVWAEINPPGLASTQAPIHVQ | |
| | LLSTALPVRVRQYPITLEAKRSLRETIRKFRAAGILRPVHSPWNTPLLPVRKSGT | |
| | SEYRMVQDLREVNKRVETIHPTVPNPYTLLSLLPPDRIWYSVLDLKDAFFCIPLA | |
| | PESQLIFAFEWADAEEGESGQLTWTRLPQGFKNSPTLFNEALNRDLQGFRLDHPS | |
| | VSLLQYVDDLLIAADTQAACLSATRDLLMTLAELGYRVSGKKAQLCQEEVTYLGF | |
| | KIHKGSRSLSNSRTQAILQIPVPKTKRQVREFLGKIGYCRLFIPGFAELAQPLYA | |
| | ATRPGNDPLVWGEKEEEAFQSLKLALTQPPALALPSLDKPFQLFVEETSGAAKGV | |
| | LTQALGPWKRPVAYLSKRLDPVAAGWPRCLRAIAAAALLTREASKLTFGQDIEIT | |
| | SSHNLESLLRSPPDKWLTNARITQYQVLLLDPPRVRFKQTAALNPATLLPETDDT | |
| | LPIHHCLDTLDSLTSTRPDLTDQPLAQAEATLFTDGSSYIRDGKRYAGAAVVTLD | |
| | SVIWAEPLPIGTSAQKAELIALTKALEWSKDKSVNIYTDSRYAFATLHVHGMIYR | |
| | ERGWLTAGGKAIKNAPEILALLTAVWLPKRVAVMHCKGHQKDDAPTSTGNRRADE | |
| | VAREVAIRPLSTQATISAEAAAKEAAAKEAAAKEAAAKALEAEAAAKEAAAKEAA | |
| | AKEAAAKADKKYSIGLDIGTNSVGWAVITDEYKVPSKKFKVLGNTDRHSIKKNLI | |
| | GALLFDSGETAEATRLKRTARRRYTRRKNRICYLQEIFSNEMAKVDDSFFHRLEE | |
| | SFLVEEDKKHERHPIFGNIVDEVAYHEKYPTIYHLRKKLVDSTDKADLRLIYLAL | |
| | AHMIKFRGHFLIEGDLNPDNSDVDKLFIQLVQTYNQLFEENPINASGVDAKAILS | |
| | ARLSKSRRLENLIAQLPGEKKNGLFGNLIALSLGLTPNFKSNFDLAEDAKLQLSK | |
| | DTYDDDLDNLLAQIGDQYADLFLAAKNLSDAILLSDILRVNTEITKAPLSASMIK | |
| | RYDEHHQDLTLLKALVRQQLPEKYKEIFFDQSKNGYAGYIDGGASQEEFYKFIKP | |
| | ILEKMDGTEELLVKLNREDLLRKQRTFDNGSIPHQIHLGELHAILRRQEDFYPFL | |
| | KDNREKIEKILTFRIPYYVGPLARGNSRFAWMTRKSEETITPWNFEEVVDKGASA | |
| | QSFIERMTNFDKNLPNEKVLPKHSLLYEYFTVYNELTKVKYVTEGMRKPAFLSGE | |
| | QKKAIVDLLFKTNRKVTVKQLKEDYFKKIECFDSVEISGVEDRFNASLGTYHDLL | |
| | KIIKDKDFLDNEENEDILEDIVLTLTLFEDREMIEERLKTYAHLFDDKVMKQLKR | |
| | RRYTGWGRLSRKLINGIRDKQSGKTILDFLKSDGFANRNFMQLIHDDSLTFKEDI | |
| | QKAQVSGQGDSLHEHIANLAGSPAIKKGILQTVKVVDELVKVMGRHKPENIVIEM | |
| | ARENQTTQKGQKNSRERMKRIEEGIKELGSQILKEHPVENTQLQNEKLYLYYLQN | |
| | GRDMYVDQELDINRLSDYDVDHIVPQSFLKDDSIDNKVLTRSDKARGKSDNVPSE | |
| | EVVKKMKNYWRQLLNAKLITQRKFDNLTKAERGGLSELDKAGFIKRQLVETRQIT | |
| | KHVAQILDSRMNTKYDENDKLIREVKVITLKSKLVSDFRKDFQFYKVREINNYHH | |
| | AHDAYLNAVVGTALIKKYPKLESEFVYGDYKVYDVRKMIAKSEQEIGKATAKYFF | |
| | YSNIMNFFKTEITLANGEIRKRPLIETNGETGEIVWDKGRDFATVRKVLSMPQVN | |
| | IVKKTEVQTGGFSKESILPKRNSDKLIARKKDWDPKKYGGFDSPTVAYSVLVVAK | |
| | VEKGKSKKLKSVKELLGITIMERSSFEKNPIDFLEAKGYKEVKKDLIIKLPKYSL | |
| | FELENGRKRMLASAGELQKGNELALPSKYVNFLYLASHYEKLKGSPEDNEQKQLF | |
| | VEQHKHYLDEIIEQISEFSKRVILADANLDKVLSAYNKHRDKPIREQAENIIHLF | |
| | TLTNLGAPAAFKYFDTTIDRKRYTSTKEVLDATLIHQSITGLYETRIDLSQLGGD | |
| | KRTADGSEFESPKKKAKVE | |
| PL24677 | MPAAKRVKLDGGMASNFTQFVLVDNGGTGDVTVAPSNFANGIAEWISSNSRSQAY | 17010 |
| | KVTCSVRQSSAQNRKYTIKVEVPKGAWRSYLNMELTIPIFATNSDCELIVKAMQG | |
| | LLKDGNPIPSAIAANSGIYANFTQFVLVDNGGTGDVTVAPSNFANGIAEWISSNS | |
| | RSQAYKVTCSVRQSSAQNRKYTIKVEVPKGAWRSYLNMELTIPIFATNSDCELIV | |
| | KAMQGLLKDGNPIPSAIAANSGIYGGGSGGGSGGGSGGGSMASNFTQFVLVDNGG | |
| | TGDVTVAPSNFANGIAEWISSNSRSQAYKVTCSVRQSSAQNRKYTIKVEVPKGAW | |
| | RSYLNMELTIPIFATNSDCELIVKAMQGLLKDGNPIPSAIAANSGIYANFTQFVL | |
| | VDNGGTGDVTVAPSNFANGIAEWISSNSRSQAYKVTCSVRQSSAQNRKYTIKVEV | |
| | PKGAWRSYLNMELTIPIFATNSDCELIVKAMQGLLKDGNPIPSAIAANSGIYAEA | |
| | AAKEAAAKEAAAKEAAAKALEAEAAAKEAAAKEAAAKEAAAKATAPLEEEYRLFL | |
| | EAPIQNVTLLEQWKREIPKVWAEINPPGLASTQAPIHVQLLSTALPVRVRQYPIT | |
| | LEAKRSLRETIRKFRAAGILRPVHSPWNTPLLPVRKSGTSEYRMVQDLREVNKRV | |
| | ETIHPTVPNPYTLLSLLPPDRIWYSVLDLKDAFFCIPLAPESQLIFAFEWADAEE | |
| | GESGQLTWTRLPQGFKNSPTLFNEALNRDLQGFRLDHPSVSLLQYVDDLLIAADT | |
| | QAACLSATRDLLMTLAELGYRVSGKKAQLCQEEVTYLGFKIHKGSRSLSNSRTQA | |
| | ILQIPVPKTKRQVREFLGKIGYCRLFIPGFAELAQPLYAATRPGNDPLVWGEKEE | |
| | EAFQSLKLALTQPPALALPSLDKPFQLFVEETSGAAKGVLTQALGPWKRPVAYLS | |
| | KRLDPVAAGWPRCLRAIAAAALLTREASKLTFGQDIEITSSHNLESLLRSPPDKW | |
| | LTNARITQYQVLLLDPPRVRFKQTAALNPATLLPETDDTLPIHHCLDTLDSLTST | |
| | RPDLTDQPLAQAEATLFTDGSSYIRDGKRYAGAAVVTLDSVIWAEPLPIGTSAQK | |
| | AELIALTKALEWSKDKSVNIYTDSRYAFATLHVHGMIYRERGWLTAGGKAIKNAP | |
| | EILALLTAVWLPKRVAVMHCKGHQKDDAPTSTGNRRADEVAREVAIRPLSTQATI | |
| | SAEAAAKEAAAKEAAAKEAAAKALEAEAAAKEAAAKEAAAKEAAAKADKKYSIGL | |
| | DIGTNSVGWAVITDEYKVPSKKFKVLGNTDRHSIKKNLIGALLFDSGETAEATRL | |
| | KRTARRRYTRRKNRICYLQEIFSNEMAKVDDSFFHRLEESFLVEEDKKHERHPIF | |
| | GNIVDEVAYHEKYPTIYHLRKKLVDSTDKADLRLIYLALAHMIKFRGHFLIEGDL | |
| | NPDNSDVDKLFIQLVQTYNQLFEENPINASGVDAKAILSARLSKSRRLENLIAQL | |
| | PGEKKNGLFGNLIALSLGLTPNFKSNFDLAEDAKLQLSKDTYDDDLDNLLAQIGD | |
| | QYADLFLAAKNLSDAILLSDILRVNTEITKAPLSASMIKRYDEHHQDLTLLKALV | |
| | RQQLPEKYKEIFFDQSKNGYAGYIDGGASQEEFYKFIKPILEKMDGTEELLVKLN | |
| | REDLLRKQRTFDNGSIPHQIHLGELHAILRRQEDFYPFLKDNREKIEKILTFRIP | |
| | YYVGPLARGNSRFAWMTRKSEETITPWNFEEVVDKGASAQSFIERMTNFDKNLPN | |
| | EKVLPKHSLLYEYFTVYNELTKVKYVTEGMRKPAFLSGEQKKAIVDLLFKTNRKV | |
| | TVKQLKEDYFKKIECFDSVEISGVEDRFNASLGTYHDLLKIIKDKDFLDNEENED | |
| | ILEDIVLTLTLFEDREMIEERLKTYAHLFDDKVMKQLKRRRYTGWGRLSRKLING | |
| | IRDKQSGKTILDFLKSDGFANRNFMQLIHDDSLTFKEDIQKAQVSGQGDSLHEHI | |
| | ANLAGSPAIKKGILQTVKVVDELVKVMGRHKPENIVIEMARENQTTQKGQKNSRE | |
| | RMKRIEEGIKELGSQILKEHPVENTQLQNEKLYLYYLQNGRDMYVDQELDINRLS | |
| | DYDVDHIVPQSFLKDDSIDNKVLTRSDKARGKSDNVPSEEVVKKMKNYWRQLLNA | |
| | KLITQRKFDNLTKAERGGLSELDKAGFIKRQLVETRQITKHVAQILDSRMNTKYD | |
| | ENDKLIREVKVITLKSKLVSDFRKDFQFYKVREINNYHHAHDAYLNAVVGTALIK | |
| | KYPKLESEFVYGDYKVYDVRKMIAKSEQEIGKATAKYFFYSNIMNFFKTEITLAN | |
| | GEIRKRPLIETNGETGEIVWDKGRDFATVRKVLSMPQVNIVKKTEVQTGGFSKES | |
| | ILPKRNSDKLIARKKDWDPKKYGGFDSPTVAYSVLVVAKVEKGKSKKLKSVKELL | |
| | GITIMERSSFEKNPIDFLEAKGYKEVKKDLIIKLPKYSLFELENGRKRMLASAGE | |
| | LQKGNELALPSKYVNFLYLASHYEKLKGSPEDNEQKQLFVEQHKHYLDEIIEQIS | |
| | EFSKRVILADANLDKVLSAYNKHRDKPIREQAENIIHLFTLTNLGAPAAFKYFDT | |
| | TIDRKRYTSTKEVLDATLIHQSITGLYETRIDLSQLGGDKRTADGSEFESPKKKA | |
| | KVE | |

### Example 10: Evaluation of Sequence Replacement Activity of Exemplary Gene Modifying Polypeptides Using Trans Template RNAs with a 5-Component System

[1331] This example describes the evaluation of exemplary gene modifying systems having up to five components in the targeted insertion of a 150 nt sequence in the human genome and deletion of a variable number of endogenous nucleotides (referred to herein as replacement). The gene modifying systems each comprise (1) a gene modifying polypeptide generated in Example 3 (and demonstrated to have trans-recruitment and rewrite activity in Examples 7 and 9 of PCT Application PCT/US2022/076064, which is herein incorporated by reference in its entirety), or in Example 9, (2) a trans template RNA (ttRNA) in which the post-edit homology region encompasses the spacer encoded by the 5′ end block of the ttRNA, as depicted in FIG. 10A, (in this example as in ttRNA sequences described in Table S7, PL25358-25379, and PL25351-25357), (3) exemplary gRNA PLV4165, an additional (4) Cas9 or different gene modifying polypeptide molecule recruited to the nicked DNA strand by the trans-template RNA (e.g., by an 5′ end block containing a gRNA spacer), or by (5) its species-matched gRNA.

TABLE S7
Exemplary ttRNA sequences

| | | SEQ |
|---|---|---|
| Identi- | | ID |
| fier | Full Amino Acid Sequence | NO: |
| PL25351 | CGAGGAGCTGTTCACCGGGGGTTTAAGAGCTAGAAATAGCAAGTTTAAATAAGGCTAGTCCGTTATCAACTTGAAAAAGTG | 17011 |
| | GCACCGAGTCGGTGCATGGTGAGCAAGGGCGAGGAGCTGTTCACCGTGGTCGAGCTGGACGGCGACGTAAACGGCCACAAG | |
| | TTCAGCGTGTCCGGCGAGGGCGAGGGCGATGCCACCTACGGCAAGCTGACCCTGAAGTTCATCTGCACCACCGGCAAGCTG | |
| | CCCGTGCCCTGGCCCACCCTCGTGACCACCCTGACGTACGGCGTGCAGTGCTTACATACAACTAACATAgggagcACATGA | |
| | GGATCACCCATGTgcgactcCCACAGTCACTGGGgagtcttccctctctctctctctctctctcgggagcACATGAGGATC | |
| | ACCCATGTgcgactcCCACAGTCACTGGGgagtcttccc | |
| PL25352 | CGAGGAGCTGTTCACCGGGGGTTTAAGAGCTAGAAATAGCAAGTTTAAATAAGGCTAGTCCGTTATCAACTTGAAAAAGTG | 17012 |
| | GCACCGAGTCGGTGCAGCAAGGGCGAGGAGCTGTTCACCGTGGTCGAGCTGGACGGCGACGTAAACGGCCACAAGTTCAGC | |
| | GTGTCCGGCGAGGGCGAGGGCGATGCCACCTACGGCAAGCTGACCCTGAAGTTCATCTGCACCACCGGCAAGCTGCCCGTG | |
| | CCCTGGCCCACCCTCGTGACCACCCTGACGTACGGCGTGCAGTGCTTACATACAACTAACATAgggagcACATGAGGATCA | |
| | CCCATGTgcgactcCCACAGTCACTGGGgagtcttccctctctctctctctctctctcgggagcACATGAGGATCACCCAT | |
| | GTgcgactcCCACAGTCACTGGGgagtcttccc | |
| PL25353 | CGAGGAGCTGTTCACCGGGGGTTTAAGAGCTAGAAATAGCAAGTTTAAATAAGGCTAGTCCGTTATCAACTTGAAAAAGTG | 17013 |
| | GCACCGAGTCGGTGCGGGCGAGGAGCTGTTCACCGTGGTCGAGCTGGACGGCGACGTAAACGGCCACAAGTTCAGCGTGTC | |
| | CGGCGAGGGCGAGGGCGATGCCACCTACGGCAAGCTGACCCTGAAGTTCATCTGCACCACCGGCAAGCTGCCCGTGCCCTG | |
| | GCCCACCCTCGTGACCACCCTGACGTACGGCGTGCAGTGCTTACATACAACTAACATAgggagcACATGAGGATCACCCAT | |
| | GTgcgactcCCACAGTCACTGGGgagtcttccctctctctctctctctctctcgggagcACATGAGGATCACCCATGTgcg | |
| | actcCCACAGTCACTGGGgagtcttccc | |
| PL25354 | CGAGGAGCTGTTCACCGGGGGTTTAAGAGCTAGAAATAGCAAGTTTAAATAAGGCTAGTCCGTTATCAACTTGAAAAAGTG | 17014 |
| | GCACCGAGTCGGTGCCGAGGAGCTGTTCACCGTGGTCGAGCTGGACGGCGACGTAAACGGCCACAAGTTCAGCGTGTCCGG | |
| | CGAGGGCGAGGGCGATGCCACCTACGGCAAGCTGACCCTGAAGTTCATCTGCACCACCGGCAAGCTGCCCGTGCCCTGGCC | |
| | CACCCTCGTGACCACCCTGACGTACGGCGTGCAGTGCTTACATACAACTAACATAgggagcACATGAGGATCACCCATGTg | |
| | cgactcCCACAGTCACTGGGgagtcttccctctctctctctctctctctcgggagcACATGAGGATCACCCATGTgcgact | |
| | CCCACAGTCACTGGGgagtcttccc | |
| PL25355 | CGAGGAGCTGTTCACCGGGGGTTTAAGAGCTAGAAATAGCAAGTTTAAATAAGGCTAGTCCGTTATCAACTTGAAAAAGTG | 17015 |
| | GCACCGAGTCGGTGCGAGCTGTTCACCGTGGTCGAGCTGGACGGCGACGTAAACGGCCACAAGTTCAGCGTGTCCGGCGAG | |
| | GGCGAGGGCGATGCCACCTACGGCAAGCTGACCCTGAAGTTCATCTGCACCACCGGCAAGCTGCCCGTGCCCTGGCCCACC | |
| | CTCGTGACCACCCTGACGTACGGCGTGCAGTGCTTACATACAACTAACATAgggagcACATGAGGATCACCCATGTgcgac | |
| | tcCCACAGTCACTGGGgagtcttccctctctctctctctctctctcgggagcACATGAGGATCACCCATGTgcgactcCCA | |
| | CAGTCACTGGGgagtcttccc | |
| PL25356 | CGAGGAGCTGTTCACCGGGGGTTTAAGAGCTAGAAATAGCAAGTTTAAATAAGGCTAGTCCGTTATCAACTTGAAAAAGTG | 17016 |
| | GCACCGAGTCGGTGCTTCACCGTGGTCGAGCTGGACGGCGACGTAAACGGCCACAAGTTCAGCGTGTCCGGCGAGGGCGAG | |
| | GGCGATGCCACCTACGGCAAGCTGACCCTGAAGTTCATCTGCACCACCGGCAAGCTGCCCGTGCCCTGGCCCACCCTCGTG | |
| | ACCACCCTGACGTACGGCGTGCAGTGCTTACATACAACTAACATAgggagcACATGAGGATCACCCATGTgcgactcCCAC | |
| | AGTCACTGGGgagtcttccctctctctctctctctctctcgggagcACATGAGGATCACCCATGTgcgactcCCACAGTCA | |
| | CTGGGgagtcttccc | |
| PL25357 | CGAGGAGCTGTTCACCGGGGGTTTAAGAGCTAGAAATAGCAAGTTTAAATAAGGCTAGTCCGTTATCAACTTGAAAAAGTG | 17017 |
| | GCACCGAGTCGGTGCATGGTGAGCAAGGGCGAGGAGCTGTTCACCGGGGTGGTGTGGTCGAGCTGGACGGCGACGTAAACG | |
| | GCCACAAGTTCAGCGTGTCCGGCGAGGGCGAGGGCGATGCCACCTACGGCAAGCTGACCCTGAAGTTCATCTGCACCACCG | |
| | GCAAGCTGCCCGTGCCCTGGCCCACCCTCGTGACCACCCTGACGTACGGCGTGCAGTGCTTACATACAACTAACATAggga | |
| | gcACATGAGGATCACCCATGTgcgactcCCACAGTCACTGGGgagtcttccctctctctctctctctctctcgggagcACA | |
| | TGAGGATCACCCATGTgcgactcCCACAGTCACTGGGgagtcttccc | |
| PL25358 | CGAGGAGCTGTTCACCGGGGGTTTAAGAGCTAGAAATAGCAAGTTTAAATAAGGCTAGTCCGTTATCAACTTGAAAAAGTG | 17018 |
| | GCACCGAGTCGGTGCAGGAGCTGTTCACCGGGGTGGTGCCCATCCTGGTCGAGCTGGACGGCGACGTAAACGGCCACAAGT | |
| | TCAGCGTGTCCGGCGAGGGCGAGGGCGATGCCACCTACGGCAAGCTGACCCTGAAGTTCATCTGCACCACCGGCAAGCTGC | |
| | CCGTGCCCTGGCCCACCCTCGTGACCACCCTGACGTACGGCGTGCAGTGCTTACATACAACTAACATAgggagcACATGAG | |
| | GATCACCCATGTgcgactcCCACAGTCACTGGGgagtcttccctctctctctctctctctctcgggagcACATGAGGATCA | |
| | CCCATGTgcgactcCCACAGTCACTGGGgagtcttccc | |
| PL25359 | GGGCGAGGAGCTGTTCACCGGTTTAAGAGCTAGAAATAGCAAGTTTAAATAAGGCTAGTCCGTTATCAACTTGAAAAAGTG | 17019 |
| | GCACCGAGTCGGTGCACCATGGTGAGCAAGGGCGAGGAGCTGTTCACCGGGGTGGTGCCCATGGTCGAGCTGGACGGCGAC | |
| | GTAAACGGCCACAAGTTCAGCGTGTCCGGCGAGGGCGAGGGCGATGCCACCTACGGCAAGCTGACCCTGAAGTTCATCTGC | |
| | ACCACCGGCAAGCTGCCCGTGCCCTGGCCCACCCTCGTGACCACCCTGACGTACGGCGTGCAGTGCTTACATACAACTAAC | |
| | ATAgggagcACATGAGGATCACCCATGTgcgactcCCACAGTCACTGGGgagtcttccctctctctctctctctctctcgg | |
| | gagcACATGAGGATCACCCATGTgcgactcCCACAGTCACTGGGgagtcttccc | |
| PL25360 | GGGCGAGGAGCTGTTCACCGGTTTAAGAGCTAGAAATAGCAAGTTTAAATAAGGCTAGTCCGTTATCAACTTGAAAAAGTG | 17020 |
| | GCACCGAGTCGGTGCAGGGCGAGGAGCTGTTCACCGGGGTGGTGCCCATCCTGGTCGAGCTGGACGGCGACGTAAACGGCC | |
| | ACAAGTTCAGCGTGTCCGGCGAGGGCGAGGGCGATGCCACCTACGGCAAGCTGACCCTGAAGTTCATCTGCACCACCGGCA | |
| | AGCTGCCCGTGCCCTGGCCCACCCTCGTGACCACCCTGACGTACGGCGTGCAGTGCTTACATACAACTAACATAgggagcA | |
| | CATGAGGATCACCCATGTgcgactcCCACAGTCACTGGGgagtcttccctctctctctctctctctctcgggagcACATGA | |
| | GGATCACCCATGTgcgactcCCACAGTCACTGGGgagtcttccc | |
| PL25361 | AGGGCGAGGAGCTGTTCACCGTTTAAGAGCTAGAAATAGCAAGTTTAAATAAGGCTAGTCCGTTATCAACTTGAAAAAGTG | 17021 |
| | GCACCGAGTCGGTGCCACCATGGTGAGCAAGGGCGAGGAGCTGTTCACCGGGGTGGTGCCCTGGTCGAGCTGGACGGCGAC | |
| | GTAAACGGCCACAAGTTCAGCGTGTCCGGCGAGGGCGAGGGCGATGCCACCTACGGCAAGCTGACCCTGAAGTTCATCTGC | |
| | ACCACCGGCAAGCTGCCCGTGCCCTGGCCCACCCTCGTGACCACCCTGACGTACGGCGTGCAGTGCTTACATACAACTAAC | |
| | ATAgggagcACATGAGGATCACCCATGTgcgactcCCACAGTCACTGGGgagtcttccctctctctctctctctctctcgg | |
| | gagcACATGAGGATCACCCATGTgcgactcCCACAGTCACTGGGgagtcttccc | |
| PL25362 | AGGGCGAGGAGCTGTTCACCGTTTAAGAGCTAGAAATAGCAAGTTTAAATAAGGCTAGTCCGTTATCAACTTGAAAAAGTG | 17022 |
| | GCACCGAGTCGGTGCCAAGGGCGAGGAGCTGTTCACCGGGGTGGTGCCCATCCTGGTCGAGCTGGACGGCGACGTAAACGG | |
| | CCACAAGTTCAGCGTGTCCGGCGAGGGCGAGGGCGATGCCACCTACGGCAAGCTGACCCTGAAGTTCATCTGCACCACCGG | |
| | CAAGCTGCCCGTGCCCTGGCCCACCCTCGTGACCACCCTGACGTACGGCGTGCAGTGCTTACATACAACTAACATAgggag | |
| | CACATGAGGATCACCCATGTgcgactcCCACAGTCACTGGGgagtcttccctctctctctctctctctctcgggagcACAT | |
| | GAGGATCACCCATGTgcgactcCCACAGTCACTGGGgagtcttccc | |
| PL25363 | AAGGGCGAGGAGCTGTTCACGTTTAAGAGCTAGAAATAGCAAGTTTAAATAAGGCTAGTCCGTTATCAACTTGAAAAAGTG | 17023 |
| | GCACCGAGTCGGTGCCCACCATGGTGAGCAAGGGCGAGGAGCTGTTCACCGGGGTGGTGCCTGGTCGAGCTGGACGGCGAC | |
| | GTAAACGGCCACAAGTTCAGCGTGTCCGGCGAGGGCGAGGGCGATGCCACCTACGGCAAGCTGACCCTGAAGTTCATCTGC | |
| | ACCACCGGCAAGCTGCCCGTGCCCTGGCCCACCCTCGTGACCACCCTGACGTACGGCGTGCAGTGCTTACATACAACTAAC | |
| | ATAgggagcACATGAGGATCACCCATGTgcgactcCCACAGTCACTGGGgagtcttccctctctctctctctctctctcgg | |
| | gagcACATGAGGATCACCCATGTgcgactcCCACAGTCACTGGGgagtcttccc | |
| PL25364 | AAGGGCGAGGAGCTGTTCACGTTTAAGAGCTAGAAATAGCAAGTTTAAATAAGGCTAGTCCGTTATCAACTTGAAAAAGTG | 17024 |
| | GCACCGAGTCGGTGCAGCAAGGGCGAGGAGCTGTTCACCGGGGTGGTGCCCATCCTGGTCGAGCTGGACGGCGACGTAAAC | |
| | GGCCACAAGTTCAGCGTGTCCGGCGAGGGCGAGGGCGATGCCACCTACGGCAAGCTGACCCTGAAGTTCATCTGCACCACC | |
| | GGCAAGCTGCCCGTGCCCTGGCCCACCCTCGTGACCACCCTGACGTACGGCGTGCAGTGCTTACATACAACTAACATAggg | |
| | agcACATGAGGATCACCCATGTgcgactcCCACAGTCACTGGGgagtcttccctctctctctctctctctctcgggagcAC | |
| | ATGAGGATCACCCATGTgcgactcCCACAGTCACTGGGgagtcttccc | |
| PL25365 | CACCATGGTGAGCAAGGGCGGTTTAAGAGCTAGAAATAGCAAGTTTAAATAAGGCTAGTCCGTTATCAACTTGAAAAAGTG | 17025 |
| | GCACCGAGTCGGTGCCGAGCCACCGCCGCCACCATGGTGAGCAAGGGCGAGGAGCTGTTCATGGTCGAGCTGGACGGCGAC | |
| | GTAAACGGCCACAAGTTCAGCGTGTCCGGCGAGGGCGAGGGCGATGCCACCTACGGCAAGCTGACCCTGAAGTTCATCTGC | |
| | ACCACCGGCAAGCTGCCCGTGCCCTGGCCCACCCTCGTGACCACCCTGACGTACGGCGTGCAGTGCTTACATACAACTAAC | |
| | ATAgggagcACATGAGGATCACCCATGTgcgactcCCACAGTCACTGGGgagtcttccctctctctctctctctctctcgg | |
| | gagcACATGAGGATCACCCATGTgcgactcCCACAGTCACTGGGgagtcttccc | |
| PL25366 | CACCATGGTGAGCAAGGGCGGTTTAAGAGCTAGAAATAGCAAGTTTAAATAAGGCTAGTCCGTTATCAACTTGAAAAAGTG | 17026 |
| | GCACCGAGTCGGTGCCGCCGCCACCATGGTGAGCAAGGGCGAGGAGCTGTTCACCGGGGTGTGGTCGAGCTGGACGGCGAC | |
| | GTAAACGGCCACAAGTTCAGCGTGTCCGGCGAGGGCGAGGGCGATGCCACCTACGGCAAGCTGACCCTGAAGTTCATCTGC | |
| | ACCACCGGCAAGCTGCCCGTGCCCTGGCCCACCCTCGTGACCACCCTGACGTACGGCGTGCAGTGCTTACATACAACTAAC | |
| | ATAgggagcACATGAGGATCACCCATGTgcgactcCCACAGTCACTGGGgagtcttccctctctctctctctctctctcgg | |
| | gagcACATGAGGATCACCCATGTgcgactcCCACAGTCACTGGGgagtcttccc | |
| PL25367 | CACCATGGTGAGCAAGGGCGGTTTAAGAGCTAGAAATAGCAAGTTTAAATAAGGCTAGTCCGTTATCAACTTGAAAAAGTG | 17027 |
| | GCACCGAGTCGGTGCCCATGGTGAGCAAGGGCGAGGAGCTGTTCACCGGGGTGGTGCCCATTGGTCGAGCTGGACGGCGAC | |
| | GTAAACGGCCACAAGTTCAGCGTGTCCGGCGAGGGCGAGGGCGATGCCACCTACGGCAAGCTGACCCTGAAGTTCATCTGC | |
| | ACCACCGGCAAGCTGCCCGTGCCCTGGCCCACCCTCGTGACCACCCTGACGTACGGCGTGCAGTGCTTACATACAACTAAC | |
| | ATAgggagcACATGAGGATCACCCATGTgcgactcCCACAGTCACTGGGgagtcttccctctctctctctctctctctcgg | |
| | gagcACATGAGGATCACCCATGTgcgactcCCACAGTCACTGGGgagtcttccc | |
| PL25368 | GCCGCCACCATGGTGAGCAAGTTTAAGAGCTAGAAATAGCAAGTTTAAATAAGGCTAGTCCGTTATCAACTTGAAAAAGTG | 17028 |
| | GCACCGAGTCGGTGCATCCTCGAGCCACCGCCGCCACCATGGTGAGCAAGGGCGAGGAGCTTGGTCGAGCTGGACGGCGAC | |
| | GTAAACGGCCACAAGTTCAGCGTGTCCGGCGAGGGCGAGGGCGATGCCACCTACGGCAAGCTGACCCTGAAGTTCATCTGC | |
| | ACCACCGGCAAGCTGCCCGTGCCCTGGCCCACCCTCGTGACCACCCTGACGTACGGCGTGCAGTGCTTACATACAACTAAC | |
| | ATAgggagcACATGAGGATCACCCATGTgcgactcCCACAGTCACTGGGgagtcttccctctctctctctctctctctcgg | |
| | gagcACATGAGGATCACCCATGTgcgactcCCACAGTCACTGGGgagtcttccc | |
| PL25369 | GCCGCCACCATGGTGAGCAAGTTTAAGAGCTAGAAATAGCAAGTTTAAATAAGGCTAGTCCGTTATCAACTTGAAAAAGTG | 17029 |
| | GCACCGAGTCGGTGCGCCACCGCCGCCACCATGGTGAGCAAGGGCGAGGAGCTGTTCACCGTGGTCGAGCTGGACGGCGAC | |
| | GTAAACGGCCACAAGTTCAGCGTGTCCGGCGAGGGCGAGGGCGATGCCACCTACGGCAAGCTGACCCTGAAGTTCATCTGC | |
| | ACCACCGGCAAGCTGCCCGTGCCCTGGCCCACCCTCGTGACCACCCTGACGTACGGCGTGCAGTGCTTACATACAACTAAC | |
| | ATAgggagcACATGAGGATCACCCATGTgcgactcCCACAGTCACTGGGgagtcttccctctctctctctctctctctcgg | |
| | gagcACATGAGGATCACCCATGTgcgactcCCACAGTCACTGGGgagtcttccc | |
| PL25370 | GCCGCCACCATGGTGAGCAAGTTTAAGAGCTAGAAATAGCAAGTTTAAATAAGGCTAGTCCGTTATCAACTTGAAAAAGTG | 17030 |
| | GCACCGAGTCGGTGCCGCCACCATGGTGAGCAAGGGCGAGGAGCTGTTCACCGGGGTGGTGTGGTCGAGCTGGACGGCGAC | |
| | GTAAACGGCCACAAGTTCAGCGTGTCCGGCGAGGGCGAGGGCGATGCCACCTACGGCAAGCTGACCCTGAAGTTCATCTGC | |
| | ACCACCGGCAAGCTGCCCGTGCCCTGGCCCACCCTCGTGACCACCCTGACGTACGGCGTGCAGTGCTTACATACAACTAAC | |
| | ATAgggagcACATGAGGATCACCCATGTgcgactcCCACAGTCACTGGGgagtcttccctctctctctctctctctctcgg | |
| | gagcACATGAGGATCACCCATGTgcgactcCCACAGTCACTGGGgagtcttccc | |
| PL25371 | CGCCGCCACCATGGTGAGCAGTTTAAGAGCTAGAAATAGCAAGTTTAAATAAGGCTAGTCCGTTATCAACTTGAAAAAGTG | 17031 |
| | GCACCGAGTCGGTGCGATCCTCGAGCCACCGCCGCCACCATGGTGAGCAAGGGCGAGGAGCTGGTCGAGCTGGACGGCGAC | |
| | GTAAACGGCCACAAGTTCAGCGTGTCCGGCGAGGGCGAGGGCGATGCCACCTACGGCAAGCTGACCCTGAAGTTCATCTGC | |
| | ACCACCGGCAAGCTGCCCGTGCCCTGGCCCACCCTCGTGACCACCCTGACGTACGGCGTGCAGTGCTTACATACAACTAAC | |
| | ATAgggagcACATGAGGATCACCCATGTgcgactcCCACAGTCACTGGGgagtcttccctctctctctctctctctctcgg | |
| | gagcACATGAGGATCACCCATGTgcgactcCCACAGTCACTGGGgagtcttccc | |
| PL25372 | CGCCGCCACCATGGTGAGCAGTTTAAGAGCTAGAAATAGCAAGTTTAAATAAGGCTAGTCCGTTATCAACTTGAAAAAGTG | 17032 |
| | GCACCGAGTCGGTGCAGCCACCGCCGCCACCATGGTGAGCAAGGGCGAGGAGCTGTTCACCTGGTCGAGCTGGACGGCGAC | |
| | GTAAACGGCCACAAGTTCAGCGTGTCCGGCGAGGGCGAGGGCGATGCCACCTACGGCAAGCTGACCCTGAAGTTCATCTGC | |
| | ACCACCGGCAAGCTGCCCGTGCCCTGGCCCACCCTCGTGACCACCCTGACGTACGGCGTGCAGTGCTTACATACAACTAAC | |
| | ATAgggagcACATGAGGATCACCCATGTgcgactcCCACAGTCACTGGGgagtcttccctctctctctctctctctctcgg | |
| | gagcACATGAGGATCACCCATGTgcgactcCCACAGTCACTGGGgagtcttccc | |
| PL25373 | CGCCGCCACCATGGTGAGCAGTTTAAGAGCTAGAAATAGCAAGTTTAAATAAGGCTAGTCCGTTATCAACTTGAAAAAGTG | 17033 |
| | GCACCGAGTCGGTGCCCGCCACCATGGTGAGCAAGGGCGAGGAGCTGTTCACCGGGGTGGTTGGTCGAGCTGGACGGCGAC | |
| | GTAAACGGCCACAAGTTCAGCGTGTCCGGCGAGGGCGAGGGCGATGCCACCTACGGCAAGCTGACCCTGAAGTTCATCTGC | |
| | ACCACCGGCAAGCTGCCCGTGCCCTGGCCCACCCTCGTGACCACCCTGACGTACGGCGTGCAGTGCTTACATACAACTAAC | |
| | ATAgggagcACATGAGGATCACCCATGTgcgactcCCACAGTCACTGGGgagtcttccctctctctctctctctctctcgg | |
| | gagcACATGAGGATCACCCATGTgcgactcCCACAGTCACTGGGgagtcttccc | |
| PL25374 | TCGAGCCACCGCCGCCACCAGTTTAAGAGCTAGAAATAGCAAGTTTAAATAAGGCTAGTCCGTTATCAACTTGAAAAAGTG | 17034 |
| | GCACCGAGTCGGTGCGGCGCCTACGATCCTCGAGCCACCGCCGCCACCATGGTGAGCAAGGTGGTCGAGCTGGACGGCGAC | |
| | GTAAACGGCCACAAGTTCAGCGTGTCCGGCGAGGGCGAGGGCGATGCCACCTACGGCAAGCTGACCCTGAAGTTCATCTGC | |
| | ACCACCGGCAAGCTGCCCGTGCCCTGGCCCACCCTCGTGACCACCCTGACGTACGGCGTGCAGTGCTTACATACAACTAAC | |
| | ATAgggagcACATGAGGATCACCCATGTgcgactcCCACAGTCACTGGGgagtcttccctctctctctctctctctctcgg | |
| | gagcACATGAGGATCACCCATGTgcgactcCCACAGTCACTGGGgagtcttccc | |
| PL25375 | TCGAGCCACCGCCGCCACCAGTTTAAGAGCTAGAAATAGCAAGTTTAAATAAGGCTAGTCCGTTATCAACTTGAAAAAGTG | 17035 |
| | GCACCGAGTCGGTGCCGATCCTCGAGCCACCGCCGCCACCATGGTGAGCAAGGGCGAGGAGTGGTCGAGCTGGACGGCGAC | |
| | GTAAACGGCCACAAGTTCAGCGTGTCCGGCGAGGGCGAGGGCGATGCCACCTACGGCAAGCTGACCCTGAAGTTCATCTGC | |
| | ACCACCGGCAAGCTGCCCGTGCCCTGGCCCACCCTCGTGACCACCCTGACGTACGGCGTGCAGTGCTTACATACAACTAAC | |
| | ATAgggagcACATGAGGATCACCCATGTgcgactcCCACAGTCACTGGGgagtcttccctctctctctctctctctctcgg | |
| | gagcACATGAGGATCACCCATGTgcgactcCCACAGTCACTGGGgagtcttccc | |
| PL25376 | TCGAGCCACCGCCGCCACCAGTTTAAGAGCTAGAAATAGCAAGTTTAAATAAGGCTAGTCCGTTATCAACTTGAAAAAGTG | 17036 |
| | GCACCGAGTCGGTGCGAGCCACCGCCGCCACCATGGTGAGCAAGGGCGAGGAGCTGTTCACTGGTCGAGCTGGACGGCGAC | |
| | GTAAACGGCCACAAGTTCAGCGTGTCCGGCGAGGGCGAGGGCGATGCCACCTACGGCAAGCTGACCCTGAAGTTCATCTGC | |
| | ACCACCGGCAAGCTGCCCGTGCCCTGGCCCACCCTCGTGACCACCCTGACGTACGGCGTGCAGTGCTTACATACAACTAAC | |
| | ATAgggagcACATGAGGATCACCCATGTgcgactcCCACAGTCACTGGGgagtcttccctctctctctctctctctctcgg | |
| | gagcACATGAGGATCACCCATGTgcgactcCCACAGTCACTGGGgagtcttccc | |
| PL25377 | TTACAGATCCAAGCTGTGACGTTTAAGAGCTAGAAATAGCAAGTTTAAATAAGGCTAGTCCGTTATCAACTTGAAAAAGTG | 17037 |
| | GCACCGAGTCGGTGCTCTGTTCTGCGCCGTTACAGATCCAAGCTGTGACCGGCGCCTACGATGGTCGAGCTGGACGGCGAC | |
| | GTAAACGGCCACAAGTTCAGCGTGTCCGGCGAGGGCGAGGGCGATGCCACCTACGGCAAGCTGACCCTGAAGTTCATCTGC | |
| | ACCACCGGCAAGCTGCCCGTGCCCTGGCCCACCCTCGTGACCACCCTGACGTACGGCGTGCAGTGCTTACATACAACTAAC | |
| | ATAgggagcACATGAGGATCACCCATGTgcgactcCCACAGTCACTGGGgagtcttccctctctctctctctctctctcgg | |
| | gagcACATGAGGATCACCCATGTgcgactcCCACAGTCACTGGGgagtcttccc | |
| PL25378 | TTACAGATCCAAGCTGTGACGTTTAAGAGCTAGAAATAGCAAGTTTAAATAAGGCTAGTCCGTTATCAACTTGAAAAAGTG | 17038 |
| | GCACCGAGTCGGTGCGCGCCGTTACAGATCCAAGCTGTGACCGGCGCCTACGATCCTCGAGTGGTCGAGCTGGACGGCGAC | |
| | GTAAACGGCCACAAGTTCAGCGTGTCCGGCGAGGGCGAGGGCGATGCCACCTACGGCAAGCTGACCCTGAAGTTCATCTGC | |
| | ACCACCGGCAAGCTGCCCGTGCCCTGGCCCACCCTCGTGACCACCCTGACGTACGGCGTGCAGTGCTTACATACAACTAAC | |
| | ATAgggagcACATGAGGATCACCCATGTgcgactcCCACAGTCACTGGGgagtcttccctctctctctctctctctctcgg | |
| | gagcACATGAGGATCACCCATGTgcgactcCCACAGTCACTGGGgagtcttccc | |
| PL25379 | TTACAGATCCAAGCTGTGACGTTTAAGAGCTAGAAATAGCAAGTTTAAATAAGGCTAGTCCGTTATCAACTTGAAAAAGTG | 17039 |
| | GCACCGAGTCGGTGCACAGATCCAAGCTGTGACCGGCGCCTACGATCCTCGAGCCACCGCCTGGTCGAGCTGGACGGCGAC | |
| | GTAAACGGCCACAAGTTCAGCGTGTCCGGCGAGGGCGAGGGCGATGCCACCTACGGCAAGCTGACCCTGAAGTTCATCTGC | |
| | ACCACCGGCAAGCTGCCCGTGCCCTGGCCCACCCTCGTGACCACCCTGACGTACGGCGTGCAGTGCTTACATACAACTAAC | |
| | ATAgggagcACATGAGGATCACCCATGTgcgactcCCACAGTCACTGGGgagtcttccctctctctctctctctctctcgg | |
| | gagcACATGAGGATCACCCATGTgcgactcCCACAGTCACTGGGgagtcttccc | |

[1332] More specifically, a gene modifying polypeptide binds the guide RNA molecule and a ttRNA molecule, together forming a gene modifying complex, which binds and nicks the target locus and performs template-directed incorporation of the desired edit in a first strand of the genomic DNA. By designing post-edit homology regions that are complementary to sequences distant from the insertion site (FIG. 10B), the intervening sequences are deleted (grey box in FIG. 10C), and in effect replaced by novel sequences encoded in the ttRNA. The additional Cas9 or different gene modifying polypeptide molecule is recruited to the nicked DNA strand by ttRNA (e.g., by a 5′ end block containing a gRNA spacer), or by its species-matched gRNA, forming the second complex. The second complex may extend the bubble of unwound/single-stranded DNA and facilitate large insertions, and may also be used to introduce a nick on the second strand to initiate second strand synthesis, and/or signal to the cell's endogenous repair system that the edited strand should be copied and maintained. Without wishing to be bound by theory, the length of one or both components of the post-edit homology region (i.e. FIG. 10C, “primer” and/or “extension”) may be adjusted to alter the number of endogenous nucleotides deleted.

[1333] To assess the genome-editing capacity of the gene modifying system, the gene modifying system was electroporated into the U2OS reporter cell lines designed to generate GFP signal upon successful sequence replacement. Specifically, these cells contain a reporter cassette consisting of a GFP sequence with a 150 bp deletion in the coding sequence that knocks out fluorescence, and in which 50 bp, 150 bp, 250 bp, or 350 bp of non-GFP DNA (a disruption sequence) was introduced that does not produce a fluorescent protein. In order to produce a GFP signal, the gene modifying complex must replace the 50-350 bp disruption sequence with the 150 bp of deleted GFP coding sequence that is encoded in the ttRNA. Cells expressing GFP therefore indicate that precise sequence replacement has occurred at the reporter locus.

[1334] All components of the gene modifying system were delivered by nucleofection in DNA format. Specifically, 100 ng of gene modifying polypeptide plasmid DNA was combined with 500 ng ttRNA and 150 ng gRNA in plasmid format. The 3 plasmids encoding the gene modifying system were added to 25 μL SE buffer containing 250,000 U2OS cells carrying the sequence replacement reporter cassette, and the cells were nucleofected using program DN-100. After nucleofection, cells were grown at 37° C., 5% CO₂ for 4 days prior to analysis of GFP signal by flow cytometry. GFP expression is indicative of cells in which the 150 nucleotide insertion was accurately written into the genome, replacing the 50-350 bp disruption sequence.

[1335] FIG. 13 shows a graph of % GFP positive cells after treating the sequence-replacement reporter cell lines with a gene modifying system comprising a ttRNA having the characteristics indicated on the X-axis or with a control gene modifying system. The results showed that no GFP positive cells were observed when cells were treated with control gene modifying systems lacking one component, or with a control gene modifying system in which the gene modifying polypeptide has an inactivated RT domain.

[1336] In contrast, approximately 8%, 6%, 7%, and 3% GFP positive cells (indicative of successful sequence replacement) were observed when cells with 50 bp, 150 bp, 250 bp, and 350 bp GFP disruptions, respectively, were treated with gene modifying systems comprising all components of the gene modifying system, and ttRNAs having 5′ end blocks comprising a Cas9 gRNA scaffold and 20 nucleotide gRNA spacer wherein the ttRNA comprised a pseudoknot at its 3′ end. This result indicates that the gene modifying complexes precisely replace sequences in the genome with the desired insertion cassette encoded in the ttRNA. This suggests that the ability of the 5′ end block to associate the gene modifying polypeptide (e.g., via the Cas9 domain) and/or the ttRNA to the genomic target and induce nicking of the target DNA is sufficient to facilitate precise sequence replacement in the genome.

[1337] The results further show that approximately 16%, 17%, 22%, and 13% GFP positive cells were observed when cells with 50 bp, 150 bp, 250 bp, and 350 bp GFP disruptions, respectively, were treated with gene modifying systems comprising ttRNAs having 5′ end blocks comprising a Cas9 gRNA scaffold and 20 nucleotide gRNA spacer wherein the ttRNA comprised an RRS. This result indicates that precise sequence replacement is increased for gene modifying systems comprising ttRNAs having an RRS by the ability of the ttRNA to stably associate with the RBP domain of the gene modifying polypeptide via an RRS.

[1338] These results suggest that the presence of RRS structures at the 3′ end of the ttRNA, which are predicted to enable stable association with the RBP domain of the gene modifying polypeptide, enhance precise replacement of the 50-350 bp of disruption sequence with the intended 150 bp GFP coding sequence. The result further suggests that the ability of the ttRNA to stably associate with the RBP domain of the gene modifying polypeptide via the RRS sequence increases the rate of precise sequence replacement of the 50-350 bp of disruption sequence with the intended 150 bp insertion sequence encoded in the ttRNA.

[1339] The results together support the interpretation that a ttRNA anchored to a target genomic DNA site (e.g., the complex of the target genomic DNA site, a first gene modifying polypeptide, and a gRNA) by two different associations (e.g., here an RBP:RRS interaction with the first gene modifying polypeptide, and a 5′ end block gRNA scaffold/spacer interaction with the target genomic DNA (e.g., mediated by a second gene modifying polypeptide)) enables a gene modifying system to site-specifically replace up to 350 bp of genomic sequence with a 150 bp insertion sequence encoded in the ttRNA. The results further support the interpretation that the efficiency of such a sequence replacement is improved by the interaction of the RBP with the RRS.

### Example 11: Evaluating the Role of Homology Arm Position (e.g., Post-Edit Homology Region) on Long Insertion Activity of Exemplary Gene Modifying Polypeptides Using Trans Template RNAs with a 5-Component System

[1340] This example describes the evaluation of exemplary gene modifying systems having up to five components in the targeted insertion of a 150 nt sequence in the human genome. The gene modifying systems each comprise (1) a gene modifying polypeptide generated in Example 3 (and demonstrated to have trans-recruitment and rewrite activity in Examples 7 and 9 of PCT Application PCT/US2022/076064, which is herein incorporated by reference in its entirety), or in Example 9, (2) a trans template RNA (ttRNA) in which a region of homology (e.g., the post-edit homology region) encompasses the spacer encoded by the 5′ end block of the ttRNA, and/or is complementary to the sequence immediately 5′ of the second nick as depicted in FIG. 11, (in this example as in ttRNA sequences described in Table S7 and S8, PL24822 and PL25346-25350 and PL25351-25357), (3) exemplary gRNA PLV4165, an additional (4) Cas9 or different gene modifying polypeptide molecule recruited to the nicked DNA strand by the trans-template RNA (e.g., by an 5′ end block containing a gRNA spacer), or by (5) its species-matched gRNA.

TABLE S8
Exemplary ttRNA sequences

| | | SEQ |
|---|---|---|
| Identi- | | ID |
| fier | Full Nucleic Acid Sequence | NO: |
| PL24822 | CGAGGAGCTGTTCACCGGGGGTTTAAGAGCTAGAAATAGCAAGTTTAAATAAGGCTAGTCCGTTATCAACTTGAAAAAGTG | 17040 |
| | GCACCGAGTCGGTGCATGGTGAGCAAGGGCGAGGAGCTGTTCACCGGGGTGGTGCCCATCCTGGTCGAGCTGGACGGCGAC | |
| | GTAAACGGCCACAAGTTCAGCGTGTCCGGCGAGGGCGAGGGCGATGCCACCTACGGCAAGCTGACCCTGAAGTTCATCTGC | |
| | ACCACCGGCAAGCTGCCCGTGCCCTGGCCCACCCTCGTGACCACCCTGACGTACGGCGTGCAGTGCTTACATACAACTAAC | |
| | ATAgggagcACATGAGGATCACCCATGTgcgactcCCACAGTCACTGGGgagtcttccctctctctctctctctctctcgg | |
| | gagcACATGAGGATCACCCATGTgcgactcCCACAGTCACTGGGgagtcttccc | |
| PL25346 | CGAGGAGCTGTTCACCGGGGGTTTAAGAGCTAGAAATAGCAAGTTTAAATAAGGCTAGTCCGTTATCAACTTGAAAAAGTG | 17041 |
| | GCACCGAGTCGGTGCAGCAAGGGCGAGGAGCTGTTCACCGGGGTGGTGCCCATCCTGGTCGAGCTGGACGGCGACGTAAAC | |
| | GGCCACAAGTTCAGCGTGTCCGGCGAGGGCGAGGGCGATGCCACCTACGGCAAGCTGACCCTGAAGTTCATCTGCACCACC | |
| | GGCAAGCTGCCCGTGCCCTGGCCCACCCTCGTGACCACCCTGACGTACGGCGTGCAGTGCTTACATACAACTAACATAggg | |
| | agcACATGAGGATCACCCATGTgcgactcCCACAGTCACTGGGgagtcttccctctctctctctctctctctcgggagcAC | |
| | ATGAGGATCACCCATGTgcgactcCCACAGTCACTGGGgagtcttccc | |
| PL25347 | CGAGGAGCTGTTCACCGGGGGTTTAAGAGCTAGAAATAGCAAGTTTAAATAAGGCTAGTCCGTTATCAACTTGAAAAAGTG | 17042 |
| | GCACCGAGTCGGTGCGGGCGAGGAGCTGTTCACCGGGGTGGTGCCCATCCTGGTCGAGCTGGACGGCGACGTAAACGGCCA | |
| | CAAGTTCAGCGTGTCCGGCGAGGGCGAGGGCGATGCCACCTACGGCAAGCTGACCCTGAAGTTCATCTGCACCACCGGCAA | |
| | GCTGCCCGTGCCCTGGCCCACCCTCGTGACCACCCTGACGTACGGCGTGCAGTGCTTACATACAACTAACATAgggagcAC | |
| | ATGAGGATCACCCATGTgcgactcCCACAGTCACTGGGgagtcttccctctctctctctctctctctcgggagcACATGAG | |
| | GATCACCCATGTgcgactcCCACAGTCACTGGGgagtcttccc | |
| PL25348 | CGAGGAGCTGTTCACCGGGGGTTTAAGAGCTAGAAATAGCAAGTTTAAATAAGGCTAGTCCGTTATCAACTTGAAAAAGTG | 17043 |
| | GCACCGAGTCGGTGCCGAGGAGCTGTTCACCGGGGTGGTGCCCATCCTGGTCGAGCTGGACGGCGACGTAAACGGCCACAA | |
| | GTTCAGCGTGTCCGGCGAGGGCGAGGGCGATGCCACCTACGGCAAGCTGACCCTGAAGTTCATCTGCACCACCGGCAAGCT | |
| | GCCCGTGCCCTGGCCCACCCTCGTGACCACCCTGACGTACGGCGTGCAGTGCTTACATACAACTAACATAgggagcACATG | |
| | AGGATCACCCATGTgcgactcCCACAGTCACTGGGgagtcttccctctctctctctctctctctcgggagcACATGAGGAT | |
| | CACCCATGTgcgactcCCACAGTCACTGGGgagtcttccc | |
| PL25349 | CGAGGAGCTGTTCACCGGGGGTTTAAGAGCTAGAAATAGCAAGTTTAAATAAGGCTAGTCCGTTATCAACTTGAAAAAGTG | 17044 |
| | GCACCGAGTCGGTGCGAGCTGTTCACCGGGGTGGTGCCCATCCTGGTCGAGCTGGACGGCGACGTAAACGGCCACAAGTTC | |
| | AGCGTGTCCGGCGAGGGCGAGGGCGATGCCACCTACGGCAAGCTGACCCTGAAGTTCATCTGCACCACCGGCAAGCTGCCC | |
| | GTGCCCTGGCCCACCCTCGTGACCACCCTGACGTACGGCGTGCAGTGCTTACATACAACTAACATAgggagcACATGAGGA | |
| | TCACCCATGTgcgactcCCACAGTCACTGGGgagtcttccctctctctctctctctctctcgggagcACATGAGGATCACC | |
| | CATGTgcgactcCCACAGTCACTGGGgagtcttccc | |
| PL25350 | CGAGGAGCTGTTCACCGGGGGTTTAAGAGCTAGAAATAGCAAGTTTAAATAAGGCTAGTCCGTTATCAACTTGAAAAAGTG | 17045 |
| | GCACCGAGTCGGTGCTTCACCGGGGTGGTGCCCATCCTGGTCGAGCTGGACGGCGACGTAAACGGCCACAAGTTCAGCGTG | |
| | TCCGGCGAGGGCGAGGGCGATGCCACCTACGGCAAGCTGACCCTGAAGTTCATCTGCACCACCGGCAAGCTGCCCGTGCCC | |
| | TGGCCCACCCTCGTGACCACCCTGACGTACGGCGTGCAGTGCTTACATACAACTAACATAgggagcACATGAGGATCACCC | |
| | ATGTgcgactcCCACAGTCACTGGGgagtcttccctctctctctctctctctctcgggagcACATGAGGATCACCCATGTg | |
| | cgactcCCACAGTCACTGGGgagtcttccc | |

[1341] More specifically, a gene modifying polypeptide binds the guide RNA molecule and a ttRNA molecule, together forming a gene modifying complex, which binds and nicks the target locus and performs template-directed incorporation of the desired edit in a first strand of the genomic DNA. The additional Cas9 or different gene modifying polypeptide molecule is recruited to the nicked DNA strand by ttRNA (e.g., by a 5′ end block containing a gRNA spacer), or by its species-matched gRNA, forming the second complex. The second complex may extend the bubble of unwound/single-stranded DNA and facilitate large insertions, and may also be used to introduce a nick on the second strand to initiate second strand synthesis, and/or signal to the cell's endogenous repair system that the edited strand should be copied and maintained. The ttRNAs are designed to comprise a homology region, e.g., a post-edit homology region, that is positioned to encompass the sequence at the site of the 2^{nd} nick. Given the complementarity of the region of homology encoded in the ttRNA to the sequence 5′ of the 2^{nd} nick, the nicked DNA may then be used as a primer, and the newly synthesized cDNA may be used as a template for replication of the inserted sequence in the second strand of the genomic target.

[1342] It is contemplated that to assess the genome-editing capacity of the gene modifying system, a gene modifying system having up to five components is electroporated into the HEK293T/U2OS 150 bp insertion GFP reporter-expressing cell line. All 4-5 components of the gene modifying system are delivered by nucleofection in DNA/RNA format. Specifically, 200-800 ng of gene modifying polypeptide plasmid DNA (or 1-4 ug mRNA) is combined with 50-200 ng ttRNA and 50-200 ng gRNA in plasmid format (or 2.5-10 uM ttRNA and 2.5-10 uM gRNA in RNA format). An additional 50-200 ng of Cas9- or different gene modifying polypeptide-encoding plasmid DNA (or 1-4 ug mRNA) and/or 25-100 ng of a second gRNA-encoding plasmid (or 1-10 uM gRNA in RNA format) are also nucleofected together with the gene modifying system. The 4-5 plasmids or RNAs encoding the gene modifying system are added to 25 μL SF/SE buffer containing 250,000 HEK293T/U2OS 150 bp insertion GFP reporter-expressing cells, and the cells are nucleofected using program DS-150/DN-100. After nucleofection, cells are grown at 37° C., 5% CO₂ for at least 3 days prior to cell lysis and genomic DNA extraction. To analyze gene editing activity, primers flanking the GFP locus can be used to amplify across the locus. Amplicons are analyzed via short read sequencing, e.g. using an Illumina MiSeq. Replacement of the genomic sequence with the template sequence encoded in the ttRNA or insertion of the template sequence encoded in the ttRNA will indicate successful editing.

[1343] In one example, to assess the genome-editing capacity of the gene modifying system, a 4-component gene modifying system was electroporated into the U2OS 150 bp insertion GFP reporter-expressing cell line. All 4 components of the gene modifying system were delivered by nucleofection in DNA format. Specifically, 100 ng of gene modifying polypeptide plasmid DNA was combined with 500 ng ttRNA and 150 ng gRNA in plasmid format. The 3 plasmids expressing the 4-component system were added to 20 μL SE buffer containing 250,000 U2OS 150 bp insertion GFP reporter-expressing cells, and the cells were nucleofected using program DN-100. After nucleofection, cells were grown at 37° C., 5% CO₂ for 4 days prior to cell lysis and genomic DNA extraction. To analyze gene editing activity, primers flanking the GFP locus were used to amplify across the locus. Amplicons were analyzed via short read sequencing, e.g. using an Illumina MiSeq. Replacement of the genomic sequence with the template sequence encoded in the ttRNA or insertion of the template sequence encoded in the ttRNA indicated successful editing.

[1344] FIG. 17 shows a graph of % perfect editing at the GFP locus as seen by next-generation sequencing data from amplicon sequencing after treating the 150 bp insertion GFP reporter-expressing cell line with a gene modifying system comprising a gRNA plasmid, a gene modifying polypeptide, and a ttRNA having the primer length (as illustrated in FIGS. 10A-10C and 11A-11C) indicated in X-axis labels, or with H2O only or a no-driver (gene modifying polypeptide), no gRNA or no-template (ttRNA) control gene modifying system (left 4 bars of the graph). Perfectly edited reads were defined as any reads that perfectly matched the expected edited sequence, as well as reads that contained the correct insertion size and included one or more “N” base calls (i.e. no clear base identification at certain sequence positions) due to limitations of the sequencing technology at these read lengths. The results show that the length of the primer impact editing efficiency, where overall, shortening of the primer results in decreased integration efficiency, particularly at primer lengths below 20 nt. The impact of primer length is more significant in the absence of an extension of the homology region past the primer (FIG. 17, “extension=0 nt”), whereas the presence of an extension of the homology region rescued editing efficiency for templates containing primers shorter than 20 nt (FIG. 17, compare “extension=0 nt” to “extension=15 nt”). These data support the interpretation that the length of the priming sequence is important for editing efficiency, and that for short primers, an extension sequence may be included to augment editing efficiency.

### Example 12: Evaluation of Long Insertion Activity of Exemplary Gene Modifying Polypeptides Using Trans Template RNAs with a 6-Component System

[1345] This example describes the evaluation of exemplary gene modifying systems having up to six components in the targeted insertion of a 150 nt sequence in the human genome. The gene modifying systems each comprise (1) a gene modifying polypeptide generated in Example 3 (and demonstrated to have trans-recruitment and rewrite activity in Examples 7 and 9 of PCT Application PCT/US2022/076064, which is herein incorporated by reference in its entirety), or in Example 9, (2) a trans template RNA (ttRNA) in which the spacer encoded by the 5′ end block of the ttRNA is shorter than 16 nt to enable template anchoring without concomitant nicking of the genomic target (as depicted in FIG. 12, in this example as in ttRNA sequences described in Table s9), (3) exemplary gRNA PLV4165, two additional (4-5) Cas9 or different gene modifying polypeptide molecules recruited to the nicked DNA strand by the trans-template RNA (e.g., by an 5′ end block containing a gRNA spacer), and by (6) an additional species-matched gRNA.

TABLE S9
Exemplary ttRNA sequences

| | | SEQ | 2nd nick |
|---|---|---|---|
| Identi- | | ID | spacer |
| fier | Full Amino Acid Sequence | NO: | Sequence |
| PL25380 | AGCTGTTCACCGGGGGTTTAAGAGCTAGAAATAGCAAGTTTAAATAAGGCTAGTCCGTTATCAACTTGA | 17046 | CGAGGAGCTG |
| | AAAAGTGGCACCGAGTCGGTGCACCATGGTGAGCAAGGGCGAGGAGCTGTTCACCGGGGTGGTGCCCAT | | TTCACCGGGG |
| | GGTCGAGCTGGACGGCGACGTAAACGGCCACAAGTTCAGCGTGTCCGGCGAGGGCGAGGGCGATGCCAC | | (SEQ ID |
| | CTACGGCAAGCTGACCCTGAAGTTCATCTGCACCACCGGCAAGCTGCCCGTGCCCTGGCCCACCCTCGT | | NO: 17071) |
| | GACCACCCTGACGTACGGCGTGCAGTGCTTACATACAACTAACATAgggagcACATGAGGATCACCCAT | | |
| | GTgcgactcCCACAGTCACTGGGgagtcttccctctctctctctctctctctcgggagcACATGAGGAT | | |
| | CACCCATGTgcgactcCCACAGTCACTGGGgagtcttccc | | |
| PL25381 | AGCTGTTCACCGGGGGTTTAAGAGCTAGAAATAGCAAGTTTAAATAAGGCTAGTCCGTTATCAACTTGA | 17047 | CGAGGAGCTG |
| | AAAAGTGGCACCGAGTCGGTGCCACCATGGTGAGCAAGGGCGAGGAGCTGTTCACCGGGGTGGTGCCCT | | TTCACCGGGG |
| | GGTCGAGCTGGACGGCGACGTAAACGGCCACAAGTTCAGCGTGTCCGGCGAGGGCGAGGGCGATGCCAC | | (SEQ ID |
| | CTACGGCAAGCTGACCCTGAAGTTCATCTGCACCACCGGCAAGCTGCCCGTGCCCTGGCCCACCCTCGT | | NO: 17071) |
| | GACCACCCTGACGTACGGCGTGCAGTGCTTACATACAACTAACATAgggagcACATGAGGATCACCCAT | | |
| | GTgcgactcCCACAGTCACTGGGgagtcttccctctctctctctctctctctcgggagcACATGAGGAT | | |
| | CACCCATGTgcgactcCCACAGTCACTGGGgagtcttccc | | |
| PL25382 | AGCTGTTCACCGGGGGTTTAAGAGCTAGAAATAGCAAGTTTAAATAAGGCTAGTCCGTTATCAACTTGA | 17048 | CGAGGAGCTG |
| | AAAAGTGGCACCGAGTCGGTGCCCACCATGGTGAGCAAGGGCGAGGAGCTGTTCACCGGGGTGGTGCCT | | TTCACCGGGG |
| | GGTCGAGCTGGACGGCGACGTAAACGGCCACAAGTTCAGCGTGTCCGGCGAGGGCGAGGGCGATGCCAC | | (SEQ ID |
| | CTACGGCAAGCTGACCCTGAAGTTCATCTGCACCACCGGCAAGCTGCCCGTGCCCTGGCCCACCCTCGT | | NO: 17071) |
| | GACCACCCTGACGTACGGCGTGCAGTGCTTACATACAACTAACATAgggagcACATGAGGATCACCCAT | | |
| | GTgcgactcCCACAGTCACTGGGgagtcttccctctctctctctctctctctcgggagcACATGAGGAT | | |
| | CACCCATGTgcgactcCCACAGTCACTGGGgagtcttccc | | |
| PL25383 | AGCTGTTCACCGGGGGTTTAAGAGCTAGAAATAGCAAGTTTAAATAAGGCTAGTCCGTTATCAACTTGA | 17049 | CGAGGAGCTG |
| | AAAAGTGGCACCGAGTCGGTGCCGAGCCACCGCCGCCACCATGGTGAGCAAGGGCGAGGAGCTGTTCAT | | TTCACCGGGG |
| | GGTCGAGCTGGACGGCGACGTAAACGGCCACAAGTTCAGCGTGTCCGGCGAGGGCGAGGGCGATGCCAC | | (SEQ ID |
| | CTACGGCAAGCTGACCCTGAAGTTCATCTGCACCACCGGCAAGCTGCCCGTGCCCTGGCCCACCCTCGT | | NO: 17071) |
| | GACCACCCTGACGTACGGCGTGCAGTGCTTACATACAACTAACATAgggagcACATGAGGATCACCCAT | | |
| | GTgcgactcCCACAGTCACTGGGgagtcttccctctctctctctctctctctcgggagcACATGAGGAT | | |
| | CACCCATGTgcgactcCCACAGTCACTGGGgagtcttccc | | |
| PL25384 | AGCTGTTCACCGGGGGTTTAAGAGCTAGAAATAGCAAGTTTAAATAAGGCTAGTCCGTTATCAACTTGA | 17050 | CGAGGAGCTG |
| | AAAAGTGGCACCGAGTCGGTGCATCCTCGAGCCACCGCCGCCACCATGGTGAGCAAGGGCGAGGAGCTT | | TTCACCGGGG |
| | GGTCGAGCTGGACGGCGACGTAAACGGCCACAAGTTCAGCGTGTCCGGCGAGGGCGAGGGCGATGCCAC | | (SEQ ID |
| | CTACGGCAAGCTGACCCTGAAGTTCATCTGCACCACCGGCAAGCTGCCCGTGCCCTGGCCCACCCTCGT | | NO: 17071) |
| | GACCACCCTGACGTACGGCGTGCAGTGCTTACATACAACTAACATAgggagcACATGAGGATCACCCAT | | |
| | GTgcgactcCCACAGTCACTGGGgagtcttccctctctctctctctctctctcgggagcACATGAGGAT | | |
| | CACCCATGTgcgactcCCACAGTCACTGGGgagtcttccc | | |
| PL25385 | AGCTGTTCACCGGGGGTTTAAGAGCTAGAAATAGCAAGTTTAAATAAGGCTAGTCCGTTATCAACTTGA | 17051 | CGAGGAGCTG |
| | AAAAGTGGCACCGAGTCGGTGCGATCCTCGAGCCACCGCCGCCACCATGGTGAGCAAGGGCGAGGAGCT | | TTCACCGGGG |
| | GGTCGAGCTGGACGGCGACGTAAACGGCCACAAGTTCAGCGTGTCCGGCGAGGGCGAGGGCGATGCCAC | | (SEQ ID |
| | CTACGGCAAGCTGACCCTGAAGTTCATCTGCACCACCGGCAAGCTGCCCGTGCCCTGGCCCACCCTCGT | | NO: 17071) |
| | GACCACCCTGACGTACGGCGTGCAGTGCTTACATACAACTAACATAgggagcACATGAGGATCACCCAT | | |
| | GTgcgactcCCACAGTCACTGGGgagtcttccctctctctctctctctctctcgggagcACATGAGGAT | | |
| | CACCCATGTgcgactcCCACAGTCACTGGGgagtcttccc | | |
| PL25386 | AGCTGTTCACCGGGGGTTTAAGAGCTAGAAATAGCAAGTTTAAATAAGGCTAGTCCGTTATCAACTTGA | 17052 | CGAGGAGCTG |
| | AAAAGTGGCACCGAGTCGGTGCGGCGCCTACGATCCTCGAGCCACCGCCGCCACCATGGTGAGCAAGGT | | TTCACCGGGG |
| | GGTCGAGCTGGACGGCGACGTAAACGGCCACAAGTTCAGCGTGTCCGGCGAGGGCGAGGGCGATGCCAC | | (SEQ ID |
| | CTACGGCAAGCTGACCCTGAAGTTCATCTGCACCACCGGCAAGCTGCCCGTGCCCTGGCCCACCCTCGT | | NO: 17071) |
| | GACCACCCTGACGTACGGCGTGCAGTGCTTACATACAACTAACATAgggagcACATGAGGATCACCCAT | | |
| | GTgcgactcCCACAGTCACTGGGgagtcttccctctctctctctctctctctcgggagcACATGAGGAT | | |
| | CACCCATGTgcgactcCCACAGTCACTGGGgagtcttccc | | |
| PL25387 | AGCTGTTCACCGGGGGTTTAAGAGCTAGAAATAGCAAGTTTAAATAAGGCTAGTCCGTTATCAACTTGA | 17053 | CGAGGAGCTG |
| | AAAAGTGGCACCGAGTCGGTGCTCTGTTCTGCGCCGTTACAGATCCAAGCTGTGACCGGCGCCTACGAT | | TTCACCGGGG |
| | GGTCGAGCTGGACGGCGACGTAAACGGCCACAAGTTCAGCGTGTCCGGCGAGGGCGAGGGCGATGCCAC | | (SEQ ID |
| | CTACGGCAAGCTGACCCTGAAGTTCATCTGCACCACCGGCAAGCTGCCCGTGCCCTGGCCCACCCTCGT | | NO: 17071) |
| | GACCACCCTGACGTACGGCGTGCAGTGCTTACATACAACTAACATAgggagcACATGAGGATCACCCAT | | |
| | GTgcgactcCCACAGTCACTGGGgagtcttccctctctctctctctctctctcgggagcACATGAGGAT | | |
| | CACCCATGTgcgactcCCACAGTCACTGGGgagtcttccc | | |
| PL25388 | AGGAGCTGTTCACCGGTTTAAGAGCTAGAAATAGCAAGTTTAAATAAGGCTAGTCCGTTATCAACTTGA | 17054 | GGGCGAGGAG |
| | AAAAGTGGCACCGAGTCGGTGCATGGTGAGCAAGGGCGAGGAGCTGTTCACCGGGGTGGTGCCCATCCT | | CTGTTCACCG |
| | GGTCGAGCTGGACGGCGACGTAAACGGCCACAAGTTCAGCGTGTCCGGCGAGGGCGAGGGCGATGCCAC | | (SEQ ID |
| | CTACGGCAAGCTGACCCTGAAGTTCATCTGCACCACCGGCAAGCTGCCCGTGCCCTGGCCCACCCTCGT | | NO: 17072) |
| | GACCACCCTGACGTACGGCGTGCAGTGCTTACATACAACTAACATAgggagcACATGAGGATCACCCAT | | |
| | GTgcgactcCCACAGTCACTGGGgagtcttccctctctctctctctctctctcgggagcACATGAGGAT | | |
| | CACCCATGTgcgactcCCACAGTCACTGGGgagtcttccc | | |
| PL25389 | GAGGAGCTGTTCACCGTTTAAGAGCTAGAAATAGCAAGTTTAAATAAGGCTAGTCCGTTATCAACTTGA | 17055 | AGGGCGAGGA |
| | AAAAGTGGCACCGAGTCGGTGCATGGTGAGCAAGGGCGAGGAGCTGTTCACCGGGGTGGTGCCCATCCT | | GCTGTTCACC |
| | GGTCGAGCTGGACGGCGACGTAAACGGCCACAAGTTCAGCGTGTCCGGCGAGGGCGAGGGCGATGCCAC | | (SEQ ID |
| | CTACGGCAAGCTGACCCTGAAGTTCATCTGCACCACCGGCAAGCTGCCCGTGCCCTGGCCCACCCTCGT | | NO: 17073) |
| | GACCACCCTGACGTACGGCGTGCAGTGCTTACATACAACTAACATAgggagcACATGAGGATCACCCAT | | |
| | GTgcgactcCCACAGTCACTGGGgagtcttccctctctctctctctctctctcgggagcACATGAGGAT | | |
| | CACCCATGTgcgactcCCACAGTCACTGGGgagtcttccc | | |
| PL25390 | CGAGGAGCTGTTCACGTTTAAGAGCTAGAAATAGCAAGTTTAAATAAGGCTAGTCCGTTATCAACTTGA | 17056 | AAGGGCGAGG |
| | AAAAGTGGCACCGAGTCGGTGCATGGTGAGCAAGGGCGAGGAGCTGTTCACCGGGGTGGTGCCCATCCT | | AGCTGTTCAC |
| | GGTCGAGCTGGACGGCGACGTAAACGGCCACAAGTTCAGCGTGTCCGGCGAGGGCGAGGGCGATGCCAC | | (SEQ ID |
| | CTACGGCAAGCTGACCCTGAAGTTCATCTGCACCACCGGCAAGCTGCCCGTGCCCTGGCCCACCCTCGT | | NO: 17074) |
| | GACCACCCTGACGTACGGCGTGCAGTGCTTACATACAACTAACATAgggagcACATGAGGATCACCCAT | | |
| | GTgcgactcCCACAGTCACTGGGgagtcttccctctctctctctctctctctcgggagcACATGAGGAT | | |
| | CACCCATGTgcgactcCCACAGTCACTGGGgagtcttccc | | |
| PL25391 | TGGTGAGCAAGGGCGGTTTAAGAGCTAGAAATAGCAAGTTTAAATAAGGCTAGTCCGTTATCAACTTGA | 17057 | CACCATGGTG |
| | AAAAGTGGCACCGAGTCGGTGCATGGTGAGCAAGGGCGAGGAGCTGTTCACCGGGGTGGTGCCCATCCT | | AGCAAGGGCG |
| | GGTCGAGCTGGACGGCGACGTAAACGGCCACAAGTTCAGCGTGTCCGGCGAGGGCGAGGGCGATGCCAC | | (SEQ ID |
| | CTACGGCAAGCTGACCCTGAAGTTCATCTGCACCACCGGCAAGCTGCCCGTGCCCTGGCCCACCCTCGT | | NO: 17075) |
| | GACCACCCTGACGTACGGCGTGCAGTGCTTACATACAACTAACATAgggagcACATGAGGATCACCCAT | | |
| | GTgcgactcCCACAGTCACTGGGgagtcttccctctctctctctctctctctcgggagcACATGAGGAT | | |
| | CACCCATGTgcgactcCCACAGTCACTGGGgagtcttccc | | |
| PL25392 | CACCATGGTGAGCAAGTTTAAGAGCTAGAAATAGCAAGTTTAAATAAGGCTAGTCCGTTATCAACTTGA | 17058 | GCCGCCACCA |
| | AAAAGTGGCACCGAGTCGGTGCATGGTGAGCAAGGGCGAGGAGCTGTTCACCGGGGTGGTGCCCATCCT | | TGGTGAGCAA |
| | GGTCGAGCTGGACGGCGACGTAAACGGCCACAAGTTCAGCGTGTCCGGCGAGGGCGAGGGCGATGCCAC | | (SEQ ID |
| | CTACGGCAAGCTGACCCTGAAGTTCATCTGCACCACCGGCAAGCTGCCCGTGCCCTGGCCCACCCTCGT | | NO: 17076) |
| | GACCACCCTGACGTACGGCGTGCAGTGCTTACATACAACTAACATAgggagcACATGAGGATCACCCAT | | |
| | GTgcgactcCCACAGTCACTGGGgagtcttccctctctctctctctctctctcgggagcACATGAGGAT | | |
| | CACCCATGTgcgactcCCACAGTCACTGGGgagtcttccc | | |
| PL25393 | CCACCATGGTGAGCAGTTTAAGAGCTAGAAATAGCAAGTTTAAATAAGGCTAGTCCGTTATCAACTTGA | 17059 | CGCCGCCACC |
| | AAAAGTGGCACCGAGTCGGTGCATGGTGAGCAAGGGCGAGGAGCTGTTCACCGGGGTGGTGCCCATCCT | | ATGGTGAGCA |
| | GGTCGAGCTGGACGGCGACGTAAACGGCCACAAGTTCAGCGTGTCCGGCGAGGGCGAGGGCGATGCCAC | | (SEQ ID |
| | CTACGGCAAGCTGACCCTGAAGTTCATCTGCACCACCGGCAAGCTGCCCGTGCCCTGGCCCACCCTCGT | | NO: 17077) |
| | GACCACCCTGACGTACGGCGTGCAGTGCTTACATACAACTAACATAgggagcACATGAGGATCACCCAT | | |
| | GTgcgactcCCACAGTCACTGGGgagtcttccctctctctctctctctctctcgggagcACATGAGGAT | | |
| | CACCCATGTgcgactcCCACAGTCACTGGGgagtcttccc | | |
| PL25394 | CCACCGCCGCCACCAGTTTAAGAGCTAGAAATAGCAAGTTTAAATAAGGCTAGTCCGTTATCAACTTGA | 17060 | TCGAGCCACC |
| | AAAAGTGGCACCGAGTCGGTGCATGGTGAGCAAGGGCGAGGAGCTGTTCACCGGGGTGGTGCCCATCCT | | GCCGCCACCA |
| | GGTCGAGCTGGACGGCGACGTAAACGGCCACAAGTTCAGCGTGTCCGGCGAGGGCGAGGGCGATGCCAC | | (SEQ ID |
| | CTACGGCAAGCTGACCCTGAAGTTCATCTGCACCACCGGCAAGCTGCCCGTGCCCTGGCCCACCCTCGT | | NO: 17078) |
| | GACCACCCTGACGTACGGCGTGCAGTGCTTACATACAACTAACATAgggagcACATGAGGATCACCCAT | | |
| | GTgcgactcCCACAGTCACTGGGgagtcttccctctctctctctctctctctcgggagcACATGAGGAT | | |
| | CACCCATGTgcgactcCCACAGTCACTGGGgagtcttccc | | |
| PL25395 | GATCCAAGCTGTGACGTTTAAGAGCTAGAAATAGCAAGTTTAAATAAGGCTAGTCCGTTATCAACTTGA | 17061 | TTACAGATCC |
| | AAAAGTGGCACCGAGTCGGTGCATGGTGAGCAAGGGCGAGGAGCTGTTCACCGGGGTGGTGCCCATCCT | | AAGCTGTGAC |
| | GGTCGAGCTGGACGGCGACGTAAACGGCCACAAGTTCAGCGTGTCCGGCGAGGGCGAGGGCGATGCCAC | | (SEQ ID |
| | CTACGGCAAGCTGACCCTGAAGTTCATCTGCACCACCGGCAAGCTGCCCGTGCCCTGGCCCACCCTCGT | | NO: 17079) |
| | GACCACCCTGACGTACGGCGTGCAGTGCTTACATACAACTAACATAgggagcACATGAGGATCACCCAT | | |
| | GTgcgactcCCACAGTCACTGGGgagtcttccctctctctctctctctctctcgggagcACATGAGGAT | | |
| | CACCCATGTgcgactcCCACAGTCACTGGGgagtcttccc | | |

[1346] More specifically, a gene modifying polypeptide binds the guide RNA molecule and a ttRNA molecule, together forming a gene modifying complex, which binds and nicks the target locus and performs template-directed incorporation of the desired edit in a first strand of the genomic DNA. The additional Cas9 or different gene modifying polypeptide molecule is recruited to the nicked DNA strand by ttRNA (e.g., by a 5′ end block containing a gRNA spacer), forming a second complex, and by the additional species-matched gRNA, forming a third complex. The second complex may extend the bubble of unwound/single-stranded DNA and facilitate large insertions, while the third complex is used to introduce a nick on the second strand to initiate second strand synthesis, and/or signal to the cell's endogenous repair system that the edited strand should be copied and maintained.

[1347] To assess the genome-editing capacity of the gene modifying system, a 6-component gene modifying system is electroporated into the HEK293T/U2OS 150 bp insertion GFP reporter-expressing cell line. All 6 components of the gene modifying system are delivered by nucleofection in DNA/RNA format. Specifically, 200-800 ng of gene modifying polypeptide plasmid DNA (or 1-4 ug mRNA) is combined with 50-200 ng ttRNA and 50-200 ng gRNA in plasmid format (or 2.5-10 uM ttRNA and 2.5-10 uM gRNA in RNA format). An additional 50-200 ng of Cas9- or different gene modifying polypeptide-encoding plasmid DNA (or 1-4 ug mRNA) and/or 25-100 ng of a second gRNA-encoding plasmid (or 1-10 uM gRNA in RNA format) are also nucleofected together with the gene modifying system. The plasmids or RNAs encoding the gene modifying system are added to 25 μL SF/SE buffer containing 250,000 HEK293T/U2OS 150 bp insertion GFP reporter-expressing cells, and the cells are nucleofected using program DS-150/DN-100. After nucleofection, cells are grown at 37° C., 5% CO₂ for at least 3 days prior to cell lysis and genomic DNA extraction. To analyze gene editing activity, primers flanking the GFP locus can be used to amplify across the locus. Amplicons are analyzed via short read sequencing, e.g. using an Illumina MiSeq. Replacement of the genomic sequence with the template sequence encoded in the ttRNA or insertion of the template sequence encoded in the ttRNA will indicate successful editing.

[1348] It should be understood that for all numerical bounds describing some parameter in this application, such as “about,” “at least,” “less than,” and “more than,” the description also necessarily encompasses any range bounded by the recited values. Accordingly, for example, the description “at least 1, 2, 3, 4, or 5” also describes, inter alia, the ranges 1-2, 1-3, 1-4, 1-5, 2-3, 2-4, 2-5, 3-4, 3-5, and 4-5, et cetera.

[1349] For all patents, applications, or other reference cited herein, such as non-patent literature and reference sequence information, it should be understood that they are incorporated by reference in their entirety for all purposes as well as for the proposition that is recited. Where any conflict exists between a document incorporated by reference and the present application, this application will control. All information associated with reference gene sequences disclosed in this application, such as GeneIDs or accession numbers (typically referencing NCBI accession numbers), including, for example, genomic loci, genomic sequences, functional annotations, allelic variants, and reference mRNA (including, e.g., exon boundaries or response elements) and protein sequences (such as conserved domain structures), as well as chemical references (e.g., PubChem compound, PubChem substance, or PubChem Bioassay entries, including the annotations therein, such as structures and assays, et cetera), are hereby incorporated by reference in their entirety.

[1350] Headings used in this application are for convenience only and do not affect the interpretation of this application.

1. A template RNA comprising:
a) a heterologous object sequence comprising, from 5′ to 3′:
i) a post-edit homology region having a length of at least 7, 10, 13, 15, 17, 20, 25, or 30 nucleotides,
ii) a mutation region having a length of at least 20 nucleotides, to introduce a mutation into a target nucleic acid sequence wherein the mutation region, and
iii) optionally, a pre-edit homology region, and
b) a primer binding site sequence (PBS sequence) that binds a first portion of the target nucleic acid sequence, wherein first portion is in the first strand of the target nucleic acid sequence, and wherein the PBS sequence is 3′ of the heterologous object sequence,
c) an RBD recruitment site (RRS), wherein the RRS is 5′ of the heterologous object sequence or 3′ of the PBS sequence; and
d) an end block sequence which is 5′ of the heterologous object sequence (e.g., wherein the end block sequence is 5′ of both of the heterologous object sequence and the RRS), wherein the end block sequence comprises:
i) a gRNA spacer having a length of at least 18 nt, wherein the gRNA spacer is complementary to a second portion of the target nucleic acid sequence wherein the second portion is on the first strand of the target nucleic acid sequence; and
ii) a gRNA scaffold.

2. A template RNA comprising:
a) a heterologous object sequence comprising, from 5′ to 3′:
i) a post-edit homology region having a length of at least 7, 10, 13, 15, 17, 20, 25, or 30 nucleotides,
ii) a mutation region having a length of at least 20 nucleotides, to introduce a mutation into a target nucleic acid sequence wherein the mutation region, and
iii) optionally, a pre-edit homology region, and
b) a primer binding site sequence (PBS sequence) that binds a first portion of the target nucleic acid sequence, wherein first portion is in the first strand of the target nucleic acid sequence, and wherein the PBS sequence is 3′ of the heterologous object sequence,
c) an RBD recruitment site (RRS), wherein the RRS is 5′ of the heterologous object sequence or 3′ of the PBS sequence; and
d) an end block sequence which is 5′ of the heterologous object sequence (e.g., wherein the end block sequence is 5′ of both of the heterologous object sequence and the RRS), wherein the end block sequence comprises:
i) a gRNA spacer (optionally having a length of at least 18 nt), wherein the gRNA spacer is complementary to a second portion of the target nucleic acid sequence wherein the second portion is on the first strand of the target nucleic acid sequence; and
ii) a gRNA scaffold.

3. A template RNA comprising:
a) a heterologous object sequence comprising a mutation region to introduce a mutation into a target nucleic acid sequence (wherein optionally the heterologous object sequence comprises, from 5′ to 3′, a post-edit homology region, the mutation region, and a pre-edit homology region), and
b) a primer binding site sequence (PBS sequence) that binds a first portion of the target nucleic acid sequence, wherein first portion is in the first strand of the target nucleic acid sequence, and wherein the PBS sequence is 3′ of the heterologous object sequence, and
c) an RBD recruitment site (RRS), wherein the RRS is 3′ of the PBS sequence or 5′ of the heterologous object sequence.

4. A template RNA comprising:
a) a heterologous object sequence comprising a mutation region to introduce a mutation into a target nucleic acid sequence (wherein optionally the heterologous object sequence comprises, from 5′ to 3′, a post-edit homology region, the mutation region, and a pre-edit homology region), and
b) a primer binding site sequence (PBS sequence) that binds a first portion of the target nucleic acid sequence, wherein first portion is in the first strand of the target nucleic acid sequence, and wherein the PBS sequence is 3′ of the heterologous object sequence, and
c) an RBD recruitment site (RRS), wherein optionally the RRS is situated between the PBS sequence and the heterologous object sequence, or within the heterologous object sequence (e.g., between the pre-edit homology region and the mutation region).

5. The template RNA of any of the preceding claims, wherein the post-edit homology region comprises, in 5′ to 3′ order:
i) a primer homology region, and
ii) optionally, an extension homology region.

6. The template RNA of claim 5, wherein the primer homology region has a length of at least 7, 10, 13, 15, 17, 20, 25, or 30 nucleotides.

7. The template RNA of claim 5, wherein the primer homology region has a length of 5-50, 5-10, 7-10, 10-15, 15-20, 20-25, 25-30, 30-35, or 35-50 nucleotides.

8. The template RNA of any of claims 5-7, which lacks an extension homology region.

9. The template RNA of any of claims 5-7, wherein the extension homology region has a length of at least 8, 15, 23, or 31 nucleotides.

10. The template RNA of any of claims 5-7, wherein the extension homology region has a length of 1-5, 5-10, 10-15, 15-20, 20-25, 25-30, or 30-35 nucleotides.

11. The template RNA of any of the preceding claims, wherein the region of the target nucleic acid corresponding to the PBS is 0-10 nt, e.g., 6 nt from the region of the target nucleic acid corresponding to the post-edit homology region.

12. The template RNA of any of the preceding claims, wherein the post-edit homology region has a length of at least 44, 45, 46, 47, 48, 49, or 50 nucleotides.

13. The template RNA of any of the preceding claims, wherein the post-edit homology region has a length of at least 30, 35, 40, or 45 nucleotides.

14. The template RNA of any of the preceding claims, wherein the post-edit homology region has a length of 30-35, 35-40, 40-45 or 45-50 nucleotides.

15. The template RNA of any of the preceding claims, wherein the post-edit homology region has a length of 46 nucleotides.

16. The template RNA of any of the preceding claims, wherein the heterologous object sequence (e.g., between the post-edit homology region and the mutation region) comprises a deletion relative to a portion of the target nucleic acid sequence, the portion comprising at least 2, 3, 4, 5, 6, 7, 8, 9, 10, 11, 12, 13, 14, 15, 16, 17, 18, 19, 20, 30, 40, 50, 100, 200, 300, or 400 contiguous nucleotides, or 2-10, 10-20, 20-50, 50-100, 100-200, or 200-500 contiguous nucleotides of the target nucleic acid sequence.

17. The template RNA of claim 16, which results in a deletion in the target DNA that is between the first stand nick and second strand nick.

18. The template RNA of claim 17, wherein a first end of the deletion is 6 bp away from the first strand nick.

19. The template RNA of claim 17, wherein a second end of the deletion is 15-20, 20-25, 20-30, 30-35, 35-50, 50-100, 100-200, or 200-500 bp away from the second strand nick.

20. The template RNA of any of claims 16-18, wherein the deletion in the target DNA is immediately adjacent to the region of the target nucleic acid corresponding to the post-edit homology region.

21. The template RNA of any of the preceding claims, wherein the editing does not increase the length of the target nucleic acid sequence.

22. The template RNA of any of the preceding claims, wherein the mutation region has a length of at least 30, 40, 50, 60, 70, 80, 90, 100, 110, 120, 125, 130, 140, 150, 175, or 200 nucleotides.

23. The template RNA of any of the preceding claims, wherein the mutation region has a length of about 20-300, 30-250, 50-200, 125-175, 100-150, or 150-200 nucleotides.

24. The template RNA of any of the preceding claims, wherein the post-edit homology region has a length of at least 35, 40, 45, 46, 50, 55, 60, 70, 80, 90, 100, 102, or 150 nucleotides.

25. The template RNA of any of the preceding claims, wherein the post-edit homology region has a length of about 35-55 or 40-50 nucleotides.

26. The template RNA of any of the preceding claims, wherein the pre-edit homology region has a length of about 5-10, 10-15, or 15-20 nucleotides.

27. The template RNA of any of the preceding claims, wherein the PBS sequence has a length of 8-20, 10-15, or 13 nucleotides.

28. The template RNA of any of the preceding claims, wherein the RRS comprises an MS2 sequence.

29. The template RNA of any of the preceding claims, which comprises a plurality (e.g., 2, 3, or 4) of RRS sequences in tandem.

30. The template RNA of claim 29, wherein the plurality of RRS sequences are MS2 sequences.

31. The template RNA of any of the preceding claims, which comprises a linker sequence between the RRS and PBS, wherein optionally the linker sequence has a length of 4-20 nucleotides, e.g., 8 or 16 nucleotides.

32. The template RNA of any of the preceding claims, wherein the end block sequence comprises a sequence of Table 41 or a sequence having at least 70%, 75%, 80%, 85%, 90%, 95%, 98%, or 99% identity thereto.

33. The template RNA of any of the preceding claims, wherein the RRS is 3′ of the PBS sequence.

34. The template RNA of any of claims 1-32, wherein the RRS is 5′ of the heterologous object sequence.

35. The template RNA of any of the preceding claims, wherein the RRS has a sequence according to Table 40 or a sequence having at least 70%, 75%, 80%, 85%, 90%, 95%, 98%, or 99% identity thereto.

36. The template RNA of any of the preceding claims, which comprises a plurality of RRSs, e.g., a tandem array of 2, 3, 4, 5, or 10 RRSs.

37. The template RNA of any of the preceding claims, wherein the PBS sequence comprises 8-17 nucleotides, e.g., 8-17 nucleotides of 100% identity to the target nucleic acid sequence.

38. The template RNA of any of the preceding claims wherein the pre-edit homology region comprises up to 20 nucleotides, e.g., up to 20 nucleotides of 100% identity to the target nucleic acid sequence.

39. The template RNA of any of the preceding claims wherein the post-edit homology region comprises 30-500 nucleotides, e.g., 30-500 nucleotides of 100% identity to the target nucleic acid sequence.

40. The template RNA of any of the preceding claims, wherein the mutation region is configured to produce an insertion in the target nucleic acid.

41. The template RNA of any of the preceding claims, wherein the gRNA scaffold is situated between the gRNA spacer and the heterologous object sequence.

42. A template RNA comprising:
a) a heterologous object sequence comprising a mutation region to introduce a mutation into a target nucleic acid sequence (wherein optionally the heterologous object sequence comprises, from 5′ to 3′, a post-edit homology region, the mutation region, and a pre-edit homology region), and
b) a primer binding site sequence (PBS sequence) that binds a first portion of the target nucleic acid sequence, wherein first portion is in the first strand of the target nucleic acid sequence, and wherein the PBS sequence is 3′ of the heterologous object sequence, and
c) an RBD recruitment site (RRS), wherein the RRS is 3′ of the PBS sequence or 5′ of the heterologous object sequence.

43. A gene modifying polypeptide comprising:
a reverse transcriptase (RT) domain; and
a DNA binding domain (DBD) that binds to a target nucleic acid sequence and is heterologous to the RT domain (e.g., a Cas domain, e.g., a Cas nickase domain, e.g., a Cas9 nickase domain); and
a RNA-binding domain (RBD) that is heterologous to the DBD and the RT domain.

44. A gene modifying polypeptide comprising:
a reverse transcriptase (RT) domain; and
a DNA binding domain (DBD) that binds to a target nucleic acid sequence and is heterologous to the RT domain (e.g., a Cas domain, e.g., a Cas nickase domain, e.g., a Cas9 nickase domain); and
a RNA-binding domain (RBD) that is heterologous to the DBD and the RT domain, wherein the domains are arranged, in an N-terminal to C-terminal direction:
g) DBD, RT domain, RBD;
h) RT domain, DBD, RBD;
i) RBD, DBD, RT domain;
j) RBD, RT domain, DBD;
k) DBD, RBD, RT domain; or
l) RT domain, RBD, DBD.

45. A gene modifying polypeptide comprising:
a reverse transcriptase (RT) domain; and
a DNA binding domain (DBD) that binds to a target nucleic acid sequence and is heterologous to the RT domain (e.g., a Cas nickase domain, e.g., a Cas9 nickase domain); and
a plurality (e.g., 2, 3, 4, or 5) RNA-binding domains (RBD) that are heterologous to the DBD and the RT domain.

46. A gene modifying polypeptide comprising:
a reverse transcriptase (RT) domain; and
a DNA binding domain (DBD) that binds to a target nucleic acid sequence and is heterologous to the RT domain (e.g., a Cas domain, e.g., a Cas nickase domain, e.g., a Cas9 nickase domain); and
a RNA-binding domain (RBD) that is heterologous to the DBD and the RT domain,
wherein the domains are arranged, in an N-terminal to C-terminal direction:
(a) DBD, RT domain, RBD;
(b) RT domain, DBD, RBD;
(c) RBD, DBD, RT domain;
(d) RBD, RT domain, DBD;
(e) DBD, RBD, RT domain; or
(f) RT domain, RBD, DBD.

47. A gene modifying polypeptide comprising:
a reverse transcriptase (RT) domain; and
a DNA binding domain (DBD) that binds to a target nucleic acid sequence and is heterologous to the RT domain (e.g., a Cas nickase domain, e.g., a Cas9 nickase domain); and
a plurality (e.g., 2, 3, 4, or 5) RNA-binding domains (RBD) that are heterologous to the DBD and the RT domain.

48. A polypeptide system (e.g., a polypeptide complex) comprising:
a) a reverse transcriptase (RT) domain; and
b) a DNA binding domain (DBD) that binds to a target nucleic acid sequence and is heterologous to the RT domain (e.g., a Cas domain, e.g., a Cas9 domain, e.g., a Cas9 nickase domain); and
c) a RNA-binding domain (RBD) that is heterologous to the DBD and the RT domain,
wherein at least 2 of (e.g., all of) (a), (b), and (c) are in separate polypeptides, e.g., separate polypeptides that noncovalently form a complex.

49. A polypeptide system comprising:
a first polypeptide comprising:
a DNA binding domain (DBD) (e.g., a Cas domain, e.g., a Cas nickase domain, e.g., a Cas9 nickase domain);
a RNA-binding domain (RBD) that is heterologous to the DBD; and
optionally, a linker disposed between the DBD and the RBD; and
a second polypeptide comprising:
an RT domain, and
a DNA binding domain (DBD) (e.g., a Cas domain, e.g., a Cas nickase domain, e.g., a Cas9 nickase domain), that is heterologous to the RT domain; and
optionally, a linker disposed between the RT domain and the DBD.

50. A polypeptide system (e.g., a polypeptide complex) comprising:
a) a reverse transcriptase (RT) domain; and
b) a DNA binding domain (DBD) that binds to a target nucleic acid sequence and is heterologous to the RT domain (e.g., a Cas domain, e.g., a Cas9 domain, e.g., a Cas9 nickase domain); and
c) a RNA-binding domain (RBD) that is heterologous to the DBD and the RT domain,
wherein at least 2 of (e.g., all of) (a), (b), and (c) are in separate polypeptides, e.g., separate polypeptides that noncovalently form a complex.

51. A polypeptide system comprising:
a first polypeptide comprising:
a DNA binding domain (DBD) (e.g., a Cas domain, e.g., a Cas nickase domain, e.g., a Cas9 nickase domain);
a RNA-binding domain (RBD) that is heterologous to the DBD; and
optionally, a linker disposed between the DBD and the RBD; and
a second polypeptide comprising:
an RT domain, and
a DNA binding domain (DBD) (e.g., a Cas domain, e.g., a Cas nickase domain, e.g., a Cas9 nickase domain), that is heterologous to the RT domain; and
optionally, a linker disposed between the RT domain and the DBD.

52. A gene modifying system comprising the template RNA of any of the preceding claims and a gene modifying polypeptide, or a nucleic acid encoding the gene modifying polypeptide.

53. The system of claim 52, wherein the gene modifying polypeptide comprises
a reverse transcriptase (RT) domain;
a DNA binding domain (DBD) that binds to a target nucleic acid sequence and is heterologous to the RT domain (e.g., a Cas domain, e.g., a Cas nickase domain, e.g., a Cas9 nickase domain); and
a RNA-binding domain (RBD) that is heterologous to the DBD and the RT domain.

54. The system of claim 53, wherein the domains are arranged, in an N-terminal to C-terminal direction:
g) DBD, RT domain, RBD;
h) RT domain, DBD, RBD;
i) RBD, DBD, RT domain;
j) RBD, RT domain, DBD;
k) DBD, RBD, RT domain; or
l) RT domain, RBD, DBD.

55. The system of any of claims 53-54, which comprises a plurality (e.g., 2, 3, 4, or 5) RNA-binding domains (RBD) that are heterologous to the DBD and the RT domain.

56. The system of any of claims 53-55, wherein the RBD has an amino acid sequence according to Table 31, or at least 75%, 80%, 85%, 90%, 95%, 96%, 97%, 98%, or 99% identity thereto.

57. The system of any of claims 53-56, wherein the plurality of RBDs have the same amino acid sequence as each other.

58. The system of any of claims 53-56, wherein the plurality of RBDs have different amino acid sequences from each other.

59. The system of any of claims 53-58, wherein the DBD has an amino acid sequence according to Table 7 or 8, or at least 75%, 80%, 85%, 90%, 95%, 96%, 97%, 98%, or 99% identity thereto.

60. The system of any of claims 53-59, wherein the RT domain has an amino acid sequence according to Table 6, or at least 75%, 80%, 85%, 90%, 95%, 96%, 97%, 98%, or 99% identity thereto.

61. The system of any of claims 53-60, wherein the gene modifying polypeptide comprises a linker.

62. The system of claim 61, wherein the linker of the gene modifying polypeptide comprises a sequence according to Table 10, or a sequence having at least 75%, 80%, 85%, 90%, 95%, 96%, 97%, 98%, or 99% identity thereto.

63. The system of claim 61 or 62, wherein the linker of the gene modifying polypeptide is disposed between the DBD and the RT domain, the RT domain and the RBD, or between the RBD and the DBD.

64. The system of any of claims 53-63, wherein the gene modifying polypeptide comprises, in an N-terminal to C-terminal direction:
g) the DBD, a first linker, the RT domain, a second linker, the RBD;
h) the RT domain, a first linker, the DBD, a second linker, the RBD;
i) the RBD, a first linker, the DBD, a second linker, the RT domain;
j) RBD, a first linker, RT domain, a second linker, DBD;
k) the DBD, a first linker, the RBD, a second linker, the RT domain; or
l) the RT domain, a first linker, the RBD, a second linker, the DBD.

65. The system of any of claims 52-64, wherein the gene modifying polypeptide was produced by intein-mediated fusion of an N-terminal portion comprising an intein-N domain and a C-terminal portion comprising an intein-C domain.

66. The system of any of claims 52-65, wherein the gene modifying polypeptide binds the gRNA scaffold.

67. The system of any of claims 52-65, wherein the gene modifying polypeptide does not substantially bind the gRNA scaffold.

68. The system of any of claims 52-67, which further comprises a gRNA, wherein the gRNA comprises:
a second gRNA spacer that binds a third portion of the target nucleic acid sequence, wherein the third portion is on the second strand of the target nucleic acid sequence; and
a second gRNA scaffold that binds the DBD of the gene modifying polypeptide.

69. The system of claim 68, wherein the second gRNA scaffold has a different sequence from the sequence of the gRNA scaffold in the template RNA.

70. The system of claim 68 or 69, wherein the gRNA directs a first strand nick to a first site of a first strand of a target nucleic acid molecule, and/or the end block sequence directs a second strand nick to a second site of a second strand of the target nucleic acid molecule.

71. The system of claim 70, wherein the first strand nick and the second strand nick are about 18, 19, 20, 21, 22, 23, 24, 25-50, 50-100, 100-200, or 200-500 nucleotides apart in the target nucleic acid molecule.

72. The system of claim 70, wherein the first strand nick and the second strand nick are about 15-20 or 20-25 nucleotides apart in the target nucleic acid molecule.

73. The system of any of claims 70-72, wherein the post-edit homology region comprises the same nucleic acid sequence as a region in the second strand of the target nucleic acid molecule comprising the second site.

74. The system of any of claims 68-73, wherein the post-edit homology region comprises the nucleic acid sequence of at least a portion of (e.g., all of) the gRNA spacer of the end block sequence, wherin optionally:
a) the post-edit homology region comprises the nucleic acid sequence of the gRNA spacer of the end block sequence;
b) the post-edit homology region comprises the nucleic acid sequence of a portion of, but not all of, the gRNA spacer of the end block sequence.

75. The system of any of claims 68-74, wherein the post-edit homology region comprises a first subregion and the gRNA spacer of the end block sequence comprises a second subregion, wherein the first subregion and the second subregion have the same nucleic acid sequence.

76. The system of any of claims 68-75, wherein the distance between (i) the second portion of the target nucleic acid sequence and (ii) the third portion of the target nucleic acid sequence is about 12, 13, 14, 15, 16, 17, 18, or 19 nucleotides.

77. The system of any of claims 52-76, which further comprises a second Cas protein or a nucleic acid encoding the second Cas protein.

78. The system of claim 77, wherein the second Cas protein is a Cas nickase protein (e.g., a Cas9 nickase protein) or a dead Cas protein (e.g., a dead Cas9 protein).

79. The system of claim 77 or 78, wherein the second Cas protein binds the gRNA scaffold of the template RNA.

80. The system of any of claims 77-79, wherein the gene modifying polypeptide does not substantially bind the gRNA scaffold of the template RNA.

81. The system of any of claims 77-80, wherein the second Cas protein does not substantially bind the second gRNA scaffold.

82. The system of any of claims 77-81, wherein the gRNA spacer of the template RNA induces nicking of the target nucleic acid, e.g., at the second strand of the target nucleic acid sequence.

83. The template RNA or system of any of the preceding claims, wherein the target nucleic acid sequence is a target gene, enhancer, or promoter.

84. The template RNA or system of any of the preceding claims, wherein the target nucleic acid sequence is a human target gene, human enhancer, or human promoter.

85. The system of any of claims 52-84, which comprises the nucleic acid encoding the gene modifying polypeptide.

86. The system of claim 85, wherein the nucleic acid encoding the gene modifying polypeptide comprises an mRNA.

87. A method for modifying a target nucleic acid in a cell (e.g., a human cell), the method comprising contacting the cell with the system of any one of the preceding claims, or nucleic acid encoding the same, thereby modifying the target nucleic acid.

88. The method of claim 87, wherein the cell is in vivo or ex vivo.

89. The method of claim 87 or 88, which results in an insertion into the target nucleic acid.

90. The method of claim 89, wherein the insertion has a length of at least 20, 30, 40, 50, 60, 70, 80, 90, 100, 110, 120, 125, 130, 140, 150, 175, or 200 nucleotides.

91. The method of claim 89, wherein the insertion has a length of about 20-300, 30-250, 50-200, 125-175, 100-150, or 150-200 nucleotides.

92. A system comprising:
I) template RNA comprising:
a) a heterologous object sequence comprising, from 5′ to 3′:
i) optionally, a post-edit homology region,
ii) a mutation region, to introduce a mutation into a target nucleic acid sequence wherein the mutation region, and
iii) optionally, a pre-edit homology region, and
b) a primer binding site sequence (PBS sequence) that binds a first portion of the target nucleic acid sequence, wherein first portion is in the first strand of the target nucleic acid sequence, and wherein the PBS sequence is 3′ of the heterologous object sequence,
c) an RBD recruitment site (RRS), wherein the RRS is 5′ of the heterologous object sequence or 3′ of the PBS sequence; and
d) an end block sequence which is 5′ of the heterologous object sequence (e.g., wherein the end block sequence is 5′ of both of the heterologous object sequence and the RRS), wherein the end block sequence comprises:
i) a gRNA spacer having a length of 12-17 nt (e.g., 15 nt), wherein the gRNA spacer is complementary to a second portion of the target nucleic acid sequence wherein the second portion is on the first strand of the target nucleic acid sequence; and
ii) a gRNA scaffold; and
II) a gRNA configured to produce a second strand nick (a “second strand nick gRNA”), comprising:
i) a gRNA spacer having a length of at least 18 nt, wherein the gRNA spacer is complementary to a further portion of the first target nucleic acid sequence; and
ii) a gRNA scaffold,
wherein:
the second portion is situated between the first portion and the further portion; or
the further portion is situated between the first portion and the second portion.

The application's sequence listing, which the Patent Office published only in electronic form, follows.

SEQUENCE LISTING (19402 sequences)

SEQ ID NO: 1 - skipped

SEQ ID NO: 2 - protein, 672 aa, Murine leukemia virus
TLNIEDEYRLHETSKEPDVSLGSTWLSDFPQAWAETGGMGLAVRQAPLIIPLKATSTPVSIKQYPMSQEARLGIKPHIQRLLDQGILVPCQSPWNTPLLPVKKPGTNDYRPVQDLREVNKRVEDIHPTVPNPYNLLSGLPPSHQWYTVLDLKDAFFCLRLHPTSQPLFAFEWRDPEMGISGQLTWTRLPQGFKNSPTLFDEALHRDLADFRIQHPDLILLQYVDDLLLAATSELDCQQGTRALLQTLGNLGYRASAKKAQICQKQVKYLGYLLKEGQRWLTEARKETVMGQPTPKTPRQLREFLGTAGFCRLWIPGFAEMAAPLYPLTKTGTLFNWGPDQQKAYQEIKQALLTAPALGLPDLTKPFELFVDEKQGYAKGVLTQKLGPWRRPVAYLSKKLDPVAAGWPPCLRMVAAIAVLTKDAGKLTMGQPLVILAPHAVEALVKQPPDRWLSNARMTHYQALLLDTDRVQFGPVVALNPATLLPLPEEGLQHNCLDILAEAHGTRPDLTDQPLPDADHTWYTDGSSLLQEGQRKAGAAVTTETEVIWAKALPAGTSAQRAELIALTQALKMAEGKKLNVYTDSRYAFATAHIHGEIYRRRGLLTSEGKEIKNKDEILALLKALFLPKRLSIIHCPGHQKGHSAEARGNRMADQAARKAAITETPDTSTLLI

SEQ ID NO: 3 - protein, 671 aa, Murine leukemia virus
TLNIEDEHRLHETSKEPDVSLGSTWLSDFPQAWAETGGMGLAVRQAPLIIPLKATSTPVSIKQYPMSQEARLGIKPHIQRLLDQGILVPCQSPWNTPLLPVKKPGTNDYRPVQDLREVNKRVEDIHPTVPNPYNLLSGLPPSHQWYTVLDLKDAFFCLRLHPTSQPLFAFEWRDPEMGISGQLTWTRLPQGFKNSPTLFDEALHRDLADFRIQHPDLILLQYVDDLLLAATSELDCQQGTRALLQTLGNLGYRASAKKAQICQKQVKYLGYLLKEGQRWLTEARKETVMGQPTPKTPRQLREFLGTAGFCRLWIPGFAEMAAPLYPLTKTGTLFNWGPDQQKAYQEIKQALLTAPALGLPDLTKPFELFVDEKQGYAKGVLTQKLGPWRRPVAYLSKKLDPVAAGWPPCLRMVAAIAVLTKDAGKLTMGQPLVILAPHAVEALVKQPPDRWLSNARMTHYQALLLDTDRVQFGPVVALNPATLLPLPEEGLQHNCLDILAEAHGTRPDLTDQPLPDADHTWYTDGSSLLQEGQRKAGAAVTTETEVIWAKALPAGTSAQRAELIALTQALKMAEGKKLNVYTDSRYAFATAHIHGEIYRRRGLLTSEGKEIKNKDEILALLKALFLPKRLSIIHCPGHQKGHSAEARGNRMADQAARKAAITETPDTSTLL

SEQ ID NO: 4 - protein, 660 aa, Murine leukemia virus
TLNIEDEHRLHETSKEPDVSLGSTWLSDFPQAWAETGGMGLAVRQAPLIIPLKATSTPVSIKQYPMSQEARLGIKPHIQRLLDQGILVPCQSPWNTPLLPVKKPGTNDYRPVQDLREVNKRVEDIHPTVPNPYNLLSGLPPSHQWYTVLDLKDAFFCLRLHPTSQPLFAFEWRDPEMGISGQLTWTRLPQGFKNSPTLFDEALHRDLADFRIQHPDLILLQYVDDLLLAATSELDCQQGTRALLQTLGNLGYRASAKKAQICQKQVKYLGYLLKEGQRWLTEARKETVMGQPTPKTPRQLREFLGTAGFCRLWIPGFAEMAAPLYPLTKTGTLFNWGPDQQKAYQEIKQALLTAPALGLPDLTKPFELFVDEKQGYAKGVLTQKLGPWRRPVAYLSKKLDPVAAGWPPCLRMVAAIAVLTKDAGKLTMGQPLVILAPHAVEALVKQPPDRWLSNARMTHYQALLLDTDRVQFGPVVALNPATLLPLPEEGLQHNCLDILAEAHGTRPDLTDQPLPDADHTWYTDGSSLLQEGQRKAGAAVTTETEVIWAKALPAGTSAQRAELIALTQALKMAEGKKLNVYTDSRYAFATAHIHGEIYRRRGLLTSEGKEIKNKDEILALLKALFLPKRLSIIHCPGHQKGHSAEARGNRMADQAARKAA

SEQ ID NO: 5 - protein, 672 aa, synthetic construct
TLNIEDEYRLHETSKEPDVSLGSTWLSDFPQAWAETGGMGLAVRQAPLIIPLKATSTPVSIKQYPMSQEARLGIKPHIQRLLDQGILVPCQSPWNTPLLPVKKPGTNDYRPVQDLREVNKRVEDIHPTVPNPYNLLSGLPPSHQWYTVLDLKDAFFCLRLHPTSQPLFAFEWRDPEMGISGQLTWTRLPQGFKNSPTLFNEALHRDLADFRIQHPDLILLQYVDDLLLAATSELDCQQGTRALLQTLGNLGYRASAKKAQICQKQVKYLGYLLKEGQRWLTEARKETVMGQPTPKTPRQLREFLGKAGFCRLFIPGFAEMAAPLYPLTKPGTLFNWGPDQQKAYQEIKQALLTAPALGLPDLTKPFELFVDEKQGYAKGVLTQKLGPWRRPVAYLSKKLDPVAAGWPPCLRMVAAIAVLTKDAGKLTMGQPLVILAPHAVEALVKQPPDRWLSNARMTHYQALLLDTDRVQFGPVVALNPATLLPLPEEGLQHNCLDILAEAHGTRPDLTDQPLPDADHTWYTDGSSLLQEGQRKAGAAVTTETEVIWAKALPAGTSAQRAELIALTQALKMAEGKKLNVYTDSRYAFATAHIHGEIYRRRGWLTSEGKEIKNKDEILALLKALFLPKRLSIIHCPGHQKGHSAEARGNRMADQAARKAAITETPDTSTLLI

SEQ ID NO: 6 - protein, 33 aa, synthetic construct
SGGSSGGSSGSETPGTSESATPESSGGSSGGSS

SEQ ID NO: 7 - protein, 1369 aa, synthetic construct
SMDKKYSIGLAIGTNSVGWAVITDDYKVPSKKFKVLGNTDRHSIKKNLIGALLFDSGETAEATRLKRTARRRYTRRKNRICYLQEIFSNEMAKVDDSFFHRLEESFLVEEDKKHERHPIFGNIVDEVAYHEKYPTIYHLRKKLVDSTDKADLRLIYLALAHMIKFRGHFLIEGDLNPDNSDVDKLFIQLVQTYNQLFEENPINASGVDAKAILSARLSKSRRLENLIAQLPGEKKNGLFGNLIALSLGLTPNFKSNFDLAEDAKLQLSKDTYDDDLDNLLAQIGDQYADLFLAAKNLSDAILLSDILRVNTEITKAPLSASMIKRYDEHHQDLTLLKALVRQQLPEKYKEIFFDQSKNGYAGYIDGGASQEEFYKFIKPILEKMDGTEELLVKLNREDLLRKQRTFDNGSIPHQIHLGELHAILRRQEDFYPFLKDNREKIEKILTFRIPYYVGPLARGNSRFAWMTRKSEETITPWNFEEVVDKGASAQSFIERMTNFDKNLPNEKVLPKHSLLYEYFTVYNELTKVKYVTEGMRKPAFLSGEQKKAIVDLLFKTNRKVTVKQLKEDYFKKIECFDSVEISGVEDRFNASLGTYHDLLKIIKDKDFLDNEENEDILEDIVLTLTLFEDREMIEERLKTYAHLFDDKVMKQLKRRRYTGWGRLSRKLINGIRDKQSGKTILDFLKSDGFANRNFMQLIHDDSLTFKEDIQKAQVSGQGDSLHEHIANLAGSPAIKKGILQTVKVVDELVKVMGRHKPENIVIEMARENQTTQKGQKNSRERMKRIEEGIKELGSQILKEHPVENTQLQNEKLYLYYLQNGRDMYVDQELDINRLSDYDVDAIVPQSFLKDDSIDNKVLTRSDKNRGKSDNVPSEEVVKKMKNYWRQLLNAKLITQRKFDNLTKAERGGLSELDKAGFIKRQLVETRQITKHVAQILDSRMNTKYDENDKLIREVKVITLKSKLVSDFRKDFQFYKVREINNYHHAHDAYLNAVVGTALIKKYPKLESEFVYGDYKVYDVRKMIAKSEQEIGKATAKYFFYSNIMNFFKTEITLANGEIRKRPLIETNGETGEIVWDKGRDFATVRKVLSMPQVNIVKKTEVQTGGFSKESILPKRNSDKLIARKKDWDPKKYGGFDSPTVAYSVLVVAKVEKGKSKKLKSVKELLGITIMERSSFEKNPIDFLEAKGYKEVKKDLIIKLPKYSLFELENGRKRMLASAGELQKGNELALPSKYVNFLYLASHYEKLKGSPEDNEQKQLFVEQHKHYLDEIIEQISEFSKRVILADANLDKVLSAYNKHRDKPIREQAENIIHLFTLTNLGAPAAFKYFDTTIDRKRYTSTKEVLDATLIHQSITGLYETRIDLSQLGGD

SEQ ID NO: 8 - DNA, 76 bp, synthetic construct
  source 1..76: mol_type = other DNA
gttttagagctagaaatagcaagttaaaataaggctagtccgttatcaacttgaaaaagtgggaccgagtcggtcc

SEQ ID NO: 9 - protein, 30 aa, synthetic construct
MDSLLMNRRKFLYQFKNVRWAKGRRETYLC

SEQ ID NO: 10 - protein, 28 aa, synthetic construct
PKKRKVEGADKRTADGSEFESPKKKRKV

SEQ ID NO: 11 - protein, 22 aa, synthetic construct
RKSGKIAAIWKRPRKPKKKRKV

SEQ ID NO: 12 - protein, 18 aa, synthetic construct
KRTADGSEFESPKKKRKV

SEQ ID NO: 13 - protein, 17 aa, synthetic construct
KKTELQTTNAENKTKKL

SEQ ID NO: 14 - protein, 19 aa, synthetic construct
KRGINDRNFWRGENGRKTR

SEQ ID NO: 15 - protein, 16 aa, synthetic construct
KRPAATKKAGQAKKKK

SEQ ID NO: 16 - protein, 29 aa, synthetic construct
PKKKRKVEGADKRTADGSEFESPKKKRKV

SEQ ID NO: 17 - protein, 25 aa, synthetic construct
KRASSQALGTIPKRRSSSRFIKRKK

SEQ ID NO: 18 - protein, 7 aa, synthetic construct
RKKRKKK

SEQ ID NO: 19-24 - skipped (6 entries)

SEQ ID NO: 25 - protein, 4 aa, synthetic construct
SGGS

SEQ ID NO: 26 - protein, 4 aa, synthetic construct
GGGS

SEQ ID NO: 27 - protein, 5 aa, synthetic construct
GGGGS

SEQ ID NO: 28 - protein, 5 aa, synthetic construct
EAAAK

SEQ ID NO: 29 - DNA, 306 bp, synthetic construct
  source 1..306: mol_type = other DNA
tgcctgtcatacgaaaccgagatactgacagtagaatatggccttctgccaatcgggaagattgtggagaaacggatagaatgcacagtttactctgtcgataacaatggtaacatttatactcagccagttgcccagtggcacgaccggggagagcaggaagtattcgaatactgtctggaggatggaagtctcattagggccactaaggaccacaaatttatgacagtcgatggccagatgctgcctatagacgaaatctttgagcgagagttggacctcatgcgagttgacaaccttcctaat

SEQ ID NO: 30 - protein, 102 aa, synthetic construct
CLSYETEILTVEYGLLPIGKIVEKRIECTVYSVDNNGNIYTQPVAQWHDRGEQEVFEYCLEDGSLIRATKDHKFMTVDGQMLPIDEIFERELDLMRVDNLPN

SEQ ID NO: 31 - DNA, 108 bp, synthetic construct
  source 1..108: mol_type = other DNA
atgatcaagatagctacaaggaagtatcttggcaaacaaaacgtttatgatattggagtcgaaagagatcacaactttgctctgaagaacggattcatagcttctaat

SEQ ID NO: 32 - protein, 36 aa, synthetic construct
MIKIATRKYLGKQNVYDIGVERDHNFALKNGFIASN

SEQ ID NO: 33 - DNA, 303 bp, synthetic construct
  source 1..303: mol_type = other DNA
tgcctgtcttatgataccgagatacttaccgttgaatatggcttcttgcctattggaaagattgtcgaagagagaattgaatgcacagtatatactgtagacaagaatggtttcgtttacacacagcccattgctcaatggcacaatcgcggcgaacaagaagtatttgagtactgtctcgaggatggaagcatcatacgagcaactaaagatcataaattcatgaccactgacgggcagatgttgccaatagatgagatattcgagcggggcttggatctcaaacaagtggatggattgcca

SEQ ID NO: 34 - protein, 101 aa, synthetic construct
CLSYDTEILTVEYGFLPIGKIVEERIECTVYTVDKNGFVYTQPIAQWHNRGEQEVFEYCLEDGSIIRATKDHKFMTTDGQMLPIDEIFERGLDLKQVDGLP

SEQ ID NO: 35 - DNA, 159 bp, synthetic construct
  source 1..159: mol_type = other DNA
atgaagaggactgccgatggatcagagtttgaatctcccaagaagaagaggaaagtaaagataatatctcgaaaaagtcttggtacccaaaatgtctatgatattggagtggagaaagatcacaacttccttctcaagaacggtctcgtagccagcaac

SEQ ID NO: 36 - protein, 53 aa, synthetic construct
MKRTADGSEFESPKKKRKVKIISRKSLGTQNVYDIGVEKDHNFLLKNGLVASN

SEQ ID NO: 37-101 - skipped (65 entries)

SEQ ID NO: 102 - protein, 6 aa, synthetic construct
GGSGGS

SEQ ID NO: 103 - protein, 9 aa, synthetic construct
GGSGGSGGS

SEQ ID NO: 104 - protein, 12 aa, synthetic construct
GGSGGSGGSGGS

SEQ ID NO: 105 - protein, 15 aa, synthetic construct
GGSGGSGGSGGSGGS

SEQ ID NO: 106 - protein, 18 aa, synthetic construct
GGSGGSGGSGGSGGSGGS

SEQ ID NO: 107 - protein, 5 aa, synthetic construct
GGGGS

SEQ ID NO: 108 - protein, 10 aa, synthetic construct
GGGGSGGGGS

SEQ ID NO: 109 - protein, 15 aa, synthetic construct
GGGGSGGGGSGGGGS

SEQ ID NO: 110 - protein, 20 aa, synthetic construct
GGGGSGGGGSGGGGSGGGGS

SEQ ID NO: 111 - protein, 25 aa, synthetic construct
GGGGSGGGGSGGGGSGGGGSGGGGS

SEQ ID NO: 112 - protein, 30 aa, synthetic construct
GGGGSGGGGSGGGGSGGGGSGGGGSGGGGS

SEQ ID NO: 113 - skipped

SEQ ID NO: 114 - protein, 4 aa, synthetic construct
GGGG

SEQ ID NO: 115 - protein, 5 aa, synthetic construct
GGGGG

SEQ ID NO: 116 - protein, 6 aa, synthetic construct
GGGGGG

SEQ ID NO: 117 - protein, 7 aa, synthetic construct
GGGGGGG

SEQ ID NO: 118 - protein, 8 aa, synthetic construct
GGGGGGGG

SEQ ID NO: 119 - skipped

SEQ ID NO: 120 - protein, 6 aa, synthetic construct
GSSGSS

SEQ ID NO: 121 - protein, 9 aa, synthetic construct
GSSGSSGSS

SEQ ID NO: 122 - protein, 12 aa, synthetic construct
GSSGSSGSSGSS

SEQ ID NO: 123 - protein, 15 aa, synthetic construct
GSSGSSGSSGSSGSS

SEQ ID NO: 124 - protein, 18 aa, synthetic construct
GSSGSSGSSGSSGSSGSS

SEQ ID NO: 125 - protein, 5 aa, synthetic construct
EAAAK

SEQ ID NO: 126 - protein, 10 aa, synthetic construct
EAAAKEAAAK

SEQ ID NO: 127 - protein, 15 aa, synthetic construct
EAAAKEAAAKEAAAK

SEQ ID NO: 128 - protein, 20 aa, synthetic construct
EAAAKEAAAKEAAAKEAAAK

SEQ ID NO: 129 - protein, 25 aa, synthetic construct
EAAAKEAAAKEAAAKEAAAKEAAAK

SEQ ID NO: 130 - protein, 30 aa, synthetic construct
EAAAKEAAAKEAAAKEAAAKEAAAKEAAAK

SEQ ID NO: 131 - skipped

SEQ ID NO: 132 - protein, 5 aa, synthetic construct
PAPAP

SEQ ID NO: 133 - protein, 7 aa, synthetic construct
PAPAPAP

SEQ ID NO: 134 - protein, 9 aa, synthetic construct
PAPAPAPAP

SEQ ID NO: 135 - protein, 11 aa, synthetic construct
PAPAPAPAPAP

SEQ ID NO: 136 - protein, 13 aa, synthetic construct
PAPAPAPAPAPAP

SEQ ID NO: 137 - protein, 6 aa, synthetic construct
GGSGGG

SEQ ID NO: 138 - protein, 6 aa, synthetic construct
GGGGGS

SEQ ID NO: 139 - protein, 6 aa, synthetic construct
GGSGSS

SEQ ID NO: 140 - protein, 6 aa, synthetic construct
GSSGGS

SEQ ID NO: 141 - protein, 8 aa, synthetic construct
GGSEAAAK

SEQ ID NO: 142 - protein, 8 aa, synthetic construct
EAAAKGGS

SEQ ID NO: 143 - protein, 6 aa, synthetic construct
GGSPAP

SEQ ID NO: 144 - protein, 6 aa, synthetic construct
PAPGGS

SEQ ID NO: 145 - protein, 6 aa, synthetic construct
GGGGSS

SEQ ID NO: 146 - protein, 6 aa, synthetic construct
GSSGGG

SEQ ID NO: 147 - protein, 8 aa, synthetic construct
GGGEAAAK

SEQ ID NO: 148 - protein, 8 aa, synthetic construct
EAAAKGGG

SEQ ID NO: 149 - protein, 6 aa, synthetic construct
GGGPAP

SEQ ID NO: 150 - protein, 6 aa, synthetic construct
PAPGGG

SEQ ID NO: 151 - protein, 8 aa, synthetic construct
GSSEAAAK

SEQ ID NO: 152 - protein, 8 aa, synthetic construct
EAAAKGSS

SEQ ID NO: 153 - protein, 6 aa, synthetic construct
GSSPAP

SEQ ID NO: 154 - protein, 6 aa, synthetic construct
PAPGSS

SEQ ID NO: 155 - protein, 8 aa, synthetic construct
EAAAKPAP

SEQ ID NO: 156 - protein, 8 aa, synthetic construct
PAPEAAAK

SEQ ID NO: 157 - protein, 9 aa, synthetic construct
GGSGGGGSS

SEQ ID NO: 158 - protein, 9 aa, synthetic construct
GGSGSSGGG

SEQ ID NO: 159 - protein, 9 aa, synthetic construct
GGGGGSGSS

SEQ ID NO: 160 - protein, 9 aa, synthetic construct
GGGGSSGGS

SEQ ID NO: 161 - protein, 9 aa, synthetic construct
GSSGGSGGG

SEQ ID NO: 162 - protein, 9 aa, synthetic construct
GSSGGGGGS

SEQ ID NO: 163 - protein, 11 aa, synthetic construct
GGSGGGEAAAK

SEQ ID NO: 164 - protein, 11 aa, synthetic construct
GGSEAAAKGGG

SEQ ID NO: 165 - protein, 11 aa, synthetic construct
GGGGGSEAAAK

SEQ ID NO: 166 - protein, 11 aa, synthetic construct
GGGEAAAKGGS

SEQ ID NO: 167 - protein, 11 aa, synthetic construct
EAAAKGGSGGG

SEQ ID NO: 168 - protein, 11 aa, synthetic construct
EAAAKGGGGGS

SEQ ID NO: 169 - protein, 9 aa, synthetic construct
GGSGGGPAP

SEQ ID NO: 170 - protein, 9 aa, synthetic construct
GGSPAPGGG

SEQ ID NO: 171 - protein, 9 aa, synthetic construct
GGGGGSPAP

SEQ ID NO: 172 - protein, 9 aa, synthetic construct
GGGPAPGGS

SEQ ID NO: 173 - protein, 9 aa, synthetic construct
PAPGGSGGG

SEQ ID NO: 174 - protein, 9 aa, synthetic construct
PAPGGGGGS

SEQ ID NO: 175 - protein, 11 aa, synthetic construct
GGSGSSEAAAK

SEQ ID NO: 176 - protein, 11 aa, synthetic construct
GGSEAAAKGSS

SEQ ID NO: 177 - protein, 11 aa, synthetic construct
GSSGGSEAAAK

SEQ ID NO: 178 - protein, 11 aa, synthetic construct
GSSEAAAKGGS

SEQ ID NO: 179 - protein, 11 aa, synthetic construct
EAAAKGGSGSS

SEQ ID NO: 180 - protein, 11 aa, synthetic construct
EAAAKGSSGGS

SEQ ID NO: 181 - protein, 9 aa, synthetic construct
GGSGSSPAP

SEQ ID NO: 182 - protein, 9 aa, synthetic construct
GGSPAPGSS

SEQ ID NO: 183 - protein, 9 aa, synthetic construct
GSSGGSPAP

SEQ ID NO: 184 - protein, 9 aa, synthetic construct
GSSPAPGGS

SEQ ID NO: 185 - protein, 9 aa, synthetic construct
PAPGGSGSS

SEQ ID NO: 186 - protein, 9 aa, synthetic construct
PAPGSSGGS

SEQ ID NO: 187 - protein, 11 aa, synthetic construct
GGSEAAAKPAP

SEQ ID NO: 188 - protein, 11 aa, synthetic construct
GGSPAPEAAAK

SEQ ID NO: 189 - protein, 11 aa, synthetic construct
EAAAKGGSPAP

SEQ ID NO: 190 - protein, 11 aa, synthetic construct
EAAAKPAPGGS

SEQ ID NO: 191 - protein, 11 aa, synthetic construct
PAPGGSEAAAK

SEQ ID NO: 192 - protein, 11 aa, synthetic construct
PAPEAAAKGGS

SEQ ID NO: 193 - protein, 11 aa, synthetic construct
GGGGSSEAAAK

SEQ ID NO: 194 - protein, 11 aa, synthetic construct
GGGEAAAKGSS

SEQ ID NO: 195 - protein, 11 aa, synthetic construct
GSSGGGEAAAK

SEQ ID NO: 196 - protein, 11 aa, synthetic construct
GSSEAAAKGGG

SEQ ID NO: 197 - protein, 11 aa, synthetic construct
EAAAKGGGGSS

SEQ ID NO: 198 - protein, 11 aa, synthetic construct
EAAAKGSSGGG

SEQ ID NO: 199 - protein, 9 aa, synthetic construct
GGGGSSPAP

SEQ ID NO: 200 - protein, 9 aa, synthetic construct
GGGPAPGSS

SEQ ID NO: 201 - protein, 9 aa, synthetic construct
GSSGGGPAP

SEQ ID NO: 202 - protein, 9 aa, synthetic construct
GSSPAPGGG

SEQ ID NO: 203 - protein, 9 aa, synthetic construct
PAPGGGGSS

SEQ ID NO: 204 - protein, 9 aa, synthetic construct
PAPGSSGGG

SEQ ID NO: 205 - protein, 11 aa, synthetic construct
GGGEAAAKPAP

SEQ ID NO: 206 - protein, 11 aa, synthetic construct
GGGPAPEAAAK

SEQ ID NO: 207 - protein, 11 aa, synthetic construct
EAAAKGGGPAP

SEQ ID NO: 208 - protein, 11 aa, synthetic construct
EAAAKPAPGGG

SEQ ID NO: 209 - protein, 11 aa, synthetic construct
PAPGGGEAAAK

SEQ ID NO: 210 - protein, 11 aa, synthetic construct
PAPEAAAKGGG

SEQ ID NO: 211 - protein, 11 aa, synthetic construct
GSSEAAAKPAP

SEQ ID NO: 212 - protein, 11 aa, synthetic construct
GSSPAPEAAAK

SEQ ID NO: 213 - protein, 11 aa, synthetic construct
EAAAKGSSPAP

SEQ ID NO: 214 - protein, 11 aa, synthetic construct
EAAAKPAPGSS

SEQ ID NO: 215 - protein, 11 aa, synthetic construct
PAPGSSEAAAK

SEQ ID NO: 216 - protein, 11 aa, synthetic construct
PAPEAAAKGSS

SEQ ID NO: 217 - protein, 46 aa, synthetic construct
AEAAAKEAAAKEAAAKEAAAKALEAEAAAKEAAAKEAAAKEAAAKA

SEQ ID NO: 218 - protein, 15 aa, synthetic construct
GGGGSEAAAKGGGGS

SEQ ID NO: 219 - protein, 15 aa, synthetic construct
EAAAKGGGGSEAAAK

SEQ ID NO: 220 - protein, 16 aa, synthetic construct
SGSETPGTSESATPES

SEQ ID NO: 221 - protein, 12 aa, synthetic construct
GSAGSAAGSGEF

SEQ ID NO: 222 - protein, 33 aa, synthetic construct; identical to SEQ ID NO: 6

SEQ ID NO: 223 - protein, 30 aa, synthetic construct
AHFKISGEKRPSTDPGKKAKNPKKKKKKDP

SEQ ID NO: 224 - protein, 12 aa, synthetic construct
AHRAKKMSKTHA

SEQ ID NO: 225 - protein, 14 aa, synthetic construct
ASPEYVNLPINGNG

SEQ ID NO: 226 - protein, 7 aa, synthetic construct
CTKRPRW

SEQ ID NO: 227 - protein, 16 aa, synthetic construct
DKAKRVSRNKSEKKRR

SEQ ID NO: 228 - protein, 15 aa, synthetic construct
EELRLKEELLKGIYA

SEQ ID NO: 229 - protein, 16 aa, synthetic construct
EEQLRRRKNSRLNNTG

SEQ ID NO: 230 - protein, 24 aa, synthetic construct
EVLKVIRTGKRKKKAWKRMVTKVC

SEQ ID NO: 231 - protein, 15 aa, synthetic construct
HHHHHHHHHHHHQPH

SEQ ID NO: 232 - protein, 17 aa, synthetic construct
HKKKHPDASVNFSEFSK

SEQ ID NO: 233 - protein, 6 aa, synthetic construct
HKRTKK

SEQ ID NO: 234 - protein, 29 aa, synthetic construct
IINGRKLKLKKSRRRSSQTSNNSFTSRRS

SEQ ID NO: 235 - protein, 8 aa, synthetic construct
KAEQERRK

SEQ ID NO: 236 - protein, 18 aa, synthetic construct
KEKRKRREELFIEQKKRK

SEQ ID NO: 237 - protein, 14 aa, synthetic construct
KKGKDEWFSRGKKP

SEQ ID NO: 238 - protein, 12 aa, synthetic construct
KKGPSVQKRKKT

SEQ ID NO: 239 - protein, 16 aa, synthetic construct
KKKTVINDLLHYKKEK

SEQ ID NO: 240 - protein, 17 aa, synthetic construct
KKNGGKGKNKPSAKIKK

SEQ ID NO: 241 - protein, 13 aa, synthetic construct
KKPKWDDFKKKKK

SEQ ID NO: 242 - protein, 6 aa, synthetic construct
KKRKKD

SEQ ID NO: 243 - protein, 9 aa, synthetic construct
KKRRKRRRK

SEQ ID NO: 244 - protein, 9 aa, synthetic construct
KKRRRRARK

SEQ ID NO: 245 - protein, 7 aa, synthetic construct
KKSKRGR

SEQ ID NO: 246 - protein, 8 aa, synthetic construct
KKSRKRGS

SEQ ID NO: 247 - protein, 17 aa, synthetic construct
KKSTALSRELGKIMRRR

SEQ ID NO: 248 - protein, 17 aa, synthetic construct
KKSYQDPEIIAHSRPRK

SEQ ID NO: 249 - protein, 17 aa, synthetic construct
KKTGKNRKLKSKRVKTR

SEQ ID NO: 250 - protein, 17 aa, synthetic construct
KKVSIAGQSGKLWRWKR

SEQ ID NO: 251 - protein, 20 aa, synthetic construct
KKYENVVIKRSPRKRGRPRK

SEQ ID NO: 252 - protein, 6 aa, synthetic construct
KNKKRK

SEQ ID NO: 253 - protein, 6 aa, synthetic construct
KPKKKR

SEQ ID NO: 254 - protein, 19 aa, synthetic construct
KRAMKDDSHGNSTSPKRRK

SEQ ID NO: 255 - protein, 17 aa, synthetic construct
KRANSNLVAAYEKAKKK

SEQ ID NO: 256 - protein, 22 aa, synthetic construct
KRASEDTTSGSPPKKSSAGPKR

SEQ ID NO: 257 - protein, 16 aa, synthetic construct
KRFKRRWMVRKMKTKK

SEQ ID NO: 258 - protein, 16 aa, synthetic construct
KRGLNSSFETSPKKVK

SEQ ID NO: 259 - protein, 20 aa, synthetic construct
KRGNSSIGPNDLSKRKQRKK

SEQ ID NO: 260 - protein, 23 aa, synthetic construct
KRIHSVSLSQSQIDPSKKVKRAK

SEQ ID NO: 261 - protein, 15 aa, synthetic construct
KRKGKLKNKGSKRKK

SEQ ID NO: 262 - protein, 13 aa, synthetic construct
KRRRRRRREKRKR

SEQ ID NO: 263 - protein, 18 aa, synthetic construct
KRSNDRTYSPEEEKQRRA

SEQ ID NO: 264 - protein, 21 aa, synthetic construct
KRTVATNGDASGAHRAKKMSK

SEQ ID NO: 265 - protein, 20 aa, synthetic construct
KRVYNKGEDEQEHLPKGKKR

SEQ ID NO: 266 - protein, 18 aa, synthetic construct
KSGKAPRRRAVSMDNSNK

SEQ ID NO: 267 - protein, 19 aa, synthetic construct
KVNFLDMSLDDIIIYKELE

SEQ ID NO: 268 - protein, 15 aa, synthetic construct
KVQHRIAKKTTRRRR

SEQ ID NO: 269 - protein, 8 aa, synthetic construct
LSPSLSPL

SEQ ID NO: 270 - protein, 30 aa, synthetic construct; identical to SEQ ID NO: 9

SEQ ID NO: 271 - protein, 52 aa, synthetic construct
MPQNEYIELHRKRYGYRLDYHEKKRKKESREAHERSKKAKKMIGLKAKLYHK

SEQ ID NO: 272 - protein, 10 aa, synthetic construct
MVQLRPRASR

SEQ ID NO: 273 - protein, 24 aa, synthetic construct
NNKLLAKRRKGGASPKDDPMDDIK

SEQ ID NO: 274 - protein, 20 aa, synthetic construct
NYKRPMDGTYGPPAKRHEGE

SEQ ID NO: 275 - protein, 19 aa, synthetic construct
PDTKRAKLDSSETTMVKKK

SEQ ID NO: 276 - protein, 7 aa, synthetic construct
PEKRTKI

SEQ ID NO: 277 - protein, 8 aa, synthetic construct
PGGRGKKK

SEQ ID NO: 278 - protein, 18 aa, synthetic construct
PGKMDKGEHRQERRDRPY

SEQ ID NO: 279 - protein, 11 aa, synthetic construct
PKKGDKYDKTD

SEQ ID NO: 280 - protein, 7 aa, synthetic construct
PKKKSRK

SEQ ID NO: 281 - protein, 7 aa, synthetic construct
PKKNKPE

SEQ ID NO: 282 - protein, 7 aa, synthetic construct
PKKRAKV

SEQ ID NO: 283 - protein, 9 aa, synthetic construct
PKPKKLKVE

SEQ ID NO: 284 - protein, 7 aa, synthetic construct
PKRGRGR

SEQ ID NO: 285 - protein, 9 aa, synthetic construct
PKRRLVDDA

SEQ ID NO: 286 - protein, 7 aa, synthetic construct
PKRRRTY

SEQ ID NO: 287 - protein, 6 aa, synthetic construct
PLFKRR

SEQ ID NO: 288 - protein, 7 aa, synthetic construct
PLRKAKR

SEQ ID NO: 289 - protein, 9 aa, synthetic construct
PPAKRKCIF

SEQ ID NO: 290 - protein, 8 aa, synthetic construct
PPARRRRL

SEQ ID NO: 291 - protein, 8 aa, synthetic construct
PPKKKRKV

SEQ ID NO: 292 - protein, 10 aa, synthetic construct
PPNKRMKVKH

SEQ ID NO: 293 - protein, 13 aa, synthetic construct
PPRIYPQLPSAPT

SEQ ID NO: 294 - protein, 13 aa, synthetic construct
PQRSPFPKSSVKR

SEQ ID NO: 295 - protein, 8 aa, synthetic construct
PRPRKVPR

SEQ ID NO: 296 - protein, 9 aa, synthetic construct
PRRRVQRKR

SEQ ID NO: 297 - protein, 7 aa, synthetic construct
PRRVRLK

SEQ ID NO: 298 - protein, 7 aa, synthetic construct
PSRKRPR

SEQ ID NO: 299 - protein, 8 aa, synthetic construct
PSSKKRKV

SEQ ID NO: 300 - protein, 7 aa, synthetic construct
PTKKRVK

SEQ ID NO: 301 - protein, 9 aa, synthetic construct
QRPGPYDRP

SEQ ID NO: 302 - protein, 18 aa, synthetic construct
RGKGGKGLGKGGAKRHRK

SEQ ID NO: 303 - protein, 24 aa, synthetic construct
RKAGKGGGGHKTTKKRSAKDEKVP

SEQ ID NO: 304 - protein, 9 aa, synthetic construct
RKIKLKRAK

SEQ ID NO: 305 - protein, 9 aa, synthetic construct
RKIKRKRAK

SEQ ID NO: 306 - protein, 17 aa, synthetic construct
RKKEAPGPREELRSRGR

SEQ ID NO: 307 - protein, 7 aa, synthetic construct
RKKRKGK

SEQ ID NO: 308 - protein, 9 aa, synthetic construct
RKKRRQRRR

SEQ ID NO: 309 - protein, 25 aa, synthetic construct
RKKSIPLSIKNLKRKHKRKKNKITR

SEQ ID NO: 310 - protein, 20 aa, synthetic construct
RKLVKPKNTKMKTKLRTNPY

SEQ ID NO: 311 - protein, 16 aa, synthetic construct
RKRLILSDKGQLDWKK

SEQ ID NO: 312 - protein, 7 aa, synthetic construct
RKRLKSK

SEQ ID NO: 313 - protein, 9 aa, synthetic construct
RKRRVRDNM

SEQ ID NO: 314 - protein, 22 aa, synthetic construct
RKRSPKDKKEKDLDGAGKRRKT

SEQ ID NO: 315 - protein, 22 aa, synthetic construct
RKRTPRVDGQTGENDMNKRRRK

SEQ ID NO: 316 - protein, 10 aa, synthetic construct
RLPVRRRRRR

SEQ ID NO: 317 - protein, 10 aa, synthetic construct
RLRFRKPKSK

SEQ ID NO: 318 - protein, 6 aa, synthetic construct
RQQRKR

SEQ ID NO: 319 - protein, 16 aa, synthetic construct
RRDLNSSFETSPKKVK

SEQ ID NO: 320 - protein, 8 aa, synthetic construct
RRDRAKLR

SEQ ID NO: 321 - protein, 8 aa, synthetic construct
RRGDGRRR

SEQ ID NO: 322 - protein, 11 aa, synthetic construct
RRGRKRKAEKQ

SEQ ID NO: 323 - protein, 6 aa, synthetic construct
RRKKRR

SEQ ID NO: 324 - protein, 19 aa, synthetic construct
RRKRSKSEDMDSVESKRRR

SEQ ID NO: 325 - protein, 6 aa, synthetic construct
RRKRSR

SEQ ID NO: 326 - protein, 14 aa, synthetic construct
RRPKGKTLQKRKPK

SEQ ID NO: 327 - protein, 18 aa, synthetic construct
RRRGFERFGPDNMGRKRK

SEQ ID NO: 328 - protein, 15 aa, synthetic construct
RRRGKNKVAAQNCRK

SEQ ID NO: 329 - protein, 6 aa, synthetic construct
RRRKRR

SEQ ID NO: 330 - protein, 14 aa, synthetic construct
RRRQKQKGGASRRR

SEQ ID NO: 331 - protein, 13 aa, synthetic construct
RRRREGPRARRRR

SEQ ID NO: 332 - protein, 61 aa, synthetic construct
RRTIRLKLVYDKCDRSCKIQKKNRNKCQYCRFHKCLSVGMSHNAIRFGRMPRSEKAKLKAE

SEQ ID NO: 333 - protein, 17 aa, synthetic construct
RRVPQRKEVSRCRKCRK

SEQ ID NO: 334 - protein, 32 aa, synthetic construct
RVGGRRQAVECIEDLLNEPGQPLDLSCKRPRP

SEQ ID NO: 335 - protein, 9 aa, synthetic construct
RVVKLRIAP

SEQ ID NO: 336 - protein, 6 aa, synthetic construct
RVVRRR

SEQ ID NO: 337 - protein, 12 aa, synthetic construct
SKRKTKISRKTR

SEQ ID NO: 338 - protein, 16 aa, synthetic construct
SYVKTVPNRTRTYIKL

SEQ ID NO: 339 - protein, 12 aa, synthetic construct
TGKNEAKKRKIA

SEQ ID NO: 340 - protein, 30 aa, synthetic construct
TLSPASSPSSVSCPVIPASTDESPGSALNI

SEQ ID NO: 341 - protein, 12 aa, synthetic construct
VSKKQRTGKKIH

SEQ ID NO: 342 - protein, 9 aa, synthetic construct
SPKKKRKVE

SEQ ID NO: 343 - protein, 19 aa, synthetic construct
KRTADGSEFESPKKKRKVE

SEQ ID NO: 344 - protein, 9 aa, synthetic construct
PAAKRVKLD

SEQ ID NO: 345 - protein, 7 aa, synthetic construct
PKKKRKV

SEQ ID NO: 346 - protein, 30 aa, synthetic construct; identical to SEQ ID NO: 9

SEQ ID NO: 347 - protein, 11 aa, synthetic construct
SPKKKRKVEAS

SEQ ID NO: 348 - protein, 16 aa, synthetic construct
MAPKKKRKVGIHRGVP

SEQ ID NO: 349-3999 - skipped (3651 entries)

SEQ ID NO: 4000 - protein, 1381 aa, synthetic construct
MPAAKRVKLDGGDKKYSIGLDIGTNSVGWAVITDEYKVPSKKFKVLGNTDRHSIKKNLIGALLFDSGETAEATRLKRTARRRYTRRKNRICYLQEIFSNEMAKVDDSFFHRLEESFLVEEDKKHERHPIFGNIVDEVAYHEKYPTIYHLRKKLVDSTDKADLRLIYLALAHMIKFRGHFLIEGDLNPDNSDVDKLFIQLVQTYNQLFEENPINASGVDAKAILSARLSKSRRLENLIAQLPGEKKNGLFGNLIALSLGLTPNFKSNFDLAEDAKLQLSKDTYDDDLDNLLAQIGDQYADLFLAAKNLSDAILLSDILRVNTEITKAPLSASMIKRYDEHHQDLTLLKALVRQQLPEKYKEIFFDQSKNGYAGYIDGGASQEEFYKFIKPILEKMDGTEELLVKLNREDLLRKQRTFDNGSIPHQIHLGELHAILRRQEDFYPFLKDNREKIEKILTFRIPYYVGPLARGNSRFAWMTRKSEETITPWNFEEVVDKGASAQSFIERMTNFDKNLPNEKVLPKHSLLYEYFTVYNELTKVKYVTEGMRKPAFLSGEQKKAIVDLLFKTNRKVTVKQLKEDYFKKIECFDSVEISGVEDRFNASLGTYHDLLKIIKDKDFLDNEENEDILEDIVLTLTLFEDREMIEERLKTYAHLFDDKVMKQLKRRRYTGWGRLSRKLINGIRDKQSGKTILDFLKSDGFANRNFMQLIHDDSLTFKEDIQKAQVSGQGDSLHEHIANLAGSPAIKKGILQTVKVVDELVKVMGRHKPENIVIEMARENQTTQKGQKNSRERMKRIEEGIKELGSQILKEHPVENTQLQNEKLYLYYLQNGRDMYVDQELDINRLSDYDVDHIVPQSFLKDDSIDNKVLTRSDKARGKSDNVPSEEVVKKMKNYWRQLLNAKLITQRKFDNLTKAERGGLSELDKAGFIKRQLVETRQITKHVAQILDSRMNTKYDENDKLIREVKVITLKSKLVSDFRKDFQFYKVREINNYHHAHDAYLNAVVGTALIKKYPKLESEFVYGDYKVYDVRKMIAKSEQEIGKATAKYFFYSNIMNFFKTEITLANGEIRKRPLIETNGETGEIVWDKGRDFATVRKVLSMPQVNIVKKTEVQTGGFSKESILPKRNSDKLIARKKDWDPKKYGGFDSPTVAYSVLVVAKVEKGKSKKLKSVKELLGITIMERSSFEKNPIDFLEAKGYKEVKKDLIIKLPKYSLFELENGRKRMLASAGELQKGNELALPSKYVNFLYLASHYEKLKGSPEDNEQKQLFVEQHKHYLDEIIEQISEFSKRVILADANLDKVLSAYNKHRDKPIREQAENIIHLFTLTNLGAPAAFKYFDTTIDRKRYTSTKEVLDATLIHQSITGLYETRIDLSQLGGDGG

SEQ ID NO: 4001 - protein, 31 aa, synthetic construct
AGKRTADGSEFEKRTADGSEFESPKKKAKVE

SEQ ID NO: 4002 - protein, 2138 aa, synthetic construct
MPAAKRVKLDGGDKKYSIGLDIGTNSVGWAVITDEYKVPSKKFKVLGNTDRHSIKKNLIGALLFDSGETAEATRLKRTARRRYTRRKNRICYLQEIFSNEMAKVDDSFFHRLEESFLVEEDKKHERHPIFGNIVDEVAYHEKYPTIYHLRKKLVDSTDKADLRLIYLALAHMIKFRGHFLIEGDLNPDNSDVDKLFIQLVQTYNQLFEENPINASGVDAKAILSARLSKSRRLENLIAQLPGEKKNGLFGNLIALSLGLTPNFKSNFDLAEDAKLQLSKDTYDDDLDNLLAQIGDQYADLFLAAKNLSDAILLSDILRVNTEITKAPLSASMIKRYDEHHQDLTLLKALVRQQLPEKYKEIFFDQSKNGYAGYIDGGASQEEFYKFIKPILEKMDGTEELLVKLNREDLLRKQRTFDNGSIPHQIHLGELHAILRRQEDFYPFLKDNREKIEKILTFRIPYYVGPLARGNSRFAWMTRKSEETITPWNFEEVVDKGASAQSFIERMTNFDKNLPNEKVLPKHSLLYEYFTVYNELTKVKYVTEGMRKPAFLSGEQKKAIVDLLFKTNRKVTVKQLKEDYFKKIECFDSVEISGVEDRFNASLGTYHDLLKIIKDKDFLDNEENEDILEDIVLTLTLFEDREMIEERLKTYAHLFDDKVMKQLKRRRYTGWGRLSRKLINGIRDKQSGKTILDFLKSDGFANRNFMQLIHDDSLTFKEDIQKAQVSGQGDSLHEHIANLAGSPAIKKGILQTVKVVDELVKVMGRHKPENIVIEMARENQTTQKGQKNSRERMKRIEEGIKELGSQILKEHPVENTQLQNEKLYLYYLQNGRDMYVDQELDINRLSDYDVDHIVPQSFLKDDSIDNKVLTRSDKARGKSDNVPSEEVVKKMKNYWRQLLNAKLITQRKFDNLTKAERGGLSELDKAGFIKRQLVETRQITKHVAQILDSRMNTKYDENDKLIREVKVITLKSKLVSDFRKDFQFYKVREINNYHHAHDAYLNAVVGTALIKKYPKLESEFVYGDYKVYDVRKMIAKSEQEIGKATAKYFFYSNIMNFFKTEITLANGEIRKRPLIETNGETGEIVWDKGRDFATVRKVLSMPQVNIVKKTEVQTGGFSKESILPKRNSDKLIARKKDWDPKKYGGFDSPTVAYSVLVVAKVEKGKSKKLKSVKELLGITIMERSSFEKNPIDFLEAKGYKEVKKDLIIKLPKYSLFELENGRKRMLASAGELQKGNELALPSKYVNFLYLASHYEKLKGSPEDNEQKQLFVEQHKHYLDEIIEQISEFSKRVILADANLDKVLSAYNKHRDKPIREQAENIIHLFTLTNLGAPAAFKYFDTTIDRKRYTSTKEVLDATLIHQSITGLYETRIDLSQLGGDGGSGGSSGGSSGSETPGTSESATPESSGGSSGGSSGGTLNIEDEYRLHETSKEPDVSLGSTWLSDFPQAWAETGGMGLAVRQAPLIIPLKATSTPVSIKQYPMSQEARLGIKPHIQRLLDQGILVPCQSPWNTPLLPVKKPGTNDYRPVQDLREVNKRVEDIHPTVPNPYNLLSGLPPSHQWYTVLDLKDAFFCLRLHPTSQPLFAFEWRDPEMGISGQLTWTRLPQGFKNSPTLFNEALHRDLADFRIQHPDLILLQYVDDLLLAATSELDCQQGTRALLQTLGNLGYRASAKKAQICQKQVKYLGYLLKEGQRWLTEARKETVMGQPTPKTPRQLREFLGKAGFCRLFIPGFAEMAAPLYPLTKPGTLFNWGPDQQKAYQEIKQALLTAPALGLPDLTKPFELFVDEKQGYAKGVLTQKLGPWRRPVAYLSKKLDPVAAGWPPCLRMVAAIAVLTKDAGKLTMGQPLVILAPHAVEALVKQPPDRWLSNARMTHYQALLLDTDRVQFGPVVALNPATLLPLPEEGLQHNCLDILAEAHGTRPDLTDQPLPDADHTWYTDGSSLLQEGQRKAGAAVTTETEVIWAKALPAGTSAQRAELIALTQALKMAEGKKLNVYTDSRYAFATAHIHGEIYRRRGWLTSEGKEIKNKDEILALLKALFLPKRLSIIHCPGHQKGHSAEARGNRMADQAARKAAITETPDTSTLLIENSSPSGGSKRTADGSEFEAGKRTADGSEFEKRTADGSEFESPKKKAKVE

SEQ ID NO: 4003-16000 - skipped (11998 entries)

SEQ ID NO: 16001 - protein, 2280 aa, synthetic construct
MPAAKRVKLDGGDKKYSIGLDIGTNSVGWAVITDEYKVPSKKFKVLGNTDRHSIKKNLIGALLFDSGETAEATRLKRTARRRYTRRKNRICYLQEIFSNEMAKVDDSFFHRLEESFLVEEDKKHERHPIFGNIVDEVAYHEKYPTIYHLRKKLVDSTDKADLRLIYLALAHMIKFRGHFLIEGDLNPDNSDVDKLFIQLVQTYNQLFEENPINASGVDAKAILSARLSKSRRLENLIAQLPGEKKNGLFGNLIALSLGLTPNFKSNFDLAEDAKLQLSKDTYDDDLDNLLAQIGDQYADLFLAAKNLSDAILLSDILRVNTEITKAPLSASMIKRYDEHHQDLTLLKALVRQQLPEKYKEIFFDQSKNGYAGYIDGGASQEEFYKFIKPILEKMDGTEELLVKLNREDLLRKQRTFDNGSIPHQIHLGELHAILRRQEDFYPFLKDNREKIEKILTFRIPYYVGPLARGNSRFAWMTRKSEETITPWNFEEVVDKGASAQSFIERMTNFDKNLPNEKVLPKHSLLYEYFTVYNELTKVKYVTEGMRKPAFLSGEQKKAIVDLLFKTNRKVTVKQLKEDYFKKIECFDSVEISGVEDRFNASLGTYHDLLKIIKDKDFLDNEENEDILEDIVLTLTLFEDREMIEERLKTYAHLFDDKVMKQLKRRRYTGWGRLSRKLINGIRDKQSGKTILDFLKSDGFANRNFMQLIHDDSLTFKEDIQKAQVSGQGDSLHEHIANLAGSPAIKKGILQTVKVVDELVKVMGRHKPENIVIEMARENQTTQKGQKNSRERMKRIEEGIKELGSQILKEHPVENTQLQNEKLYLYYLQNGRDMYVDQELDINRLSDYDVDHIVPQSFLKDDSIDNKVLTRSDKARGKSDNVPSEEVVKKMKNYWRQLLNAKLITQRKFDNLTKAERGGLSELDKAGFIKRQLVETRQITKHVAQILDSRMNTKYDENDKLIREVKVITLKSKLVSDFRKDFQFYKVREINNYHHAHDAYLNAVVGTALIKKYPKLESEFVYGDYKVYDVRKMIAKSEQEIGKATAKYFFYSNIMNFFKTEITLANGEIRKRPLIETNGETGEIVWDKGRDFATVRKVLSMPQVNIVKKTEVQTGGFSKESILPKRNSDKLIARKKDWDPKKYGGFDSPTVAYSVLVVAKVEKGKSKKLKSVKELLGITIMERSSFEKNPIDFLEAKGYKEVKKDLIIKLPKYSLFELENGRKRMLASAGELQKGNELALPSKYVNFLYLASHYEKLKGSPEDNEQKQLFVEQHKHYLDEIIEQISEFSKRVILADANLDKVLSAYNKHRDKPIREQAENIIHLFTLTNLGAPAAFKYFDTTIDRKRYTSTKEVLDATLIHQSITGLYETRIDLSQLGGDAEAAAKEAAAKEAAAKEAAAKALEAEAAAKEAAAKEAAAKEAAAKAMASNFTQFVLVDNGGTGDVTVAPSNFANGIAEWISSNSRSQAYKVTCSVRQSSAQNRKYTIKVEVPKGAWRSYLNMELTIPIFATNSDCELIVKAMQGLLKDGNPIPSAIAANSGIYAEAAAKEAAAKEAAAKEAAAKALEAEAAAKEAAAKEAAAKEAAAKATAPLEEEYRLFLEAPIQNVTLLEQWKREIPKVWAEINPPGLASTQAPIHVQLLSTALPVRVRQYPITLEAKRSLRETIRKFRAAGILRPVHSPWNTPLLPVRKSGTSEYRMVQDLREVNKRVETIHPTVPNPYTLLSLLPPDRIWYSVLDLKDAFFCIPLAPESQLIFAFEWADAEEGESGQLTWTRLPQGFKNSPTLFNEALNRDLQGFRLDHPSVSLLQYVDDLLIAADTQAACLSATRDLLMTLAELGYRVSGKKAQLCQEEVTYLGFKIHKGSRSLSNSRTQAILQIPVPKTKRQVREFLGKIGYCRLFIPGFAELAQPLYAATRPGNDPLVWGEKEEEAFQSLKLALTQPPALALPSLDKPFQLFVEETSGAAKGVLTQALGPWKRPVAYLSKRLDPVAAGWPRCLRAIAAAALLTREASKLTFGQDIEITSSHNLESLLRSPPDKWLTNARITQYQVLLLDPPRVRFKQTAALNPATLLPETDDTLPIHHCLDTLDSLTSTRPDLTDQPLAQAEATLFTDGSSYIRDGKRYAGAAVVTLDSVIWAEPLPIGTSAQKAELIALTKALEWSKDKSVNIYTDSRYAFATLHVHGMIYRERGWLTAGGKAIKNAPEILALLTAVWLPKRVAVMHCKGHQKDDAPTSTGNRRADEVAREVAIRPLSTQATISKRTADGSEFESPKKKAKVE

SEQ ID NO: 16002 - protein, 2267 aa, synthetic construct
MPAAKRVKLDGGDKKYSIGLDIGTNSVGWAVITDEYKVPSKKFKVLGNTDRHSIKKNLIGALLFDSGETAEATRLKRTARRRYTRRKNRICYLQEIFSNEMAKVDDSFFHRLEESFLVEEDKKHERHPIFGNIVDEVAYHEKYPTIYHLRKKLVDSTDKADLRLIYLALAHMIKFRGHFLIEGDLNPDNSDVDKLFIQLVQTYNQLFEENPINASGVDAKAILSARLSKSRRLENLIAQLPGEKKNGLFGNLIALSLGLTPNFKSNFDLAEDAKLQLSKDTYDDDLDNLLAQIGDQYADLFLAAKNLSDAILLSDILRVNTEITKAPLSASMIKRYDEHHQDLTLLKALVRQQLPEKYKEIFFDQSKNGYAGYIDGGASQEEFYKFIKPILEKMDGTEELLVKLNREDLLRKQRTFDNGSIPHQIHLGELHAILRRQEDFYPFLKDNREKIEKILTFRIPYYVGPLARGNSRFAWMTRKSEETITPWNFEEVVDKGASAQSFIERMTNFDKNLPNEKVLPKHSLLYEYFTVYNELTKVKYVTEGMRKPAFLSGEQKKAIVDLLFKTNRKVTVKQLKEDYFKKIECFDSVEISGVEDRFNASLGTYHDLLKIIKDKDFLDNEENEDILEDIVLTLTLFEDREMIEERLKTYAHLFDDKVMKQLKRRRYTGWGRLSRKLINGIRDKQSGKTILDFLKSDGFANRNFMQLIHDDSLTFKEDIQKAQVSGQGDSLHEHIANLAGSPAIKKGILQTVKVVDELVKVMGRHKPENIVIEMARENQTTQKGQKNSRERMKRIEEGIKELGSQILKEHPVENTQLQNEKLYLYYLQNGRDMYVDQELDINRLSDYDVDHIVPQSFLKDDSIDNKVLTRSDKARGKSDNVPSEEVVKKMKNYWRQLLNAKLITQRKFDNLTKAERGGLSELDKAGFIKRQLVETRQITKHVAQILDSRMNTKYDENDKLIREVKVITLKSKLVSDFRKDFQFYKVREINNYHHAHDAYLNAVVGTALIKKYPKLESEFVYGDYKVYDVRKMIAKSEQEIGKATAKYFFYSNIMNFFKTEITLANGEIRKRPLIETNGETGEIVWDKGRDFATVRKVLSMPQVNIVKKTEVQTGGFSKESILPKRNSDKLIARKKDWDPKKYGGFDSPTVAYSVLVVAKVEKGKSKKLKSVKELLGITIMERSSFEKNPIDFLEAKGYKEVKKDLIIKLPKYSLFELENGRKRMLASAGELQKGNELALPSKYVNFLYLASHYEKLKGSPEDNEQKQLFVEQHKHYLDEIIEQISEFSKRVILADANLDKVLSAYNKHRDKPIREQAENIIHLFTLTNLGAPAAFKYFDTTIDRKRYTSTKEVLDATLIHQSITGLYETRIDLSQLGGDAEAAAKEAAAKEAAAKEAAAKALEAEAAAKEAAAKEAAAKEAAAKAMASNFTQFVLVDNGGTGDVTVAPSNFANGIAEWISSNSRSQAYKVTCSVRQSSAQNRKYTIKVEVPKGAWRSYLNMELTIPIFATNSDCELIVKAMQGLLKDGNPIPSAIAANSGIYSGGSSGGSSGSETPGTSESATPESSGGSSGGSSTAPLEEEYRLFLEAPIQNVTLLEQWKREIPKVWAEINPPGLASTQAPIHVQLLSTALPVRVRQYPITLEAKRSLRETIRKFRAAGILRPVHSPWNTPLLPVRKSGTSEYRMVQDLREVNKRVETIHPTVPNPYTLLSLLPPDRIWYSVLDLKDAFFCIPLAPESQLIFAFEWADAEEGESGQLTWTRLPQGFKNSPTLFNEALNRDLQGFRLDHPSVSLLQYVDDLLIAADTQAACLSATRDLLMTLAELGYRVSGKKAQLCQEEVTYLGFKIHKGSRSLSNSRTQAILQIPVPKTKRQVREFLGKIGYCRLFIPGFAELAQPLYAATRPGNDPLVWGEKEEEAFQSLKLALTQPPALALPSLDKPFQLFVEETSGAAKGVLTQALGPWKRPVAYLSKRLDPVAAGWPRCLRAIAAAALLTREASKLTFGQDIEITSSHNLESLLRSPPDKWLTNARITQYQVLLLDPPRVRFKQTAALNPATLLPETDDTLPIHHCLDTLDSLTSTRPDLTDQPLAQAEATLFTDGSSYIRDGKRYAGAAVVTLDSVIWAEPLPIGTSAQKAELIALTKALEWSKDKSVNIYTDSRYAFATLHVHGMIYRERGWLTAGGKAIKNAPEILALLTAVWLPKRVAVMHCKGHQKDDAPTSTGNRRADEVAREVAIRPLSTQATISKRTADGSEFESPKKKAKVE

SEQ ID NO: 16003 - protein, 2252 aa, synthetic construct
MPAAKRVKLDGGDKKYSIGLDIGTNSVGWAVITDEYKVPSKKFKVLGNTDRHSIKKNLIGALLFDSGETAEATRLKRTARRRYTRRKNRICYLQEIFSNEMAKVDDSFFHRLEESFLVEEDKKHERHPIFGNIVDEVAYHEKYPTIYHLRKKLVDSTDKADLRLIYLALAHMIKFRGHFLIEGDLNPDNSDVDKLFIQLVQTYNQLFEENPINASGVDAKAILSARLSKSRRLENLIAQLPGEKKNGLFGNLIALSLGLTPNFKSNFDLAEDAKLQLSKDTYDDDLDNLLAQIGDQYADLFLAAKNLSDAILLSDILRVNTEITKAPLSASMIKRYDEHHQDLTLLKALVRQQLPEKYKEIFFDQSKNGYAGYIDGGASQEEFYKFIKPILEKMDGTEELLVKLNREDLLRKQRTFDNGSIPHQIHLGELHAILRRQEDFYPFLKDNREKIEKILTFRIPYYVGPLARGNSRFAWMTRKSEETITPWNFEEVVDKGASAQSFIERMTNFDKNLPNEKVLPKHSLLYEYFTVYNELTKVKYVTEGMRKPAFLSGEQKKAIVDLLFKTNRKVTVKQLKEDYFKKIECFDSVEISGVEDRFNASLGTYHDLLKIIKDKDFLDNEENEDILEDIVLTLTLFEDREMIEERLKTYAHLFDDKVMKQLKRRRYTGWGRLSRKLINGIRDKQSGKTILDFLKSDGFANRNFMQLIHDDSLTFKEDIQKAQVSGQGDSLHEHIANLAGSPAIKKGILQTVKVVDELVKVMGRHKPENIVIEMARENQTTQKGQKNSRERMKRIEEGIKELGSQILKEHPVENTQLQNEKLYLYYLQNGRDMYVDQELDINRLSDYDVDHIVPQSFLKDDSIDNKVLTRSDKARGKSDNVPSEEVVKKMKNYWRQLLNAKLITQRKFDNLTKAERGGLSELDKAGFIKRQLVETRQITKHVAQILDSRMNTKYDENDKLIREVKVITLKSKLVSDFRKDFQFYKVREINNYHHAHDAYLNAVVGTALIKKYPKLESEFVYGDYKVYDVRKMIAKSEQEIGKATAKYFFYSNIMNFFKTEITLANGEIRKRPLIETNGETGEIVWDKGRDFATVRKVLSMPQVNIVKKTEVQTGGFSKESILPKRNSDKLIARKKDWDPKKYGGFDSPTVAYSVLVVAKVEKGKSKKLKSVKELLGITIMERSSFEKNPIDFLEAKGYKEVKKDLIIKLPKYSLFELENGRKRMLASAGELQKGNELALPSKYVNFLYLASHYEKLKGSPEDNEQKQLFVEQHKHYLDEIIEQISEFSKRVILADANLDKVLSAYNKHRDKPIREQAENIIHLFTLTNLGAPAAFKYFDTTIDRKRYTSTKEVLDATLIHQSITGLYETRIDLSQLGGDAEAAAKEAAAKEAAAKEAAAKALEAEAAAKEAAAKEAAAKEAAAKAMASNFTQFVLVDNGGTGDVTVAPSNFANGIAEWISSNSRSQAYKVTCSVRQSSAQNRKYTIKVEVPKGAWRSYLNMELTIPIFATNSDCELIVKAMQGLLKDGNPIPSAIAANSGIYGSSGSSGSSGSSGSSGSSTAPLEEEYRLFLEAPIQNVTLLEQWKREIPKVWAEINPPGLASTQAPIHVQLLSTALPVRVRQYPITLEAKRSLRETIRKFRAAGILRPVHSPWNTPLLPVRKSGTSEYRMVQDLREVNKRVETIHPTVPNPYTLLSLLPPDRIWYSVLDLKDAFFCIPLAPESQLIFAFEWADAEEGESGQLTWTRLPQGFKNSPTLFNEALNRDLQGFRLDHPSVSLLQYVDDLLIAADTQAACLSATRDLLMTLAELGYRVSGKKAQLCQEEVTYLGFKIHKGSRSLSNSRTQAILQIPVPKTKRQVREFLGKIGYCRLFIPGFAELAQPLYAATRPGNDPLVWGEKEEEAFQSLKLALTQPPALALPSLDKPFQLFVEETSGAAKGVLTQALGPWKRPVAYLSKRLDPVAAGWPRCLRAIAAAALLTREASKLTFGQDIEITSSHNLESLLRSPPDKWLTNARITQYQVLLLDPPRVRFKQTAALNPATLLPETDDTLPIHHCLDTLDSLTSTRPDLTDQPLAQAEATLFTDGSSYIRDGKRYAGAAVVTLDSVIWAEPLPIGTSAQKAELIALTKALEWSKDKSVNIYTDSRYAFATLHVHGMIYRERGWLTAGGKAIKNAPEILALLTAVWLPKRVAVMHCKGHQKDDAPTSTGNRRADEVAREVAIRPLSTQATISKRTADGSEFESPKKKAKVE

SEQ ID NO: 16004 - protein, 2245 aa, synthetic construct
MPAAKRVKLDGGDKKYSIGLDIGTNSVGWAVITDEYKVPSKKFKVLGNTDRHSIKKNLIGALLFDSGETAEATRLKRTARRRYTRRKNRICYLQEIFSNEMAKVDDSFFHRLEESFLVEEDKKHERHPIFGNIVDEVAYHEKYPTIYHLRKKLVDSTDKADLRLIYLALAHMIKFRGHFLIEGDLNPDNSDVDKLFIQLVQTYNQLFEENPINASGVDAKAILSARLSKSRRLENLIAQLPGEKKNGLFGNLIALSLGLTPNFKSNFDLAEDAKLQLSKDTYDDDLDNLLAQIGDQYADLFLAAKNLSDAILLSDILRVNTEITKAPLSASMIKRYDEHHQDLTLLKALVRQQLPEKYKEIFFDQSKNGYAGYIDGGASQEEFYKFIKPILEKMDGTEELLVKLNREDLLRKQRTFDNGSIPHQIHLGELHAILRRQEDFYPFLKDNREKIEKILTFRIPYYVGPLARGNSRFAWMTRKSEETITPWNFEEVVDKGASAQSFIERMTNFDKNLPNEKVLPKHSLLYEYFTVYNELTKVKYVTEGMRKPAFLSGEQKKAIVDLLFKTNRKVTVKQLKEDYFKKIECFDSVEISGVEDRFNASLGTYHDLLKIIKDKDFLDNEENEDILEDIVLTLTLFEDREMIEERLKTYAHLFDDKVMKQLKRRRYTGWGRLSRKLINGIRDKQSGKTILDFLKSDGFANRNFMQLIHDDSLTFKEDIQKAQVSGQGDSLHEHIANLAGSPAIKKGILQTVKVVDELVKVMGRHKPENIVIEMARENQTTQKGQKNSRERMKRIEEGIKELGSQILKEHPVENTQLQNEKLYLYYLQNGRDMYVDQELDINRLSDYDVDHIVPQSFLKDDSIDNKVLTRSDKARGKSDNVPSEEVVKKMKNYWRQLLNAKLITQRKFDNLTKAERGGLSELDKAGFIKRQLVETRQITKHVAQILDSRMNTKYDENDKLIREVKVITLKSKLVSDFRKDFQFYKVREINNYHHAHDAYLNAVVGTALIKKYPKLESEFVYGDYKVYDVRKMIAKSEQEIGKATAKYFFYSNIMNFFKTEITLANGEIRKRPLIETNGETGEIVWDKGRDFATVRKVLSMPQVNIVKKTEVQTGGFSKESILPKRNSDKLIARKKDWDPKKYGGFDSPTVAYSVLVVAKVEKGKSKKLKSVKELLGITIMERSSFEKNPIDFLEAKGYKEVKKDLIIKLPKYSLFELENGRKRMLASAGELQKGNELALPSKYVNFLYLASHYEKLKGSPEDNEQKQLFVEQHKHYLDEIIEQISEFSKRVILADANLDKVLSAYNKHRDKPIREQAENIIHLFTLTNLGAPAAFKYFDTTIDRKRYTSTKEVLDATLIHQSITGLYETRIDLSQLGGDAEAAAKEAAAKEAAAKEAAAKALEAEAAAKEAAAKEAAAKEAAAKAMASNFTQFVLVDNGGTGDVTVAPSNFANGIAEWISSNSRSQAYKVTCSVRQSSAQNRKYTIKVEVPKGAWRSYLNMELTIPIFATNSDCELIVKAMQGLLKDGNPIPSAIAANSGIYGSSGGGEAAAKTAPLEEEYRLFLEAPIQNVTLLEQWKREIPKVWAEINPPGLASTQAPIHVQLLSTALPVRVRQYPITLEAKRSLRETIRKFRAAGILRPVHSPWNTPLLPVRKSGTSEYRMVQDLREVNKRVETIHPTVPNPYTLLSLLPPDRIWYSVLDLKDAFFCIPLAPESQLIFAFEWADAEEGESGQLTWTRLPQGFKNSPTLFNEALNRDLQGFRLDHPSVSLLQYVDDLLIAADTQAACLSATRDLLMTLAELGYRVSGKKAQLCQEEVTYLGFKIHKGSRSLSNSRTQAILQIPVPKTKRQVREFLGKIGYCRLFIPGFAELAQPLYAATRPGNDPLVWGEKEEEAFQSLKLALTQPPALALPSLDKPFQLFVEETSGAAKGVLTQALGPWKRPVAYLSKRLDPVAAGWPRCLRAIAAAALLTREASKLTFGQDIEITSSHNLESLLRSPPDKWLTNARITQYQVLLLDPPRVRFKQTAALNPATLLPETDDTLPIHHCLDTLDSLTSTRPDLTDQPLAQAEATLFTDGSSYIRDGKRYAGAAVVTLDSVIWAEPLPIGTSAQKAELIALTKALEWSKDKSVNIYTDSRYAFATLHVHGMIYRERGWLTAGGKAIKNAPEILALLTAVWLPKRVAVMHCKGHQKDDAPTSTGNRRADEVAREVAIRPLSTQATISKRTADGSEFESPKKKAKVE

SEQ ID NO: 16005 - protein, 2403 aa, synthetic construct
MPAAKRVKLDGGDKKYSIGLDIGTNSVGWAVITDEYKVPSKKFKVLGNTDRHSIKKNLIGALLFDSGETAEATRLKRTARRRYTRRKNRICYLQEIFSNEMAKVDDSFFHRLEESFLVEEDKKHERHPIFGNIVDEVAYHEKYPTIYHLRKKLVDSTDKADLRLIYLALAHMIKFRGHFLIEGDLNPDNSDVDKLFIQLVQTYNQLFEENPINASGVDAKAILSARLSKSRRLENLIAQLPGEKKNGLFGNLIALSLGLTPNFKSNFDLAEDAKLQLSKDTYDDDLDNLLAQIGDQYADLFLAAKNLSDAILLSDILRVNTEITKAPLSASMIKRYDEHHQDLTLLKALVRQQLPEKYKEIFFDQSKNGYAGYIDGGASQEEFYKFIKPILEKMDGTEELLVKLNREDLLRKQRTFDNGSIPHQIHLGELHAILRRQEDFYPFLKDNREKIEKILTFRIPYYVGPLARGNSRFAWMTRKSEETITPWNFEEVVDKGASAQSFIERMTNFDKNLPNEKVLPKHSLLYEYFTVYNELTKVKYVTEGMRKPAFLSGEQKKAIVDLLFKTNRKVTVKQLKEDYFKKIECFDSVEISGVEDRFNASLGTYHDLLKIIKDKDFLDNEENEDILEDIVLTLTLFEDREMIEERLKTYAHLFDDKVMKQLKRRRYTGWGRLSRKLINGIRDKQSGKTILDFLKSDGFANRNFMQLIHDDSLTFKEDIQKAQVSGQGDSLHEHIANLAGSPAIKKGILQTVKVVDELVKVMGRHKPENIVIEMARENQTTQKGQKNSRERMKRIEEGIKELGSQILKEHPVENTQLQNEKLYLYYLQNGRDMYVDQELDINRLSDYDVDHIVPQSFLKDDSIDNKVLTRSDKARGKSDNVPSEEVVKKMKNYWRQLLNAKLITQRKFDNLTKAERGGLSELDKAGFIKRQLVETRQITKHVAQILDSRMNTKYDENDKLIREVKVITLKSKLVSDFRKDFQFYKVREINNYHHAHDAYLNAVVGTALIKKYPKLESEFVYGDYKVYDVRKMIAKSEQEIGKATAKYFFYSNIMNFFKTEITLANGEIRKRPLIETNGETGEIVWDKGRDFATVRKVLSMPQVNIVKKTEVQTGGFSKESILPKRNSDKLIARKKDWDPKKYGGFDSPTVAYSVLVVAKVEKGKSKKLKSVKELLGITIMERSSFEKNPIDFLEAKGYKEVKKDLIIKLPKYSLFELENGRKRMLASAGELQKGNELALPSKYVNFLYLASHYEKLKGSPEDNEQKQLFVEQHKHYLDEIIEQISEFSKRVILADANLDKVLSAYNKHRDKPIREQAENIIHLFTLTNLGAPAAFKYFDTTIDRKRYTSTKEVLDATLIHQSITGLYETRIDLSQLGGDAEAAAKEAAAKEAAAKEAAAKALEAEAAAKEAAAKEAAAKEAAAKAMASNFTQFVLVDNGGTGDVTVAPSNFANGIAEWISSNSRSQAYKVTCSVRQSSAQNRKYTIKVEVPKGAWRSYLNMELTIPIFATNSDCELIVKAMQGLLKDGNPIPSAIAANSGIYGGSGGSMASNFTQFVLVDNGGTGDVTVAPSNFANGIAEWISSNSRSQAYKVTCSVRQSSAQNRKYTIKVEVPKGAWRSYLNMELTIPIFATNSDCELIVKAMQGLLKDGNPIPSAIAANSGIYAEAAAKEAAAKEAAAKEAAAKALEAEAAAKEAAAKEAAAKEAAAKATAPLEEEYRLFLEAPIQNVTLLEQWKREIPKVWAEINPPGLASTQAPIHVQLLSTALPVRVRQYPITLEAKRSLRETIRKFRAAGILRPVHSPWNTPLLPVRKSGTSEYRMVQDLREVNKRVETIHPTVPNPYTLLSLLPPDRIWYSVLDLKDAFFCIPLAPESQLIFAFEWADAEEGESGQLTWTRLPQGFKNSPTLFNEALNRDLQGFRLDHPSVSLLQYVDDLLIAADTQAACLSATRDLLMTLAELGYRVSGKKAQLCQEEVTYLGFKIHKGSRSLSNSRTQAILQIPVPKTKRQVREFLGKIGYCRLFIPGFAELAQPLYAATRPGNDPLVWGEKEEEAFQSLKLALTQPPALALPSLDKPFQLFVEETSGAAKGVLTQALGPWKRPVAYLSKRLDPVAAGWPRCLRAIAAAALLTREASKLTFGQDIEITSSHNLESLLRSPPDKWLTNARITQYQVLLLDPPRVRFKQTAALNPATLLPETDDTLPIHHCLDTLDSLTSTRPDLTDQPLAQAEATLFTDGSSYIRDGKRYAGAAVVTLDSVIWAEPLPIGTSAQKAELIALTKALEWSKDKSVNIYTDSRYAFATLHVHGMIYRERGWLTAGGKAIKNAPEILALLTAVWLPKRVAVMHCKGHQKDDAPTSTGNRRADEVAREVAIRPLSTQATISKRTADGSEFESPKKKAKVE

SEQ ID NO: 16006 - protein, 2390 aa, synthetic construct
MPAAKRVKLDGGDKKYSIGLDIGTNSVGWAVITDEYKVPSKKFKVLGNTDRHSIKKNLIGALLFDSGETAEATRLKRTARRRYTRRKNRICYLQEIFSNEMAKVDDSFFHRLEESFLVEEDKKHERHPIFGNIVDEVAYHEKYPTIYHLRKKLVDSTDKADLRLIYLALAHMIKFRGHFLIEGDLNPDNSDVDKLFIQLVQTYNQLFEENPINASGVDAKAILSARLSKSRRLENLIAQLPGEKKNGLFGNLIALSLGLTPNFKSNFDLAEDAKLQLSKDTYDDDLDNLLAQIGDQYADLFLAAKNLSDAILLSDILRVNTEITKAPLSASMIKRYDEHHQDLTLLKALVRQQLPEKYKEIFFDQSKNGYAGYIDGGASQEEFYKFIKPILEKMDGTEELLVKLNREDLLRKQRTFDNGSIPHQIHLGELHAILRRQEDFYPFLKDNREKIEKILTFRIPYYVGPLARGNSRFAWMTRKSEETITPWNFEEVVDKGASAQSFIERMTNFDKNLPNEKVLPKHSLLYEYFTVYNELTKVKYVTEGMRKPAFLSGEQKKAIVDLLFKTNRKVTVKQLKEDYFKKIECFDSVEISGVEDRFNASLGTYHDLLKIIKDKDFLDNEENEDILEDIVLTLTLFEDREMIEERLKTYAHLFDDKVMKQLKRRRYTGWGRLSRKLINGIRDKQSGKTILDFLKSDGFANRNFMQLIHDDSLTFKEDIQKAQVSGQGDSLHEHIANLAGSPAIKKGILQTVKVVDELVKVMGRHKPENIVIEMARENQTTQKGQKNSRERMKRIEEGIKELGSQILKEHPVENTQLQNEKLYLYYLQNGRDMYVDQELDINRLSDYDVDHIVPQSFLKDDSIDNKVLTRSDKARGKSDNVPSEEVVKKMKNYWRQLLNAKLITQRKFDNLTKAERGGLSELDKAGFIKRQLVETRQITKHVAQILDSRMNTKYDENDKLIREVKVITLKSKLVSDFRKDFQFYKVREINNYHHAHDAYLNAVVGTALIKKYPKLESEFVYGDYKVYDVRKMIAKSEQEIGKATAKYFFYSNIMNFFKTEITLANGEIRKRPLIETNGETGEIVWDKGRDFATVRKVLSMPQVNIVKKTEVQTGGFSKESILPKRNSDKLIARKKDWDPKKYGGFDSPTVAYSVLVVAKVEKGKSKKLKSVKELLGITIMERSSFEKNPIDFLEAKGYKEVKKDLIIKLPKYSLFELENGRKRMLASAGELQKGNELALPSKYVNFLYLASHYEKLKGSPEDNEQKQLFVEQHKHYLDEIIEQISEFSKRVILADANLDKVLSAYNKHRDKPIREQAENIIHLFTLTNLGAPAAFKYFDTTIDRKRYTSTKEVLDATLIHQSITGLYETRIDLSQLGGDAEAAAKEAAAKEAAAKEAAAKALEAEAAAKEAAAKEAAAKEAAAKAMASNFTQFVLVDNGGTGDVTVAPSNFANGIAEWISSNSRSQAYKVTCSVRQSSAQNRKYTIKVEVPKGAWRSYLNMELTIPIFATNSDCELIVKAMQGLLKDGNPIPSAIAANSGIYGGSGGSMASNFTQFVLVDNGGTGDVTVAPSNFANGIAEWISSNSRSQAYKVTCSVRQSSAQNRKYTIKVEVPKGAWRSYLNMELTIPIFATNSDCELIVKAMQGLLKDGNPIPSAIAANSGIYSGGSSGGSSGSETPGTSESATPESSGGSSGGSSTAPLEEEYRLFLEAPIQNVTLLEQWKREIPKVWAEINPPGLASTQAPIHVQLLSTALPVRVRQYPITLEAKRSLRETIRKFRAAGILRPVHSPWNTPLLPVRKSGTSEYRMVQDLREVNKRVETIHPTVPNPYTLLSLLPPDRIWYSVLDLKDAFFCIPLAPESQLIFAFEWADAEEGESGQLTWTRLPQGFKNSPTLFNEALNRDLQGFRLDHPSVSLLQYVDDLLIAADTQAACLSATRDLLMTLAELGYRVSGKKAQLCQEEVTYLGFKIHKGSRSLSNSRTQAILQIPVPKTKRQVREFLGKIGYCRLFIPGFAELAQPLYAATRPGNDPLVWGEKEEEAFQSLKLALTQPPALALPSLDKPFQLFVEETSGAAKGVLTQALGPWKRPVAYLSKRLDPVAAGWPRCLRAIAAAALLTREASKLTFGQDIEITSSHNLESLLRSPPDKWLTNARITQYQVLLLDPPRVRFKQTAALNPATLLPETDDTLPIHHCLDTLDSLTSTRPDLTDQPLAQAEATLFTDGSSYIRDGKRYAGAAVVTLDSVIWAEPLPIGTSAQKAELIALTKALEWSKDKSVNIYTDSRYAFATLHVHGMIYRERGWLTAGGKAIKNAPEILALLTAVWLPKRVAVMHCKGHQKDDAPTSTGNRRADEVAREVAIRPLSTQATISKRTADGSEFESPKKKAKVE

SEQ ID NO: 16007 - protein, 2375 aa, synthetic construct
MPAAKRVKLDGGDKKYSIGLDIGTNSVGWAVITDEYKVPSKKFKVLGNTDRHSIKKNLIGALLFDSGETAEATRLKRTARRRYTRRKNRICYLQEIFSNEMAKVDDSFFHRLEESFLVEEDKKHERHPIFGNIVDEVAYHEKYPTIYHLRKKLVDSTDKADLRLIYLALAHMIKFRGHFLIEGDLNPDNSDVDKLFIQLVQTYNQLFEENPINASGVDAKAILSARLSKSRRLENLIAQLPGEKKNGLFGNLIALSLGLTPNFKSNFDLAEDAKLQLSKDTYDDDLDNLLAQIGDQYADLFLAAKNLSDAILLSDILRVNTEITKAPLSASMIKRYDEHHQDLTLLKALVRQQLPEKYKEIFFDQSKNGYAGYIDGGASQEEFYKFIKPILEKMDGTEELLVKLNREDLLRKQRTFDNGSIPHQIHLGELHAILRRQEDFYPFLKDNREKIEKILTFRIPYYVGPLARGNSRFAWMTRKSEETITPWNFEEVVDKGASAQSFIERMTNFDKNLPNEKVLPKHSLLYEYFTVYNELTKVKYVTEGMRKPAFLSGEQKKAIVDLLFKTNRKVTVKQLKEDYFKKIECFDSVEISGVEDRFNASLGTYHDLLKIIKDKDFLDNEENEDILEDIVLTLTLFEDREMIEERLKTYAHLFDDKVMKQLKRRRYTGWGRLSRKLINGIRDKQSGKTILDFLKSDGFANRNFMQLIHDDSLTFKEDIQKAQVSGQGDSLHEHIANLAGSPAIKKGILQTVKVVDELVKVMGRHKPENIVIEMARENQTTQKGQKNSRERMKRIEEGIKELGSQILKEHPVENTQLQNEKLYLYYLQNGRDMYVDQELDINRLSDYDVDHIVPQSFLKDDSIDNKVLTRSDKARGKSDNVPSEEVVKKMKNYWRQLLNAKLITQRKFDNLTKAERGGLSELDKAGFIKRQLVETRQITKHVAQILDSRMNTKYDENDKLIREVKVITLKSKLVSDFRKDFQFYKVREINNYHHAHDAYLNAVVGTALIKKYPKLESEFVYGDYKVYDVRKMIAKSEQEIGKATAKYFFYSNIMNFFKTEITLANGEIRKRPLIETNGETGEIVWDKGRDFATVRKVLSMPQVNIVKKTEVQTGGFSKESILPKRNSDKLIARKKDWDPKKYGGFDSPTVAYSVLVVAKVEKGKSKKLKSVKELLGITIMERSSFEKNPIDFLEAKGYKEVKKDLIIKLPKYSLFELENGRKRMLASAGELQKGNELALPSKYVNFLYLASHYEKLKGSPEDNEQKQLFVEQHKHYLDEIIEQISEFSKRVILADANLDKVLSAYNKHRDKPIREQAENIIHLFTLTNLGAPAAFKYFDTTIDRKRYTSTKEVLDATLIHQSITGLYETRIDLSQLGGDAEAAAKEAAAKEAAAKEAAAKALEAEAAAKEAAAKEAAAKEAAAKAMASNFTQFVLVDNGGTGDVTVAPSNFANGIAEWISSNSRSQAYKVTCSVRQSSAQNRKYTIKVEVPKGAWRSYLNMELTIPIFATNSDCELIVKAMQGLLKDGNPIPSAIAANSGIYGGSGGSMASNFTQFVLVDNGGTGDVTVAPSNFANGIAEWISSNSRSQAYKVTCSVRQSSAQNRKYTIKVEVPKGAWRSYLNMELTIPIFATNSDCELIVKAMQGLLKDGNPIPSAIAANSGIYGSSGSSGSSGSSGSSGSSTAPLEEEYRLFLEAPIQNVTLLEQWKREIPKVWAEINPPGLASTQAPIHVQLLSTALPVRVRQYPITLEAKRSLRETIRKFRAAGILRPVHSPWNTPLLPVRKSGTSEYRMVQDLREVNKRVETIHPTVPNPYTLLSLLPPDRIWYSVLDLKDAFFCIPLAPESQLIFAFEWADAEEGESGQLTWTRLPQGFKNSPTLFNEALNRDLQGFRLDHPSVSLLQYVDDLLIAADTQAACLSATRDLLMTLAELGYRVSGKKAQLCQEEVTYLGFKIHKGSRSLSNSRTQAILQIPVPKTKRQVREFLGKIGYCRLFIPGFAELAQPLYAATRPGNDPLVWGEKEEEAFQSLKLALTQPPALALPSLDKPFQLFVEETSGAAKGVLTQALGPWKRPVAYLSKRLDPVAAGWPRCLRAIAAAALLTREASKLTFGQDIEITSSHNLESLLRSPPDKWLTNARITQYQVLLLDPPRVRFKQTAALNPATLLPETDDTLPIHHCLDTLDSLTSTRPDLTDQPLAQAEATLFTDGSSYIRDGKRYAGAAVVTLDSVIWAEPLPIGTSAQKAELIALTKALEWSKDKSVNIYTDSRYAFATLHVHGMIYRERGWLTAGGKAIKNAPEILALLTAVWLPKRVAVMHCKGHQKDDAPTSTGNRRADEVAREVAIRPLSTQATISKRTADGSEFESPKKKAKVE

SEQ ID NO: 16008 - protein, 2368 aa, synthetic construct
MPAAKRVKLDGGDKKYSIGLDIGTNSVGWAVITDEYKVPSKKFKVLGNTDRHSIKKNLIGALLFDSGETAEATRLKRTARRRYTRRKNRICYLQEIFSNEMAKVDDSFFHRLEESFLVEEDKKHERHPIFGNIVDEVAYHEKYPTIYHLRKKLVDSTDKADLRLIYLALAHMIKFRGHFLIEGDLNPDNSDVDKLFIQLVQTYNQLFEENPINASGVDAKAILSARLSKSRRLENLIAQLPGEKKNGLFGNLIALSLGLTPNFKSNFDLAEDAKLQLSKDTYDDDLDNLLAQIGDQYADLFLAAKNLSDAILLSDILRVNTEITKAPLSASMIKRYDEHHQDLTLLKALVRQQLPEKYKEIFFDQSKNGYAGYIDGGASQEEFYKFIKPILEKMDGTEELLVKLNREDLLRKQRTFDNGSIPHQIHLGELHAILRRQEDFYPFLKDNREKIEKILTFRIPYYVGPLARGNSRFAWMTRKSEETITPWNFEEVVDKGASAQSFIERMTNFDKNLPNEKVLPKHSLLYEYFTVYNELTKVKYVTEGMRKPAFLSGEQKKAIVDLLFKTNRKVTVKQLKEDYFKKIECFDSVEISGVEDRFNASLGTYHDLLKIIKDKDFLDNEENEDILEDIVLTLTLFEDREMIEERLKTYAHLFDDKVMKQLKRRRYTGWGRLSRKLINGIRDKQSGKTILDFLKSDGFANRNFMQLIHDDSLTFKEDIQKAQVSGQGDSLHEHIANLAGSPAIKKGILQTVKVVDELVKVMGRHKPENIVIEMARENQTTQKGQKNSRERMKRIEEGIKELGSQILKEHPVENTQLQNEKLYLYYLQNGRDMYVDQELDINRLSDYDVDHIVPQSFLKDDSIDNKVLTRSDKARGKSDNVPSEEVVKKMKNYWRQLLNAKLITQRKFDNLTKAERGGLSELDKAGFIKRQLVETRQITKHVAQILDSRMNTKYDENDKLIREVKVITLKSKLVSDFRKDFQFYKVREINNYHHAHDAYLNAVVGTALIKKYPKLESEFVYGDYKVYDVRKMIAKSEQEIGKATAKYFFYSNIMNFFKTEITLANGEIRKRPLIETNGETGEIVWDKGRDFATVRKVLSMPQVNIVKKTEVQTGGFSKESILPKRNSDKLIARKKDWDPKKYGGFDSPTVAYSVLVVAKVEKGKSKKLKSVKELLGITIMERSSFEKNPIDFLEAKGYKEVKKDLIIKLPKYSLFELENGRKRMLASAGELQKGNELALPSKYVNFLYLASHYEKLKGSPEDNEQKQLFVEQHKHYLDEIIEQISEFSKRVILADANLDKVLSAYNKHRDKPIREQAENIIHLFTLTNLGAPAAFKYFDTTIDRKRYTSTKEVLDATLIHQSITGLYETRIDLSQLGGDAEAAAKEAAAKEAAAKEAAAKALEAEAAAKEAAAKEAAAKEAAAKAMASNFTQFVLVDNGGTGDVTVAPSNFANGIAEWISSNSRSQAYKVTCSVRQSSAQNRKYTIKVEVPKGAWRSYLNMELTIPIFATNSDCELIVKAMQGLLKDGNPIPSAIAANSGIYGGSGGSMASNFTQFVLVDNGGTGDVTVAPSNFANGIAEWISSNSRSQAYKVTCSVRQSSAQNRKYTIKVEVPKGAWRSYLNMELTIPIFATNSDCELIVKAMQGLLKDGNPIPSAIAANSGIYGSSGGGEAAAKTAPLEEEYRLFLEAPIQNVTLLEQWKREIPKVWAEINPPGLASTQAPIHVQLLSTALPVRVRQYPITLEAKRSLRETIRKFRAAGILRPVHSPWNTPLLPVRKSGTSEYRMVQDLREVNKRVETIHPTVPNPYTLLSLLPPDRIWYSVLDLKDAFFCIPLAPESQLIFAFEWADAEEGESGQLTWTRLPQGFKNSPTLFNEALNRDLQGFRLDHPSVSLLQYVDDLLIAADTQAACLSATRDLLMTLAELGYRVSGKKAQLCQEEVTYLGFKIHKGSRSLSNSRTQAILQIPVPKTKRQVREFLGKIGYCRLFIPGFAELAQPLYAATRPGNDPLVWGEKEEEAFQSLKLALTQPPALALPSLDKPFQLFVEETSGAAKGVLTQALGPWKRPVAYLSKRLDPVAAGWPRCLRAIAAAALLTREASKLTFGQDIEITSSHNLESLLRSPPDKWLTNARITQYQVLLLDPPRVRFKQTAALNPATLLPETDDTLPIHHCLDTLDSLTSTRPDLTDQPLAQAEATLFTDGSSYIRDGKRYAGAAVVTLDSVIWAEPLPIGTSAQKAELIALTKALEWSKDKSVNIYTDSRYAFATLHVHGMIYRERGWLTAGGKAIKNAPEILALLTAVWLPKRVAVMHCKGHQKDDAPTSTGNRRADEVAREVAIRPLSTQATISKRTADGSEFESPKKKAKVE

SEQ ID NO: 16009 - protein, 2659 aa, synthetic construct
MPAAKRVKLDGGDKKYSIGLDIGTNSVGWAVITDEYKVPSKKFKVLGNTDRHSIKKNLIGALLFDSGETAEATRLKRTARRRYTRRKNRICYLQEIFSNEMAKVDDSFFHRLEESFLVEEDKKHERHPIFGNIVDEVAYHEKYPTIYHLRKKLVDSTDKADLRLIYLALAHMIKFRGHFLIEGDLNPDNSDVDKLFIQLVQTYNQLFEENPINASGVDAKAILSARLSKSRRLENLIAQLPGEKKNGLFGNLIALSLGLTPNFKSNFDLAEDAKLQLSKDTYDDDLDNLLAQIGDQYADLFLAAKNLSDAILLSDILRVNTEITKAPLSASMIKRYDEHHQDLTLLKALVRQQLPEKYKEIFFDQSKNGYAGYIDGGASQEEFYKFIKPILEKMDGTEELLVKLNREDLLRKQRTFDNGSIPHQIHLGELHAILRRQEDFYPFLKDNREKIEKILTFRIPYYVGPLARGNSRFAWMTRKSEETITPWNFEEVVDKGASAQSFIERMTNFDKNLPNEKVLPKHSLLYEYFTVYNELTKVKYVTEGMRKPAFLSGEQKKAIVDLLFKTNRKVTVKQLKEDYFKKIECFDSVEISGVEDRFNASLGTYHDLLKIIKDKDFLDNEENEDILEDIVLTLTLFEDREMIEERLKTYAHLFDDKVMKQLKRRRYTGWGRLSRKLINGIRDKQSGKTILDFLKSDGFANRNFMQLIHDDSLTFKEDIQKAQVSGQGDSLHEHIANLAGSPAIKKGILQTVKVVDELVKVMGRHKPENIVIEMARENQTTQKGQKNSRERMKRIEEGIKELGSQILKEHPVENTQLQNEKLYLYYLQNGRDMYVDQELDINRLSDYDVDHIVPQSFLKDDSIDNKVLTRSDKARGKSDNVPSEEVVKKMKNYWRQLLNAKLITQRKFDNLTKAERGGLSELDKAGFIKRQLVETRQITKHVAQILDSRMNTKYDENDKLIREVKVITLKSKLVSDFRKDFQFYKVREINNYHHAHDAYLNAVVGTALIKKYPKLESEFVYGDYKVYDVRKMIAKSEQEIGKATAKYFFYSNIMNFFKTEITLANGEIRKRPLIETNGETGEIVWDKGRDFATVRKVLSMPQVNIVKKTEVQTGGFSKESILPKRNSDKLIARKKDWDPKKYGGFDSPTVAYSVLVVAKVEKGKSKKLKSVKELLGITIMERSSFEKNPIDFLEAKGYKEVKKDLIIKLPKYSLFELENGRKRMLASAGELQKGNELALPSKYVNFLYLASHYEKLKGSPEDNEQKQLFVEQHKHYLDEIIEQISEFSKRVILADANLDKVLSAYNKHRDKPIREQAENIIHLFTLTNLGAPAAFKYFDTTIDRKRYTSTKEVLDATLIHQSITGLYETRIDLSQLGGDAEAAAKEAAAKEAAAKEAAAKALEAEAAAKEAAAKEAAAKEAAAKAMASNFTQFVLVDNGGTGDVTVAPSNFANGIAEWISSNSRSQAYKVTCSVRQSSAQNRKYTIKVEVPKGAWRSYLNMELTIPIFATNSDCELIVKAMQGLLKDGNPIPSAIAANSGIYGGSGGSMASNFTQFVLVDNGGTGDVTVAPSNFANGIAEWISSNSRSQAYKVTCSVRQSSAQNRKYTIKVEVPKGAWRSYLNMELTIPIFATNSDCELIVKAMQGLLKDGNPIPSAIAANSGIYGGGSGGGSGGGSGGGSMASNFTQFVLVDNGGTGDVTVAPSNFANGIAEWISSNSRSQAYKVTCSVRQSSAQNRKYTIKVEVPKGAWRSYLNMELTIPIFATNSDCELIVKAMQGLLKDGNPIPSAIAANSGIYGGSGGSMASNFTQFVLVDNGGTGDVTVAPSNFANGIAEWISSNSRSQAYKVTCSVRQSSAQNRKYTIKVEVPKGAWRSYLNMELTIPIFATNSDCELIVKAMQGLLKDGNPIPSAIAANSGIYAEAAAKEAAAKEAAAKEAAAKALEAEAAAKEAAAKEAAAKEAAAKATAPLEEEYRLFLEAPIQNVTLLEQWKREIPKVWAEINPPGLASTQAPIHVQLLSTALPVRVRQYPITLEAKRSLRETIRKFRAAGILRPVHSPWNTPLLPVRKSGTSEYRMVQDLREVNKRVETIHPTVPNPYTLLSLLPPDRIWYSVLDLKDAFFCIPLAPESQLIFAFEWADAEEGESGQLTWTRLPQGFKNSPTLFNEALNRDLQGFRLDHPSVSLLQYVDDLLIAADTQAACLSATRDLLMTLAELGYRVSGKKAQLCQEEVTYLGFKIHKGSRSLSNSRTQAILQIPVPKTKRQVREFLGKIGYCRLFIPGFAELAQPLYAATRPGNDPLVWGEKEEEAFQSLKLALTQPPALALPSLDKPFQLFVEETSGAAKGVLTQALGPWKRPVAYLSKRLDPVAAGWPRCLRAIAAAALLTREASKLTFGQDIEITSSHNLESLLRSPPDKWLTNARITQYQVLLLDPPRVRFKQTAALNPATLLPETDDTLPIHHCLDTLDSLTSTRPDLTDQPLAQAEATLFTDGSSYIRDGKRYAGAAVVTLDSVIWAEPLPIGTSAQKAELIALTKALEWSKDKSVNIYTDSRYAFATLHVHGMIYRERGWLTAGGKAIKNAPEILALLTAVWLPKRVAVMHCKGHQKDDAPTSTGNRRADEVAREVAIRPLSTQATISKRTADGSEFESPKKKAKVE

SEQ ID NO: 16010 - protein, 2646 aa, synthetic construct
MPAAKRVKLDGGDKKYSIGLDIGTNSVGWAVITDEYKVPSKKFKVLGNTDRHSIKKNLIGALLFDSGETAEATRLKRTARRRYTRRKNRICYLQEIFSNEMAKVDDSFFHRLEESFLVEEDKKHERHPIFGNIVDEVAYHEKYPTIYHLRKKLVDSTDKADLRLIYLALAHMIKFRGHFLIEGDLNPDNSDVDKLFIQLVQTYNQLFEENPINASGVDAKAILSARLSKSRRLENLIAQLPGEKKNGLFGNLIALSLGLTPNFKSNFDLAEDAKLQLSKDTYDDDLDNLLAQIGDQYADLFLAAKNLSDAILLSDILRVNTEITKAPLSASMIKRYDEHHQDLTLLKALVRQQLPEKYKEIFFDQSKNGYAGYIDGGASQEEFYKFIKPILEKMDGTEELLVKLNREDLLRKQRTFDNGSIPHQIHLGELHAILRRQEDFYPFLKDNREKIEKILTFRIPYYVGPLARGNSRFAWMTRKSEETITPWNFEEVVDKGASAQSFIERMTNFDKNLPNEKVLPKHSLLYEYFTVYNELTKVKYVTEGMRKPAFLSGEQKKAIVDLLFKTNRKVTVKQLKEDYFKKIECFDSVEISGVEDRFNASLGTYHDLLKIIKDKDFLDNEENEDILEDIVLTLTLFEDREMIEERLKTYAHLFDDKVMKQLKRRRYTGWGRLSRKLINGIRDKQSGKTILDFLKSDGFANRNFMQLIHDDSLTFKEDIQKAQVSGQGDSLHEHIANLAGSPAIKKGILQTVKVVDELVKVMGRHKPENIVIEMARENQTTQKGQKNSRERMKRIEEGIKELGSQILKEHPVENTQLQNEKLYLYYLQNGRDMYVDQELDINRLSDYDVDHIVPQSFLKDDSIDNKVLTRSDKARGKSDNVPSEEVVKKMKNYWRQLLNAKLITQRKFDNLTKAERGGLSELDKAGFIKRQLVETRQITKHVAQILDSRMNTKYDENDKLIREVKVITLKSKLVSDFRKDFQFYKVREINNYHHAHDAYLNAVVGTALIKKYPKLESEFVYGDYKVYDVRKMIAKSEQEIGKATAKYFFYSNIMNFFKTEITLANGEIRKRPLIETNGETGEIVWDKGRDFATVRKVLSMPQVNIVKKTEVQTGGFSKESILPKRNSDKLIARKKDWDPKKYGGFDSPTVAYSVLVVAKVEKGKSKKLKSVKELLGITIMERSSFEKNPIDFLEAKGYKEVKKDLIIKLPKYSLFELENGRKRMLASAGELQKGNELALPSKYVNFLYLASHYEKLKGSPEDNEQKQLFVEQHKHYLDEIIEQISEFSKRVILADANLDKVLSAYNKHRDKPIREQAENIIHLFTLTNLGAPAAFKYFDTTIDRKRYTSTKEVLDATLIHQSITGLYETRIDLSQLGGDAEAAAKEAAAKEAAAKEAAAKALEAEAAAKEAAAKEAAAKEAAAKAMASNFTQFVLVDNGGTGDVTVAPSNFANGIAEWISSNSRSQAYKVTCSVRQSSAQNRKYTIKVEVPKGAWRSYLNMELTIPIFATNSDCELIVKAMQGLLKDGNPIPSAIAANSGIYGGSGGSMASNFTQFVLVDNGGTGDVTVAPSNFANGIAEWISSNSRSQAYKVTCSVRQSSAQNRKYTIKVEVPKGAWRSYLNMELTIPIFATNSDCELIVKAMQGLLKDGNPIPSAIAANSGIYGGGSGGGSGGGSGGGSMASNFTQFVLVDNGGTGDVTVAPSNFANGIAEWISSNSRSQAYKVTCSVRQSSAQNRKYTIKVEVPKGAWRSYLNMELTIPIFATNSDCELIVKAMQGLLKDGNPIPSAIAANSGIYGGSGGSMASNFTQFVLVDNGGTGDVTVAPSNFANGIAEWISSNSRSQAYKVTCSVRQSSAQNRKYTIKVEVPKGAWRSYLNMELTIPIFATNSDCELIVKAMQGLLKDGNPIPSAIAANSGIYSGGSSGGSSGSETPGTSESATPESSGGSSGGSSTAPLEEEYRLFLEAPIQNVTLLEQWKREIPKVWAEINPPGLASTQAPIHVQLLSTALPVRVRQYPITLEAKRSLRETIRKFRAAGILRPVHSPWNTPLLPVRKSGTSEYRMVQDLREVNKRVETIHPTVPNPYTLLSLLPPDRIWYSVLDLKDAFFCIPLAPESQLIFAFEWADAEEGESGQLTWTRLPQGFKNSPTLFNEALNRDLQGFRLDHPSVSLLQYVDDLLIAADTQAACLSATRDLLMTLAELGYRVSGKKAQLCQEEVTYLGFKIHKGSRSLSNSRTQAILQIPVPKTKRQVREFLGKIGYCRLFIPGFAELAQPLYAATRPGNDPLVWGEKEEEAFQSLKLALTQPPALALPSLDKPFQLFVEETSGAAKGVLTQALGPWKRPVAYLSKRLDPVAAGWPRCLRAIAAAALLTREASKLTFGQDIEITSSHNLESLLRSPPDKWLTNARITQYQVLLLDPPRVRFKQTAALNPATLLPETDDTLPIHHCLDTLDSLTSTRPDLTDQPLAQAEATLFTDGSSYIRDGKRYAGAAVVTLDSVIWAEPLPIGTSAQKAELIALTKALEWSKDKSVNIYTDSRYAFATLHVHGMIYRERGWLTAGGKAIKNAPEILALLTAVWLPKRVAVMHCKGHQKDDAPTSTGNRRADEVAREVAIRPLSTQATISKRTADGSEFESPKKKAKVE

SEQ ID NO: 16011 - protein, 2631 aa, synthetic construct
MPAAKRVKLDGGDKKYSIGLDIGTNSVGWAVITDEYKVPSKKFKVLGNTDRHSIKKNLIGALLFDSGETAEATRLKRTARRRYTRRKNRICYLQEIFSNEMAKVDDSFFHRLEESFLVEEDKKHERHPIFGNIVDEVAYHEKYPTIYHLRKKLVDSTDKADLRLIYLALAHMIKFRGHFLIEGDLNPDNSDVDKLFIQLVQTYNQLFEENPINASGVDAKAILSARLSKSRRLENLIAQLPGEKKNGLFGNLIALSLGLTPNFKSNFDLAEDAKLQLSKDTYDDDLDNLLAQIGDQYADLFLAAKNLSDAILLSDILRVNTEITKAPLSASMIKRYDEHHQDLTLLKALVRQQLPEKYKEIFFDQSKNGYAGYIDGGASQEEFYKFIKPILEKMDGTEELLVKLNREDLLRKQRTFDNGSIPHQIHLGELHAILRRQEDFYPFLKDNREKIEKILTFRIPYYVGPLARGNSRFAWMTRKSEETITPWNFEEVVDKGASAQSFIERMTNFDKNLPNEKVLPKHSLLYEYFTVYNELTKVKYVTEGMRKPAFLSGEQKKAIVDLLFKTNRKVTVKQLKEDYFKKIECFDSVEISGVEDRFNASLGTYHDLLKIIKDKDFLDNEENEDILEDIVLTLTLFEDREMIEERLKTYAHLFDDKVMKQLKRRRYTGWGRLSRKLINGIRDKQSGKTILDFLKSDGFANRNFMQLIHDDSLTFKEDIQKAQVSGQGDSLHEHIANLAGSPAIKKGILQTVKVVDELVKVMGRHKPENIVIEMARENQTTQKGQKNSRERMKRIEEGIKELGSQILKEHPVENTQLQNEKLYLYYLQNGRDMYVDQELDINRLSDYDVDHIVPQSFLKDDSIDNKVLTRSDKARGKSDNVPSEEVVKKMKNYWRQLLNAKLITQRKFDNLTKAERGGLSELDKAGFIKRQLVETRQITKHVAQILDSRMNTKYDENDKLIREVKVITLKSKLVSDFRKDFQFYKVREINNYHHAHDAYLNAVVGTALIKKYPKLESEFVYGDYKVYDVRKMIAKSEQEIGKATAKYFFYSNIMNFFKTEITLANGEIRKRPLIETNGETGEIVWDKGRDFATVRKVLSMPQVNIVKKTEVQTGGFSKESILPKRNSDKLIARKKDWDPKKYGGFDSPTVAYSVLVVAKVEKGKSKKLKSVKELLGITIMERSSFEKNPIDFLEAKGYKEVKKDLIIKLPKYSLFELENGRKRMLASAGELQKGNELALPSKYVNFLYLASHYEKLKGSPEDNEQKQLFVEQHKHYLDEIIEQISEFSKRVILADANLDKVLSAYNKHRDKPIREQAENIIHLFTLTNLGAPAAFKYFDTTIDRKRYTSTKEVLDATLIHQSITGLYETRIDLSQLGGDAEAAAKEAAAKEAAAKEAAAKALEAEAAAKEAAAKEAAAKEAAAKAMASNFTQFVLVDNGGTGDVTVAPSNFANGIAEWISSNSRSQAYKVTCSVRQSSAQNRKYTIKVEVPKGAWRSYLNMELTIPIFATNSDCELIVKAMQGLLKDGNPIPSAIAANSGIYGGSGGSMASNFTQFVLVDNGGTGDVTVAPSNFANGIAEWISSNSRSQAYKVTCSVRQSSAQNRKYTIKVEVPKGAWRSYLNMELTIPIFATNSDCELIVKAMQGLLKDGNPIPSAIAANSGIYGGGSGGGSGGGSGGGSMASNFTQFVLVDNGGTGDVTVAPSNFANGIAEWISSNSRSQAYKVTCSVRQSSAQNRKYTIKVEVPKGAWRSYLNMELTIPIFATNSDCELIVKAMQGLLKDGNPIPSAIAANSGIYGGSGGSMASNFTQFVLVDNGGTGDVTVAPSNFANGIAEWISSNSRSQAYKVTCSVRQSSAQNRKYTIKVEVPKGAWRSYLNMELTIPIFATNSDCELIVKAMQGLLKDGNPIPSAIAANSGIYGSSGSSGSSGSSGSSGSSTAPLEEEYRLFLEAPIQNVTLLEQWKREIPKVWAEINPPGLASTQAPIHVQLLSTALPVRVRQYPITLEAKRSLRETIRKFRAAGILRPVHSPWNTPLLPVRKSGTSEYRMVQDLREVNKRVETIHPTVPNPYTLLSLLPPDRIWYSVLDLKDAFFCIPLAPESQLIFAFEWADAEEGESGQLTWTRLPQGFKNSPTLFNEALNRDLQGFRLDHPSVSLLQYVDDLLIAADTQAACLSATRDLLMTLAELGYRVSGKKAQLCQEEVTYLGFKIHKGSRSLSNSRTQAILQIPVPKTKRQVREFLGKIGYCRLFIPGFAELAQPLYAATRPGNDPLVWGEKEEEAFQSLKLALTQPPALALPSLDKPFQLFVEETSGAAKGVLTQALGPWKRPVAYLSKRLDPVAAGWPRCLRAIAAAALLTREASKLTFGQDIEITSSHNLESLLRSPPDKWLTNARITQYQVLLLDPPRVRFKQTAALNPATLLPETDDTLPIHHCLDTLDSLTSTRPDLTDQPLAQAEATLFTDGSSYIRDGKRYAGAAVVTLDSVIWAEPLPIGTSAQKAELIALTKALEWSKDKSVNIYTDSRYAFATLHVHGMIYRERGWLTAGGKAIKNAPEILALLTAVWLPKRVAVMHCKGHQKDDAPTSTGNRRADEVAREVAIRPLSTQATISKRTADGSEFESPKKKAKVE

SEQ ID NO: 16012 - protein, 2624 aa, synthetic construct
MPAAKRVKLDGGDKKYSIGLDIGTNSVGWAVITDEYKVPSKKFKVLGNTDRHSIKKNLIGALLFDSGETAEATRLKRTARRRYTRRKNRICYLQEIFSNEMAKVDDSFFHRLEESFLVEEDKKHERHPIFGNIVDEVAYHEKYPTIYHLRKKLVDSTDKADLRLIYLALAHMIKFRGHFLIEGDLNPDNSDVDKLFIQLVQTYNQLFEENPINASGVDAKAILSARLSKSRRLENLIAQLPGEKKNGLFGNLIALSLGLTPNFKSNFDLAEDAKLQLSKDTYDDDLDNLLAQIGDQYADLFLAAKNLSDAILLSDILRVNTEITKAPLSASMIKRYDEHHQDLTLLKALVRQQLPEKYKEIFFDQSKNGYAGYIDGGASQEEFYKFIKPILEKMDGTEELLVKLNREDLLRKQRTFDNGSIPHQIHLGELHAILRRQEDFYPFLKDNREKIEKILTFRIPYYVGPLARGNSRFAWMTRKSEETITPWNFEEVVDKGASAQSFIERMTNFDKNLPNEKVLPKHSLLYEYFTVYNELTKVKYVTEGMRKPAFLSGEQKKAIVDLLFKTNRKVTVKQLKEDYFKKIECFDSVEISGVEDRFNASLGTYHDLLKIIKDKDFLDNEENEDILEDIVLTLTLFEDREMIEERLKTYAHLFDDKVMKQLKRRRYTGWGRLSRKLINGIRDKQSGKTILDFLKSDGFANRNFMQLIHDDSLTFKEDIQKAQVSGQGDSLHEHIANLAGSPAIKKGILQTVKVVDELVKVMGRHKPENIVIEMARENQTTQKGQKNSRERMKRIEEGIKELGSQILKEHPVENTQLQNEKLYLYYLQNGRDMYVDQELDINRLSDYDVDHIVPQSFLKDDSIDNKVLTRSDKARGKSDNVPSEEVVKKMKNYWRQLLNAKLITQRKFDNLTKAERGGLSELDKAGFIKRQLVETRQITKHVAQILDSRMNTKYDENDKLIREVKVITLKSKLVSDFRKDFQFYKVREINNYHHAHDAYLNAVVGTALIKKYPKLESEFVYGDYKVYDVRKMIAKSEQEIGKATAKYFFYSNIMNFFKTEITLANGEIRKRPLIETNGETGEIVWDKGRDFATVRKVLSMPQVNIVKKTEVQTGGFSKESILPKRNSDKLIARKKDWDPKKYGGFDSPTVAYSVLVVAKVEKGKSKKLKSVKELLGITIMERSSFEKNPIDFLEAKGYKEVKKDLIIKLPKYSLFELENGRKRMLASAGELQKGNELALPSKYVNFLYLASHYEKLKGSPEDNEQKQLFVEQHKHYLDEIIEQISEFSKRVILADANLDKVLSAYNKHRDKPIREQAENIIHLFTLTNLGAPAAFKYFDTTIDRKRYTSTKEVLDATLIHQSITGLYETRIDLSQLGGDAEAAAKEAAAKEAAAKEAAAKALEAEAAAKEAAAKEAAAKEAAAKAMASNFTQFVLVDNGGTGDVTVAPSNFANGIAEWISSNSRSQAYKVTCSVRQSSAQNRKYTIKVEVPKGAWRSYLNMELTIPIFATNSDCELIVKAMQGLLKDGNPIPSAIAANSGIYGGSGGSMASNFTQFVLVDNGGTGDVTVAPSNFANGIAEWISSNSRSQAYKVTCSVRQSSAQNRKYTIKVEVPKGAWRSYLNMELTIPIFATNSDCELIVKAMQGLLKDGNPIPSAIAANSGIYGGGSGGGSGGGSGGGSMASNFTQFVLVDNGGTGDVTVAPSNFANGIAEWISSNSRSQAYKVTCSVRQSSAQNRKYTIKVEVPKGAWRSYLNMELTIPIFATNSDCELIVKAMQGLLKDGNPIPSAIAANSGIYGGSGGSMASNFTQFVLVDNGGTGDVTVAPSNFANGIAEWISSNSRSQAYKVTCSVRQSSAQNRKYTIKVEVPKGAWRSYLNMELTIPIFATNSDCELIVKAMQGLLKDGNPIPSAIAANSGIYGSSGGGEAAAKTAPLEEEYRLFLEAPIQNVTLLEQWKREIPKVWAEINPPGLASTQAPIHVQLLSTALPVRVRQYPITLEAKRSLRETIRKFRAAGILRPVHSPWNTPLLPVRKSGTSEYRMVQDLREVNKRVETIHPTVPNPYTLLSLLPPDRIWYSVLDLKDAFFCIPLAPESQLIFAFEWADAEEGESGQLTWTRLPQGFKNSPTLFNEALNRDLQGFRLDHPSVSLLQYVDDLLIAADTQAACLSATRDLLMTLAELGYRVSGKKAQLCQEEVTYLGFKIHKGSRSLSNSRTQAILQIPVPKTKRQVREFLGKIGYCRLFIPGFAELAQPLYAATRPGNDPLVWGEKEEEAFQSLKLALTQPPALALPSLDKPFQLFVEETSGAAKGVLTQALGPWKRPVAYLSKRLDPVAAGWPRCLRAIAAAALLTREASKLTFGQDIEITSSHNLESLLRSPPDKWLTNARITQYQVLLLDPPRVRFKQTAALNPATLLPETDDTLPIHHCLDTLDSLTSTRPDLTDQPLAQAEATLFTDGSSYIRDGKRYAGAAVVTLDSVIWAEPLPIGTSAQKAELIALTKALEWSKDKSVNIYTDSRYAFATLHVHGMIYRERGWLTAGGKAIKNAPEILALLTAVWLPKRVAVMHCKGHQKDDAPTSTGNRRADEVAREVAIRPLSTQATISKRTADGSEFESPKKKAKVE

SEQ ID NO: 16013 - protein, 2267 aa, synthetic construct
MPAAKRVKLDGGDKKYSIGLDIGTNSVGWAVITDEYKVPSKKFKVLGNTDRHSIKKNLIGALLFDSGETAEATRLKRTARRRYTRRKNRICYLQEIFSNEMAKVDDSFFHRLEESFLVEEDKKHERHPIFGNIVDEVAYHEKYPTIYHLRKKLVDSTDKADLRLIYLALAHMIKFRGHFLIEGDLNPDNSDVDKLFIQLVQTYNQLFEENPINASGVDAKAILSARLSKSRRLENLIAQLPGEKKNGLFGNLIALSLGLTPNFKSNFDLAEDAKLQLSKDTYDDDLDNLLAQIGDQYADLFLAAKNLSDAILLSDILRVNTEITKAPLSASMIKRYDEHHQDLTLLKALVRQQLPEKYKEIFFDQSKNGYAGYIDGGASQEEFYKFIKPILEKMDGTEELLVKLNREDLLRKQRTFDNGSIPHQIHLGELHAILRRQEDFYPFLKDNREKIEKILTFRIPYYVGPLARGNSRFAWMTRKSEETITPWNFEEVVDKGASAQSFIERMTNFDKNLPNEKVLPKHSLLYEYFTVYNELTKVKYVTEGMRKPAFLSGEQKKAIVDLLFKTNRKVTVKQLKEDYFKKIECFDSVEISGVEDRFNASLGTYHDLLKIIKDKDFLDNEENEDILEDIVLTLTLFEDREMIEERLKTYAHLFDDKVMKQLKRRRYTGWGRLSRKLINGIRDKQSGKTILDFLKSDGFANRNFMQLIHDDSLTFKEDIQKAQVSGQGDSLHEHIANLAGSPAIKKGILQTVKVVDELVKVMGRHKPENIVIEMARENQTTQKGQKNSRERMKRIEEGIKELGSQILKEHPVENTQLQNEKLYLYYLQNGRDMYVDQELDINRLSDYDVDHIVPQSFLKDDSIDNKVLTRSDKARGKSDNVPSEEVVKKMKNYWRQLLNAKLITQRKFDNLTKAERGGLSELDKAGFIKRQLVETRQITKHVAQILDSRMNTKYDENDKLIREVKVITLKSKLVSDFRKDFQFYKVREINNYHHAHDAYLNAVVGTALIKKYPKLESEFVYGDYKVYDVRKMIAKSEQEIGKATAKYFFYSNIMNFFKTEITLANGEIRKRPLIETNGETGEIVWDKGRDFATVRKVLSMPQVNIVKKTEVQTGGFSKESILPKRNSDKLIARKKDWDPKKYGGFDSPTVAYSVLVVAKVEKGKSKKLKSVKELLGITIMERSSFEKNPIDFLEAKGYKEVKKDLIIKLPKYSLFELENGRKRMLASAGELQKGNELALPSKYVNFLYLASHYEKLKGSPEDNEQKQLFVEQHKHYLDEIIEQISEFSKRVILADANLDKVLSAYNKHRDKPIREQAENIIHLFTLTNLGAPAAFKYFDTTIDRKRYTSTKEVLDATLIHQSITGLYETRIDLSQLGGDSGGSSGGSSGSETPGTSESATPESSGGSSGGSSMASNFTQFVLVDNGGTGDVTVAPSNFANGIAEWISSNSRSQAYKVTCSVRQSSAQNRKYTIKVEVPKGAWRSYLNMELTIPIFATNSDCELIVKAMQGLLKDGNPIPSAIAANSGIYAEAAAKEAAAKEAAAKEAAAKALEAEAAAKEAAAKEAAAKEAAAKATAPLEEEYRLFLEAPIQNVTLLEQWKREIPKVWAEINPPGLASTQAPIHVQLLSTALPVRVRQYPITLEAKRSLRETIRKFRAAGILRPVHSPWNTPLLPVRKSGTSEYRMVQDLREVNKRVETIHPTVPNPYTLLSLLPPDRIWYSVLDLKDAFFCIPLAPESQLIFAFEWADAEEGESGQLTWTRLPQGFKNSPTLFNEALNRDLQGFRLDHPSVSLLQYVDDLLIAADTQAACLSATRDLLMTLAELGYRVSGKKAQLCQEEVTYLGFKIHKGSRSLSNSRTQAILQIPVPKTKRQVREFLGKIGYCRLFIPGFAELAQPLYAATRPGNDPLVWGEKEEEAFQSLKLALTQPPALALPSLDKPFQLFVEETSGAAKGVLTQALGPWKRPVAYLSKRLDPVAAGWPRCLRAIAAAALLTREASKLTFGQDIEITSSHNLESLLRSPPDKWLTNARITQYQVLLLDPPRVRFKQTAALNPATLLPETDDTLPIHHCLDTLDSLTSTRPDLTDQPLAQAEATLFTDGSSYIRDGKRYAGAAVVTLDSVIWAEPLPIGTSAQKAELIALTKALEWSKDKSVNIYTDSRYAFATLHVHGMIYRERGWLTAGGKAIKNAPEILALLTAVWLPKRVAVMHCKGHQKDDAPTSTGNRRADEVAREVAIRPLSTQATISKRTADGSEFESPKKKAKVE

SEQ ID NO: 16014 - protein, 2254 aa, synthetic construct
MPAAKRVKLDGGDKKYSIGLDIGTNSVGWAVITDEYKVPSKKFKVLGNTDRHSIKKNLIGALLFDSGETAEATRLKRTARRRYTRRKNRICYLQEIFSNEMAKVDDSFFHRLEESFLVEEDKKHERHPIFGNIVDEVAYHEKYPTIYHLRKKLVDSTDKADLRLIYLALAHMIKFRGHFLIEGDLNPDNSDVDKLFIQLVQTYNQLFEENPINASGVDAKAILSARLSKSRRLENLIAQLPGEKKNGLFGNLIALSLGLTPNFKSNFDLAEDAKLQLSKDTYDDDLDNLLAQIGDQYADLFLAAKNLSDAILLSDILRVNTEITKAPLSASMIKRYDEHHQDLTLLKALVRQQLPEKYKEIFFDQSKNGYAGYIDGGASQEEFYKFIKPILEKMDGTEELLVKLNREDLLRKQRTFDNGSIPHQIHLGELHAILRRQEDFYPFLKDNREKIEKILTFRIPYYVGPLARGNSRFAWMTRKSEETITPWNFEEVVDKGASAQSFIERMTNFDKNLPNEKVLPKHSLLYEYFTVYNELTKVKYVTEGMRKPAFLSGEQKKAIVDLLFKTNRKVTVKQLKEDYFKKIECFDSVEISGVEDRFNASLGTYHDLLKIIKDKDFLDNEENEDILEDIVLTLTLFEDREMIEERLKTYAHLFDDKVMKQLKRRRYTGWGRLSRKLINGIRDKQSGKTILDFLKSDGFANRNFMQLIHDDSLTFKEDIQKAQVSGQGDSLHEHIANLAGSPAIKKGILQTVKVVDELVKVMGRHKPENIVIEMARENQTTQKGQKNSRERMKRIEEGIKELGSQILKEHPVENTQLQNEKLYLYYLQNGRDMYVDQELDINRLSDYDVDHIVPQSFLKDDSIDNKVLTRSDKARGKSDNVPSEEVVKKMKNYWRQLLNAKLITQRKFDNLTKAERGGLSELDKAGFIKRQLVETRQITKHVAQILDSRMNTKYDENDKLIREVKVITLKSKLVSDFRKDFQFYKVREINNYHHAHDAYLNAVVGTALIKKYPKLESEFVYGDYKVYDVRKMIAKSEQEIGKATAKYFFYSNIMNFFKTEITLANGEIRKRPLIETNGETGEIVWDKGRDFATVRKVLSMPQVNIVKKTEVQTGGFSKESILPKRNSDKLIARKKDWDPKKYGGFDSPTVAYSVLVVAKVEKGKSKKLKSVKELLGITIMERSSFEKNPIDFLEAKGYKEVKKDLIIKLPKYSLFELENGRKRMLASAGELQKGNELALPSKYVNFLYLASHYEKLKGSPEDNEQKQLFVEQHKHYLDEIIEQISEFSKRVILADANLDKVLSAYNKHRDKPIREQAENIIHLFTLTNLGAPAAFKYFDTTIDRKRYTSTKEVLDATLIHQSITGLYETRIDLSQLGGDSGGSSGGSSGSETPGTSESATPESSGGSSGGSSMASNFTQFVLVDNGGTGDVTVAPSNFANGIAEWISSNSRSQAYKVTCSVRQSSAQNRKYTIKVEVPKGAWRSYLNMELTIPIFATNSDCELIVKAMQGLLKDGNPIPSAIAANSGIYSGGSSGGSSGSETPGTSESATPESSGGSSGGSSTAPLEEEYRLFLEAPIQNVTLLEQWKREIPKVWAEINPPGLASTQAPIHVQLLSTALPVRVRQYPITLEAKRSLRETIRKFRAAGILRPVHSPWNTPLLPVRKSGTSEYRMVQDLREVNKRVETIHPTVPNPYTLLSLLPPDRIWYSVLDLKDAFFCIPLAPESQLIFAFEWADAEEGESGQLTWTRLPQGFKNSPTLFNEALNRDLQGFRLDHPSVSLLQYVDDLLIAADTQAACLSATRDLLMTLAELGYRVSGKKAQLCQEEVTYLGFKIHKGSRSLSNSRTQAILQIPVPKTKRQVREFLGKIGYCRLFIPGFAELAQPLYAATRPGNDPLVWGEKEEEAFQSLKLALTQPPALALPSLDKPFQLFVEETSGAAKGVLTQALGPWKRPVAYLSKRLDPVAAGWPRCLRAIAAAALLTREASKLTFGQDIEITSSHNLESLLRSPPDKWLTNARITQYQVLLLDPPRVRFKQTAALNPATLLPETDDTLPIHHCLDTLDSLTSTRPDLTDQPLAQAEATLFTDGSSYIRDGKRYAGAAVVTLDSVIWAEPLPIGTSAQKAELIALTKALEWSKDKSVNIYTDSRYAFATLHVHGMIYRERGWLTAGGKAIKNAPEILALLTAVWLPKRVAVMHCKGHQKDDAPTSTGNRRADEVAREVAIRPLSTQATISKRTADGSEFESPKKKAKVE

SEQ ID NO: 16015 - protein, 2239 aa, synthetic construct
MPAAKRVKLDGGDKKYSIGLDIGTNSVGWAVITDEYKVPSKKFKVLGNTDRHSIKKNLIGALLFDSGETAEATRLKRTARRRYTRRKNRICYLQEIFSNEMAKVDDSFFHRLEESFLVEEDKKHERHPIFGNIVDEVAYHEKYPTIYHLRKKLVDSTDKADLRLIYLALAHMIKFRGHFLIEGDLNPDNSDVDKLFIQLVQTYNQLFEENPINASGVDAKAILSARLSKSRRLENLIAQLPGEKKNGLFGNLIALSLGLTPNFKSNFDLAEDAKLQLSKDTYDDDLDNLLAQIGDQYADLFLAAKNLSDAILLSDILRVNTEITKAPLSASMIKRYDEHHQDLTLLKALVRQQLPEKYKEIFFDQSKNGYAGYIDGGASQEEFYKFIKPILEKMDGTEELLVKLNREDLLRKQRTFDNGSIPHQIHLGELHAILRRQEDFYPFLKDNREKIEKILTFRIPYYVGPLARGNSRFAWMTRKSEETITPWNFEEVVDKGASAQSFIERMTNFDKNLPNEKVLPKHSLLYEYFTVYNELTKVKYVTEGMRKPAFLSGEQKKAIVDLLFKTNRKVTVKQLKEDYFKKIECFDSVEISGVEDRFNASLGTYHDLLKIIKDKDFLDNEENEDILEDIVLTLTLFEDREMIEERLKTYAHLFDDKVMKQLKRRRYTGWGRLSRKLINGIRDKQSGKTILDFLKSDGFANRNFMQLIHDDSLTFKEDIQKAQVSGQGDSLHEHIANLAGSPAIKKGILQTVKVVDELVKVMGRHKPENIVIEMARENQTTQKGQKNSRERMKRIEEGIKELGSQILKEHPVENTQLQNEKLYLYYLQNGRDMYVDQELDINRLSDYDVDHIVPQSFLKDDSIDNKVLTRSDKARGKSDNVPSEEVVKKMKNYWRQLLNAKLITQRKFDNLTKAERGGLSELDKAGFIKRQLVETRQITKHVAQILDSRMNTKYDENDKLIREVKVITLKSKLVSDFRKDFQFYKVREINNYHHAHDAYLNAVVGTALIKKYPKLESEFVYGDYKVYDVRKMIAKSEQEIGKATAKYFFYSNIMNFFKTEITLANGEIRKRPLIETNGETGEIVWDKGRDFATVRKVLSMPQVNIVKKTEVQTGGFSKESILPKRNSDKLIARKKDWDPKKYGGFDSPTVAYSVLVVAKVEKGKSKKLKSVKELLGITIMERSSFEKNPIDFLEAKGYKEVKKDLIIKLPKYSLFELENGRKRMLASAGELQKGNELALPSKYVNFLYLASHYEKLKGSPEDNEQKQLFVEQHKHYLDEIIEQISEFSKRVILADANLDKVLSAYNKHRDKPIREQAENIIHLFTLTNLGAPAAFKYFDTTIDRKRYTSTKEVLDATLIHQSITGLYETRIDLSQLGGDSGGSSGGSSGSETPGTSESATPESSGGSSGGSSMASNFTQFVLVDNGGTGDVTVAPSNFANGIAEWISSNSRSQAYKVTCSVRQSSAQNRKYTIKVEVPKGAWRSYLNMELTIPIFATNSDCELIVKAMQGLLKDGNPIPSAIAANSGIYGSSGSSGSSGSSGSSGSSTAPLEEEYRLFLEAPIQNVTLLEQWKREIPKVWAEINPPGLASTQAPIHVQLLSTALPVRVRQYPITLEAKRSLRETIRKFRAAGILRPVHSPWNTPLLPVRKSGTSEYRMVQDLREVNKRVETIHPTVPNPYTLLSLLPPDRIWYSVLDLKDAFFCIPLAPESQLIFAFEWADAEEGESGQLTWTRLPQGFKNSPTLFNEALNRDLQGFRLDHPSVSLLQYVDDLLIAADTQAACLSATRDLLMTLAELGYRVSGKKAQLCQEEVTYLGFKIHKGSRSLSNSRTQAILQIPVPKTKRQVREFLGKIGYCRLFIPGFAELAQPLYAATRPGNDPLVWGEKEEEAFQSLKLALTQPPALALPSLDKPFQLFVEETSGAAKGVLTQALGPWKRPVAYLSKRLDPVAAGWPRCLRAIAAAALLTREASKLTFGQDIEITSSHNLESLLRSPPDKWLTNARITQYQVLLLDPPRVRFKQTAALNPATLLPETDDTLPIHHCLDTLDSLTSTRPDLTDQPLAQAEATLFTDGSSYIRDGKRYAGAAVVTLDSVIWAEPLPIGTSAQKAELIALTKALEWSKDKSVNIYTDSRYAFATLHVHGMIYRERGWLTAGGKAIKNAPEILALLTAVWLPKRVAVMHCKGHQKDDAPTSTGNRRADEVAREVAIRPLSTQATISKRTADGSEFESPKKKAKVE

SEQ ID NO: 16016 - protein, 2232 aa, synthetic construct
MPAAKRVKLDGGDKKYSIGLDIGTNSVGWAVITDEYKVPSKKFKVLGNTDRHSIKKNLIGALLFDSGETAEATRLKRTARRRYTRRKNRICYLQEIFSNEMAKVDDSFFHRLEESFLVEEDKKHERHPIFGNIVDEVAYHEKYPTIYHLRKKLVDSTDKADLRLIYLALAHMIKFRGHFLIEGDLNPDNSDVDKLFIQLVQTYNQLFEENPINASGVDAKAILSARLSKSRRLENLIAQLPGEKKNGLFGNLIALSLGLTPNFKSNFDLAEDAKLQLSKDTYDDDLDNLLAQIGDQYADLFLAAKNLSDAILLSDILRVNTEITKAPLSASMIKRYDEHHQDLTLLKALVRQQLPEKYKEIFFDQSKNGYAGYIDGGASQEEFYKFIKPILEKMDGTEELLVKLNREDLLRKQRTFDNGSIPHQIHLGELHAILRRQEDFYPFLKDNREKIEKILTFRIPYYVGPLARGNSRFAWMTRKSEETITPWNFEEVVDKGASAQSFIERMTNFDKNLPNEKVLPKHSLLYEYFTVYNELTKVKYVTEGMRKPAFLSGEQKKAIVDLLFKTNRKVTVKQLKEDYFKKIECFDSVEISGVEDRFNASLGTYHDLLKIIKDKDFLDNEENEDILEDIVLTLTLFEDREMIEERLKTYAHLFDDKVMKQLKRRRYTGWGRLSRKLINGIRDKQSGKTILDFLKSDGFANRNFMQLIHDDSLTFKEDIQKAQVSGQGDSLHEHIANLAGSPAIKKGILQTVKVVDELVKVMGRHKPENIVIEMARENQTTQKGQKNSRERMKRIEEGIKELGSQILKEHPVENTQLQNEKLYLYYLQNGRDMYVDQELDINRLSDYDVDHIVPQSFLKDDSIDNKVLTRSDKARGKSDNVPSEEVVKKMKNYWRQLLNAKLITQRKFDNLTKAERGGLSELDKAGFIKRQLVETRQITKHVAQILDSRMNTKYDENDKLIREVKVITLKSKLVSDFRKDFQFYKVREINNYHHAHDAYLNAVVGTALIKKYPKLESEFVYGDYKVYDVRKMIAKSEQEIGKATAKYFFYSNIMNFFKTEITLANGEIRKRPLIETNGETGEIVWDKGRDFATVRKVLSMPQVNIVKKTEVQTGGFSKESILPKRNSDKLIARKKDWDPKKYGGFDSPTVAYSVLVVAKVEKGKSKKLKSVKELLGITIMERSSFEKNPIDFLEAKGYKEVKKDLIIKLPKYSLFELENGRKRMLASAGELQKGNELALPSKYVNFLYLASHYEKLKGSPEDNEQKQLFVEQHKHYLDEIIEQISEFSKRVILADANLDKVLSAYNKHRDKPIREQAENIIHLFTLTNLGAPAAFKYFDTTIDRKRYTSTKEVLDATLIHQSITGLYETRIDLSQLGGDSGGSSGGSSGSETPGTSESATPESSGGSSGGSSMASNFTQFVLVDNGGTGDVTVAPSNFANGIAEWISSNSRSQAYKVTCSVRQSSAQNRKYTIKVEVPKGAWRSYLNMELTIPIFATNSDCELIVKAMQGLLKDGNPIPSAIAANSGIYGSSGGGEAAAKTAPLEEEYRLFLEAPIQNVTLLEQWKREIPKVWAEINPPGLASTQAPIHVQLLSTALPVRVRQYPITLEAKRSLRETIRKFRAAGILRPVHSPWNTPLLPVRKSGTSEYRMVQDLREVNKRVETIHPTVPNPYTLLSLLPPDRIWYSVLDLKDAFFCIPLAPESQLIFAFEWADAEEGESGQLTWTRLPQGFKNSPTLFNEALNRDLQGFRLDHPSVSLLQYVDDLLIAADTQAACLSATRDLLMTLAELGYRVSGKKAQLCQEEVTYLGFKIHKGSRSLSNSRTQAILQIPVPKTKRQVREFLGKIGYCRLFIPGFAELAQPLYAATRPGNDPLVWGEKEEEAFQSLKLALTQPPALALPSLDKPFQLFVEETSGAAKGVLTQALGPWKRPVAYLSKRLDPVAAGWPRCLRAIAAAALLTREASKLTFGQDIEITSSHNLESLLRSPPDKWLTNARITQYQVLLLDPPRVRFKQTAALNPATLLPETDDTLPIHHCLDTLDSLTSTRPDLTDQPLAQAEATLFTDGSSYIRDGKRYAGAAVVTLDSVIWAEPLPIGTSAQKAELIALTKALEWSKDKSVNIYTDSRYAFATLHVHGMIYRERGWLTAGGKAIKNAPEILALLTAVWLPKRVAVMHCKGHQKDDAPTSTGNRRADEVAREVAIRPLSTQATISKRTADGSEFESPKKKAKVE

SEQ ID NO: 16017 - protein, 2390 aa, synthetic construct
MPAAKRVKLDGGDKKYSIGLDIGTNSVGWAVITDEYKVPSKKFKVLGNTDRHSIKKNLIGALLFDSGETAEATRLKRTARRRYTRRKNRICYLQEIFSNEMAKVDDSFFHRLEESFLVEEDKKHERHPIFGNIVDEVAYHEKYPTIYHLRKKLVDSTDKADLRLIYLALAHMIKFRGHFLIEGDLNPDNSDVDKLFIQLVQTYNQLFEENPINASGVDAKAILSARLSKSRRLENLIAQLPGEKKNGLFGNLIALSLGLTPNFKSNFDLAEDAKLQLSKDTYDDDLDNLLAQIGDQYADLFLAAKNLSDAILLSDILRVNTEITKAPLSASMIKRYDEHHQDLTLLKALVRQQLPEKYKEIFFDQSKNGYAGYIDGGASQEEFYKFIKPILEKMDGTEELLVKLNREDLLRKQRTFDNGSIPHQIHLGELHAILRRQEDFYPFLKDNREKIEKILTFRIPYYVGPLARGNSRFAWMTRKSEETITPWNFEEVVDKGASAQSFIERMTNFDKNLPNEKVLPKHSLLYEYFTVYNELTKVKYVTEGMRKPAFLSGEQKKAIVDLLFKTNRKVTVKQLKEDYFKKIECFDSVEISGVEDRFNASLGTYHDLLKIIKDKDFLDNEENEDILEDIVLTLTLFEDREMIEERLKTYAHLFDDKVMKQLKRRRYTGWGRLSRKLINGIRDKQSGKTILDFLKSDGFANRNFMQLIHDDSLTFKEDIQKAQVSGQGDSLHEHIANLAGSPAIKKGILQTVKVVDELVKVMGRHKPENIVIEMARENQTTQKGQKNSRERMKRIEEGIKELGSQILKEHPVENTQLQNEKLYLYYLQNGRDMYVDQELDINRLSDYDVDHIVPQSFLKDDSIDNKVLTRSDKARGKSDNVPSEEVVKKMKNYWRQLLNAKLITQRKFDNLTKAERGGLSELDKAGFIKRQLVETRQITKHVAQILDSRMNTKYDENDKLIREVKVITLKSKLVSDFRKDFQFYKVREINNYHHAHDAYLNAVVGTALIKKYPKLESEFVYGDYKVYDVRKMIAKSEQEIGKATAKYFFYSNIMNFFKTEITLANGEIRKRPLIETNGETGEIVWDKGRDFATVRKVLSMPQVNIVKKTEVQTGGFSKESILPKRNSDKLIARKKDWDPKKYGGFDSPTVAYSVLVVAKVEKGKSKKLKSVKELLGITIMERSSFEKNPIDFLEAKGYKEVKKDLIIKLPKYSLFELENGRKRMLASAGELQKGNELALPSKYVNFLYLASHYEKLKGSPEDNEQKQLFVEQHKHYLDEIIEQISEFSKRVILADANLDKVLSAYNKHRDKPIREQAENIIHLFTLTNLGAPAAFKYFDTTIDRKRYTSTKEVLDATLIHQSITGLYETRIDLSQLGGDSGGSSGGSSGSETPGTSESATPESSGGSSGGSSMASNFTQFVLVDNGGTGDVTVAPSNFANGIAEWISSNSRSQAYKVTCSVRQSSAQNRKYTIKVEVPKGAWRSYLNMELTIPIFATNSDCELIVKAMQGLLKDGNPIPSAIAANSGIYGGSGGSMASNFTQFVLVDNGGTGDVTVAPSNFANGIAEWISSNSRSQAYKVTCSVRQSSAQNRKYTIKVEVPKGAWRSYLNMELTIPIFATNSDCELIVKAMQGLLKDGNPIPSAIAANSGIYAEAAAKEAAAKEAAAKEAAAKALEAEAAAKEAAAKEAAAKEAAAKATAPLEEEYRLFLEAPIQNVTLLEQWKREIPKVWAEINPPGLASTQAPIHVQLLSTALPVRVRQYPITLEAKRSLRETIRKFRAAGILRPVHSPWNTPLLPVRKSGTSEYRMVQDLREVNKRVETIHPTVPNPYTLLSLLPPDRIWYSVLDLKDAFFCIPLAPESQLIFAFEWADAEEGESGQLTWTRLPQGFKNSPTLFNEALNRDLQGFRLDHPSVSLLQYVDDLLIAADTQAACLSATRDLLMTLAELGYRVSGKKAQLCQEEVTYLGFKIHKGSRSLSNSRTQAILQIPVPKTKRQVREFLGKIGYCRLFIPGFAELAQPLYAATRPGNDPLVWGEKEEEAFQSLKLALTQPPALALPSLDKPFQLFVEETSGAAKGVLTQALGPWKRPVAYLSKRLDPVAAGWPRCLRAIAAAALLTREASKLTFGQDIEITSSHNLESLLRSPPDKWLTNARITQYQVLLLDPPRVRFKQTAALNPATLLPETDDTLPIHHCLDTLDSLTSTRPDLTDQPLAQAEATLFTDGSSYIRDGKRYAGAAVVTLDSVIWAEPLPIGTSAQKAELIALTKALEWSKDKSVNIYTDSRYAFATLHVHGMIYRERGWLTAGGKAIKNAPEILALLTAVWLPKRVAVMHCKGHQKDDAPTSTGNRRADEVAREVAIRPLSTQATISKRTADGSEFESPKKKAKVE

SEQ ID NO: 16018 - protein, 2377 aa, synthetic construct
MPAAKRVKLDGGDKKYSIGLDIGTNSVGWAVITDEYKVPSKKFKVLGNTDRHSIKKNLIGALLFDSGETAEATRLKRTARRRYTRRKNRICYLQEIFSNEMAKVDDSFFHRLEESFLVEEDKKHERHPIFGNIVDEVAYHEKYPTIYHLRKKLVDSTDKADLRLIYLALAHMIKFRGHFLIEGDLNPDNSDVDKLFIQLVQTYNQLFEENPINASGVDAKAILSARLSKSRRLENLIAQLPGEKKNGLFGNLIALSLGLTPNFKSNFDLAEDAKLQLSKDTYDDDLDNLLAQIGDQYADLFLAAKNLSDAILLSDILRVNTEITKAPLSASMIKRYDEHHQDLTLLKALVRQQLPEKYKEIFFDQSKNGYAGYIDGGASQEEFYKFIKPILEKMDGTEELLVKLNREDLLRKQRTFDNGSIPHQIHLGELHAILRRQEDFYPFLKDNREKIEKILTFRIPYYVGPLARGNSRFAWMTRKSEETITPWNFEEVVDKGASAQSFIERMTNFDKNLPNEKVLPKHSLLYEYFTVYNELTKVKYVTEGMRKPAFLSGEQKKAIVDLLFKTNRKVTVKQLKEDYFKKIECFDSVEISGVEDRFNASLGTYHDLLKIIKDKDFLDNEENEDILEDIVLTLTLFEDREMIEERLKTYAHLFDDKVMKQLKRRRYTGWGRLSRKLINGIRDKQSGKTILDFLKSDGFANRNFMQLIHDDSLTFKEDIQKAQVSGQGDSLHEHIANLAGSPAIKKGILQTVKVVDELVKVMGRHKPENIVIEMARENQTTQKGQKNSRERMKRIEEGIKELGSQILKEHPVENTQLQNEKLYLYYLQNGRDMYVDQELDINRLSDYDVDHIVPQSFLKDDSIDNKVLTRSDKARGKSDNVPSEEVVKKMKNYWRQLLNAKLITQRKFDNLTKAERGGLSELDKAGFIKRQLVETRQITKHVAQILDSRMNTKYDENDKLIREVKVITLKSKLVSDFRKDFQFYKVREINNYHHAHDAYLNAVVGTALIKKYPKLESEFVYGDYKVYDVRKMIAKSEQEIGKATAKYFFYSNIMNFFKTEITLANGEIRKRPLIETNGETGEIVWDKGRDFATVRKVLSMPQVNIVKKTEVQTGGFSKESILPKRNSDKLIARKKDWDPKKYGGFDSPTVAYSVLVVAKVEKGKSKKLKSVKELLGITIMERSSFEKNPIDFLEAKGYKEVKKDLIIKLPKYSLFELENGRKRMLASAGELQKGNELALPSKYVNFLYLASHYEKLKGSPEDNEQKQLFVEQHKHYLDEIIEQISEFSKRVILADANLDKVLSAYNKHRDKPIREQAENIIHLFTLTNLGAPAAFKYFDTTIDRKRYTSTKEVLDATLIHQSITGLYETRIDLSQLGGDSGGSSGGSSGSETPGTSESATPESSGGSSGGSSMASNFTQFVLVDNGGTGDVTVAPSNFANGIAEWISSNSRSQAYKVTCSVRQSSAQNRKYTIKVEVPKGAWRSYLNMELTIPIFATNSDCELIVKAMQGLLKDGNPIPSAIAANSGIYGGSGGSMASNFTQFVLVDNGGTGDVTVAPSNFANGIAEWISSNSRSQAYKVTCSVRQSSAQNRKYTIKVEVPKGAWRSYLNMELTIPIFATNSDCELIVKAMQGLLKDGNPIPSAIAANSGIYSGGSSGGSSGSETPGTSESATPESSGGSSGGSSTAPLEEEYRLFLEAPIQNVTLLEQWKREIPKVWAEINPPGLASTQAPIHVQLLSTALPVRVRQYPITLEAKRSLRETIRKFRAAGILRPVHSPWNTPLLPVRKSGTSEYRMVQDLREVNKRVETIHPTVPNPYTLLSLLPPDRIWYSVLDLKDAFFCIPLAPESQLIFAFEWADAEEGESGQLTWTRLPQGFKNSPTLFNEALNRDLQGFRLDHPSVSLLQYVDDLLIAADTQAACLSATRDLLMTLAELGYRVSGKKAQLCQEEVTYLGFKIHKGSRSLSNSRTQAILQIPVPKTKRQVREFLGKIGYCRLFIPGFAELAQPLYAATRPGNDPLVWGEKEEEAFQSLKLALTQPPALALPSLDKPFQLFVEETSGAAKGVLTQALGPWKRPVAYLSKRLDPVAAGWPRCLRAIAAAALLTREASKLTFGQDIEITSSHNLESLLRSPPDKWLTNARITQYQVLLLDPPRVRFKQTAALNPATLLPETDDTLPIHHCLDTLDSLTSTRPDLTDQPLAQAEATLFTDGSSYIRDGKRYAGAAVVTLDSVIWAEPLPIGTSAQKAELIALTKALEWSKDKSVNIYTDSRYAFATLHVHGMIYRERGWLTAGGKAIKNAPEILALLTAVWLPKRVAVMHCKGHQKDDAPTSTGNRRADEVAREVAIRPLSTQATISKRTADGSEFESPKKKAKVE

SEQ ID NO: 16019 - protein, 2362 aa, synthetic construct
MPAAKRVKLDGGDKKYSIGLDIGTNSVGWAVITDEYKVPSKKFKVLGNTDRHSIKKNLIGALLFDSGETAEATRLKRTARRRYTRRKNRICYLQEIFSNEMAKVDDSFFHRLEESFLVEEDKKHERHPIFGNIVDEVAYHEKYPTIYHLRKKLVDSTDKADLRLIYLALAHMIKFRGHFLIEGDLNPDNSDVDKLFIQLVQTYNQLFEENPINASGVDAKAILSARLSKSRRLENLIAQLPGEKKNGLFGNLIALSLGLTPNFKSNFDLAEDAKLQLSKDTYDDDLDNLLAQIGDQYADLFLAAKNLSDAILLSDILRVNTEITKAPLSASMIKRYDEHHQDLTLLKALVRQQLPEKYKEIFFDQSKNGYAGYIDGGASQEEFYKFIKPILEKMDGTEELLVKLNREDLLRKQRTFDNGSIPHQIHLGELHAILRRQEDFYPFLKDNREKIEKILTFRIPYYVGPLARGNSRFAWMTRKSEETITPWNFEEVVDKGASAQSFIERMTNFDKNLPNEKVLPKHSLLYEYFTVYNELTKVKYVTEGMRKPAFLSGEQKKAIVDLLFKTNRKVTVKQLKEDYFKKIECFDSVEISGVEDRFNASLGTYHDLLKIIKDKDFLDNEENEDILEDIVLTLTLFEDREMIEERLKTYAHLFDDKVMKQLKRRRYTGWGRLSRKLINGIRDKQSGKTILDFLKSDGFANRNFMQLIHDDSLTFKEDIQKAQVSGQGDSLHEHIANLAGSPAIKKGILQTVKVVDELVKVMGRHKPENIVIEMARENQTTQKGQKNSRERMKRIEEGIKELGSQILKEHPVENTQLQNEKLYLYYLQNGRDMYVDQELDINRLSDYDVDHIVPQSFLKDDSIDNKVLTRSDKARGKSDNVPSEEVVKKMKNYWRQLLNAKLITQRKFDNLTKAERGGLSELDKAGFIKRQLVETRQITKHVAQILDSRMNTKYDENDKLIREVKVITLKSKLVSDFRKDFQFYKVREINNYHHAHDAYLNAVVGTALIKKYPKLESEFVYGDYKVYDVRKMIAKSEQEIGKATAKYFFYSNIMNFFKTEITLANGEIRKRPLIETNGETGEIVWDKGRDFATVRKVLSMPQVNIVKKTEVQTGGFSKESILPKRNSDKLIARKKDWDPKKYGGFDSPTVAYSVLVVAKVEKGKSKKLKSVKELLGITIMERSSFEKNPIDFLEAKGYKEVKKDLIIKLPKYSLFELENGRKRMLASAGELQKGNELALPSKYVNFLYLASHYEKLKGSPEDNEQKQLFVEQHKHYLDEIIEQISEFSKRVILADANLDKVLSAYNKHRDKPIREQAENIIHLFTLTNLGAPAAFKYFDTTIDRKRYTSTKEVLDATLIHQSITGLYETRIDLSQLGGDSGGSSGGSSGSETPGTSESATPESSGGSSGGSSMASNFTQFVLVDNGGTGDVTVAPSNFANGIAEWISSNSRSQAYKVTCSVRQSSAQNRKYTIKVEVPKGAWRSYLNMELTIPIFATNSDCELIVKAMQGLLKDGNPIPSAIAANSGIYGGSGGSMASNFTQFVLVDNGGTGDVTVAPSNFANGIAEWISSNSRSQAYKVTCSVRQSSAQNRKYTIKVEVPKGAWRSYLNMELTIPIFATNSDCELIVKAMQGLLKDGNPIPSAIAANSGIYGSSGSSGSSGSSGSSGSSTAPLEEEYRLFLEAPIQNVTLLEQWKREIPKVWAEINPPGLASTQAPIHVQLLSTALPVRVRQYPITLEAKRSLRETIRKFRAAGILRPVHSPWNTPLLPVRKSGTSEYRMVQDLREVNKRVETIHPTVPNPYTLLSLLPPDRIWYSVLDLKDAFFCIPLAPESQLIFAFEWADAEEGESGQLTWTRLPQGFKNSPTLFNEALNRDLQGFRLDHPSVSLLQYVDDLLIAADTQAACLSATRDLLMTLAELGYRVSGKKAQLCQEEVTYLGFKIHKGSRSLSNSRTQAILQIPVPKTKRQVREFLGKIGYCRLFIPGFAELAQPLYAATRPGNDPLVWGEKEEEAFQSLKLALTQPPALALPSLDKPFQLFVEETSGAAKGVLTQALGPWKRPVAYLSKRLDPVAAGWPRCLRAIAAAALLTREASKLTFGQDIEITSSHNLESLLRSPPDKWLTNARITQYQVLLLDPPRVRFKQTAALNPATLLPETDDTLPIHHCLDTLDSLTSTRPDLTDQPLAQAEATLFTDGSSYIRDGKRYAGAAVVTLDSVIWAEPLPIGTSAQKAELIALTKALEWSKDKSVNIYTDSRYAFATLHVHGMIYRERGWLTAGGKAIKNAPEILALLTAVWLPKRVAVMHCKGHQKDDAPTSTGNRRADEVAREVAIRPLSTQATISKRTADGSEFESPKKKAKVE

SEQ ID NO: 16020 - protein, 2355 aa, synthetic construct
MPAAKRVKLDGGDKKYSIGLDIGTNSVGWAVITDEYKVPSKKFKVLGNTDRHSIKKNLIGALLFDSGETAEATRLKRTARRRYTRRKNRICYLQEIFSNEMAKVDDSFFHRLEESFLVEEDKKHERHPIFGNIVDEVAYHEKYPTIYHLRKKLVDSTDKADLRLIYLALAHMIKFRGHFLIEGDLNPDNSDVDKLFIQLVQTYNQLFEENPINASGVDAKAILSARLSKSRRLENLIAQLPGEKKNGLFGNLIALSLGLTPNFKSNFDLAEDAKLQLSKDTYDDDLDNLLAQIGDQYADLFLAAKNLSDAILLSDILRVNTEITKAPLSASMIKRYDEHHQDLTLLKALVRQQLPEKYKEIFFDQSKNGYAGYIDGGASQEEFYKFIKPILEKMDGTEELLVKLNREDLLRKQRTFDNGSIPHQIHLGELHAILRRQEDFYPFLKDNREKIEKILTFRIPYYVGPLARGNSRFAWMTRKSEETITPWNFEEVVDKGASAQSFIERMTNFDKNLPNEKVLPKHSLLYEYFTVYNELTKVKYVTEGMRKPAFLSGEQKKAIVDLLFKTNRKVTVKQLKEDYFKKIECFDSVEISGVEDRFNASLGTYHDLLKIIKDKDFLDNEENEDILEDIVLTLTLFEDREMIEERLKTYAHLFDDKVMKQLKRRRYTGWGRLSRKLINGIRDKQSGKTILDFLKSDGFANRNFMQLIHDDSLTFKEDIQKAQVSGQGDSLHEHIANLAGSPAIKKGILQTVKVVDELVKVMGRHKPENIVIEMARENQTTQKGQKNSRERMKRIEEGIKELGSQILKEHPVENTQLQNEKLYLYYLQNGRDMYVDQELDINRLSDYDVDHIVPQSFLKDDSIDNKVLTRSDKARGKSDNVPSEEVVKKMKNYWRQLLNAKLITQRKFDNLTKAERGGLSELDKAGFIKRQLVETRQITKHVAQILDSRMNTKYDENDKLIREVKVITLKSKLVSDFRKDFQFYKVREINNYHHAHDAYLNAVVGTALIKKYPKLESEFVYGDYKVYDVRKMIAKSEQEIGKATAKYFFYSNIMNFFKTEITLANGEIRKRPLIETNGETGEIVWDKGRDFATVRKVLSMPQVNIVKKTEVQTGGFSKESILPKRNSDKLIARKKDWDPKKYGGFDSPTVAYSVLVVAKVEKGKSKKLKSVKELLGITIMERSSFEKNPIDFLEAKGYKEVKKDLIIKLPKYSLFELENGRKRMLASAGELQKGNELALPSKYVNFLYLASHYEKLKGSPEDNEQKQLFVEQHKHYLDEIIEQISEFSKRVILADANLDKVLSAYNKHRDKPIREQAENIIHLFTLTNLGAPAAFKYFDTTIDRKRYTSTKEVLDATLIHQSITGLYETRIDLSQLGGDSGGSSGGSSGSETPGTSESATPESSGGSSGGSSMASNFTQFVLVDNGGTGDVTVAPSNFANGIAEWISSNSRSQAYKVTCSVRQSSAQNRKYTIKVEVPKGAWRSYLNMELTIPIFATNSDCELIVKAMQGLLKDGNPIPSAIAANSGIYGGSGGSMASNFTQFVLVDNGGTGDVTVAPSNFANGIAEWISSNSRSQAYKVTCSVRQSSAQNRKYTIKVEVPKGAWRSYLNMELTIPIFATNSDCELIVKAMQGLLKDGNPIPSAIAANSGIYGSSGGGEAAAKTAPLEEEYRLFLEAPIQNVTLLEQWKREIPKVWAEINPPGLASTQAPIHVQLLSTALPVRVRQYPITLEAKRSLRETIRKFRAAGILRPVHSPWNTPLLPVRKSGTSEYRMVQDLREVNKRVETIHPTVPNPYTLLSLLPPDRIWYSVLDLKDAFFCIPLAPESQLIFAFEWADAEEGESGQLTWTRLPQGFKNSPTLFNEALNRDLQGFRLDHPSVSLLQYVDDLLIAADTQAACLSATRDLLMTLAELGYRVSGKKAQLCQEEVTYLGFKIHKGSRSLSNSRTQAILQIPVPKTKRQVREFLGKIGYCRLFIPGFAELAQPLYAATRPGNDPLVWGEKEEEAFQSLKLALTQPPALALPSLDKPFQLFVEETSGAAKGVLTQALGPWKRPVAYLSKRLDPVAAGWPRCLRAIAAAALLTREASKLTFGQDIEITSSHNLESLLRSPPDKWLTNARITQYQVLLLDPPRVRFKQTAALNPATLLPETDDTLPIHHCLDTLDSLTSTRPDLTDQPLAQAEATLFTDGSSYIRDGKRYAGAAVVTLDSVIWAEPLPIGTSAQKAELIALTKALEWSKDKSVNIYTDSRYAFATLHVHGMIYRERGWLTAGGKAIKNAPEILALLTAVWLPKRVAVMHCKGHQKDDAPTSTGNRRADEVAREVAIRPLSTQATISKRTADGSEFESPKKKAKVE

SEQ ID NO: 16021 - protein, 2646 aa, synthetic construct
MPAAKRVKLDGGDKKYSIGLDIGTNSVGWAVITDEYKVPSKKFKVLGNTDRHSIKKNLIGALLFDSGETAEATRLKRTARRRYTRRKNRICYLQEIFSNEMAKVDDSFFHRLEESFLVEEDKKHERHPIFGNIVDEVAYHEKYPTIYHLRKKLVDSTDKADLRLIYLALAHMIKFRGHFLIEGDLNPDNSDVDKLFIQLVQTYNQLFEENPINASGVDAKAILSARLSKSRRLENLIAQLPGEKKNGLFGNLIALSLGLTPNFKSNFDLAEDAKLQLSKDTYDDDLDNLLAQIGDQYADLFLAAKNLSDAILLSDILRVNTEITKAPLSASMIKRYDEHHQDLTLLKALVRQQLPEKYKEIFFDQSKNGYAGYIDGGASQEEFYKFIKPILEKMDGTEELLVKLNREDLLRKQRTFDNGSIPHQIHLGELHAILRRQEDFYPFLKDNREKIEKILTFRIPYYVGPLARGNSRFAWMTRKSEETITPWNFEEVVDKGASAQSFIERMTNFDKNLPNEKVLPKHSLLYEYFTVYNELTKVKYVTEGMRKPAFLSGEQKKAIVDLLFKTNRKVTVKQLKEDYFKKIECFDSVEISGVEDRFNASLGTYHDLLKIIKDKDFLDNEENEDILEDIVLTLTLFEDREMIEERLKTYAHLFDDKVMKQLKRRRYTGWGRLSRKLINGIRDKQSGKTILDFLKSDGFANRNFMQLIHDDSLTFKEDIQKAQVSGQGDSLHEHIANLAGSPAIKKGILQTVKVVDELVKVMGRHKPENIVIEMARENQTTQKGQKNSRERMKRIEEGIKELGSQILKEHPVENTQLQNEKLYLYYLQNGRDMYVDQELDINRLSDYDVDHIVPQSFLKDDSIDNKVLTRSDKARGKSDNVPSEEVVKKMKNYWRQLLNAKLITQRKFDNLTKAERGGLSELDKAGFIKRQLVETRQITKHVAQILDSRMNTKYDENDKLIREVKVITLKSKLVSDFRKDFQFYKVREINNYHHAHDAYLNAVVGTALIKKYPKLESEFVYGDYKVYDVRKMIAKSEQEIGKATAKYFFYSNIMNFFKTEITLANGEIRKRPLIETNGETGEIVWDKGRDFATVRKVLSMPQVNIVKKTEVQTGGFSKESILPKRNSDKLIARKKDWDPKKYGGFDSPTVAYSVLVVAKVEKGKSKKLKSVKELLGITIMERSSFEKNPIDFLEAKGYKEVKKDLIIKLPKYSLFELENGRKRMLASAGELQKGNELALPSKYVNFLYLASHYEKLKGSPEDNEQKQLFVEQHKHYLDEIIEQISEFSKRVILADANLDKVLSAYNKHRDKPIREQAENIIHLFTLTNLGAPAAFKYFDTTIDRKRYTSTKEVLDATLIHQSITGLYETRIDLSQLGGDSGGSSGGSSGSETPGTSESATPESSGGSSGGSSMASNFTQFVLVDNGGTGDVTVAPSNFANGIAEWISSNSRSQAYKVTCSVRQSSAQNRKYTIKVEVPKGAWRSYLNMELTIPIFATNSDCELIVKAMQGLLKDGNPIPSAIAANSGIYGGSGGSMASNFTQFVLVDNGGTGDVTVAPSNFANGIAEWISSNSRSQAYKVTCSVRQSSAQNRKYTIKVEVPKGAWRSYLNMELTIPIFATNSDCELIVKAMQGLLKDGNPIPSAIAANSGIYGGGSGGGSGGGSGGGSMASNFTQFVLVDNGGTGDVTVAPSNFANGIAEWISSNSRSQAYKVTCSVRQSSAQNRKYTIKVEVPKGAWRSYLNMELTIPIFATNSDCELIVKAMQGLLKDGNPIPSAIAANSGIYGGSGGSMASNFTQFVLVDNGGTGDVTVAPSNFANGIAEWISSNSRSQAYKVTCSVRQSSAQNRKYTIKVEVPKGAWRSYLNMELTIPIFATNSDCELIVKAMQGLLKDGNPIPSAIAANSGIYAEAAAKEAAAKEAAAKEAAAKALEAEAAAKEAAAKEAAAKEAAAKATAPLEEEYRLFLEAPIQNVTLLEQWKREIPKVWAEINPPGLASTQAPIHVQLLSTALPVRVRQYPITLEAKRSLRETIRKFRAAGILRPVHSPWNTPLLPVRKSGTSEYRMVQDLREVNKRVETIHPTVPNPYTLLSLLPPDRIWYSVLDLKDAFFCIPLAPESQLIFAFEWADAEEGESGQLTWTRLPQGFKNSPTLFNEALNRDLQGFRLDHPSVSLLQYVDDLLIAADTQAACLSATRDLLMTLAELGYRVSGKKAQLCQEEVTYLGFKIHKGSRSLSNSRTQAILQIPVPKTKRQVREFLGKIGYCRLFIPGFAELAQPLYAATRPGNDPLVWGEKEEEAFQSLKLALTQPPALALPSLDKPFQLFVEETSGAAKGVLTQALGPWKRPVAYLSKRLDPVAAGWPRCLRAIAAAALLTREASKLTFGQDIEITSSHNLESLLRSPPDKWLTNARITQYQVLLLDPPRVRFKQTAALNPATLLPETDDTLPIHHCLDTLDSLTSTRPDLTDQPLAQAEATLFTDGSSYIRDGKRYAGAAVVTLDSVIWAEPLPIGTSAQKAELIALTKALEWSKDKSVNIYTDSRYAFATLHVHGMIYRERGWLTAGGKAIKNAPEILALLTAVWLPKRVAVMHCKGHQKDDAPTSTGNRRADEVAREVAIRPLSTQATISKRTADGSEFESPKKKAKVE

SEQ ID NO: 16022 - protein, 2633 aa, synthetic construct
MPAAKRVKLDGGDKKYSIGLDIGTNSVGWAVITDEYKVPSKKFKVLGNTDRHSIKKNLIGALLFDSGETAEATRLKRTARRRYTRRKNRICYLQEIFSNEMAKVDDSFFHRLEESFLVEEDKKHERHPIFGNIVDEVAYHEKYPTIYHLRKKLVDSTDKADLRLIYLALAHMIKFRGHFLIEGDLNPDNSDVDKLFIQLVQTYNQLFEENPINASGVDAKAILSARLSKSRRLENLIAQLPGEKKNGLFGNLIALSLGLTPNFKSNFDLAEDAKLQLSKDTYDDDLDNLLAQIGDQYADLFLAAKNLSDAILLSDILRVNTEITKAPLSASMIKRYDEHHQDLTLLKALVRQQLPEKYKEIFFDQSKNGYAGYIDGGASQEEFYKFIKPILEKMDGTEELLVKLNREDLLRKQRTFDNGSIPHQIHLGELHAILRRQEDFYPFLKDNREKIEKILTFRIPYYVGPLARGNSRFAWMTRKSEETITPWNFEEVVDKGASAQSFIERMTNFDKNLPNEKVLPKHSLLYEYFTVYNELTKVKYVTEGMRKPAFLSGEQKKAIVDLLFKTNRKVTVKQLKEDYFKKIECFDSVEISGVEDRFNASLGTYHDLLKIIKDKDFLDNEENEDILEDIVLTLTLFEDREMIEERLKTYAHLFDDKVMKQLKRRRYTGWGRLSRKLINGIRDKQSGKTILDFLKSDGFANRNFMQLIHDDSLTFKEDIQKAQVSGQGDSLHEHIANLAGSPAIKKGILQTVKVVDELVKVMGRHKPENIVIEMARENQTTQKGQKNSRERMKRIEEGIKELGSQILKEHPVENTQLQNEKLYLYYLQNGRDMYVDQELDINRLSDYDVDHIVPQSFLKDDSIDNKVLTRSDKARGKSDNVPSEEVVKKMKNYWRQLLNAKLITQRKFDNLTKAERGGLSELDKAGFIKRQLVETRQITKHVAQILDSRMNTKYDENDKLIREVKVITLKSKLVSDFRKDFQFYKVREINNYHHAHDAYLNAVVGTALIKKYPKLESEFVYGDYKVYDVRKMIAKSEQEIGKATAKYFFYSNIMNFFKTEITLANGEIRKRPLIETNGETGEIVWDKGRDFATVRKVLSMPQVNIVKKTEVQTGGFSKESILPKRNSDKLIARKKDWDPKKYGGFDSPTVAYSVLVVAKVEKGKSKKLKSVKELLGITIMERSSFEKNPIDFLEAKGYKEVKKDLIIKLPKYSLFELENGRKRMLASAGELQKGNELALPSKYVNFLYLASHYEKLKGSPEDNEQKQLFVEQHKHYLDEIIEQISEFSKRVILADANLDKVLSAYNKHRDKPIREQAENIIHLFTLTNLGAPAAFKYFDTTIDRKRYTSTKEVLDATLIHQSITGLYETRIDLSQLGGDSGGSSGGSSGSETPGTSESATPESSGGSSGGSSMASNFTQFVLVDNGGTGDVTVAPSNFANGIAEWISSNSRSQAYKVTCSVRQSSAQNRKYTIKVEVPKGAWRSYLNMELTIPIFATNSDCELIVKAMQGLLKDGNPIPSAIAANSGIYGGSGGSMASNFTQFVLVDNGGTGDVTVAPSNFANGIAEWISSNSRSQAYKVTCSVRQSSAQNRKYTIKVEVPKGAWRSYLNMELTIPIFATNSDCELIVKAMQGLLKDGNPIPSAIAANSGIYGGGSGGGSGGGSGGGSMASNFTQFVLVDNGGTGDVTVAPSNFANGIAEWISSNSRSQAYKVTCSVRQSSAQNRKYTIKVEVPKGAWRSYLNMELTIPIFATNSDCELIVKAMQGLLKDGNPIPSAIAANSGIYGGSGGSMASNFTQFVLVDNGGTGDVTVAPSNFANGIAEWISSNSRSQAYKVTCSVRQSSAQNRKYTIKVEVPKGAWRSYLNMELTIPIFATNSDCELIVKAMQGLLKDGNPIPSAIAANSGIYSGGSSGGSSGSETPGTSESATPESSGGSSGGSSTAPLEEEYRLFLEAPIQNVTLLEQWKREIPKVWAEINPPGLASTQAPIHVQLLSTALPVRVRQYPITLEAKRSLRETIRKFRAAGILRPVHSPWNTPLLPVRKSGTSEYRMVQDLREVNKRVETIHPTVPNPYTLLSLLPPDRIWYSVLDLKDAFFCIPLAPESQLIFAFEWADAEEGESGQLTWTRLPQGFKNSPTLFNEALNRDLQGFRLDHPSVSLLQYVDDLLIAADTQAACLSATRDLLMTLAELGYRVSGKKAQLCQEEVTYLGFKIHKGSRSLSNSRTQAILQIPVPKTKRQVREFLGKIGYCRLFIPGFAELAQPLYAATRPGNDPLVWGEKEEEAFQSLKLALTQPPALALPSLDKPFQLFVEETSGAAKGVLTQALGPWKRPVAYLSKRLDPVAAGWPRCLRAIAAAALLTREASKLTFGQDIEITSSHNLESLLRSPPDKWLTNARITQYQVLLLDPPRVRFKQTAALNPATLLPETDDTLPIHHCLDTLDSLTSTRPDLTDQPLAQAEATLFTDGSSYIRDGKRYAGAAVVTLDSVIWAEPLPIGTSAQKAELIALTKALEWSKDKSVNIYTDSRYAFATLHVHGMIYRERGWLTAGGKAIKNAPEILALLTAVWLPKRVAVMHCKGHQKDDAPTSTGNRRADEVAREVAIRPLSTQATISKRTADGSEFESPKKKAKVE

SEQ ID NO: 16023 - protein, 2618 aa, synthetic construct
MPAAKRVKLDGGDKKYSIGLDIGTNSVGWAVITDEYKVPSKKFKVLGNTDRHSIKKNLIGALLFDSGETAEATRLKRTARRRYTRRKNRICYLQEIFSNEMAKVDDSFFHRLEESFLVEEDKKHERHPIFGNIVDEVAYHEKYPTIYHLRKKLVDSTDKADLRLIYLALAHMIKFRGHFLIEGDLNPDNSDVDKLFIQLVQTYNQLFEENPINASGVDAKAILSARLSKSRRLENLIAQLPGEKKNGLFGNLIALSLGLTPNFKSNFDLAEDAKLQLSKDTYDDDLDNLLAQIGDQYADLFLAAKNLSDAILLSDILRVNTEITKAPLSASMIKRYDEHHQDLTLLKALVRQQLPEKYKEIFFDQSKNGYAGYIDGGASQEEFYKFIKPILEKMDGTEELLVKLNREDLLRKQRTFDNGSIPHQIHLGELHAILRRQEDFYPFLKDNREKIEKILTFRIPYYVGPLARGNSRFAWMTRKSEETITPWNFEEVVDKGASAQSFIERMTNFDKNLPNEKVLPKHSLLYEYFTVYNELTKVKYVTEGMRKPAFLSGEQKKAIVDLLFKTNRKVTVKQLKEDYFKKIECFDSVEISGVEDRFNASLGTYHDLLKIIKDKDFLDNEENEDILEDIVLTLTLFEDREMIEERLKTYAHLFDDKVMKQLKRRRYTGWGRLSRKLINGIRDKQSGKTILDFLKSDGFANRNFMQLIHDDSLTFKEDIQKAQVSGQGDSLHEHIANLAGSPAIKKGILQTVKVVDELVKVMGRHKPENIVIEMARENQTTQKGQKNSRERMKRIEEGIKELGSQILKEHPVENTQLQNEKLYLYYLQNGRDMYVDQELDINRLSDYDVDHIVPQSFLKDDSIDNKVLTRSDKARGKSDNVPSEEVVKKMKNYWRQLLNAKLITQRKFDNLTKAERGGLSELDKAGFIKRQLVETRQITKHVAQILDSRMNTKYDENDKLIREVKVITLKSKLVSDFRKDFQFYKVREINNYHHAHDAYLNAVVGTALIKKYPKLESEFVYGDYKVYDVRKMIAKSEQEIGKATAKYFFYSNIMNFFKTEITLANGEIRKRPLIETNGETGEIVWDKGRDFATVRKVLSMPQVNIVKKTEVQTGGFSKESILPKRNSDKLIARKKDWDPKKYGGFDSPTVAYSVLVVAKVEKGKSKKLKSVKELLGITIMERSSFEKNPIDFLEAKGYKEVKKDLIIKLPKYSLFELENGRKRMLASAGELQKGNELALPSKYVNFLYLASHYEKLKGSPEDNEQKQLFVEQHKHYLDEIIEQISEFSKRVILADANLDKVLSAYNKHRDKPIREQAENIIHLFTLTNLGAPAAFKYFDTTIDRKRYTSTKEVLDATLIHQSITGLYETRIDLSQLGGDSGGSSGGSSGSETPGTSESATPESSGGSSGGSSMASNFTQFVLVDNGGTGDVTVAPSNFANGIAEWISSNSRSQAYKVTCSVRQSSAQNRKYTIKVEVPKGAWRSYLNMELTIPIFATNSDCELIVKAMQGLLKDGNPIPSAIAANSGIYGGSGGSMASNFTQFVLVDNGGTGDVTVAPSNFANGIAEWISSNSRSQAYKVTCSVRQSSAQNRKYTIKVEVPKGAWRSYLNMELTIPIFATNSDCELIVKAMQGLLKDGNPIPSAIAANSGIYGGGSGGGSGGGSGGGSMASNFTQFVLVDNGGTGDVTVAPSNFANGIAEWISSNSRSQAYKVTCSVRQSSAQNRKYTIKVEVPKGAWRSYLNMELTIPIFATNSDCELIVKAMQGLLKDGNPIPSAIAANSGIYGGSGGSMASNFTQFVLVDNGGTGDVTVAPSNFANGIAEWISSNSRSQAYKVTCSVRQSSAQNRKYTIKVEVPKGAWRSYLNMELTIPIFATNSDCELIVKAMQGLLKDGNPIPSAIAANSGIYGSSGSSGSSGSSGSSGSSTAPLEEEYRLFLEAPIQNVTLLEQWKREIPKVWAEINPPGLASTQAPIHVQLLSTALPVRVRQYPITLEAKRSLRETIRKFRAAGILRPVHSPWNTPLLPVRKSGTSEYRMVQDLREVNKRVETIHPTVPNPYTLLSLLPPDRIWYSVLDLKDAFFCIPLAPESQLIFAFEWADAEEGESGQLTWTRLPQGFKNSPTLFNEALNRDLQGFRLDHPSVSLLQYVDDLLIAADTQAACLSATRDLLMTLAELGYRVSGKKAQLCQEEVTYLGFKIHKGSRSLSNSRTQAILQIPVPKTKRQVREFLGKIGYCRLFIPGFAELAQPLYAATRPGNDPLVWGEKEEEAFQSLKLALTQPPALALPSLDKPFQLFVEETSGAAKGVLTQALGPWKRPVAYLSKRLDPVAAGWPRCLRAIAAAALLTREASKLTFGQDIEITSSHNLESLLRSPPDKWLTNARITQYQVLLLDPPRVRFKQTAALNPATLLPETDDTLPIHHCLDTLDSLTSTRPDLTDQPLAQAEATLFTDGSSYIRDGKRYAGAAVVTLDSVIWAEPLPIGTSAQKAELIALTKALEWSKDKSVNIYTDSRYAFATLHVHGMIYRERGWLTAGGKAIKNAPEILALLTAVWLPKRVAVMHCKGHQKDDAPTSTGNRRADEVAREVAIRPLSTQATISKRTADGSEFESPKKKAKVE

SEQ ID NO: 16024 - protein, 2611 aa, synthetic construct
MPAAKRVKLDGGDKKYSIGLDIGTNSVGWAVITDEYKVPSKKFKVLGNTDRHSIKKNLIGALLFDSGETAEATRLKRTARRRYTRRKNRICYLQEIFSNEMAKVDDSFFHRLEESFLVEEDKKHERHPIFGNIVDEVAYHEKYPTIYHLRKKLVDSTDKADLRLIYLALAHMIKFRGHFLIEGDLNPDNSDVDKLFIQLVQTYNQLFEENPINASGVDAKAILSARLSKSRRLENLIAQLPGEKKNGLFGNLIALSLGLTPNFKSNFDLAEDAKLQLSKDTYDDDLDNLLAQIGDQYADLFLAAKNLSDAILLSDILRVNTEITKAPLSASMIKRYDEHHQDLTLLKALVRQQLPEKYKEIFFDQSKNGYAGYIDGGASQEEFYKFIKPILEKMDGTEELLVKLNREDLLRKQRTFDNGSIPHQIHLGELHAILRRQEDFYPFLKDNREKIEKILTFRIPYYVGPLARGNSRFAWMTRKSEETITPWNFEEVVDKGASAQSFIERMTNFDKNLPNEKVLPKHSLLYEYFTVYNELTKVKYVTEGMRKPAFLSGEQKKAIVDLLFKTNRKVTVKQLKEDYFKKIECFDSVEISGVEDRFNASLGTYHDLLKIIKDKDFLDNEENEDILEDIVLTLTLFEDREMIEERLKTYAHLFDDKVMKQLKRRRYTGWGRLSRKLINGIRDKQSGKTILDFLKSDGFANRNFMQLIHDDSLTFKEDIQKAQVSGQGDSLHEHIANLAGSPAIKKGILQTVKVVDELVKVMGRHKPENIVIEMARENQTTQKGQKNSRERMKRIEEGIKELGSQILKEHPVENTQLQNEKLYLYYLQNGRDMYVDQELDINRLSDYDVDHIVPQSFLKDDSIDNKVLTRSDKARGKSDNVPSEEVVKKMKNYWRQLLNAKLITQRKFDNLTKAERGGLSELDKAGFIKRQLVETRQITKHVAQILDSRMNTKYDENDKLIREVKVITLKSKLVSDFRKDFQFYKVREINNYHHAHDAYLNAVVGTALIKKYPKLESEFVYGDYKVYDVRKMIAKSEQEIGKATAKYFFYSNIMNFFKTEITLANGEIRKRPLIETNGETGEIVWDKGRDFATVRKVLSMPQVNIVKKTEVQTGGFSKESILPKRNSDKLIARKKDWDPKKYGGFDSPTVAYSVLVVAKVEKGKSKKLKSVKELLGITIMERSSFEKNPIDFLEAKGYKEVKKDLIIKLPKYSLFELENGRKRMLASAGELQKGNELALPSKYVNFLYLASHYEKLKGSPEDNEQKQLFVEQHKHYLDEIIEQISEFSKRVILADANLDKVLSAYNKHRDKPIREQAENIIHLFTLTNLGAPAAFKYFDTTIDRKRYTSTKEVLDATLIHQSITGLYETRIDLSQLGGDSGGSSGGSSGSETPGTSESATPESSGGSSGGSSMASNFTQFVLVDNGGTGDVTVAPSNFANGIAEWISSNSRSQAYKVTCSVRQSSAQNRKYTIKVEVPKGAWRSYLNMELTIPIFATNSDCELIVKAMQGLLKDGNPIPSAIAANSGIYGGSGGSMASNFTQFVLVDNGGTGDVTVAPSNFANGIAEWISSNSRSQAYKVTCSVRQSSAQNRKYTIKVEVPKGAWRSYLNMELTIPIFATNSDCELIVKAMQGLLKDGNPIPSAIAANSGIYGGGSGGGSGGGSGGGSMASNFTQFVLVDNGGTGDVTVAPSNFANGIAEWISSNSRSQAYKVTCSVRQSSAQNRKYTIKVEVPKGAWRSYLNMELTIPIFATNSDCELIVKAMQGLLKDGNPIPSAIAANSGIYGGSGGSMASNFTQFVLVDNGGTGDVTVAPSNFANGIAEWISSNSRSQAYKVTCSVRQSSAQNRKYTIKVEVPKGAWRSYLNMELTIPIFATNSDCELIVKAMQGLLKDGNPIPSAIAANSGIYGSSGGGEAAAKTAPLEEEYRLFLEAPIQNVTLLEQWKREIPKVWAEINPPGLASTQAPIHVQLLSTALPVRVRQYPITLEAKRSLRETIRKFRAAGILRPVHSPWNTPLLPVRKSGTSEYRMVQDLREVNKRVETIHPTVPNPYTLLSLLPPDRIWYSVLDLKDAFFCIPLAPESQLIFAFEWADAEEGESGQLTWTRLPQGFKNSPTLFNEALNRDLQGFRLDHPSVSLLQYVDDLLIAADTQAACLSATRDLLMTLAELGYRVSGKKAQLCQEEVTYLGFKIHKGSRSLSNSRTQAILQIPVPKTKRQVREFLGKIGYCRLFIPGFAELAQPLYAATRPGNDPLVWGEKEEEAFQSLKLALTQPPALALPSLDKPFQLFVEETSGAAKGVLTQALGPWKRPVAYLSKRLDPVAAGWPRCLRAIAAAALLTREASKLTFGQDIEITSSHNLESLLRSPPDKWLTNARITQYQVLLLDPPRVRFKQTAALNPATLLPETDDTLPIHHCLDTLDSLTSTRPDLTDQPLAQAEATLFTDGSSYIRDGKRYAGAAVVTLDSVIWAEPLPIGTSAQKAELIALTKALEWSKDKSVNIYTDSRYAFATLHVHGMIYRERGWLTAGGKAIKNAPEILALLTAVWLPKRVAVMHCKGHQKDDAPTSTGNRRADEVAREVAIRPLSTQATISKRTADGSEFESPKKKAKVE

SEQ ID NO: 16025 - protein, 2252 aa, synthetic construct
MPAAKRVKLDGGDKKYSIGLDIGTNSVGWAVITDEYKVPSKKFKVLGNTDRHSIKKNLIGALLFDSGETAEATRLKRTARRRYTRRKNRICYLQEIFSNEMAKVDDSFFHRLEESFLVEEDKKHERHPIFGNIVDEVAYHEKYPTIYHLRKKLVDSTDKADLRLIYLALAHMIKFRGHFLIEGDLNPDNSDVDKLFIQLVQTYNQLFEENPINASGVDAKAILSARLSKSRRLENLIAQLPGEKKNGLFGNLIALSLGLTPNFKSNFDLAEDAKLQLSKDTYDDDLDNLLAQIGDQYADLFLAAKNLSDAILLSDILRVNTEITKAPLSASMIKRYDEHHQDLTLLKALVRQQLPEKYKEIFFDQSKNGYAGYIDGGASQEEFYKFIKPILEKMDGTEELLVKLNREDLLRKQRTFDNGSIPHQIHLGELHAILRRQEDFYPFLKDNREKIEKILTFRIPYYVGPLARGNSRFAWMTRKSEETITPWNFEEVVDKGASAQSFIERMTNFDKNLPNEKVLPKHSLLYEYFTVYNELTKVKYVTEGMRKPAFLSGEQKKAIVDLLFKTNRKVTVKQLKEDYFKKIECFDSVEISGVEDRFNASLGTYHDLLKIIKDKDFLDNEENEDILEDIVLTLTLFEDREMIEERLKTYAHLFDDKVMKQLKRRRYTGWGRLSRKLINGIRDKQSGKTILDFLKSDGFANRNFMQLIHDDSLTFKEDIQKAQVSGQGDSLHEHIANLAGSPAIKKGILQTVKVVDELVKVMGRHKPENIVIEMARENQTTQKGQKNSRERMKRIEEGIKELGSQILKEHPVENTQLQNEKLYLYYLQNGRDMYVDQELDINRLSDYDVDHIVPQSFLKDDSIDNKVLTRSDKARGKSDNVPSEEVVKKMKNYWRQLLNAKLITQRKFDNLTKAERGGLSELDKAGFIKRQLVETRQITKHVAQILDSRMNTKYDENDKLIREVKVITLKSKLVSDFRKDFQFYKVREINNYHHAHDAYLNAVVGTALIKKYPKLESEFVYGDYKVYDVRKMIAKSEQEIGKATAKYFFYSNIMNFFKTEITLANGEIRKRPLIETNGETGEIVWDKGRDFATVRKVLSMPQVNIVKKTEVQTGGFSKESILPKRNSDKLIARKKDWDPKKYGGFDSPTVAYSVLVVAKVEKGKSKKLKSVKELLGITIMERSSFEKNPIDFLEAKGYKEVKKDLIIKLPKYSLFELENGRKRMLASAGELQKGNELALPSKYVNFLYLASHYEKLKGSPEDNEQKQLFVEQHKHYLDEIIEQISEFSKRVILADANLDKVLSAYNKHRDKPIREQAENIIHLFTLTNLGAPAAFKYFDTTIDRKRYTSTKEVLDATLIHQSITGLYETRIDLSQLGGDGSSGSSGSSGSSGSSGSSMASNFTQFVLVDNGGTGDVTVAPSNFANGIAEWISSNSRSQAYKVTCSVRQSSAQNRKYTIKVEVPKGAWRSYLNMELTIPIFATNSDCELIVKAMQGLLKDGNPIPSAIAANSGIYAEAAAKEAAAKEAAAKEAAAKALEAEAAAKEAAAKEAAAKEAAAKATAPLEEEYRLFLEAPIQNVTLLEQWKREIPKVWAEINPPGLASTQAPIHVQLLSTALPVRVRQYPITLEAKRSLRETIRKFRAAGILRPVHSPWNTPLLPVRKSGTSEYRMVQDLREVNKRVETIHPTVPNPYTLLSLLPPDRIWYSVLDLKDAFFCIPLAPESQLIFAFEWADAEEGESGQLTWTRLPQGFKNSPTLFNEALNRDLQGFRLDHPSVSLLQYVDDLLIAADTQAACLSATRDLLMTLAELGYRVSGKKAQLCQEEVTYLGFKIHKGSRSLSNSRTQAILQIPVPKTKRQVREFLGKIGYCRLFIPGFAELAQPLYAATRPGNDPLVWGEKEEEAFQSLKLALTQPPALALPSLDKPFQLFVEETSGAAKGVLTQALGPWKRPVAYLSKRLDPVAAGWPRCLRAIAAAALLTREASKLTFGQDIEITSSHNLESLLRSPPDKWLTNARITQYQVLLLDPPRVRFKQTAALNPATLLPETDDTLPIHHCLDTLDSLTSTRPDLTDQPLAQAEATLFTDGSSYIRDGKRYAGAAVVTLDSVIWAEPLPIGTSAQKAELIALTKALEWSKDKSVNIYTDSRYAFATLHVHGMIYRERGWLTAGGKAIKNAPEILALLTAVWLPKRVAVMHCKGHQKDDAPTSTGNRRADEVAREVAIRPLSTQATISKRTADGSEFESPKKKAKVE

SEQ ID NO: 16026 - protein, 2239 aa, synthetic construct
MPAAKRVKLDGGDKKYSIGLDIGTNSVGWAVITDEYKVPSKKFKVLGNTDRHSIKKNLIGALLFDSGETAEATRLKRTARRRYTRRKNRICYLQEIFSNEMAKVDDSFFHRLEESFLVEEDKKHERHPIFGNIVDEVAYHEKYPTIYHLRKKLVDSTDKADLRLIYLALAHMIKFRGHFLIEGDLNPDNSDVDKLFIQLVQTYNQLFEENPINASGVDAKAILSARLSKSRRLENLIAQLPGEKKNGLFGNLIALSLGLTPNFKSNFDLAEDAKLQLSKDTYDDDLDNLLAQIGDQYADLFLAAKNLSDAILLSDILRVNTEITKAPLSASMIKRYDEHHQDLTLLKALVRQQLPEKYKEIFFDQSKNGYAGYIDGGASQEEFYKFIKPILEKMDGTEELLVKLNREDLLRKQRTFDNGSIPHQIHLGELHAILRRQEDFYPFLKDNREKIEKILTFRIPYYVGPLARGNSRFAWMTRKSEETITPWNFEEVVDKGASAQSFIERMTNFDKNLPNEKVLPKHSLLYEYFTVYNELTKVKYVTEGMRKPAFLSGEQKKAIVDLLFKTNRKVTVKQLKEDYFKKIECFDSVEISGVEDRFNASLGTYHDLLKIIKDKDFLDNEENEDILEDIVLTLTLFEDREMIEERLKTYAHLFDDKVMKQLKRRRYTGWGRLSRKLINGIRDKQSGKTILDFLKSDGFANRNFMQLIHDDSLTFKEDIQKAQVSGQGDSLHEHIANLAGSPAIKKGILQTVKVVDELVKVMGRHKPENIVIEMARENQTTQKGQKNSRERMKRIEEGIKELGSQILKEHPVENTQLQNEKLYLYYLQNGRDMYVDQELDINRLSDYDVDHIVPQSFLKDDSIDNKVLTRSDKARGKSDNVPSEEVVKKMKNYWRQLLNAKLITQRKFDNLTKAERGGLSELDKAGFIKRQLVETRQITKHVAQILDSRMNTKYDENDKLIREVKVITLKSKLVSDFRKDFQFYKVREINNYHHAHDAYLNAVVGTALIKKYPKLESEFVYGDYKVYDVRKMIAKSEQEIGKATAKYFFYSNIMNFFKTEITLANGEIRKRPLIETNGETGEIVWDKGRDFATVRKVLSMPQVNIVKKTEVQTGGFSKESILPKRNSDKLIARKKDWDPKKYGGFDSPTVAYSVLVVAKVEKGKSKKLKSVKELLGITIMERSSFEKNPIDFLEAKGYKEVKKDLIIKLPKYSLFELENGRKRMLASAGELQKGNELALPSKYVNFLYLASHYEKLKGSPEDNEQKQLFVEQHKHYLDEIIEQISEFSKRVILADANLDKVLSAYNKHRDKPIREQAENIIHLFTLTNLGAPAAFKYFDTTIDRKRYTSTKEVLDATLIHQSITGLYETRIDLSQLGGDGSSGSSGSSGSSGSSGSSMASNFTQFVLVDNGGTGDVTVAPSNFANGIAEWISSNSRSQAYKVTCSVRQSSAQNRKYTIKVEVPKGAWRSYLNMELTIPIFATNSDCELIVKAMQGLLKDGNPIPSAIAANSGIYSGGSSGGSSGSETPGTSESATPESSGGSSGGSSTAPLEEEYRLFLEAPIQNVTLLEQWKREIPKVWAEINPPGLASTQAPIHVQLLSTALPVRVRQYPITLEAKRSLRETIRKFRAAGILRPVHSPWNTPLLPVRKSGTSEYRMVQDLREVNKRVETIHPTVPNPYTLLSLLPPDRIWYSVLDLKDAFFCIPLAPESQLIFAFEWADAEEGESGQLTWTRLPQGFKNSPTLFNEALNRDLQGFRLDHPSVSLLQYVDDLLIAADTQAACLSATRDLLMTLAELGYRVSGKKAQLCQEEVTYLGFKIHKGSRSLSNSRTQAILQIPVPKTKRQVREFLGKIGYCRLFIPGFAELAQPLYAATRPGNDPLVWGEKEEEAFQSLKLALTQPPALALPSLDKPFQLFVEETSGAAKGVLTQALGPWKRPVAYLSKRLDPVAAGWPRCLRAIAAAALLTREASKLTFGQDIEITSSHNLESLLRSPPDKWLTNARITQYQVLLLDPPRVRFKQTAALNPATLLPETDDTLPIHHCLDTLDSLTSTRPDLTDQPLAQAEATLFTDGSSYIRDGKRYAGAAVVTLDSVIWAEPLPIGTSAQKAELIALTKALEWSKDKSVNIYTDSRYAFATLHVHGMIYRERGWLTAGGKAIKNAPEILALLTAVWLPKRVAVMHCKGHQKDDAPTSTGNRRADEVAREVAIRPLSTQATISKRTADGSEFESPKKKAKVE

SEQ ID NO: 16027 - protein, 2224 aa, synthetic construct
MPAAKRVKLDGGDKKYSIGLDIGTNSVGWAVITDEYKVPSKKFKVLGNTDRHSIKKNLIGALLFDSGETAEATRLKRTARRRYTRRKNRICYLQEIFSNEMAKVDDSFFHRLEESFLVEEDKKHERHPIFGNIVDEVAYHEKYPTIYHLRKKLVDSTDKADLRLIYLALAHMIKFRGHFLIEGDLNPDNSDVDKLFIQLVQTYNQLFEENPINASGVDAKAILSARLSKSRRLENLIAQLPGEKKNGLFGNLIALSLGLTPNFKSNFDLAEDAKLQLSKDTYDDDLDNLLAQIGDQYADLFLAAKNLSDAILLSDILRVNTEITKAPLSASMIKRYDEHHQDLTLLKALVRQQLPEKYKEIFFDQSKNGYAGYIDGGASQEEFYKFIKPILEKMDGTEELLVKLNREDLLRKQRTFDNGSIPHQIHLGELHAILRRQEDFYPFLKDNREKIEKILTFRIPYYVGPLARGNSRFAWMTRKSEETITPWNFEEVVDKGASAQSFIERMTNFDKNLPNEKVLPKHSLLYEYFTVYNELTKVKYVTEGMRKPAFLSGEQKKAIVDLLFKTNRKVTVKQLKEDYFKKIECFDSVEISGVEDRFNASLGTYHDLLKIIKDKDFLDNEENEDILEDIVLTLTLFEDREMIEERLKTYAHLFDDKVMKQLKRRRYTGWGRLSRKLINGIRDKQSGKTILDFLKSDGFANRNFMQLIHDDSLTFKEDIQKAQVSGQGDSLHEHIANLAGSPAIKKGILQTVKVVDELVKVMGRHKPENIVIEMARENQTTQKGQKNSRERMKRIEEGIKELGSQILKEHPVENTQLQNEKLYLYYLQNGRDMYVDQELDINRLSDYDVDHIVPQSFLKDDSIDNKVLTRSDKARGKSDNVPSEEVVKKMKNYWRQLLNAKLITQRKFDNLTKAERGGLSELDKAGFIKRQLVETRQITKHVAQILDSRMNTKYDENDKLIREVKVITLKSKLVSDFRKDFQFYKVREINNYHHAHDAYLNAVVGTALIKKYPKLESEFVYGDYKVYDVRKMIAKSEQEIGKATAKYFFYSNIMNFFKTEITLANGEIRKRPLIETNGETGEIVWDKGRDFATVRKVLSMPQVNIVKKTEVQTGGFSKESILPKRNSDKLIARKKDWDPKKYGGFDSPTVAYSVLVVAKVEKGKSKKLKSVKELLGITIMERSSFEKNPIDFLEAKGYKEVKKDLIIKLPKYSLFELENGRKRMLASAGELQKGNELALPSKYVNFLYLASHYEKLKGSPEDNEQKQLFVEQHKHYLDEIIEQISEFSKRVILADANLDKVLSAYNKHRDKPIREQAENIIHLFTLTNLGAPAAFKYFDTTIDRKRYTSTKEVLDATLIHQSITGLYETRIDLSQLGGDGSSGSSGSSGSSGSSGSSMASNFTQFVLVDNGGTGDVTVAPSNFANGIAEWISSNSRSQAYKVTCSVRQSSAQNRKYTIKVEVPKGAWRSYLNMELTIPIFATNSDCELIVKAMQGLLKDGNPIPSAIAANSGIYGSSGSSGSSGSSGSSGSSTAPLEEEYRLFLEAPIQNVTLLEQWKREIPKVWAEINPPGLASTQAPIHVQLLSTALPVRVRQYPITLEAKRSLRETIRKFRAAGILRPVHSPWNTPLLPVRKSGTSEYRMVQDLREVNKRVETIHPTVPNPYTLLSLLPPDRIWYSVLDLKDAFFCIPLAPESQLIFAFEWADAEEGESGQLTWTRLPQGFKNSPTLFNEALNRDLQGFRLDHPSVSLLQYVDDLLIAADTQAACLSATRDLLMTLAELGYRVSGKKAQLCQEEVTYLGFKIHKGSRSLSNSRTQAILQIPVPKTKRQVREFLGKIGYCRLFIPGFAELAQPLYAATRPGNDPLVWGEKEEEAFQSLKLALTQPPALALPSLDKPFQLFVEETSGAAKGVLTQALGPWKRPVAYLSKRLDPVAAGWPRCLRAIAAAALLTREASKLTFGQDIEITSSHNLESLLRSPPDKWLTNARITQYQVLLLDPPRVRFKQTAALNPATLLPETDDTLPIHHCLDTLDSLTSTRPDLTDQPLAQAEATLFTDGSSYIRDGKRYAGAAVVTLDSVIWAEPLPIGTSAQKAELIALTKALEWSKDKSVNIYTDSRYAFATLHVHGMIYRERGWLTAGGKAIKNAPEILALLTAVWLPKRVAVMHCKGHQKDDAPTSTGNRRADEVAREVAIRPLSTQATISKRTADGSEFESPKKKAKVE

SEQ ID NO: 16028 - protein, 2217 aa, synthetic construct
MPAAKRVKLDGGDKKYSIGLDIGTNSVGWAVITDEYKVPSKKFKVLGNTDRHSIKKNLIGALLFDSGETAEATRLKRTARRRYTRRKNRICYLQEIFSNEMAKVDDSFFHRLEESFLVEEDKKHERHPIFGNIVDEVAYHEKYPTIYHLRKKLVDSTDKADLRLIYLALAHMIKFRGHFLIEGDLNPDNSDVDKLFIQLVQTYNQLFEENPINASGVDAKAILSARLSKSRRLENLIAQLPGEKKNGLFGNLIALSLGLTPNFKSNFDLAEDAKLQLSKDTYDDDLDNLLAQIGDQYADLFLAAKNLSDAILLSDILRVNTEITKAPLSASMIKRYDEHHQDLTLLKALVRQQLPEKYKEIFFDQSKNGYAGYIDGGASQEEFYKFIKPILEKMDGTEELLVKLNREDLLRKQRTFDNGSIPHQIHLGELHAILRRQEDFYPFLKDNREKIEKILTFRIPYYVGPLARGNSRFAWMTRKSEETITPWNFEEVVDKGASAQSFIERMTNFDKNLPNEKVLPKHSLLYEYFTVYNELTKVKYVTEGMRKPAFLSGEQKKAIVDLLFKTNRKVTVKQLKEDYFKKIECFDSVEISGVEDRFNASLGTYHDLLKIIKDKDFLDNEENEDILEDIVLTLTLFEDREMIEERLKTYAHLFDDKVMKQLKRRRYTGWGRLSRKLINGIRDKQSGKTILDFLKSDGFANRNFMQLIHDDSLTFKEDIQKAQVSGQGDSLHEHIANLAGSPAIKKGILQTVKVVDELVKVMGRHKPENIVIEMARENQTTQKGQKNSRERMKRIEEGIKELGSQILKEHPVENTQLQNEKLYLYYLQNGRDMYVDQELDINRLSDYDVDHIVPQSFLKDDSIDNKVLTRSDKARGKSDNVPSEEVVKKMKNYWRQLLNAKLITQRKFDNLTKAERGGLSELDKAGFIKRQLVETRQITKHVAQILDSRMNTKYDENDKLIREVKVITLKSKLVSDFRKDFQFYKVREINNYHHAHDAYLNAVVGTALIKKYPKLESEFVYGDYKVYDVRKMIAKSEQEIGKATAKYFFYSNIMNFFKTEITLANGEIRKRPLIETNGETGEIVWDKGRDFATVRKVLSMPQVNIVKKTEVQTGGFSKESILPKRNSDKLIARKKDWDPKKYGGFDSPTVAYSVLVVAKVEKGKSKKLKSVKELLGITIMERSSFEKNPIDFLEAKGYKEVKKDLIIKLPKYSLFELENGRKRMLASAGELQKGNELALPSKYVNFLYLASHYEKLKGSPEDNEQKQLFVEQHKHYLDEIIEQISEFSKRVILADANLDKVLSAYNKHRDKPIREQAENIIHLFTLTNLGAPAAFKYFDTTIDRKRYTSTKEVLDATLIHQSITGLYETRIDLSQLGGDGSSGSSGSSGSSGSSGSSMASNFTQFVLVDNGGTGDVTVAPSNFANGIAEWISSNSRSQAYKVTCSVRQSSAQNRKYTIKVEVPKGAWRSYLNMELTIPIFATNSDCELIVKAMQGLLKDGNPIPSAIAANSGIYGSSGGGEAAAKTAPLEEEYRLFLEAPIQNVTLLEQWKREIPKVWAEINPPGLASTQAPIHVQLLSTALPVRVRQYPITLEAKRSLRETIRKFRAAGILRPVHSPWNTPLLPVRKSGTSEYRMVQDLREVNKRVETIHPTVPNPYTLLSLLPPDRIWYSVLDLKDAFFCIPLAPESQLIFAFEWADAEEGESGQLTWTRLPQGFKNSPTLFNEALNRDLQGFRLDHPSVSLLQYVDDLLIAADTQAACLSATRDLLMTLAELGYRVSGKKAQLCQEEVTYLGFKIHKGSRSLSNSRTQAILQIPVPKTKRQVREFLGKIGYCRLFIPGFAELAQPLYAATRPGNDPLVWGEKEEEAFQSLKLALTQPPALALPSLDKPFQLFVEETSGAAKGVLTQALGPWKRPVAYLSKRLDPVAAGWPRCLRAIAAAALLTREASKLTFGQDIEITSSHNLESLLRSPPDKWLTNARITQYQVLLLDPPRVRFKQTAALNPATLLPETDDTLPIHHCLDTLDSLTSTRPDLTDQPLAQAEATLFTDGSSYIRDGKRYAGAAVVTLDSVIWAEPLPIGTSAQKAELIALTKALEWSKDKSVNIYTDSRYAFATLHVHGMIYRERGWLTAGGKAIKNAPEILALLTAVWLPKRVAVMHCKGHQKDDAPTSTGNRRADEVAREVAIRPLSTQATISKRTADGSEFESPKKKAKVE

SEQ ID NO: 16029 - protein, 2375 aa, synthetic construct
MPAAKRVKLDGGDKKYSIGLDIGTNSVGWAVITDEYKVPSKKFKVLGNTDRHSIKKNLIGALLFDSGETAEATRLKRTARRRYTRRKNRICYLQEIFSNEMAKVDDSFFHRLEESFLVEEDKKHERHPIFGNIVDEVAYHEKYPTIYHLRKKLVDSTDKADLRLIYLALAHMIKFRGHFLIEGDLNPDNSDVDKLFIQLVQTYNQLFEENPINASGVDAKAILSARLSKSRRLENLIAQLPGEKKNGLFGNLIALSLGLTPNFKSNFDLAEDAKLQLSKDTYDDDLDNLLAQIGDQYADLFLAAKNLSDAILLSDILRVNTEITKAPLSASMIKRYDEHHQDLTLLKALVRQQLPEKYKEIFFDQSKNGYAGYIDGGASQEEFYKFIKPILEKMDGTEELLVKLNREDLLRKQRTFDNGSIPHQIHLGELHAILRRQEDFYPFLKDNREKIEKILTFRIPYYVGPLARGNSRFAWMTRKSEETITPWNFEEVVDKGASAQSFIERMTNFDKNLPNEKVLPKHSLLYEYFTVYNELTKVKYVTEGMRKPAFLSGEQKKAIVDLLFKTNRKVTVKQLKEDYFKKIECFDSVEISGVEDRFNASLGTYHDLLKIIKDKDFLDNEENEDILEDIVLTLTLFEDREMIEERLKTYAHLFDDKVMKQLKRRRYTGWGRLSRKLINGIRDKQSGKTILDFLKSDGFANRNFMQLIHDDSLTFKEDIQKAQVSGQGDSLHEHIANLAGSPAIKKGILQTVKVVDELVKVMGRHKPENIVIEMARENQTTQKGQKNSRERMKRIEEGIKELGSQILKEHPVENTQLQNEKLYLYYLQNGRDMYVDQELDINRLSDYDVDHIVPQSFLKDDSIDNKVLTRSDKARGKSDNVPSEEVVKKMKNYWRQLLNAKLITQRKFDNLTKAERGGLSELDKAGFIKRQLVETRQITKHVAQILDSRMNTKYDENDKLIREVKVITLKSKLVSDFRKDFQFYKVREINNYHHAHDAYLNAVVGTALIKKYPKLESEFVYGDYKVYDVRKMIAKSEQEIGKATAKYFFYSNIMNFFKTEITLANGEIRKRPLIETNGETGEIVWDKGRDFATVRKVLSMPQVNIVKKTEVQTGGFSKESILPKRNSDKLIARKKDWDPKKYGGFDSPTVAYSVLVVAKVEKGKSKKLKSVKELLGITIMERSSFEKNPIDFLEAKGYKEVKKDLIIKLPKYSLFELENGRKRMLASAGELQKGNELALPSKYVNFLYLASHYEKLKGSPEDNEQKQLFVEQHKHYLDEIIEQISEFSKRVILADANLDKVLSAYNKHRDKPIREQAENIIHLFTLTNLGAPAAFKYFDTTIDRKRYTSTKEVLDATLIHQSITGLYETRIDLSQLGGDGSSGSSGSSGSSGSSGSSMASNFTQFVLVDNGGTGDVTVAPSNFANGIAEWISSNSRSQAYKVTCSVRQSSAQNRKYTIKVEVPKGAWRSYLNMELTIPIFATNSDCELIVKAMQGLLKDGNPIPSAIAANSGIYGGSGGSMASNFTQFVLVDNGGTGDVTVAPSNFANGIAEWISSNSRSQAYKVTCSVRQSSAQNRKYTIKVEVPKGAWRSYLNMELTIPIFATNSDCELIVKAMQGLLKDGNPIPSAIAANSGIYAEAAAKEAAAKEAAAKEAAAKALEAEAAAKEAAAKEAAAKEAAAKATAPLEEEYRLFLEAPIQNVTLLEQWKREIPKVWAEINPPGLASTQAPIHVQLLSTALPVRVRQYPITLEAKRSLRETIRKFRAAGILRPVHSPWNTPLLPVRKSGTSEYRMVQDLREVNKRVETIHPTVPNPYTLLSLLPPDRIWYSVLDLKDAFFCIPLAPESQLIFAFEWADAEEGESGQLTWTRLPQGFKNSPTLFNEALNRDLQGFRLDHPSVSLLQYVDDLLIAADTQAACLSATRDLLMTLAELGYRVSGKKAQLCQEEVTYLGFKIHKGSRSLSNSRTQAILQIPVPKTKRQVREFLGKIGYCRLFIPGFAELAQPLYAATRPGNDPLVWGEKEEEAFQSLKLALTQPPALALPSLDKPFQLFVEETSGAAKGVLTQALGPWKRPVAYLSKRLDPVAAGWPRCLRAIAAAALLTREASKLTFGQDIEITSSHNLESLLRSPPDKWLTNARITQYQVLLLDPPRVRFKQTAALNPATLLPETDDTLPIHHCLDTLDSLTSTRPDLTDQPLAQAEATLFTDGSSYIRDGKRYAGAAVVTLDSVIWAEPLPIGTSAQKAELIALTKALEWSKDKSVNIYTDSRYAFATLHVHGMIYRERGWLTAGGKAIKNAPEILALLTAVWLPKRVAVMHCKGHQKDDAPTSTGNRRADEVAREVAIRPLSTQATISKRTADGSEFESPKKKAKVE

SEQ ID NO: 16030 - protein, 2362 aa, synthetic construct
MPAAKRVKLDGGDKKYSIGLDIGTNSVGWAVITDEYKVPSKKFKVLGNTDRHSIKKNLIGALLFDSGETAEATRLKRTARRRYTRRKNRICYLQEIFSNEMAKVDDSFFHRLEESFLVEEDKKHERHPIFGNIVDEVAYHEKYPTIYHLRKKLVDSTDKADLRLIYLALAHMIKFRGHFLIEGDLNPDNSDVDKLFIQLVQTYNQLFEENPINASGVDAKAILSARLSKSRRLENLIAQLPGEKKNGLFGNLIALSLGLTPNFKSNFDLAEDAKLQLSKDTYDDDLDNLLAQIGDQYADLFLAAKNLSDAILLSDILRVNTEITKAPLSASMIKRYDEHHQDLTLLKALVRQQLPEKYKEIFFDQSKNGYAGYIDGGASQEEFYKFIKPILEKMDGTEELLVKLNREDLLRKQRTFDNGSIPHQIHLGELHAILRRQEDFYPFLKDNREKIEKILTFRIPYYVGPLARGNSRFAWMTRKSEETITPWNFEEVVDKGASAQSFIERMTNFDKNLPNEKVLPKHSLLYEYFTVYNELTKVKYVTEGMRKPAFLSGEQKKAIVDLLFKTNRKVTVKQLKEDYFKKIECFDSVEISGVEDRFNASLGTYHDLLKIIKDKDFLDNEENEDILEDIVLTLTLFEDREMIEERLKTYAHLFDDKVMKQLKRRRYTGWGRLSRKLINGIRDKQSGKTILDFLKSDGFANRNFMQLIHDDSLTFKEDIQKAQVSGQGDSLHEHIANLAGSPAIKKGILQTVKVVDELVKVMGRHKPENIVIEMARENQTTQKGQKNSRERMKRIEEGIKELGSQILKEHPVENTQLQNEKLYLYYLQNGRDMYVDQELDINRLSDYDVDHIVPQSFLKDDSIDNKVLTRSDKARGKSDNVPSEEVVKKMKNYWRQLLNAKLITQRKFDNLTKAERGGLSELDKAGFIKRQLVETRQITKHVAQILDSRMNTKYDENDKLIREVKVITLKSKLVSDFRKDFQFYKVREINNYHHAHDAYLNAVVGTALIKKYPKLESEFVYGDYKVYDVRKMIAKSEQEIGKATAKYFFYSNIMNFFKTEITLANGEIRKRPLIETNGETGEIVWDKGRDFATVRKVLSMPQVNIVKKTEVQTGGFSKESILPKRNSDKLIARKKDWDPKKYGGFDSPTVAYSVLVVAKVEKGKSKKLKSVKELLGITIMERSSFEKNPIDFLEAKGYKEVKKDLIIKLPKYSLFELENGRKRMLASAGELQKGNELALPSKYVNFLYLASHYEKLKGSPEDNEQKQLFVEQHKHYLDEIIEQISEFSKRVILADANLDKVLSAYNKHRDKPIREQAENIIHLFTLTNLGAPAAFKYFDTTIDRKRYTSTKEVLDATLIHQSITGLYETRIDLSQLGGDGSSGSSGSSGSSGSSGSSMASNFTQFVLVDNGGTGDVTVAPSNFANGIAEWISSNSRSQAYKVTCSVRQSSAQNRKYTIKVEVPKGAWRSYLNMELTIPIFATNSDCELIVKAMQGLLKDGNPIPSAIAANSGIYGGSGGSMASNFTQFVLVDNGGTGDVTVAPSNFANGIAEWISSNSRSQAYKVTCSVRQSSAQNRKYTIKVEVPKGAWRSYLNMELTIPIFATNSDCELIVKAMQGLLKDGNPIPSAIAANSGIYSGGSSGGSSGSETPGTSESATPESSGGSSGGSSTAPLEEEYRLFLEAPIQNVTLLEQWKREIPKVWAEINPPGLASTQAPIHVQLLSTALPVRVRQYPITLEAKRSLRETIRKFRAAGILRPVHSPWNTPLLPVRKSGTSEYRMVQDLREVNKRVETIHPTVPNPYTLLSLLPPDRIWYSVLDLKDAFFCIPLAPESQLIFAFEWADAEEGESGQLTWTRLPQGFKNSPTLFNEALNRDLQGFRLDHPSVSLLQYVDDLLIAADTQAACLSATRDLLMTLAELGYRVSGKKAQLCQEEVTYLGFKIHKGSRSLSNSRTQAILQIPVPKTKRQVREFLGKIGYCRLFIPGFAELAQPLYAATRPGNDPLVWGEKEEEAFQSLKLALTQPPALALPSLDKPFQLFVEETSGAAKGVLTQALGPWKRPVAYLSKRLDPVAAGWPRCLRAIAAAALLTREASKLTFGQDIEITSSHNLESLLRSPPDKWLTNARITQYQVLLLDPPRVRFKQTAALNPATLLPETDDTLPIHHCLDTLDSLTSTRPDLTDQPLAQAEATLFTDGSSYIRDGKRYAGAAVVTLDSVIWAEPLPIGTSAQKAELIALTKALEWSKDKSVNIYTDSRYAFATLHVHGMIYRERGWLTAGGKAIKNAPEILALLTAVWLPKRVAVMHCKGHQKDDAPTSTGNRRADEVAREVAIRPLSTQATISKRTADGSEFESPKKKAKVE

SEQ ID NO: 16031 - protein, 2347 aa, synthetic construct
MPAAKRVKLDGGDKKYSIGLDIGTNSVGWAVITDEYKVPSKKFKVLGNTDRHSIKKNLIGALLFDSGETAEATRLKRTARRRYTRRKNRICYLQEIFSNEMAKVDDSFFHRLEESFLVEEDKKHERHPIFGNIVDEVAYHEKYPTIYHLRKKLVDSTDKADLRLIYLALAHMIKFRGHFLIEGDLNPDNSDVDKLFIQLVQTYNQLFEENPINASGVDAKAILSARLSKSRRLENLIAQLPGEKKNGLFGNLIALSLGLTPNFKSNFDLAEDAKLQLSKDTYDDDLDNLLAQIGDQYADLFLAAKNLSDAILLSDILRVNTEITKAPLSASMIKRYDEHHQDLTLLKALVRQQLPEKYKEIFFDQSKNGYAGYIDGGASQEEFYKFIKPILEKMDGTEELLVKLNREDLLRKQRTFDNGSIPHQIHLGELHAILRRQEDFYPFLKDNREKIEKILTFRIPYYVGPLARGNSRFAWMTRKSEETITPWNFEEVVDKGASAQSFIERMTNFDKNLPNEKVLPKHSLLYEYFTVYNELTKVKYVTEGMRKPAFLSGEQKKAIVDLLFKTNRKVTVKQLKEDYFKKIECFDSVEISGVEDRFNASLGTYHDLLKIIKDKDFLDNEENEDILEDIVLTLTLFEDREMIEERLKTYAHLFDDKVMKQLKRRRYTGWGRLSRKLINGIRDKQSGKTILDFLKSDGFANRNFMQLIHDDSLTFKEDIQKAQVSGQGDSLHEHIANLAGSPAIKKGILQTVKVVDELVKVMGRHKPENIVIEMARENQTTQKGQKNSRERMKRIEEGIKELGSQILKEHPVENTQLQNEKLYLYYLQNGRDMYVDQELDINRLSDYDVDHIVPQSFLKDDSIDNKVLTRSDKARGKSDNVPSEEVVKKMKNYWRQLLNAKLITQRKFDNLTKAERGGLSELDKAGFIKRQLVETRQITKHVAQILDSRMNTKYDENDKLIREVKVITLKSKLVSDFRKDFQFYKVREINNYHHAHDAYLNAVVGTALIKKYPKLESEFVYGDYKVYDVRKMIAKSEQEIGKATAKYFFYSNIMNFFKTEITLANGEIRKRPLIETNGETGEIVWDKGRDFATVRKVLSMPQVNIVKKTEVQTGGFSKESILPKRNSDKLIARKKDWDPKKYGGFDSPTVAYSVLVVAKVEKGKSKKLKSVKELLGITIMERSSFEKNPIDFLEAKGYKEVKKDLIIKLPKYSLFELENGRKRMLASAGELQKGNELALPSKYVNFLYLASHYEKLKGSPEDNEQKQLFVEQHKHYLDEIIEQISEFSKRVILADANLDKVLSAYNKHRDKPIREQAENIIHLFTLTNLGAPAAFKYFDTTIDRKRYTSTKEVLDATLIHQSITGLYETRIDLSQLGGDGSSGSSGSSGSSGSSGSSMASNFTQFVLVDNGGTGDVTVAPSNFANGIAEWISSNSRSQAYKVTCSVRQSSAQNRKYTIKVEVPKGAWRSYLNMELTIPIFATNSDCELIVKAMQGLLKDGNPIPSAIAANSGIYGGSGGSMASNFTQFVLVDNGGTGDVTVAPSNFANGIAEWISSNSRSQAYKVTCSVRQSSAQNRKYTIKVEVPKGAWRSYLNMELTIPIFATNSDCELIVKAMQGLLKDGNPIPSAIAANSGIYGSSGSSGSSGSSGSSGSSTAPLEEEYRLFLEAPIQNVTLLEQWKREIPKVWAEINPPGLASTQAPIHVQLLSTALPVRVRQYPITLEAKRSLRETIRKFRAAGILRPVHSPWNTPLLPVRKSGTSEYRMVQDLREVNKRVETIHPTVPNPYTLLSLLPPDRIWYSVLDLKDAFFCIPLAPESQLIFAFEWADAEEGESGQLTWTRLPQGFKNSPTLFNEALNRDLQGFRLDHPSVSLLQYVDDLLIAADTQAACLSATRDLLMTLAELGYRVSGKKAQLCQEEVTYLGFKIHKGSRSLSNSRTQAILQIPVPKTKRQVREFLGKIGYCRLFIPGFAELAQPLYAATRPGNDPLVWGEKEEEAFQSLKLALTQPPALALPSLDKPFQLFVEETSGAAKGVLTQALGPWKRPVAYLSKRLDPVAAGWPRCLRAIAAAALLTREASKLTFGQDIEITSSHNLESLLRSPPDKWLTNARITQYQVLLLDPPRVRFKQTAALNPATLLPETDDTLPIHHCLDTLDSLTSTRPDLTDQPLAQAEATLFTDGSSYIRDGKRYAGAAVVTLDSVIWAEPLPIGTSAQKAELIALTKALEWSKDKSVNIYTDSRYAFATLHVHGMIYRERGWLTAGGKAIKNAPEILALLTAVWLPKRVAVMHCKGHQKDDAPTSTGNRRADEVAREVAIRPLSTQATISKRTADGSEFESPKKKAKVE

SEQ ID NO: 16032 - protein, 2340 aa, synthetic construct
MPAAKRVKLDGGDKKYSIGLDIGTNSVGWAVITDEYKVPSKKFKVLGNTDRHSIKKNLIGALLFDSGETAEATRLKRTARRRYTRRKNRICYLQEIFSNEMAKVDDSFFHRLEESFLVEEDKKHERHPIFGNIVDEVAYHEKYPTIYHLRKKLVDSTDKADLRLIYLALAHMIKFRGHFLIEGDLNPDNSDVDKLFIQLVQTYNQLFEENPINASGVDAKAILSARLSKSRRLENLIAQLPGEKKNGLFGNLIALSLGLTPNFKSNFDLAEDAKLQLSKDTYDDDLDNLLAQIGDQYADLFLAAKNLSDAILLSDILRVNTEITKAPLSASMIKRYDEHHQDLTLLKALVRQQLPEKYKEIFFDQSKNGYAGYIDGGASQEEFYKFIKPILEKMDGTEELLVKLNREDLLRKQRTFDNGSIPHQIHLGELHAILRRQEDFYPFLKDNREKIEKILTFRIPYYVGPLARGNSRFAWMTRKSEETITPWNFEEVVDKGASAQSFIERMTNFDKNLPNEKVLPKHSLLYEYFTVYNELTKVKYVTEGMRKPAFLSGEQKKAIVDLLFKTNRKVTVKQLKEDYFKKIECFDSVEISGVEDRFNASLGTYHDLLKIIKDKDFLDNEENEDILEDIVLTLTLFEDREMIEERLKTYAHLFDDKVMKQLKRRRYTGWGRLSRKLINGIRDKQSGKTILDFLKSDGFANRNFMQLIHDDSLTFKEDIQKAQVSGQGDSLHEHIANLAGSPAIKKGILQTVKVVDELVKVMGRHKPENIVIEMARENQTTQKGQKNSRERMKRIEEGIKELGSQILKEHPVENTQLQNEKLYLYYLQNGRDMYVDQELDINRLSDYDVDHIVPQSFLKDDSIDNKVLTRSDKARGKSDNVPSEEVVKKMKNYWRQLLNAKLITQRKFDNLTKAERGGLSELDKAGFIKRQLVETRQITKHVAQILDSRMNTKYDENDKLIREVKVITLKSKLVSDFRKDFQFYKVREINNYHHAHDAYLNAVVGTALIKKYPKLESEFVYGDYKVYDVRKMIAKSEQEIGKATAKYFFYSNIMNFFKTEITLANGEIRKRPLIETNGETGEIVWDKGRDFATVRKVLSMPQVNIVKKTEVQTGGFSKESILPKRNSDKLIARKKDWDPKKYGGFDSPTVAYSVLVVAKVEKGKSKKLKSVKELLGITIMERSSFEKNPIDFLEAKGYKEVKKDLIIKLPKYSLFELENGRKRMLASAGELQKGNELALPSKYVNFLYLASHYEKLKGSPEDNEQKQLFVEQHKHYLDEIIEQISEFSKRVILADANLDKVLSAYNKHRDKPIREQAENIIHLFTLTNLGAPAAFKYFDTTIDRKRYTSTKEVLDATLIHQSITGLYETRIDLSQLGGDGSSGSSGSSGSSGSSGSSMASNFTQFVLVDNGGTGDVTVAPSNFANGIAEWISSNSRSQAYKVTCSVRQSSAQNRKYTIKVEVPKGAWRSYLNMELTIPIFATNSDCELIVKAMQGLLKDGNPIPSAIAANSGIYGGSGGSMASNFTQFVLVDNGGTGDVTVAPSNFANGIAEWISSNSRSQAYKVTCSVRQSSAQNRKYTIKVEVPKGAWRSYLNMELTIPIFATNSDCELIVKAMQGLLKDGNPIPSAIAANSGIYGSSGGGEAAAKTAPLEEEYRLFLEAPIQNVTLLEQWKREIPKVWAEINPPGLASTQAPIHVQLLSTALPVRVRQYPITLEAKRSLRETIRKFRAAGILRPVHSPWNTPLLPVRKSGTSEYRMVQDLREVNKRVETIHPTVPNPYTLLSLLPPDRIWYSVLDLKDAFFCIPLAPESQLIFAFEWADAEEGESGQLTWTRLPQGFKNSPTLFNEALNRDLQGFRLDHPSVSLLQYVDDLLIAADTQAACLSATRDLLMTLAELGYRVSGKKAQLCQEEVTYLGFKIHKGSRSLSNSRTQAILQIPVPKTKRQVREFLGKIGYCRLFIPGFAELAQPLYAATRPGNDPLVWGEKEEEAFQSLKLALTQPPALALPSLDKPFQLFVEETSGAAKGVLTQALGPWKRPVAYLSKRLDPVAAGWPRCLRAIAAAALLTREASKLTFGQDIEITSSHNLESLLRSPPDKWLTNARITQYQVLLLDPPRVRFKQTAALNPATLLPETDDTLPIHHCLDTLDSLTSTRPDLTDQPLAQAEATLFTDGSSYIRDGKRYAGAAVVTLDSVIWAEPLPIGTSAQKAELIALTKALEWSKDKSVNIYTDSRYAFATLHVHGMIYRERGWLTAGGKAIKNAPEILALLTAVWLPKRVAVMHCKGHQKDDAPTSTGNRRADEVAREVAIRPLSTQATISKRTADGSEFESPKKKAKVE

SEQ ID NO: 16033 - protein, 2631 aa, synthetic construct
MPAAKRVKLDGGDKKYSIGLDIGTNSVGWAVITDEYKVPSKKFKVLGNTDRHSIKKNLIGALLFDSGETAEATRLKRTARRRYTRRKNRICYLQEIFSNEMAKVDDSFFHRLEESFLVEEDKKHERHPIFGNIVDEVAYHEKYPTIYHLRKKLVDSTDKADLRLIYLALAHMIKFRGHFLIEGDLNPDNSDVDKLFIQLVQTYNQLFEENPINASGVDAKAILSARLSKSRRLENLIAQLPGEKKNGLFGNLIALSLGLTPNFKSNFDLAEDAKLQLSKDTYDDDLDNLLAQIGDQYADLFLAAKNLSDAILLSDILRVNTEITKAPLSASMIKRYDEHHQDLTLLKALVRQQLPEKYKEIFFDQSKNGYAGYIDGGASQEEFYKFIKPILEKMDGTEELLVKLNREDLLRKQRTFDNGSIPHQIHLGELHAILRRQEDFYPFLKDNREKIEKILTFRIPYYVGPLARGNSRFAWMTRKSEETITPWNFEEVVDKGASAQSFIERMTNFDKNLPNEKVLPKHSLLYEYFTVYNELTKVKYVTEGMRKPAFLSGEQKKAIVDLLFKTNRKVTVKQLKEDYFKKIECFDSVEISGVEDRFNASLGTYHDLLKIIKDKDFLDNEENEDILEDIVLTLTLFEDREMIEERLKTYAHLFDDKVMKQLKRRRYTGWGRLSRKLINGIRDKQSGKTILDFLKSDGFANRNFMQLIHDDSLTFKEDIQKAQVSGQGDSLHEHIANLAGSPAIKKGILQTVKVVDELVKVMGRHKPENIVIEMARENQTTQKGQKNSRERMKRIEEGIKELGSQILKEHPVENTQLQNEKLYLYYLQNGRDMYVDQELDINRLSDYDVDHIVPQSFLKDDSIDNKVLTRSDKARGKSDNVPSEEVVKKMKNYWRQLLNAKLITQRKFDNLTKAERGGLSELDKAGFIKRQLVETRQITKHVAQILDSRMNTKYDENDKLIREVKVITLKSKLVSDFRKDFQFYKVREINNYHHAHDAYLNAVVGTALIKKYPKLESEFVYGDYKVYDVRKMIAKSEQEIGKATAKYFFYSNIMNFFKTEITLANGEIRKRPLIETNGETGEIVWDKGRDFATVRKVLSMPQVNIVKKTEVQTGGFSKESILPKRNSDKLIARKKDWDPKKYGGFDSPTVAYSVLVVAKVEKGKSKKLKSVKELLGITIMERSSFEKNPIDFLEAKGYKEVKKDLIIKLPKYSLFELENGRKRMLASAGELQKGNELALPSKYVNFLYLASHYEKLKGSPEDNEQKQLFVEQHKHYLDEIIEQISEFSKRVILADANLDKVLSAYNKHRDKPIREQAENIIHLFTLTNLGAPAAFKYFDTTIDRKRYTSTKEVLDATLIHQSITGLYETRIDLSQLGGDGSSGSSGSSGSSGSSGSSMASNFTQFVLVDNGGTGDVTVAPSNFANGIAEWISSNSRSQAYKVTCSVRQSSAQNRKYTIKVEVPKGAWRSYLNMELTIPIFATNSDCELIVKAMQGLLKDGNPIPSAIAANSGIYGGSGGSMASNFTQFVLVDNGGTGDVTVAPSNFANGIAEWISSNSRSQAYKVTCSVRQSSAQNRKYTIKVEVPKGAWRSYLNMELTIPIFATNSDCELIVKAMQGLLKDGNPIPSAIAANSGIYGGGSGGGSGGGSGGGSMASNFTQFVLVDNGGTGDVTVAPSNFANGIAEWISSNSRSQAYKVTCSVRQSSAQNRKYTIKVEVPKGAWRSYLNMELTIPIFATNSDCELIVKAMQGLLKDGNPIPSAIAANSGIYGGSGGSMASNFTQFVLVDNGGTGDVTVAPSNFANGIAEWISSNSRSQAYKVTCSVRQSSAQNRKYTIKVEVPKGAWRSYLNMELTIPIFATNSDCELIVKAMQGLLKDGNPIPSAIAANSGIYAEAAAKEAAAKEAAAKEAAAKALEAEAAAKEAAAKEAAAKEAAAKATAPLEEEYRLFLEAPIQNVTLLEQWKREIPKVWAEINPPGLASTQAPIHVQLLSTALPVRVRQYPITLEAKRSLRETIRKFRAAGILRPVHSPWNTPLLPVRKSGTSEYRMVQDLREVNKRVETIHPTVPNPYTLLSLLPPDRIWYSVLDLKDAFFCIPLAPESQLIFAFEWADAEEGESGQLTWTRLPQGFKNSPTLFNEALNRDLQGFRLDHPSVSLLQYVDDLLIAADTQAACLSATRDLLMTLAELGYRVSGKKAQLCQEEVTYLGFKIHKGSRSLSNSRTQAILQIPVPKTKRQVREFLGKIGYCRLFIPGFAELAQPLYAATRPGNDPLVWGEKEEEAFQSLKLALTQPPALALPSLDKPFQLFVEETSGAAKGVLTQALGPWKRPVAYLSKRLDPVAAGWPRCLRAIAAAALLTREASKLTFGQDIEITSSHNLESLLRSPPDKWLTNARITQYQVLLLDPPRVRFKQTAALNPATLLPETDDTLPIHHCLDTLDSLTSTRPDLTDQPLAQAEATLFTDGSSYIRDGKRYAGAAVVTLDSVIWAEPLPIGTSAQKAELIALTKALEWSKDKSVNIYTDSRYAFATLHVHGMIYRERGWLTAGGKAIKNAPEILALLTAVWLPKRVAVMHCKGHQKDDAPTSTGNRRADEVAREVAIRPLSTQATISKRTADGSEFESPKKKAKVE

SEQ ID NO: 16034 - protein, 2618 aa, synthetic construct
MPAAKRVKLDGGDKKYSIGLDIGTNSVGWAVITDEYKVPSKKFKVLGNTDRHSIKKNLIGALLFDSGETAEATRLKRTARRRYTRRKNRICYLQEIFSNEMAKVDDSFFHRLEESFLVEEDKKHERHPIFGNIVDEVAYHEKYPTIYHLRKKLVDSTDKADLRLIYLALAHMIKFRGHFLIEGDLNPDNSDVDKLFIQLVQTYNQLFEENPINASGVDAKAILSARLSKSRRLENLIAQLPGEKKNGLFGNLIALSLGLTPNFKSNFDLAEDAKLQLSKDTYDDDLDNLLAQIGDQYADLFLAAKNLSDAILLSDILRVNTEITKAPLSASMIKRYDEHHQDLTLLKALVRQQLPEKYKEIFFDQSKNGYAGYIDGGASQEEFYKFIKPILEKMDGTEELLVKLNREDLLRKQRTFDNGSIPHQIHLGELHAILRRQEDFYPFLKDNREKIEKILTFRIPYYVGPLARGNSRFAWMTRKSEETITPWNFEEVVDKGASAQSFIERMTNFDKNLPNEKVLPKHSLLYEYFTVYNELTKVKYVTEGMRKPAFLSGEQKKAIVDLLFKTNRKVTVKQLKEDYFKKIECFDSVEISGVEDRFNASLGTYHDLLKIIKDKDFLDNEENEDILEDIVLTLTLFEDREMIEERLKTYAHLFDDKVMKQLKRRRYTGWGRLSRKLINGIRDKQSGKTILDFLKSDGFANRNFMQLIHDDSLTFKEDIQKAQVSGQGDSLHEHIANLAGSPAIKKGILQTVKVVDELVKVMGRHKPENIVIEMARENQTTQKGQKNSRERMKRIEEGIKELGSQILKEHPVENTQLQNEKLYLYYLQNGRDMYVDQELDINRLSDYDVDHIVPQSFLKDDSIDNKVLTRSDKARGKSDNVPSEEVVKKMKNYWRQLLNAKLITQRKFDNLTKAERGGLSELDKAGFIKRQLVETRQITKHVAQILDSRMNTKYDENDKLIREVKVITLKSKLVSDFRKDFQFYKVREINNYHHAHDAYLNAVVGTALIKKYPKLESEFVYGDYKVYDVRKMIAKSEQEIGKATAKYFFYSNIMNFFKTEITLANGEIRKRPLIETNGETGEIVWDKGRDFATVRKVLSMPQVNIVKKTEVQTGGFSKESILPKRNSDKLIARKKDWDPKKYGGFDSPTVAYSVLVVAKVEKGKSKKLKSVKELLGITIMERSSFEKNPIDFLEAKGYKEVKKDLIIKLPKYSLFELENGRKRMLASAGELQKGNELALPSKYVNFLYLASHYEKLKGSPEDNEQKQLFVEQHKHYLDEIIEQISEFSKRVILADANLDKVLSAYNKHRDKPIREQAENIIHLFTLTNLGAPAAFKYFDTTIDRKRYTSTKEVLDATLIHQSITGLYETRIDLSQLGGDGSSGSSGSSGSSGSSGSSMASNFTQFVLVDNGGTGDVTVAPSNFANGIAEWISSNSRSQAYKVTCSVRQSSAQNRKYTIKVEVPKGAWRSYLNMELTIPIFATNSDCELIVKAMQGLLKDGNPIPSAIAANSGIYGGSGGSMASNFTQFVLVDNGGTGDVTVAPSNFANGIAEWISSNSRSQAYKVTCSVRQSSAQNRKYTIKVEVPKGAWRSYLNMELTIPIFATNSDCELIVKAMQGLLKDGNPIPSAIAANSGIYGGGSGGGSGGGSGGGSMASNFTQFVLVDNGGTGDVTVAPSNFANGIAEWISSNSRSQAYKVTCSVRQSSAQNRKYTIKVEVPKGAWRSYLNMELTIPIFATNSDCELIVKAMQGLLKDGNPIPSAIAANSGIYGGSGGSMASNFTQFVLVDNGGTGDVTVAPSNFANGIAEWISSNSRSQAYKVTCSVRQSSAQNRKYTIKVEVPKGAWRSYLNMELTIPIFATNSDCELIVKAMQGLLKDGNPIPSAIAANSGIYSGGSSGGSSGSETPGTSESATPESSGGSSGGSSTAPLEEEYRLFLEAPIQNVTLLEQWKREIPKVWAEINPPGLASTQAPIHVQLLSTALPVRVRQYPITLEAKRSLRETIRKFRAAGILRPVHSPWNTPLLPVRKSGTSEYRMVQDLREVNKRVETIHPTVPNPYTLLSLLPPDRIWYSVLDLKDAFFCIPLAPESQLIFAFEWADAEEGESGQLTWTRLPQGFKNSPTLFNEALNRDLQGFRLDHPSVSLLQYVDDLLIAADTQAACLSATRDLLMTLAELGYRVSGKKAQLCQEEVTYLGFKIHKGSRSLSNSRTQAILQIPVPKTKRQVREFLGKIGYCRLFIPGFAELAQPLYAATRPGNDPLVWGEKEEEAFQSLKLALTQPPALALPSLDKPFQLFVEETSGAAKGVLTQALGPWKRPVAYLSKRLDPVAAGWPRCLRAIAAAALLTREASKLTFGQDIEITSSHNLESLLRSPPDKWLTNARITQYQVLLLDPPRVRFKQTAALNPATLLPETDDTLPIHHCLDTLDSLTSTRPDLTDQPLAQAEATLFTDGSSYIRDGKRYAGAAVVTLDSVIWAEPLPIGTSAQKAELIALTKALEWSKDKSVNIYTDSRYAFATLHVHGMIYRERGWLTAGGKAIKNAPEILALLTAVWLPKRVAVMHCKGHQKDDAPTSTGNRRADEVAREVAIRPLSTQATISKRTADGSEFESPKKKAKVE

SEQ ID NO: 16035 - protein, 2603 aa, synthetic construct
MPAAKRVKLDGGDKKYSIGLDIGTNSVGWAVITDEYKVPSKKFKVLGNTDRHSIKKNLIGALLFDSGETAEATRLKRTARRRYTRRKNRICYLQEIFSNEMAKVDDSFFHRLEESFLVEEDKKHERHPIFGNIVDEVAYHEKYPTIYHLRKKLVDSTDKADLRLIYLALAHMIKFRGHFLIEGDLNPDNSDVDKLFIQLVQTYNQLFEENPINASGVDAKAILSARLSKSRRLENLIAQLPGEKKNGLFGNLIALSLGLTPNFKSNFDLAEDAKLQLSKDTYDDDLDNLLAQIGDQYADLFLAAKNLSDAILLSDILRVNTEITKAPLSASMIKRYDEHHQDLTLLKALVRQQLPEKYKEIFFDQSKNGYAGYIDGGASQEEFYKFIKPILEKMDGTEELLVKLNREDLLRKQRTFDNGSIPHQIHLGELHAILRRQEDFYPFLKDNREKIEKILTFRIPYYVGPLARGNSRFAWMTRKSEETITPWNFEEVVDKGASAQSFIERMTNFDKNLPNEKVLPKHSLLYEYFTVYNELTKVKYVTEGMRKPAFLSGEQKKAIVDLLFKTNRKVTVKQLKEDYFKKIECFDSVEISGVEDRFNASLGTYHDLLKIIKDKDFLDNEENEDILEDIVLTLTLFEDREMIEERLKTYAHLFDDKVMKQLKRRRYTGWGRLSRKLINGIRDKQSGKTILDFLKSDGFANRNFMQLIHDDSLTFKEDIQKAQVSGQGDSLHEHIANLAGSPAIKKGILQTVKVVDELVKVMGRHKPENIVIEMARENQTTQKGQKNSRERMKRIEEGIKELGSQILKEHPVENTQLQNEKLYLYYLQNGRDMYVDQELDINRLSDYDVDHIVPQSFLKDDSIDNKVLTRSDKARGKSDNVPSEEVVKKMKNYWRQLLNAKLITQRKFDNLTKAERGGLSELDKAGFIKRQLVETRQITKHVAQILDSRMNTKYDENDKLIREVKVITLKSKLVSDFRKDFQFYKVREINNYHHAHDAYLNAVVGTALIKKYPKLESEFVYGDYKVYDVRKMIAKSEQEIGKATAKYFFYSNIMNFFKTEITLANGEIRKRPLIETNGETGEIVWDKGRDFATVRKVLSMPQVNIVKKTEVQTGGFSKESILPKRNSDKLIARKKDWDPKKYGGFDSPTVAYSVLVVAKVEKGKSKKLKSVKELLGITIMERSSFEKNPIDFLEAKGYKEVKKDLIIKLPKYSLFELENGRKRMLASAGELQKGNELALPSKYVNFLYLASHYEKLKGSPEDNEQKQLFVEQHKHYLDEIIEQISEFSKRVILADANLDKVLSAYNKHRDKPIREQAENIIHLFTLTNLGAPAAFKYFDTTIDRKRYTSTKEVLDATLIHQSITGLYETRIDLSQLGGDGSSGSSGSSGSSGSSGSSMASNFTQFVLVDNGGTGDVTVAPSNFANGIAEWISSNSRSQAYKVTCSVRQSSAQNRKYTIKVEVPKGAWRSYLNMELTIPIFATNSDCELIVKAMQGLLKDGNPIPSAIAANSGIYGGSGGSMASNFTQFVLVDNGGTGDVTVAPSNFANGIAEWISSNSRSQAYKVTCSVRQSSAQNRKYTIKVEVPKGAWRSYLNMELTIPIFATNSDCELIVKAMQGLLKDGNPIPSAIAANSGIYGGGSGGGSGGGSGGGSMASNFTQFVLVDNGGTGDVTVAPSNFANGIAEWISSNSRSQAYKVTCSVRQSSAQNRKYTIKVEVPKGAWRSYLNMELTIPIFATNSDCELIVKAMQGLLKDGNPIPSAIAANSGIYGGSGGSMASNFTQFVLVDNGGTGDVTVAPSNFANGIAEWISSNSRSQAYKVTCSVRQSSAQNRKYTIKVEVPKGAWRSYLNMELTIPIFATNSDCELIVKAMQGLLKDGNPIPSAIAANSGIYGSSGSSGSSGSSGSSGSSTAPLEEEYRLFLEAPIQNVTLLEQWKREIPKVWAEINPPGLASTQAPIHVQLLSTALPVRVRQYPITLEAKRSLRETIRKFRAAGILRPVHSPWNTPLLPVRKSGTSEYRMVQDLREVNKRVETIHPTVPNPYTLLSLLPPDRIWYSVLDLKDAFFCIPLAPESQLIFAFEWADAEEGESGQLTWTRLPQGFKNSPTLFNEALNRDLQGFRLDHPSVSLLQYVDDLLIAADTQAACLSATRDLLMTLAELGYRVSGKKAQLCQEEVTYLGFKIHKGSRSLSNSRTQAILQIPVPKTKRQVREFLGKIGYCRLFIPGFAELAQPLYAATRPGNDPLVWGEKEEEAFQSLKLALTQPPALALPSLDKPFQLFVEETSGAAKGVLTQALGPWKRPVAYLSKRLDPVAAGWPRCLRAIAAAALLTREASKLTFGQDIEITSSHNLESLLRSPPDKWLTNARITQYQVLLLDPPRVRFKQTAALNPATLLPETDDTLPIHHCLDTLDSLTSTRPDLTDQPLAQAEATLFTDGSSYIRDGKRYAGAAVVTLDSVIWAEPLPIGTSAQKAELIALTKALEWSKDKSVNIYTDSRYAFATLHVHGMIYRERGWLTAGGKAIKNAPEILALLTAVWLPKRVAVMHCKGHQKDDAPTSTGNRRADEVAREVAIRPLSTQATISKRTADGSEFESPKKKAKVE

SEQ ID NO: 16036 - protein, 2596 aa, synthetic construct
MPAAKRVKLDGGDKKYSIGLDIGTNSVGWAVITDEYKVPSKKFKVLGNTDRHSIKKNLIGALLFDSGETAEATRLKRTARRRYTRRKNRICYLQEIFSNEMAKVDDSFFHRLEESFLVEEDKKHERHPIFGNIVDEVAYHEKYPTIYHLRKKLVDSTDKADLRLIYLALAHMIKFRGHFLIEGDLNPDNSDVDKLFIQLVQTYNQLFEENPINASGVDAKAILSARLSKSRRLENLIAQLPGEKKNGLFGNLIALSLGLTPNFKSNFDLAEDAKLQLSKDTYDDDLDNLLAQIGDQYADLFLAAKNLSDAILLSDILRVNTEITKAPLSASMIKRYDEHHQDLTLLKALVRQQLPEKYKEIFFDQSKNGYAGYIDGGASQEEFYKFIKPILEKMDGTEELLVKLNREDLLRKQRTFDNGSIPHQIHLGELHAILRRQEDFYPFLKDNREKIEKILTFRIPYYVGPLARGNSRFAWMTRKSEETITPWNFEEVVDKGASAQSFIERMTNFDKNLPNEKVLPKHSLLYEYFTVYNELTKVKYVTEGMRKPAFLSGEQKKAIVDLLFKTNRKVTVKQLKEDYFKKIECFDSVEISGVEDRFNASLGTYHDLLKIIKDKDFLDNEENEDILEDIVLTLTLFEDREMIEERLKTYAHLFDDKVMKQLKRRRYTGWGRLSRKLINGIRDKQSGKTILDFLKSDGFANRNFMQLIHDDSLTFKEDIQKAQVSGQGDSLHEHIANLAGSPAIKKGILQTVKVVDELVKVMGRHKPENIVIEMARENQTTQKGQKNSRERMKRIEEGIKELGSQILKEHPVENTQLQNEKLYLYYLQNGRDMYVDQELDINRLSDYDVDHIVPQSFLKDDSIDNKVLTRSDKARGKSDNVPSEEVVKKMKNYWRQLLNAKLITQRKFDNLTKAERGGLSELDKAGFIKRQLVETRQITKHVAQILDSRMNTKYDENDKLIREVKVITLKSKLVSDFRKDFQFYKVREINNYHHAHDAYLNAVVGTALIKKYPKLESEFVYGDYKVYDVRKMIAKSEQEIGKATAKYFFYSNIMNFFKTEITLANGEIRKRPLIETNGETGEIVWDKGRDFATVRKVLSMPQVNIVKKTEVQTGGFSKESILPKRNSDKLIARKKDWDPKKYGGFDSPTVAYSVLVVAKVEKGKSKKLKSVKELLGITIMERSSFEKNPIDFLEAKGYKEVKKDLIIKLPKYSLFELENGRKRMLASAGELQKGNELALPSKYVNFLYLASHYEKLKGSPEDNEQKQLFVEQHKHYLDEIIEQISEFSKRVILADANLDKVLSAYNKHRDKPIREQAENIIHLFTLTNLGAPAAFKYFDTTIDRKRYTSTKEVLDATLIHQSITGLYETRIDLSQLGGDGSSGSSGSSGSSGSSGSSMASNFTQFVLVDNGGTGDVTVAPSNFANGIAEWISSNSRSQAYKVTCSVRQSSAQNRKYTIKVEVPKGAWRSYLNMELTIPIFATNSDCELIVKAMQGLLKDGNPIPSAIAANSGIYGGSGGSMASNFTQFVLVDNGGTGDVTVAPSNFANGIAEWISSNSRSQAYKVTCSVRQSSAQNRKYTIKVEVPKGAWRSYLNMELTIPIFATNSDCELIVKAMQGLLKDGNPIPSAIAANSGIYGGGSGGGSGGGSGGGSMASNFTQFVLVDNGGTGDVTVAPSNFANGIAEWISSNSRSQAYKVTCSVRQSSAQNRKYTIKVEVPKGAWRSYLNMELTIPIFATNSDCELIVKAMQGLLKDGNPIPSAIAANSGIYGGSGGSMASNFTQFVLVDNGGTGDVTVAPSNFANGIAEWISSNSRSQAYKVTCSVRQSSAQNRKYTIKVEVPKGAWRSYLNMELTIPIFATNSDCELIVKAMQGLLKDGNPIPSAIAANSGIYGSSGGGEAAAKTAPLEEEYRLFLEAPIQNVTLLEQWKREIPKVWAEINPPGLASTQAPIHVQLLSTALPVRVRQYPITLEAKRSLRETIRKFRAAGILRPVHSPWNTPLLPVRKSGTSEYRMVQDLREVNKRVETIHPTVPNPYTLLSLLPPDRIWYSVLDLKDAFFCIPLAPESQLIFAFEWADAEEGESGQLTWTRLPQGFKNSPTLFNEALNRDLQGFRLDHPSVSLLQYVDDLLIAADTQAACLSATRDLLMTLAELGYRVSGKKAQLCQEEVTYLGFKIHKGSRSLSNSRTQAILQIPVPKTKRQVREFLGKIGYCRLFIPGFAELAQPLYAATRPGNDPLVWGEKEEEAFQSLKLALTQPPALALPSLDKPFQLFVEETSGAAKGVLTQALGPWKRPVAYLSKRLDPVAAGWPRCLRAIAAAALLTREASKLTFGQDIEITSSHNLESLLRSPPDKWLTNARITQYQVLLLDPPRVRFKQTAALNPATLLPETDDTLPIHHCLDTLDSLTSTRPDLTDQPLAQAEATLFTDGSSYIRDGKRYAGAAVVTLDSVIWAEPLPIGTSAQKAELIALTKALEWSKDKSVNIYTDSRYAFATLHVHGMIYRERGWLTAGGKAIKNAPEILALLTAVWLPKRVAVMHCKGHQKDDAPTSTGNRRADEVAREVAIRPLSTQATISKRTADGSEFESPKKKAKVE

SEQ ID NO: 16037 - protein, 2245 aa, synthetic construct
MPAAKRVKLDGGDKKYSIGLDIGTNSVGWAVITDEYKVPSKKFKVLGNTDRHSIKKNLIGALLFDSGETAEATRLKRTARRRYTRRKNRICYLQEIFSNEMAKVDDSFFHRLEESFLVEEDKKHERHPIFGNIVDEVAYHEKYPTIYHLRKKLVDSTDKADLRLIYLALAHMIKFRGHFLIEGDLNPDNSDVDKLFIQLVQTYNQLFEENPINASGVDAKAILSARLSKSRRLENLIAQLPGEKKNGLFGNLIALSLGLTPNFKSNFDLAEDAKLQLSKDTYDDDLDNLLAQIGDQYADLFLAAKNLSDAILLSDILRVNTEITKAPLSASMIKRYDEHHQDLTLLKALVRQQLPEKYKEIFFDQSKNGYAGYIDGGASQEEFYKFIKPILEKMDGTEELLVKLNREDLLRKQRTFDNGSIPHQIHLGELHAILRRQEDFYPFLKDNREKIEKILTFRIPYYVGPLARGNSRFAWMTRKSEETITPWNFEEVVDKGASAQSFIERMTNFDKNLPNEKVLPKHSLLYEYFTVYNELTKVKYVTEGMRKPAFLSGEQKKAIVDLLFKTNRKVTVKQLKEDYFKKIECFDSVEISGVEDRFNASLGTYHDLLKIIKDKDFLDNEENEDILEDIVLTLTLFEDREMIEERLKTYAHLFDDKVMKQLKRRRYTGWGRLSRKLINGIRDKQSGKTILDFLKSDGFANRNFMQLIHDDSLTFKEDIQKAQVSGQGDSLHEHIANLAGSPAIKKGILQTVKVVDELVKVMGRHKPENIVIEMARENQTTQKGQKNSRERMKRIEEGIKELGSQILKEHPVENTQLQNEKLYLYYLQNGRDMYVDQELDINRLSDYDVDHIVPQSFLKDDSIDNKVLTRSDKARGKSDNVPSEEVVKKMKNYWRQLLNAKLITQRKFDNLTKAERGGLSELDKAGFIKRQLVETRQITKHVAQILDSRMNTKYDENDKLIREVKVITLKSKLVSDFRKDFQFYKVREINNYHHAHDAYLNAVVGTALIKKYPKLESEFVYGDYKVYDVRKMIAKSEQEIGKATAKYFFYSNIMNFFKTEITLANGEIRKRPLIETNGETGEIVWDKGRDFATVRKVLSMPQVNIVKKTEVQTGGFSKESILPKRNSDKLIARKKDWDPKKYGGFDSPTVAYSVLVVAKVEKGKSKKLKSVKELLGITIMERSSFEKNPIDFLEAKGYKEVKKDLIIKLPKYSLFELENGRKRMLASAGELQKGNELALPSKYVNFLYLASHYEKLKGSPEDNEQKQLFVEQHKHYLDEIIEQISEFSKRVILADANLDKVLSAYNKHRDKPIREQAENIIHLFTLTNLGAPAAFKYFDTTIDRKRYTSTKEVLDATLIHQSITGLYETRIDLSQLGGDGSSGGGEAAAKMASNFTQFVLVDNGGTGDVTVAPSNFANGIAEWISSNSRSQAYKVTCSVRQSSAQNRKYTIKVEVPKGAWRSYLNMELTIPIFATNSDCELIVKAMQGLLKDGNPIPSAIAANSGIYAEAAAKEAAAKEAAAKEAAAKALEAEAAAKEAAAKEAAAKEAAAKATAPLEEEYRLFLEAPIQNVTLLEQWKREIPKVWAEINPPGLASTQAPIHVQLLSTALPVRVRQYPITLEAKRSLRETIRKFRAAGILRPVHSPWNTPLLPVRKSGTSEYRMVQDLREVNKRVETIHPTVPNPYTLLSLLPPDRIWYSVLDLKDAFFCIPLAPESQLIFAFEWADAEEGESGQLTWTRLPQGFKNSPTLFNEALNRDLQGFRLDHPSVSLLQYVDDLLIAADTQAACLSATRDLLMTLAELGYRVSGKKAQLCQEEVTYLGFKIHKGSRSLSNSRTQAILQIPVPKTKRQVREFLGKIGYCRLFIPGFAELAQPLYAATRPGNDPLVWGEKEEEAFQSLKLALTQPPALALPSLDKPFQLFVEETSGAAKGVLTQALGPWKRPVAYLSKRLDPVAAGWPRCLRAIAAAALLTREASKLTFGQDIEITSSHNLESLLRSPPDKWLTNARITQYQVLLLDPPRVRFKQTAALNPATLLPETDDTLPIHHCLDTLDSLTSTRPDLTDQPLAQAEATLFTDGSSYIRDGKRYAGAAVVTLDSVIWAEPLPIGTSAQKAELIALTKALEWSKDKSVNIYTDSRYAFATLHVHGMIYRERGWLTAGGKAIKNAPEILALLTAVWLPKRVAVMHCKGHQKDDAPTSTGNRRADEVAREVAIRPLSTQATISKRTADGSEFESPKKKAKVE

SEQ ID NO: 16038 - protein, 2232 aa, synthetic construct
MPAAKRVKLDGGDKKYSIGLDIGTNSVGWAVITDEYKVPSKKFKVLGNTDRHSIKKNLIGALLFDSGETAEATRLKRTARRRYTRRKNRICYLQEIFSNEMAKVDDSFFHRLEESFLVEEDKKHERHPIFGNIVDEVAYHEKYPTIYHLRKKLVDSTDKADLRLIYLALAHMIKFRGHFLIEGDLNPDNSDVDKLFIQLVQTYNQLFEENPINASGVDAKAILSARLSKSRRLENLIAQLPGEKKNGLFGNLIALSLGLTPNFKSNFDLAEDAKLQLSKDTYDDDLDNLLAQIGDQYADLFLAAKNLSDAILLSDILRVNTEITKAPLSASMIKRYDEHHQDLTLLKALVRQQLPEKYKEIFFDQSKNGYAGYIDGGASQEEFYKFIKPILEKMDGTEELLVKLNREDLLRKQRTFDNGSIPHQIHLGELHAILRRQEDFYPFLKDNREKIEKILTFRIPYYVGPLARGNSRFAWMTRKSEETITPWNFEEVVDKGASAQSFIERMTNFDKNLPNEKVLPKHSLLYEYFTVYNELTKVKYVTEGMRKPAFLSGEQKKAIVDLLFKTNRKVTVKQLKEDYFKKIECFDSVEISGVEDRFNASLGTYHDLLKIIKDKDFLDNEENEDILEDIVLTLTLFEDREMIEERLKTYAHLFDDKVMKQLKRRRYTGWGRLSRKLINGIRDKQSGKTILDFLKSDGFANRNFMQLIHDDSLTFKEDIQKAQVSGQGDSLHEHIANLAGSPAIKKGILQTVKVVDELVKVMGRHKPENIVIEMARENQTTQKGQKNSRERMKRIEEGIKELGSQILKEHPVENTQLQNEKLYLYYLQNGRDMYVDQELDINRLSDYDVDHIVPQSFLKDDSIDNKVLTRSDKARGKSDNVPSEEVVKKMKNYWRQLLNAKLITQRKFDNLTKAERGGLSELDKAGFIKRQLVETRQITKHVAQILDSRMNTKYDENDKLIREVKVITLKSKLVSDFRKDFQFYKVREINNYHHAHDAYLNAVVGTALIKKYPKLESEFVYGDYKVYDVRKMIAKSEQEIGKATAKYFFYSNIMNFFKTEITLANGEIRKRPLIETNGETGEIVWDKGRDFATVRKVLSMPQVNIVKKTEVQTGGFSKESILPKRNSDKLIARKKDWDPKKYGGFDSPTVAYSVLVVAKVEKGKSKKLKSVKELLGITIMERSSFEKNPIDFLEAKGYKEVKKDLIIKLPKYSLFELENGRKRMLASAGELQKGNELALPSKYVNFLYLASHYEKLKGSPEDNEQKQLFVEQHKHYLDEIIEQISEFSKRVILADANLDKVLSAYNKHRDKPIREQAENIIHLFTLTNLGAPAAFKYFDTTIDRKRYTSTKEVLDATLIHQSITGLYETRIDLSQLGGDGSSGGGEAAAKMASNFTQFVLVDNGGTGDVTVAPSNFANGIAEWISSNSRSQAYKVTCSVRQSSAQNRKYTIKVEVPKGAWRSYLNMELTIPIFATNSDCELIVKAMQGLLKDGNPIPSAIAANSGIYSGGSSGGSSGSETPGTSESATPESSGGSSGGSSTAPLEEEYRLFLEAPIQNVTLLEQWKREIPKVWAEINPPGLASTQAPIHVQLLSTALPVRVRQYPITLEAKRSLRETIRKFRAAGILRPVHSPWNTPLLPVRKSGTSEYRMVQDLREVNKRVETIHPTVPNPYTLLSLLPPDRIWYSVLDLKDAFFCIPLAPESQLIFAFEWADAEEGESGQLTWTRLPQGFKNSPTLFNEALNRDLQGFRLDHPSVSLLQYVDDLLIAADTQAACLSATRDLLMTLAELGYRVSGKKAQLCQEEVTYLGFKIHKGSRSLSNSRTQAILQIPVPKTKRQVREFLGKIGYCRLFIPGFAELAQPLYAATRPGNDPLVWGEKEEEAFQSLKLALTQPPALALPSLDKPFQLFVEETSGAAKGVLTQALGPWKRPVAYLSKRLDPVAAGWPRCLRAIAAAALLTREASKLTFGQDIEITSSHNLESLLRSPPDKWLTNARITQYQVLLLDPPRVRFKQTAALNPATLLPETDDTLPIHHCLDTLDSLTSTRPDLTDQPLAQAEATLFTDGSSYIRDGKRYAGAAVVTLDSVIWAEPLPIGTSAQKAELIALTKALEWSKDKSVNIYTDSRYAFATLHVHGMIYRERGWLTAGGKAIKNAPEILALLTAVWLPKRVAVMHCKGHQKDDAPTSTGNRRADEVAREVAIRPLSTQATISKRTADGSEFESPKKKAKVE

SEQ ID NO: 16039 - protein, 2217 aa, synthetic construct
MPAAKRVKLDGGDKKYSIGLDIGTNSVGWAVITDEYKVPSKKFKVLGNTDRHSIKKNLIGALLFDSGETAEATRLKRTARRRYTRRKNRICYLQEIFSNEMAKVDDSFFHRLEESFLVEEDKKHERHPIFGNIVDEVAYHEKYPTIYHLRKKLVDSTDKADLRLIYLALAHMIKFRGHFLIEGDLNPDNSDVDKLFIQLVQTYNQLFEENPINASGVDAKAILSARLSKSRRLENLIAQLPGEKKNGLFGNLIALSLGLTPNFKSNFDLAEDAKLQLSKDTYDDDLDNLLAQIGDQYADLFLAAKNLSDAILLSDILRVNTEITKAPLSASMIKRYDEHHQDLTLLKALVRQQLPEKYKEIFFDQSKNGYAGYIDGGASQEEFYKFIKPILEKMDGTEELLVKLNREDLLRKQRTFDNGSIPHQIHLGELHAILRRQEDFYPFLKDNREKIEKILTFRIPYYVGPLARGNSRFAWMTRKSEETITPWNFEEVVDKGASAQSFIERMTNFDKNLPNEKVLPKHSLLYEYFTVYNELTKVKYVTEGMRKPAFLSGEQKKAIVDLLFKTNRKVTVKQLKEDYFKKIECFDSVEISGVEDRFNASLGTYHDLLKIIKDKDFLDNEENEDILEDIVLTLTLFEDREMIEERLKTYAHLFDDKVMKQLKRRRYTGWGRLSRKLINGIRDKQSGKTILDFLKSDGFANRNFMQLIHDDSLTFKEDIQKAQVSGQGDSLHEHIANLAGSPAIKKGILQTVKVVDELVKVMGRHKPENIVIEMARENQTTQKGQKNSRERMKRIEEGIKELGSQILKEHPVENTQLQNEKLYLYYLQNGRDMYVDQELDINRLSDYDVDHIVPQSFLKDDSIDNKVLTRSDKARGKSDNVPSEEVVKKMKNYWRQLLNAKLITQRKFDNLTKAERGGLSELDKAGFIKRQLVETRQITKHVAQILDSRMNTKYDENDKLIREVKVITLKSKLVSDFRKDFQFYKVREINNYHHAHDAYLNAVVGTALIKKYPKLESEFVYGDYKVYDVRKMIAKSEQEIGKATAKYFFYSNIMNFFKTEITLANGEIRKRPLIETNGETGEIVWDKGRDFATVRKVLSMPQVNIVKKTEVQTGGFSKESILPKRNSDKLIARKKDWDPKKYGGFDSPTVAYSVLVVAKVEKGKSKKLKSVKELLGITIMERSSFEKNPIDFLEAKGYKEVKKDLIIKLPKYSLFELENGRKRMLASAGELQKGNELALPSKYVNFLYLASHYEKLKGSPEDNEQKQLFVEQHKHYLDEIIEQISEFSKRVILADANLDKVLSAYNKHRDKPIREQAENIIHLFTLTNLGAPAAFKYFDTTIDRKRYTSTKEVLDATLIHQSITGLYETRIDLSQLGGDGSSGGGEAAAKMASNFTQFVLVDNGGTGDVTVAPSNFANGIAEWISSNSRSQAYKVTCSVRQSSAQNRKYTIKVEVPKGAWRSYLNMELTIPIFATNSDCELIVKAMQGLLKDGNPIPSAIAANSGIYGSSGSSGSSGSSGSSGSSTAPLEEEYRLFLEAPIQNVTLLEQWKREIPKVWAEINPPGLASTQAPIHVQLLSTALPVRVRQYPITLEAKRSLRETIRKFRAAGILRPVHSPWNTPLLPVRKSGTSEYRMVQDLREVNKRVETIHPTVPNPYTLLSLLPPDRIWYSVLDLKDAFFCIPLAPESQLIFAFEWADAEEGESGQLTWTRLPQGFKNSPTLFNEALNRDLQGFRLDHPSVSLLQYVDDLLIAADTQAACLSATRDLLMTLAELGYRVSGKKAQLCQEEVTYLGFKIHKGSRSLSNSRTQAILQIPVPKTKRQVREFLGKIGYCRLFIPGFAELAQPLYAATRPGNDPLVWGEKEEEAFQSLKLALTQPPALALPSLDKPFQLFVEETSGAAKGVLTQALGPWKRPVAYLSKRLDPVAAGWPRCLRAIAAAALLTREASKLTFGQDIEITSSHNLESLLRSPPDKWLTNARITQYQVLLLDPPRVRFKQTAALNPATLLPETDDTLPIHHCLDTLDSLTSTRPDLTDQPLAQAEATLFTDGSSYIRDGKRYAGAAVVTLDSVIWAEPLPIGTSAQKAELIALTKALEWSKDKSVNIYTDSRYAFATLHVHGMIYRERGWLTAGGKAIKNAPEILALLTAVWLPKRVAVMHCKGHQKDDAPTSTGNRRADEVAREVAIRPLSTQATISKRTADGSEFESPKKKAKVE

SEQ ID NO: 16040 - protein, 2210 aa, synthetic construct
MPAAKRVKLDGGDKKYSIGLDIGTNSVGWAVITDEYKVPSKKFKVLGNTDRHSIKKNLIGALLFDSGETAEATRLKRTARRRYTRRKNRICYLQEIFSNEMAKVDDSFFHRLEESFLVEEDKKHERHPIFGNIVDEVAYHEKYPTIYHLRKKLVDSTDKADLRLIYLALAHMIKFRGHFLIEGDLNPDNSDVDKLFIQLVQTYNQLFEENPINASGVDAKAILSARLSKSRRLENLIAQLPGEKKNGLFGNLIALSLGLTPNFKSNFDLAEDAKLQLSKDTYDDDLDNLLAQIGDQYADLFLAAKNLSDAILLSDILRVNTEITKAPLSASMIKRYDEHHQDLTLLKALVRQQLPEKYKEIFFDQSKNGYAGYIDGGASQEEFYKFIKPILEKMDGTEELLVKLNREDLLRKQRTFDNGSIPHQIHLGELHAILRRQEDFYPFLKDNREKIEKILTFRIPYYVGPLARGNSRFAWMTRKSEETITPWNFEEVVDKGASAQSFIERMTNFDKNLPNEKVLPKHSLLYEYFTVYNELTKVKYVTEGMRKPAFLSGEQKKAIVDLLFKTNRKVTVKQLKEDYFKKIECFDSVEISGVEDRFNASLGTYHDLLKIIKDKDFLDNEENEDILEDIVLTLTLFEDREMIEERLKTYAHLFDDKVMKQLKRRRYTGWGRLSRKLINGIRDKQSGKTILDFLKSDGFANRNFMQLIHDDSLTFKEDIQKAQVSGQGDSLHEHIANLAGSPAIKKGILQTVKVVDELVKVMGRHKPENIVIEMARENQTTQKGQKNSRERMKRIEEGIKELGSQILKEHPVENTQLQNEKLYLYYLQNGRDMYVDQELDINRLSDYDVDHIVPQSFLKDDSIDNKVLTRSDKARGKSDNVPSEEVVKKMKNYWRQLLNAKLITQRKFDNLTKAERGGLSELDKAGFIKRQLVETRQITKHVAQILDSRMNTKYDENDKLIREVKVITLKSKLVSDFRKDFQFYKVREINNYHHAHDAYLNAVVGTALIKKYPKLESEFVYGDYKVYDVRKMIAKSEQEIGKATAKYFFYSNIMNFFKTEITLANGEIRKRPLIETNGETGEIVWDKGRDFATVRKVLSMPQVNIVKKTEVQTGGFSKESILPKRNSDKLIARKKDWDPKKYGGFDSPTVAYSVLVVAKVEKGKSKKLKSVKELLGITIMERSSFEKNPIDFLEAKGYKEVKKDLIIKLPKYSLFELENGRKRMLASAGELQKGNELALPSKYVNFLYLASHYEKLKGSPEDNEQKQLFVEQHKHYLDEIIEQISEFSKRVILADANLDKVLSAYNKHRDKPIREQAENIIHLFTLTNLGAPAAFKYFDTTIDRKRYTSTKEVLDATLIHQSITGLYETRIDLSQLGGDGSSGGGEAAAKMASNFTQFVLVDNGGTGDVTVAPSNFANGIAEWISSNSRSQAYKVTCSVRQSSAQNRKYTIKVEVPKGAWRSYLNMELTIPIFATNSDCELIVKAMQGLLKDGNPIPSAIAANSGIYGSSGGGEAAAKTAPLEEEYRLFLEAPIQNVTLLEQWKREIPKVWAEINPPGLASTQAPIHVQLLSTALPVRVRQYPITLEAKRSLRETIRKFRAAGILRPVHSPWNTPLLPVRKSGTSEYRMVQDLREVNKRVETIHPTVPNPYTLLSLLPPDRIWYSVLDLKDAFFCIPLAPESQLIFAFEWADAEEGESGQLTWTRLPQGFKNSPTLFNEALNRDLQGFRLDHPSVSLLQYVDDLLIAADTQAACLSATRDLLMTLAELGYRVSGKKAQLCQEEVTYLGFKIHKGSRSLSNSRTQAILQIPVPKTKRQVREFLGKIGYCRLFIPGFAELAQPLYAATRPGNDPLVWGEKEEEAFQSLKLALTQPPALALPSLDKPFQLFVEETSGAAKGVLTQALGPWKRPVAYLSKRLDPVAAGWPRCLRAIAAAALLTREASKLTFGQDIEITSSHNLESLLRSPPDKWLTNARITQYQVLLLDPPRVRFKQTAALNPATLLPETDDTLPIHHCLDTLDSLTSTRPDLTDQPLAQAEATLFTDGSSYIRDGKRYAGAAVVTLDSVIWAEPLPIGTSAQKAELIALTKALEWSKDKSVNIYTDSRYAFATLHVHGMIYRERGWLTAGGKAIKNAPEILALLTAVWLPKRVAVMHCKGHQKDDAPTSTGNRRADEVAREVAIRPLSTQATISKRTADGSEFESPKKKAKVE

SEQ ID NO: 16041 - protein, 2368 aa, synthetic construct
MPAAKRVKLDGGDKKYSIGLDIGTNSVGWAVITDEYKVPSKKFKVLGNTDRHSIKKNLIGALLFDSGETAEATRLKRTARRRYTRRKNRICYLQEIFSNEMAKVDDSFFHRLEESFLVEEDKKHERHPIFGNIVDEVAYHEKYPTIYHLRKKLVDSTDKADLRLIYLALAHMIKFRGHFLIEGDLNPDNSDVDKLFIQLVQTYNQLFEENPINASGVDAKAILSARLSKSRRLENLIAQLPGEKKNGLFGNLIALSLGLTPNFKSNFDLAEDAKLQLSKDTYDDDLDNLLAQIGDQYADLFLAAKNLSDAILLSDILRVNTEITKAPLSASMIKRYDEHHQDLTLLKALVRQQLPEKYKEIFFDQSKNGYAGYIDGGASQEEFYKFIKPILEKMDGTEELLVKLNREDLLRKQRTFDNGSIPHQIHLGELHAILRRQEDFYPFLKDNREKIEKILTFRIPYYVGPLARGNSRFAWMTRKSEETITPWNFEEVVDKGASAQSFIERMTNFDKNLPNEKVLPKHSLLYEYFTVYNELTKVKYVTEGMRKPAFLSGEQKKAIVDLLFKTNRKVTVKQLKEDYFKKIECFDSVEISGVEDRFNASLGTYHDLLKIIKDKDFLDNEENEDILEDIVLTLTLFEDREMIEERLKTYAHLFDDKVMKQLKRRRYTGWGRLSRKLINGIRDKQSGKTILDFLKSDGFANRNFMQLIHDDSLTFKEDIQKAQVSGQGDSLHEHIANLAGSPAIKKGILQTVKVVDELVKVMGRHKPENIVIEMARENQTTQKGQKNSRERMKRIEEGIKELGSQILKEHPVENTQLQNEKLYLYYLQNGRDMYVDQELDINRLSDYDVDHIVPQSFLKDDSIDNKVLTRSDKARGKSDNVPSEEVVKKMKNYWRQLLNAKLITQRKFDNLTKAERGGLSELDKAGFIKRQLVETRQITKHVAQILDSRMNTKYDENDKLIREVKVITLKSKLVSDFRKDFQFYKVREINNYHHAHDAYLNAVVGTALIKKYPKLESEFVYGDYKVYDVRKMIAKSEQEIGKATAKYFFYSNIMNFFKTEITLANGEIRKRPLIETNGETGEIVWDKGRDFATVRKVLSMPQVNIVKKTEVQTGGFSKESILPKRNSDKLIARKKDWDPKKYGGFDSPTVAYSVLVVAKVEKGKSKKLKSVKELLGITIMERSSFEKNPIDFLEAKGYKEVKKDLIIKLPKYSLFELENGRKRMLASAGELQKGNELALPSKYVNFLYLASHYEKLKGSPEDNEQKQLFVEQHKHYLDEIIEQISEFSKRVILADANLDKVLSAYNKHRDKPIREQAENIIHLFTLTNLGAPAAFKYFDTTIDRKRYTSTKEVLDATLIHQSITGLYETRIDLSQLGGDGSSGGGEAAAKMASNFTQFVLVDNGGTGDVTVAPSNFANGIAEWISSNSRSQAYKVTCSVRQSSAQNRKYTIKVEVPKGAWRSYLNMELTIPIFATNSDCELIVKAMQGLLKDGNPIPSAIAANSGIYGGSGGSMASNFTQFVLVDNGGTGDVTVAPSNFANGIAEWISSNSRSQAYKVTCSVRQSSAQNRKYTIKVEVPKGAWRSYLNMELTIPIFATNSDCELIVKAMQGLLKDGNPIPSAIAANSGIYAEAAAKEAAAKEAAAKEAAAKALEAEAAAKEAAAKEAAAKEAAAKATAPLEEEYRLFLEAPIQNVTLLEQWKREIPKVWAEINPPGLASTQAPIHVQLLSTALPVRVRQYPITLEAKRSLRETIRKFRAAGILRPVHSPWNTPLLPVRKSGTSEYRMVQDLREVNKRVETIHPTVPNPYTLLSLLPPDRIWYSVLDLKDAFFCIPLAPESQLIFAFEWADAEEGESGQLTWTRLPQGFKNSPTLFNEALNRDLQGFRLDHPSVSLLQYVDDLLIAADTQAACLSATRDLLMTLAELGYRVSGKKAQLCQEEVTYLGFKIHKGSRSLSNSRTQAILQIPVPKTKRQVREFLGKIGYCRLFIPGFAELAQPLYAATRPGNDPLVWGEKEEEAFQSLKLALTQPPALALPSLDKPFQLFVEETSGAAKGVLTQALGPWKRPVAYLSKRLDPVAAGWPRCLRAIAAAALLTREASKLTFGQDIEITSSHNLESLLRSPPDKWLTNARITQYQVLLLDPPRVRFKQTAALNPATLLPETDDTLPIHHCLDTLDSLTSTRPDLTDQPLAQAEATLFTDGSSYIRDGKRYAGAAVVTLDSVIWAEPLPIGTSAQKAELIALTKALEWSKDKSVNIYTDSRYAFATLHVHGMIYRERGWLTAGGKAIKNAPEILALLTAVWLPKRVAVMHCKGHQKDDAPTSTGNRRADEVAREVAIRPLSTQATISKRTADGSEFESPKKKAKVE

SEQ ID NO: 16042 - protein, 2355 aa, synthetic construct
MPAAKRVKLDGGDKKYSIGLDIGTNSVGWAVITDEYKVPSKKFKVLGNTDRHSIKKNLIGALLFDSGETAEATRLKRTARRRYTRRKNRICYLQEIFSNEMAKVDDSFFHRLEESFLVEEDKKHERHPIFGNIVDEVAYHEKYPTIYHLRKKLVDSTDKADLRLIYLALAHMIKFRGHFLIEGDLNPDNSDVDKLFIQLVQTYNQLFEENPINASGVDAKAILSARLSKSRRLENLIAQLPGEKKNGLFGNLIALSLGLTPNFKSNFDLAEDAKLQLSKDTYDDDLDNLLAQIGDQYADLFLAAKNLSDAILLSDILRVNTEITKAPLSASMIKRYDEHHQDLTLLKALVRQQLPEKYKEIFFDQSKNGYAGYIDGGASQEEFYKFIKPILEKMDGTEELLVKLNREDLLRKQRTFDNGSIPHQIHLGELHAILRRQEDFYPFLKDNREKIEKILTFRIPYYVGPLARGNSRFAWMTRKSEETITPWNFEEVVDKGASAQSFIERMTNFDKNLPNEKVLPKHSLLYEYFTVYNELTKVKYVTEGMRKPAFLSGEQKKAIVDLLFKTNRKVTVKQLKEDYFKKIECFDSVEISGVEDRFNASLGTYHDLLKIIKDKDFLDNEENEDILEDIVLTLTLFEDREMIEERLKTYAHLFDDKVMKQLKRRRYTGWGRLSRKLINGIRDKQSGKTILDFLKSDGFANRNFMQLIHDDSLTFKEDIQKAQVSGQGDSLHEHIANLAGSPAIKKGILQTVKVVDELVKVMGRHKPENIVIEMARENQTTQKGQKNSRERMKRIEEGIKELGSQILKEHPVENTQLQNEKLYLYYLQNGRDMYVDQELDINRLSDYDVDHIVPQSFLKDDSIDNKVLTRSDKARGKSDNVPSEEVVKKMKNYWRQLLNAKLITQRKFDNLTKAERGGLSELDKAGFIKRQLVETRQITKHVAQILDSRMNTKYDENDKLIREVKVITLKSKLVSDFRKDFQFYKVREINNYHHAHDAYLNAVVGTALIKKYPKLESEFVYGDYKVYDVRKMIAKSEQEIGKATAKYFFYSNIMNFFKTEITLANGEIRKRPLIETNGETGEIVWDKGRDFATVRKVLSMPQVNIVKKTEVQTGGFSKESILPKRNSDKLIARKKDWDPKKYGGFDSPTVAYSVLVVAKVEKGKSKKLKSVKELLGITIMERSSFEKNPIDFLEAKGYKEVKKDLIIKLPKYSLFELENGRKRMLASAGELQKGNELALPSKYVNFLYLASHYEKLKGSPEDNEQKQLFVEQHKHYLDEIIEQISEFSKRVILADANLDKVLSAYNKHRDKPIREQAENIIHLFTLTNLGAPAAFKYFDTTIDRKRYTSTKEVLDATLIHQSITGLYETRIDLSQLGGDGSSGGGEAAAKMASNFTQFVLVDNGGTGDVTVAPSNFANGIAEWISSNSRSQAYKVTCSVRQSSAQNRKYTIKVEVPKGAWRSYLNMELTIPIFATNSDCELIVKAMQGLLKDGNPIPSAIAANSGIYGGSGGSMASNFTQFVLVDNGGTGDVTVAPSNFANGIAEWISSNSRSQAYKVTCSVRQSSAQNRKYTIKVEVPKGAWRSYLNMELTIPIFATNSDCELIVKAMQGLLKDGNPIPSAIAANSGIYSGGSSGGSSGSETPGTSESATPESSGGSSGGSSTAPLEEEYRLFLEAPIQNVTLLEQWKREIPKVWAEINPPGLASTQAPIHVQLLSTALPVRVRQYPITLEAKRSLRETIRKFRAAGILRPVHSPWNTPLLPVRKSGTSEYRMVQDLREVNKRVETIHPTVPNPYTLLSLLPPDRIWYSVLDLKDAFFCIPLAPESQLIFAFEWADAEEGESGQLTWTRLPQGFKNSPTLFNEALNRDLQGFRLDHPSVSLLQYVDDLLIAADTQAACLSATRDLLMTLAELGYRVSGKKAQLCQEEVTYLGFKIHKGSRSLSNSRTQAILQIPVPKTKRQVREFLGKIGYCRLFIPGFAELAQPLYAATRPGNDPLVWGEKEEEAFQSLKLALTQPPALALPSLDKPFQLFVEETSGAAKGVLTQALGPWKRPVAYLSKRLDPVAAGWPRCLRAIAAAALLTREASKLTFGQDIEITSSHNLESLLRSPPDKWLTNARITQYQVLLLDPPRVRFKQTAALNPATLLPETDDTLPIHHCLDTLDSLTSTRPDLTDQPLAQAEATLFTDGSSYIRDGKRYAGAAVVTLDSVIWAEPLPIGTSAQKAELIALTKALEWSKDKSVNIYTDSRYAFATLHVHGMIYRERGWLTAGGKAIKNAPEILALLTAVWLPKRVAVMHCKGHQKDDAPTSTGNRRADEVAREVAIRPLSTQATISKRTADGSEFESPKKKAKVE

SEQ ID NO: 16043 - protein, 2340 aa, synthetic construct
MPAAKRVKLDGGDKKYSIGLDIGTNSVGWAVITDEYKVPSKKFKVLGNTDRHSIKKNLIGALLFDSGETAEATRLKRTARRRYTRRKNRICYLQEIFSNEMAKVDDSFFHRLEESFLVEEDKKHERHPIFGNIVDEVAYHEKYPTIYHLRKKLVDSTDKADLRLIYLALAHMIKFRGHFLIEGDLNPDNSDVDKLFIQLVQTYNQLFEENPINASGVDAKAILSARLSKSRRLENLIAQLPGEKKNGLFGNLIALSLGLTPNFKSNFDLAEDAKLQLSKDTYDDDLDNLLAQIGDQYADLFLAAKNLSDAILLSDILRVNTEITKAPLSASMIKRYDEHHQDLTLLKALVRQQLPEKYKEIFFDQSKNGYAGYIDGGASQEEFYKFIKPILEKMDGTEELLVKLNREDLLRKQRTFDNGSIPHQIHLGELHAILRRQEDFYPFLKDNREKIEKILTFRIPYYVGPLARGNSRFAWMTRKSEETITPWNFEEVVDKGASAQSFIERMTNFDKNLPNEKVLPKHSLLYEYFTVYNELTKVKYVTEGMRKPAFLSGEQKKAIVDLLFKTNRKVTVKQLKEDYFKKIECFDSVEISGVEDRFNASLGTYHDLLKIIKDKDFLDNEENEDILEDIVLTLTLFEDREMIEERLKTYAHLFDDKVMKQLKRRRYTGWGRLSRKLINGIRDKQSGKTILDFLKSDGFANRNFMQLIHDDSLTFKEDIQKAQVSGQGDSLHEHIANLAGSPAIKKGILQTVKVVDELVKVMGRHKPENIVIEMARENQTTQKGQKNSRERMKRIEEGIKELGSQILKEHPVENTQLQNEKLYLYYLQNGRDMYVDQELDINRLSDYDVDHIVPQSFLKDDSIDNKVLTRSDKARGKSDNVPSEEVVKKMKNYWRQLLNAKLITQRKFDNLTKAERGGLSELDKAGFIKRQLVETRQITKHVAQILDSRMNTKYDENDKLIREVKVITLKSKLVSDFRKDFQFYKVREINNYHHAHDAYLNAVVGTALIKKYPKLESEFVYGDYKVYDVRKMIAKSEQEIGKATAKYFFYSNIMNFFKTEITLANGEIRKRPLIETNGETGEIVWDKGRDFATVRKVLSMPQVNIVKKTEVQTGGFSKESILPKRNSDKLIARKKDWDPKKYGGFDSPTVAYSVLVVAKVEKGKSKKLKSVKELLGITIMERSSFEKNPIDFLEAKGYKEVKKDLIIKLPKYSLFELENGRKRMLASAGELQKGNELALPSKYVNFLYLASHYEKLKGSPEDNEQKQLFVEQHKHYLDEIIEQISEFSKRVILADANLDKVLSAYNKHRDKPIREQAENIIHLFTLTNLGAPAAFKYFDTTIDRKRYTSTKEVLDATLIHQSITGLYETRIDLSQLGGDGSSGGGEAAAKMASNFTQFVLVDNGGTGDVTVAPSNFANGIAEWISSNSRSQAYKVTCSVRQSSAQNRKYTIKVEVPKGAWRSYLNMELTIPIFATNSDCELIVKAMQGLLKDGNPIPSAIAANSGIYGGSGGSMASNFTQFVLVDNGGTGDVTVAPSNFANGIAEWISSNSRSQAYKVTCSVRQSSAQNRKYTIKVEVPKGAWRSYLNMELTIPIFATNSDCELIVKAMQGLLKDGNPIPSAIAANSGIYGSSGSSGSSGSSGSSGSSTAPLEEEYRLFLEAPIQNVTLLEQWKREIPKVWAEINPPGLASTQAPIHVQLLSTALPVRVRQYPITLEAKRSLRETIRKFRAAGILRPVHSPWNTPLLPVRKSGTSEYRMVQDLREVNKRVETIHPTVPNPYTLLSLLPPDRIWYSVLDLKDAFFCIPLAPESQLIFAFEWADAEEGESGQLTWTRLPQGFKNSPTLFNEALNRDLQGFRLDHPSVSLLQYVDDLLIAADTQAACLSATRDLLMTLAELGYRVSGKKAQLCQEEVTYLGFKIHKGSRSLSNSRTQAILQIPVPKTKRQVREFLGKIGYCRLFIPGFAELAQPLYAATRPGNDPLVWGEKEEEAFQSLKLALTQPPALALPSLDKPFQLFVEETSGAAKGVLTQALGPWKRPVAYLSKRLDPVAAGWPRCLRAIAAAALLTREASKLTFGQDIEITSSHNLESLLRSPPDKWLTNARITQYQVLLLDPPRVRFKQTAALNPATLLPETDDTLPIHHCLDTLDSLTSTRPDLTDQPLAQAEATLFTDGSSYIRDGKRYAGAAVVTLDSVIWAEPLPIGTSAQKAELIALTKALEWSKDKSVNIYTDSRYAFATLHVHGMIYRERGWLTAGGKAIKNAPEILALLTAVWLPKRVAVMHCKGHQKDDAPTSTGNRRADEVAREVAIRPLSTQATISKRTADGSEFESPKKKAKVE

SEQ ID NO: 16044 - protein, 2333 aa, synthetic construct
MPAAKRVKLDGGDKKYSIGLDIGTNSVGWAVITDEYKVPSKKFKVLGNTDRHSIKKNLIGALLFDSGETAEATRLKRTARRRYTRRKNRICYLQEIFSNEMAKVDDSFFHRLEESFLVEEDKKHERHPIFGNIVDEVAYHEKYPTIYHLRKKLVDSTDKADLRLIYLALAHMIKFRGHFLIEGDLNPDNSDVDKLFIQLVQTYNQLFEENPINASGVDAKAILSARLSKSRRLENLIAQLPGEKKNGLFGNLIALSLGLTPNFKSNFDLAEDAKLQLSKDTYDDDLDNLLAQIGDQYADLFLAAKNLSDAILLSDILRVNTEITKAPLSASMIKRYDEHHQDLTLLKALVRQQLPEKYKEIFFDQSKNGYAGYIDGGASQEEFYKFIKPILEKMDGTEELLVKLNREDLLRKQRTFDNGSIPHQIHLGELHAILRRQEDFYPFLKDNREKIEKILTFRIPYYVGPLARGNSRFAWMTRKSEETITPWNFEEVVDKGASAQSFIERMTNFDKNLPNEKVLPKHSLLYEYFTVYNELTKVKYVTEGMRKPAFLSGEQKKAIVDLLFKTNRKVTVKQLKEDYFKKIECFDSVEISGVEDRFNASLGTYHDLLKIIKDKDFLDNEENEDILEDIVLTLTLFEDREMIEERLKTYAHLFDDKVMKQLKRRRYTGWGRLSRKLINGIRDKQSGKTILDFLKSDGFANRNFMQLIHDDSLTFKEDIQKAQVSGQGDSLHEHIANLAGSPAIKKGILQTVKVVDELVKVMGRHKPENIVIEMARENQTTQKGQKNSRERMKRIEEGIKELGSQILKEHPVENTQLQNEKLYLYYLQNGRDMYVDQELDINRLSDYDVDHIVPQSFLKDDSIDNKVLTRSDKARGKSDNVPSEEVVKKMKNYWRQLLNAKLITQRKFDNLTKAERGGLSELDKAGFIKRQLVETRQITKHVAQILDSRMNTKYDENDKLIREVKVITLKSKLVSDFRKDFQFYKVREINNYHHAHDAYLNAVVGTALIKKYPKLESEFVYGDYKVYDVRKMIAKSEQEIGKATAKYFFYSNIMNFFKTEITLANGEIRKRPLIETNGETGEIVWDKGRDFATVRKVLSMPQVNIVKKTEVQTGGFSKESILPKRNSDKLIARKKDWDPKKYGGFDSPTVAYSVLVVAKVEKGKSKKLKSVKELLGITIMERSSFEKNPIDFLEAKGYKEVKKDLIIKLPKYSLFELENGRKRMLASAGELQKGNELALPSKYVNFLYLASHYEKLKGSPEDNEQKQLFVEQHKHYLDEIIEQISEFSKRVILADANLDKVLSAYNKHRDKPIREQAENIIHLFTLTNLGAPAAFKYFDTTIDRKRYTSTKEVLDATLIHQSITGLYETRIDLSQLGGDGSSGGGEAAAKMASNFTQFVLVDNGGTGDVTVAPSNFANGIAEWISSNSRSQAYKVTCSVRQSSAQNRKYTIKVEVPKGAWRSYLNMELTIPIFATNSDCELIVKAMQGLLKDGNPIPSAIAANSGIYGGSGGSMASNFTQFVLVDNGGTGDVTVAPSNFANGIAEWISSNSRSQAYKVTCSVRQSSAQNRKYTIKVEVPKGAWRSYLNMELTIPIFATNSDCELIVKAMQGLLKDGNPIPSAIAANSGIYGSSGGGEAAAKTAPLEEEYRLFLEAPIQNVTLLEQWKREIPKVWAEINPPGLASTQAPIHVQLLSTALPVRVRQYPITLEAKRSLRETIRKFRAAGILRPVHSPWNTPLLPVRKSGTSEYRMVQDLREVNKRVETIHPTVPNPYTLLSLLPPDRIWYSVLDLKDAFFCIPLAPESQLIFAFEWADAEEGESGQLTWTRLPQGFKNSPTLFNEALNRDLQGFRLDHPSVSLLQYVDDLLIAADTQAACLSATRDLLMTLAELGYRVSGKKAQLCQEEVTYLGFKIHKGSRSLSNSRTQAILQIPVPKTKRQVREFLGKIGYCRLFIPGFAELAQPLYAATRPGNDPLVWGEKEEEAFQSLKLALTQPPALALPSLDKPFQLFVEETSGAAKGVLTQALGPWKRPVAYLSKRLDPVAAGWPRCLRAIAAAALLTREASKLTFGQDIEITSSHNLESLLRSPPDKWLTNARITQYQVLLLDPPRVRFKQTAALNPATLLPETDDTLPIHHCLDTLDSLTSTRPDLTDQPLAQAEATLFTDGSSYIRDGKRYAGAAVVTLDSVIWAEPLPIGTSAQKAELIALTKALEWSKDKSVNIYTDSRYAFATLHVHGMIYRERGWLTAGGKAIKNAPEILALLTAVWLPKRVAVMHCKGHQKDDAPTSTGNRRADEVAREVAIRPLSTQATISKRTADGSEFESPKKKAKVE

SEQ ID NO: 16045 - protein, 2624 aa, synthetic construct
MPAAKRVKLDGGDKKYSIGLDIGTNSVGWAVITDEYKVPSKKFKVLGNTDRHSIKKNLIGALLFDSGETAEATRLKRTARRRYTRRKNRICYLQEIFSNEMAKVDDSFFHRLEESFLVEEDKKHERHPIFGNIVDEVAYHEKYPTIYHLRKKLVDSTDKADLRLIYLALAHMIKFRGHFLIEGDLNPDNSDVDKLFIQLVQTYNQLFEENPINASGVDAKAILSARLSKSRRLENLIAQLPGEKKNGLFGNLIALSLGLTPNFKSNFDLAEDAKLQLSKDTYDDDLDNLLAQIGDQYADLFLAAKNLSDAILLSDILRVNTEITKAPLSASMIKRYDEHHQDLTLLKALVRQQLPEKYKEIFFDQSKNGYAGYIDGGASQEEFYKFIKPILEKMDGTEELLVKLNREDLLRKQRTFDNGSIPHQIHLGELHAILRRQEDFYPFLKDNREKIEKILTFRIPYYVGPLARGNSRFAWMTRKSEETITPWNFEEVVDKGASAQSFIERMTNFDKNLPNEKVLPKHSLLYEYFTVYNELTKVKYVTEGMRKPAFLSGEQKKAIVDLLFKTNRKVTVKQLKEDYFKKIECFDSVEISGVEDRFNASLGTYHDLLKIIKDKDFLDNEENEDILEDIVLTLTLFEDREMIEERLKTYAHLFDDKVMKQLKRRRYTGWGRLSRKLINGIRDKQSGKTILDFLKSDGFANRNFMQLIHDDSLTFKEDIQKAQVSGQGDSLHEHIANLAGSPAIKKGILQTVKVVDELVKVMGRHKPENIVIEMARENQTTQKGQKNSRERMKRIEEGIKELGSQILKEHPVENTQLQNEKLYLYYLQNGRDMYVDQELDINRLSDYDVDHIVPQSFLKDDSIDNKVLTRSDKARGKSDNVPSEEVVKKMKNYWRQLLNAKLITQRKFDNLTKAERGGLSELDKAGFIKRQLVETRQITKHVAQILDSRMNTKYDENDKLIREVKVITLKSKLVSDFRKDFQFYKVREINNYHHAHDAYLNAVVGTALIKKYPKLESEFVYGDYKVYDVRKMIAKSEQEIGKATAKYFFYSNIMNFFKTEITLANGEIRKRPLIETNGETGEIVWDKGRDFATVRKVLSMPQVNIVKKTEVQTGGFSKESILPKRNSDKLIARKKDWDPKKYGGFDSPTVAYSVLVVAKVEKGKSKKLKSVKELLGITIMERSSFEKNPIDFLEAKGYKEVKKDLIIKLPKYSLFELENGRKRMLASAGELQKGNELALPSKYVNFLYLASHYEKLKGSPEDNEQKQLFVEQHKHYLDEIIEQISEFSKRVILADANLDKVLSAYNKHRDKPIREQAENIIHLFTLTNLGAPAAFKYFDTTIDRKRYTSTKEVLDATLIHQSITGLYETRIDLSQLGGDGSSGGGEAAAKMASNFTQFVLVDNGGTGDVTVAPSNFANGIAEWISSNSRSQAYKVTCSVRQSSAQNRKYTIKVEVPKGAWRSYLNMELTIPIFATNSDCELIVKAMQGLLKDGNPIPSAIAANSGIYGGSGGSMASNFTQFVLVDNGGTGDVTVAPSNFANGIAEWISSNSRSQAYKVTCSVRQSSAQNRKYTIKVEVPKGAWRSYLNMELTIPIFATNSDCELIVKAMQGLLKDGNPIPSAIAANSGIYGGGSGGGSGGGSGGGSMASNFTQFVLVDNGGTGDVTVAPSNFANGIAEWISSNSRSQAYKVTCSVRQSSAQNRKYTIKVEVPKGAWRSYLNMELTIPIFATNSDCELIVKAMQGLLKDGNPIPSAIAANSGIYGGSGGSMASNFTQFVLVDNGGTGDVTVAPSNFANGIAEWISSNSRSQAYKVTCSVRQSSAQNRKYTIKVEVPKGAWRSYLNMELTIPIFATNSDCELIVKAMQGLLKDGNPIPSAIAANSGIYAEAAAKEAAAKEAAAKEAAAKALEAEAAAKEAAAKEAAAKEAAAKATAPLEEEYRLFLEAPIQNVTLLEQWKREIPKVWAEINPPGLASTQAPIHVQLLSTALPVRVRQYPITLEAKRSLRETIRKFRAAGILRPVHSPWNTPLLPVRKSGTSEYRMVQDLREVNKRVETIHPTVPNPYTLLSLLPPDRIWYSVLDLKDAFFCIPLAPESQLIFAFEWADAEEGESGQLTWTRLPQGFKNSPTLFNEALNRDLQGFRLDHPSVSLLQYVDDLLIAADTQAACLSATRDLLMTLAELGYRVSGKKAQLCQEEVTYLGFKIHKGSRSLSNSRTQAILQIPVPKTKRQVREFLGKIGYCRLFIPGFAELAQPLYAATRPGNDPLVWGEKEEEAFQSLKLALTQPPALALPSLDKPFQLFVEETSGAAKGVLTQALGPWKRPVAYLSKRLDPVAAGWPRCLRAIAAAALLTREASKLTFGQDIEITSSHNLESLLRSPPDKWLTNARITQYQVLLLDPPRVRFKQTAALNPATLLPETDDTLPIHHCLDTLDSLTSTRPDLTDQPLAQAEATLFTDGSSYIRDGKRYAGAAVVTLDSVIWAEPLPIGTSAQKAELIALTKALEWSKDKSVNIYTDSRYAFATLHVHGMIYRERGWLTAGGKAIKNAPEILALLTAVWLPKRVAVMHCKGHQKDDAPTSTGNRRADEVAREVAIRPLSTQATISKRTADGSEFESPKKKAKVE

SEQ ID NO: 16046 - protein, 2611 aa, synthetic construct
MPAAKRVKLDGGDKKYSIGLDIGTNSVGWAVITDEYKVPSKKFKVLGNTDRHSIKKNLIGALLFDSGETAEATRLKRTARRRYTRRKNRICYLQEIFSNEMAKVDDSFFHRLEESFLVEEDKKHERHPIFGNIVDEVAYHEKYPTIYHLRKKLVDSTDKADLRLIYLALAHMIKFRGHFLIEGDLNPDNSDVDKLFIQLVQTYNQLFEENPINASGVDAKAILSARLSKSRRLENLIAQLPGEKKNGLFGNLIALSLGLTPNFKSNFDLAEDAKLQLSKDTYDDDLDNLLAQIGDQYADLFLAAKNLSDAILLSDILRVNTEITKAPLSASMIKRYDEHHQDLTLLKALVRQQLPEKYKEIFFDQSKNGYAGYIDGGASQEEFYKFIKPILEKMDGTEELLVKLNREDLLRKQRTFDNGSIPHQIHLGELHAILRRQEDFYPFLKDNREKIEKILTFRIPYYVGPLARGNSRFAWMTRKSEETITPWNFEEVVDKGASAQSFIERMTNFDKNLPNEKVLPKHSLLYEYFTVYNELTKVKYVTEGMRKPAFLSGEQKKAIVDLLFKTNRKVTVKQLKEDYFKKIECFDSVEISGVEDRFNASLGTYHDLLKIIKDKDFLDNEENEDILEDIVLTLTLFEDREMIEERLKTYAHLFDDKVMKQLKRRRYTGWGRLSRKLINGIRDKQSGKTILDFLKSDGFANRNFMQLIHDDSLTFKEDIQKAQVSGQGDSLHEHIANLAGSPAIKKGILQTVKVVDELVKVMGRHKPENIVIEMARENQTTQKGQKNSRERMKRIEEGIKELGSQILKEHPVENTQLQNEKLYLYYLQNGRDMYVDQELDINRLSDYDVDHIVPQSFLKDDSIDNKVLTRSDKARGKSDNVPSEEVVKKMKNYWRQLLNAKLITQRKFDNLTKAERGGLSELDKAGFIKRQLVETRQITKHVAQILDSRMNTKYDENDKLIREVKVITLKSKLVSDFRKDFQFYKVREINNYHHAHDAYLNAVVGTALIKKYPKLESEFVYGDYKVYDVRKMIAKSEQEIGKATAKYFFYSNIMNFFKTEITLANGEIRKRPLIETNGETGEIVWDKGRDFATVRKVLSMPQVNIVKKTEVQTGGFSKESILPKRNSDKLIARKKDWDPKKYGGFDSPTVAYSVLVVAKVEKGKSKKLKSVKELLGITIMERSSFEKNPIDFLEAKGYKEVKKDLIIKLPKYSLFELENGRKRMLASAGELQKGNELALPSKYVNFLYLASHYEKLKGSPEDNEQKQLFVEQHKHYLDEIIEQISEFSKRVILADANLDKVLSAYNKHRDKPIREQAENIIHLFTLTNLGAPAAFKYFDTTIDRKRYTSTKEVLDATLIHQSITGLYETRIDLSQLGGDGSSGGGEAAAKMASNFTQFVLVDNGGTGDVTVAPSNFANGIAEWISSNSRSQAYKVTCSVRQSSAQNRKYTIKVEVPKGAWRSYLNMELTIPIFATNSDCELIVKAMQGLLKDGNPIPSAIAANSGIYGGSGGSMASNFTQFVLVDNGGTGDVTVAPSNFANGIAEWISSNSRSQAYKVTCSVRQSSAQNRKYTIKVEVPKGAWRSYLNMELTIPIFATNSDCELIVKAMQGLLKDGNPIPSAIAANSGIYGGGSGGGSGGGSGGGSMASNFTQFVLVDNGGTGDVTVAPSNFANGIAEWISSNSRSQAYKVTCSVRQSSAQNRKYTIKVEVPKGAWRSYLNMELTIPIFATNSDCELIVKAMQGLLKDGNPIPSAIAANSGIYGGSGGSMASNFTQFVLVDNGGTGDVTVAPSNFANGIAEWISSNSRSQAYKVTCSVRQSSAQNRKYTIKVEVPKGAWRSYLNMELTIPIFATNSDCELIVKAMQGLLKDGNPIPSAIAANSGIYSGGSSGGSSGSETPGTSESATPESSGGSSGGSSTAPLEEEYRLFLEAPIQNVTLLEQWKREIPKVWAEINPPGLASTQAPIHVQLLSTALPVRVRQYPITLEAKRSLRETIRKFRAAGILRPVHSPWNTPLLPVRKSGTSEYRMVQDLREVNKRVETIHPTVPNPYTLLSLLPPDRIWYSVLDLKDAFFCIPLAPESQLIFAFEWADAEEGESGQLTWTRLPQGFKNSPTLFNEALNRDLQGFRLDHPSVSLLQYVDDLLIAADTQAACLSATRDLLMTLAELGYRVSGKKAQLCQEEVTYLGFKIHKGSRSLSNSRTQAILQIPVPKTKRQVREFLGKIGYCRLFIPGFAELAQPLYAATRPGNDPLVWGEKEEEAFQSLKLALTQPPALALPSLDKPFQLFVEETSGAAKGVLTQALGPWKRPVAYLSKRLDPVAAGWPRCLRAIAAAALLTREASKLTFGQDIEITSSHNLESLLRSPPDKWLTNARITQYQVLLLDPPRVRFKQTAALNPATLLPETDDTLPIHHCLDTLDSLTSTRPDLTDQPLAQAEATLFTDGSSYIRDGKRYAGAAVVTLDSVIWAEPLPIGTSAQKAELIALTKALEWSKDKSVNIYTDSRYAFATLHVHGMIYRERGWLTAGGKAIKNAPEILALLTAVWLPKRVAVMHCKGHQKDDAPTSTGNRRADEVAREVAIRPLSTQATISKRTADGSEFESPKKKAKVE

SEQ ID NO: 16047 - protein, 2596 aa, synthetic construct
MPAAKRVKLDGGDKKYSIGLDIGTNSVGWAVITDEYKVPSKKFKVLGNTDRHSIKKNLIGALLFDSGETAEATRLKRTARRRYTRRKNRICYLQEIFSNEMAKVDDSFFHRLEESFLVEEDKKHERHPIFGNIVDEVAYHEKYPTIYHLRKKLVDSTDKADLRLIYLALAHMIKFRGHFLIEGDLNPDNSDVDKLFIQLVQTYNQLFEENPINASGVDAKAILSARLSKSRRLENLIAQLPGEKKNGLFGNLIALSLGLTPNFKSNFDLAEDAKLQLSKDTYDDDLDNLLAQIGDQYADLFLAAKNLSDAILLSDILRVNTEITKAPLSASMIKRYDEHHQDLTLLKALVRQQLPEKYKEIFFDQSKNGYAGYIDGGASQEEFYKFIKPILEKMDGTEELLVKLNREDLLRKQRTFDNGSIPHQIHLGELHAILRRQEDFYPFLKDNREKIEKILTFRIPYYVGPLARGNSRFAWMTRKSEETITPWNFEEVVDKGASAQSFIERMTNFDKNLPNEKVLPKHSLLYEYFTVYNELTKVKYVTEGMRKPAFLSGEQKKAIVDLLFKTNRKVTVKQLKEDYFKKIECFDSVEISGVEDRFNASLGTYHDLLKIIKDKDFLDNEENEDILEDIVLTLTLFEDREMIEERLKTYAHLFDDKVMKQLKRRRYTGWGRLSRKLINGIRDKQSGKTILDFLKSDGFANRNFMQLIHDDSLTFKEDIQKAQVSGQGDSLHEHIANLAGSPAIKKGILQTVKVVDELVKVMGRHKPENIVIEMARENQTTQKGQKNSRERMKRIEEGIKELGSQILKEHPVENTQLQNEKLYLYYLQNGRDMYVDQELDINRLSDYDVDHIVPQSFLKDDSIDNKVLTRSDKARGKSDNVPSEEVVKKMKNYWRQLLNAKLITQRKFDNLTKAERGGLSELDKAGFIKRQLVETRQITKHVAQILDSRMNTKYDENDKLIREVKVITLKSKLVSDFRKDFQFYKVREINNYHHAHDAYLNAVVGTALIKKYPKLESEFVYGDYKVYDVRKMIAKSEQEIGKATAKYFFYSNIMNFFKTEITLANGEIRKRPLIETNGETGEIVWDKGRDFATVRKVLSMPQVNIVKKTEVQTGGFSKESILPKRNSDKLIARKKDWDPKKYGGFDSPTVAYSVLVVAKVEKGKSKKLKSVKELLGITIMERSSFEKNPIDFLEAKGYKEVKKDLIIKLPKYSLFELENGRKRMLASAGELQKGNELALPSKYVNFLYLASHYEKLKGSPEDNEQKQLFVEQHKHYLDEIIEQISEFSKRVILADANLDKVLSAYNKHRDKPIREQAENIIHLFTLTNLGAPAAFKYFDTTIDRKRYTSTKEVLDATLIHQSITGLYETRIDLSQLGGDGSSGGGEAAAKMASNFTQFVLVDNGGTGDVTVAPSNFANGIAEWISSNSRSQAYKVTCSVRQSSAQNRKYTIKVEVPKGAWRSYLNMELTIPIFATNSDCELIVKAMQGLLKDGNPIPSAIAANSGIYGGSGGSMASNFTQFVLVDNGGTGDVTVAPSNFANGIAEWISSNSRSQAYKVTCSVRQSSAQNRKYTIKVEVPKGAWRSYLNMELTIPIFATNSDCELIVKAMQGLLKDGNPIPSAIAANSGIYGGGSGGGSGGGSGGGSMASNFTQFVLVDNGGTGDVTVAPSNFANGIAEWISSNSRSQAYKVTCSVRQSSAQNRKYTIKVEVPKGAWRSYLNMELTIPIFATNSDCELIVKAMQGLLKDGNPIPSAIAANSGIYGGSGGSMASNFTQFVLVDNGGTGDVTVAPSNFANGIAEWISSNSRSQAYKVTCSVRQSSAQNRKYTIKVEVPKGAWRSYLNMELTIPIFATNSDCELIVKAMQGLLKDGNPIPSAIAANSGIYGSSGSSGSSGSSGSSGSSTAPLEEEYRLFLEAPIQNVTLLEQWKREIPKVWAEINPPGLASTQAPIHVQLLSTALPVRVRQYPITLEAKRSLRETIRKFRAAGILRPVHSPWNTPLLPVRKSGTSEYRMVQDLREVNKRVETIHPTVPNPYTLLSLLPPDRIWYSVLDLKDAFFCIPLAPESQLIFAFEWADAEEGESGQLTWTRLPQGFKNSPTLFNEALNRDLQGFRLDHPSVSLLQYVDDLLIAADTQAACLSATRDLLMTLAELGYRVSGKKAQLCQEEVTYLGFKIHKGSRSLSNSRTQAILQIPVPKTKRQVREFLGKIGYCRLFIPGFAELAQPLYAATRPGNDPLVWGEKEEEAFQSLKLALTQPPALALPSLDKPFQLFVEETSGAAKGVLTQALGPWKRPVAYLSKRLDPVAAGWPRCLRAIAAAALLTREASKLTFGQDIEITSSHNLESLLRSPPDKWLTNARITQYQVLLLDPPRVRFKQTAALNPATLLPETDDTLPIHHCLDTLDSLTSTRPDLTDQPLAQAEATLFTDGSSYIRDGKRYAGAAVVTLDSVIWAEPLPIGTSAQKAELIALTKALEWSKDKSVNIYTDSRYAFATLHVHGMIYRERGWLTAGGKAIKNAPEILALLTAVWLPKRVAVMHCKGHQKDDAPTSTGNRRADEVAREVAIRPLSTQATISKRTADGSEFESPKKKAKVE

SEQ ID NO: 16048 - protein, 2589 aa, synthetic construct
MPAAKRVKLDGGDKKYSIGLDIGTNSVGWAVITDEYKVPSKKFKVLGNTDRHSIKKNLIGALLFDSGETAEATRLKRTARRRYTRRKNRICYLQEIFSNEMAKVDDSFFHRLEESFLVEEDKKHERHPIFGNIVDEVAYHEKYPTIYHLRKKLVDSTDKADLRLIYLALAHMIKFRGHFLIEGDLNPDNSDVDKLFIQLVQTYNQLFEENPINASGVDAKAILSARLSKSRRLENLIAQLPGEKKNGLFGNLIALSLGLTPNFKSNFDLAEDAKLQLSKDTYDDDLDNLLAQIGDQYADLFLAAKNLSDAILLSDILRVNTEITKAPLSASMIKRYDEHHQDLTLLKALVRQQLPEKYKEIFFDQSKNGYAGYIDGGASQEEFYKFIKPILEKMDGTEELLVKLNREDLLRKQRTFDNGSIPHQIHLGELHAILRRQEDFYPFLKDNREKIEKILTFRIPYYVGPLARGNSRFAWMTRKSEETITPWNFEEVVDKGASAQSFIERMTNFDKNLPNEKVLPKHSLLYEYFTVYNELTKVKYVTEGMRKPAFLSGEQKKAIVDLLFKTNRKVTVKQLKEDYFKKIECFDSVEISGVEDRFNASLGTYHDLLKIIKDKDFLDNEENEDILEDIVLTLTLFEDREMIEERLKTYAHLFDDKVMKQLKRRRYTGWGRLSRKLINGIRDKQSGKTILDFLKSDGFANRNFMQLIHDDSLTFKEDIQKAQVSGQGDSLHEHIANLAGSPAIKKGILQTVKVVDELVKVMGRHKPENIVIEMARENQTTQKGQKNSRERMKRIEEGIKELGSQILKEHPVENTQLQNEKLYLYYLQNGRDMYVDQELDINRLSDYDVDHIVPQSFLKDDSIDNKVLTRSDKARGKSDNVPSEEVVKKMKNYWRQLLNAKLITQRKFDNLTKAERGGLSELDKAGFIKRQLVETRQITKHVAQILDSRMNTKYDENDKLIREVKVITLKSKLVSDFRKDFQFYKVREINNYHHAHDAYLNAVVGTALIKKYPKLESEFVYGDYKVYDVRKMIAKSEQEIGKATAKYFFYSNIMNFFKTEITLANGEIRKRPLIETNGETGEIVWDKGRDFATVRKVLSMPQVNIVKKTEVQTGGFSKESILPKRNSDKLIARKKDWDPKKYGGFDSPTVAYSVLVVAKVEKGKSKKLKSVKELLGITIMERSSFEKNPIDFLEAKGYKEVKKDLIIKLPKYSLFELENGRKRMLASAGELQKGNELALPSKYVNFLYLASHYEKLKGSPEDNEQKQLFVEQHKHYLDEIIEQISEFSKRVILADANLDKVLSAYNKHRDKPIREQAENIIHLFTLTNLGAPAAFKYFDTTIDRKRYTSTKEVLDATLIHQSITGLYETRIDLSQLGGDGSSGGGEAAAKMASNFTQFVLVDNGGTGDVTVAPSNFANGIAEWISSNSRSQAYKVTCSVRQSSAQNRKYTIKVEVPKGAWRSYLNMELTIPIFATNSDCELIVKAMQGLLKDGNPIPSAIAANSGIYGGSGGSMASNFTQFVLVDNGGTGDVTVAPSNFANGIAEWISSNSRSQAYKVTCSVRQSSAQNRKYTIKVEVPKGAWRSYLNMELTIPIFATNSDCELIVKAMQGLLKDGNPIPSAIAANSGIYGGGSGGGSGGGSGGGSMASNFTQFVLVDNGGTGDVTVAPSNFANGIAEWISSNSRSQAYKVTCSVRQSSAQNRKYTIKVEVPKGAWRSYLNMELTIPIFATNSDCELIVKAMQGLLKDGNPIPSAIAANSGIYGGSGGSMASNFTQFVLVDNGGTGDVTVAPSNFANGIAEWISSNSRSQAYKVTCSVRQSSAQNRKYTIKVEVPKGAWRSYLNMELTIPIFATNSDCELIVKAMQGLLKDGNPIPSAIAANSGIYGSSGGGEAAAKTAPLEEEYRLFLEAPIQNVTLLEQWKREIPKVWAEINPPGLASTQAPIHVQLLSTALPVRVRQYPITLEAKRSLRETIRKFRAAGILRPVHSPWNTPLLPVRKSGTSEYRMVQDLREVNKRVETIHPTVPNPYTLLSLLPPDRIWYSVLDLKDAFFCIPLAPESQLIFAFEWADAEEGESGQLTWTRLPQGFKNSPTLFNEALNRDLQGFRLDHPSVSLLQYVDDLLIAADTQAACLSATRDLLMTLAELGYRVSGKKAQLCQEEVTYLGFKIHKGSRSLSNSRTQAILQIPVPKTKRQVREFLGKIGYCRLFIPGFAELAQPLYAATRPGNDPLVWGEKEEEAFQSLKLALTQPPALALPSLDKPFQLFVEETSGAAKGVLTQALGPWKRPVAYLSKRLDPVAAGWPRCLRAIAAAALLTREASKLTFGQDIEITSSHNLESLLRSPPDKWLTNARITQYQVLLLDPPRVRFKQTAALNPATLLPETDDTLPIHHCLDTLDSLTSTRPDLTDQPLAQAEATLFTDGSSYIRDGKRYAGAAVVTLDSVIWAEPLPIGTSAQKAELIALTKALEWSKDKSVNIYTDSRYAFATLHVHGMIYRERGWLTAGGKAIKNAPEILALLTAVWLPKRVAVMHCKGHQKDDAPTSTGNRRADEVAREVAIRPLSTQATISKRTADGSEFESPKKKAKVE

SEQ ID NO: 16049 - protein, 2278 aa, synthetic construct
MPAAKRVKLDGGDKKYSIGLDIGTNSVGWAVITDEYKVPSKKFKVLGNTDRHSIKKNLIGALLFDSGETAEATRLKRTARRRYTRRKNRICYLQEIFSNEMAKVDDSFFHRLEESFLVEEDKKHERHPIFGNIVDEVAYHEKYPTIYHLRKKLVDSTDKADLRLIYLALAHMIKFRGHFLIEGDLNPDNSDVDKLFIQLVQTYNQLFEENPINASGVDAKAILSARLSKSRRLENLIAQLPGEKKNGLFGNLIALSLGLTPNFKSNFDLAEDAKLQLSKDTYDDDLDNLLAQIGDQYADLFLAAKNLSDAILLSDILRVNTEITKAPLSASMIKRYDEHHQDLTLLKALVRQQLPEKYKEIFFDQSKNGYAGYIDGGASQEEFYKFIKPILEKMDGTEELLVKLNREDLLRKQRTFDNGSIPHQIHLGELHAILRRQEDFYPFLKDNREKIEKILTFRIPYYVGPLARGNSRFAWMTRKSEETITPWNFEEVVDKGASAQSFIERMTNFDKNLPNEKVLPKHSLLYEYFTVYNELTKVKYVTEGMRKPAFLSGEQKKAIVDLLFKTNRKVTVKQLKEDYFKKIECFDSVEISGVEDRFNASLGTYHDLLKIIKDKDFLDNEENEDILEDIVLTLTLFEDREMIEERLKTYAHLFDDKVMKQLKRRRYTGWGRLSRKLINGIRDKQSGKTILDFLKSDGFANRNFMQLIHDDSLTFKEDIQKAQVSGQGDSLHEHIANLAGSPAIKKGILQTVKVVDELVKVMGRHKPENIVIEMARENQTTQKGQKNSRERMKRIEEGIKELGSQILKEHPVENTQLQNEKLYLYYLQNGRDMYVDQELDINRLSDYDVDHIVPQSFLKDDSIDNKVLTRSDKARGKSDNVPSEEVVKKMKNYWRQLLNAKLITQRKFDNLTKAERGGLSELDKAGFIKRQLVETRQITKHVAQILDSRMNTKYDENDKLIREVKVITLKSKLVSDFRKDFQFYKVREINNYHHAHDAYLNAVVGTALIKKYPKLESEFVYGDYKVYDVRKMIAKSEQEIGKATAKYFFYSNIMNFFKTEITLANGEIRKRPLIETNGETGEIVWDKGRDFATVRKVLSMPQVNIVKKTEVQTGGFSKESILPKRNSDKLIARKKDWDPKKYGGFDSPTVAYSVLVVAKVEKGKSKKLKSVKELLGITIMERSSFEKNPIDFLEAKGYKEVKKDLIIKLPKYSLFELENGRKRMLASAGELQKGNELALPSKYVNFLYLASHYEKLKGSPEDNEQKQLFVEQHKHYLDEIIEQISEFSKRVILADANLDKVLSAYNKHRDKPIREQAENIIHLFTLTNLGAPAAFKYFDTTIDRKRYTSTKEVLDATLIHQSITGLYETRIDLSQLGGDAEAAAKEAAAKEAAAKEAAAKALEAEAAAKEAAAKEAAAKEAAAKAMASNFTQFVLVDNGGTGDVTVAPSNFANGIAEWISSNSRSQAYKVTCSVRQSSAQNRKYTIKVEVPKGAWRSYLNMELTIPIFATNSDCELIVKAMQGLLKDGNPIPSAIAANSGIYAEAAAKEAAAKEAAAKEAAAKALEAEAAAKEAAAKEAAAKEAAAKATLNIEDEHRLHETSKEPDVSLGSTWLSDFPQAWAETGGMGLAVRQAPLIIPLKATSTPVSIKQYPMSQEARLGIKPHIQRLLDQGILVPCQSPWNTPLLPVKKPGTNDYRPVQDLREVNKRVEDIHPTVPNPYNLLSGLPPSHQWYTVLDLKDAFFCLRLHPTSQPLFAFEWRDPEMGISGQLTWTRLPQGFKNSPTLFNEALHRDLADFRIQHPDLILLQYVDDLLLAATSELDCQQGTRALLQTLGNLGYRASAKKAQICQKQVKYLGYLLKEGQRWLTEARKETVMGQPTPKTPRQLREFLGKAGFCRLFIPGFAEMAAPLYPLTKPGTLFNWGPDQQKAYQEIKQALLTAPALGLPDLTKPFELFVDEKQGYAKGVLTQKLGPWRRPVAYLSKKLDPVAAGWPPCLRMVAAIAVLTKDAGKLTMGQPLVILAPHAVEALVKQPPDRWLSNARMTHYQALLLDTDRVQFGPVVALNPATLLPLPEEGLQHNCLDILAEAHGTRPDLTDQPLPDADHTWYTDGSSLLQEGQRKAGAAVTTETEVIWAKALPAGTSAQRAELIALTQALKMAEGKKLNVYTDSRYAFATAHIHGEIYRRRGWLTSEGKEIKNKDEILALLKALFLPKRLSIIHCPGHQKGHSAEARGNRMADQAARKAAITETPDTSTLLKRTADGSEFESPKKKAKVE

SEQ ID NO: 16050 - protein, 2265 aa, synthetic construct
MPAAKRVKLDGGDKKYSIGLDIGTNSVGWAVITDEYKVPSKKFKVLGNTDRHSIKKNLIGALLFDSGETAEATRLKRTARRRYTRRKNRICYLQEIFSNEMAKVDDSFFHRLEESFLVEEDKKHERHPIFGNIVDEVAYHEKYPTIYHLRKKLVDSTDKADLRLIYLALAHMIKFRGHFLIEGDLNPDNSDVDKLFIQLVQTYNQLFEENPINASGVDAKAILSARLSKSRRLENLIAQLPGEKKNGLFGNLIALSLGLTPNFKSNFDLAEDAKLQLSKDTYDDDLDNLLAQIGDQYADLFLAAKNLSDAILLSDILRVNTEITKAPLSASMIKRYDEHHQDLTLLKALVRQQLPEKYKEIFFDQSKNGYAGYIDGGASQEEFYKFIKPILEKMDGTEELLVKLNREDLLRKQRTFDNGSIPHQIHLGELHAILRRQEDFYPFLKDNREKIEKILTFRIPYYVGPLARGNSRFAWMTRKSEETITPWNFEEVVDKGASAQSFIERMTNFDKNLPNEKVLPKHSLLYEYFTVYNELTKVKYVTEGMRKPAFLSGEQKKAIVDLLFKTNRKVTVKQLKEDYFKKIECFDSVEISGVEDRFNASLGTYHDLLKIIKDKDFLDNEENEDILEDIVLTLTLFEDREMIEERLKTYAHLFDDKVMKQLKRRRYTGWGRLSRKLINGIRDKQSGKTILDFLKSDGFANRNFMQLIHDDSLTFKEDIQKAQVSGQGDSLHEHIANLAGSPAIKKGILQTVKVVDELVKVMGRHKPENIVIEMARENQTTQKGQKNSRERMKRIEEGIKELGSQILKEHPVENTQLQNEKLYLYYLQNGRDMYVDQELDINRLSDYDVDHIVPQSFLKDDSIDNKVLTRSDKARGKSDNVPSEEVVKKMKNYWRQLLNAKLITQRKFDNLTKAERGGLSELDKAGFIKRQLVETRQITKHVAQILDSRMNTKYDENDKLIREVKVITLKSKLVSDFRKDFQFYKVREINNYHHAHDAYLNAVVGTALIKKYPKLESEFVYGDYKVYDVRKMIAKSEQEIGKATAKYFFYSNIMNFFKTEITLANGEIRKRPLIETNGETGEIVWDKGRDFATVRKVLSMPQVNIVKKTEVQTGGFSKESILPKRNSDKLIARKKDWDPKKYGGFDSPTVAYSVLVVAKVEKGKSKKLKSVKELLGITIMERSSFEKNPIDFLEAKGYKEVKKDLIIKLPKYSLFELENGRKRMLASAGELQKGNELALPSKYVNFLYLASHYEKLKGSPEDNEQKQLFVEQHKHYLDEIIEQISEFSKRVILADANLDKVLSAYNKHRDKPIREQAENIIHLFTLTNLGAPAAFKYFDTTIDRKRYTSTKEVLDATLIHQSITGLYETRIDLSQLGGDAEAAAKEAAAKEAAAKEAAAKALEAEAAAKEAAAKEAAAKEAAAKAMASNFTQFVLVDNGGTGDVTVAPSNFANGIAEWISSNSRSQAYKVTCSVRQSSAQNRKYTIKVEVPKGAWRSYLNMELTIPIFATNSDCELIVKAMQGLLKDGNPIPSAIAANSGIYSGGSSGGSSGSETPGTSESATPESSGGSSGGSSTLNIEDEHRLHETSKEPDVSLGSTWLSDFPQAWAETGGMGLAVRQAPLIIPLKATSTPVSIKQYPMSQEARLGIKPHIQRLLDQGILVPCQSPWNTPLLPVKKPGTNDYRPVQDLREVNKRVEDIHPTVPNPYNLLSGLPPSHQWYTVLDLKDAFFCLRLHPTSQPLFAFEWRDPEMGISGQLTWTRLPQGFKNSPTLFNEALHRDLADFRIQHPDLILLQYVDDLLLAATSELDCQQGTRALLQTLGNLGYRASAKKAQICQKQVKYLGYLLKEGQRWLTEARKETVMGQPTPKTPRQLREFLGKAGFCRLFIPGFAEMAAPLYPLTKPGTLFNWGPDQQKAYQEIKQALLTAPALGLPDLTKPFELFVDEKQGYAKGVLTQKLGPWRRPVAYLSKKLDPVAAGWPPCLRMVAAIAVLTKDAGKLTMGQPLVILAPHAVEALVKQPPDRWLSNARMTHYQALLLDTDRVQFGPVVALNPATLLPLPEEGLQHNCLDILAEAHGTRPDLTDQPLPDADHTWYTDGSSLLQEGQRKAGAAVTTETEVIWAKALPAGTSAQRAELIALTQALKMAEGKKLNVYTDSRYAFATAHIHGEIYRRRGWLTSEGKEIKNKDEILALLKALFLPKRLSIIHCPGHQKGHSAEARGNRMADQAARKAAITETPDTSTLLKRTADGSEFESPKKKAKVE

SEQ ID NO: 16051 - protein, 2250 aa, synthetic construct
MPAAKRVKLDGGDKKYSIGLDIGTNSVGWAVITDEYKVPSKKFKVLGNTDRHSIKKNLIGALLFDSGETAEATRLKRTARRRYTRRKNRICYLQEIFSNEMAKVDDSFFHRLEESFLVEEDKKHERHPIFGNIVDEVAYHEKYPTIYHLRKKLVDSTDKADLRLIYLALAHMIKFRGHFLIEGDLNPDNSDVDKLFIQLVQTYNQLFEENPINASGVDAKAILSARLSKSRRLENLIAQLPGEKKNGLFGNLIALSLGLTPNFKSNFDLAEDAKLQLSKDTYDDDLDNLLAQIGDQYADLFLAAKNLSDAILLSDILRVNTEITKAPLSASMIKRYDEHHQDLTLLKALVRQQLPEKYKEIFFDQSKNGYAGYIDGGASQEEFYKFIKPILEKMDGTEELLVKLNREDLLRKQRTFDNGSIPHQIHLGELHAILRRQEDFYPFLKDNREKIEKILTFRIPYYVGPLARGNSRFAWMTRKSEETITPWNFEEVVDKGASAQSFIERMTNFDKNLPNEKVLPKHSLLYEYFTVYNELTKVKYVTEGMRKPAFLSGEQKKAIVDLLFKTNRKVTVKQLKEDYFKKIECFDSVEISGVEDRFNASLGTYHDLLKIIKDKDFLDNEENEDILEDIVLTLTLFEDREMIEERLKTYAHLFDDKVMKQLKRRRYTGWGRLSRKLINGIRDKQSGKTILDFLKSDGFANRNFMQLIHDDSLTFKEDIQKAQVSGQGDSLHEHIANLAGSPAIKKGILQTVKVVDELVKVMGRHKPENIVIEMARENQTTQKGQKNSRERMKRIEEGIKELGSQILKEHPVENTQLQNEKLYLYYLQNGRDMYVDQELDINRLSDYDVDHIVPQSFLKDDSIDNKVLTRSDKARGKSDNVPSEEVVKKMKNYWRQLLNAKLITQRKFDNLTKAERGGLSELDKAGFIKRQLVETRQITKHVAQILDSRMNTKYDENDKLIREVKVITLKSKLVSDFRKDFQFYKVREINNYHHAHDAYLNAVVGTALIKKYPKLESEFVYGDYKVYDVRKMIAKSEQEIGKATAKYFFYSNIMNFFKTEITLANGEIRKRPLIETNGETGEIVWDKGRDFATVRKVLSMPQVNIVKKTEVQTGGFSKESILPKRNSDKLIARKKDWDPKKYGGFDSPTVAYSVLVVAKVEKGKSKKLKSVKELLGITIMERSSFEKNPIDFLEAKGYKEVKKDLIIKLPKYSLFELENGRKRMLASAGELQKGNELALPSKYVNFLYLASHYEKLKGSPEDNEQKQLFVEQHKHYLDEIIEQISEFSKRVILADANLDKVLSAYNKHRDKPIREQAENIIHLFTLTNLGAPAAFKYFDTTIDRKRYTSTKEVLDATLIHQSITGLYETRIDLSQLGGDAEAAAKEAAAKEAAAKEAAAKALEAEAAAKEAAAKEAAAKEAAAKAMASNFTQFVLVDNGGTGDVTVAPSNFANGIAEWISSNSRSQAYKVTCSVRQSSAQNRKYTIKVEVPKGAWRSYLNMELTIPIFATNSDCELIVKAMQGLLKDGNPIPSAIAANSGIYGSSGSSGSSGSSGSSGSSTLNIEDEHRLHETSKEPDVSLGSTWLSDFPQAWAETGGMGLAVRQAPLIIPLKATSTPVSIKQYPMSQEARLGIKPHIQRLLDQGILVPCQSPWNTPLLPVKKPGTNDYRPVQDLREVNKRVEDIHPTVPNPYNLLSGLPPSHQWYTVLDLKDAFFCLRLHPTSQPLFAFEWRDPEMGISGQLTWTRLPQGFKNSPTLFNEALHRDLADFRIQHPDLILLQYVDDLLLAATSELDCQQGTRALLQTLGNLGYRASAKKAQICQKQVKYLGYLLKEGQRWLTEARKETVMGQPTPKTPRQLREFLGKAGFCRLFIPGFAEMAAPLYPLTKPGTLFNWGPDQQKAYQEIKQALLTAPALGLPDLTKPFELFVDEKQGYAKGVLTQKLGPWRRPVAYLSKKLDPVAAGWPPCLRMVAAIAVLTKDAGKLTMGQPLVILAPHAVEALVKQPPDRWLSNARMTHYQALLLDTDRVQFGPVVALNPATLLPLPEEGLQHNCLDILAEAHGTRPDLTDQPLPDADHTWYTDGSSLLQEGQRKAGAAVTTETEVIWAKALPAGTSAQRAELIALTQALKMAEGKKLNVYTDSRYAFATAHIHGEIYRRRGWLTSEGKEIKNKDEILALLKALFLPKRLSIIHCPGHQKGHSAEARGNRMADQAARKAAITETPDTSTLLKRTADGSEFESPKKKAKVE

SEQ ID NO: 16052 - protein, 2243 aa, synthetic construct
MPAAKRVKLDGGDKKYSIGLDIGTNSVGWAVITDEYKVPSKKFKVLGNTDRHSIKKNLIGALLFDSGETAEATRLKRTARRRYTRRKNRICYLQEIFSNEMAKVDDSFFHRLEESFLVEEDKKHERHPIFGNIVDEVAYHEKYPTIYHLRKKLVDSTDKADLRLIYLALAHMIKFRGHFLIEGDLNPDNSDVDKLFIQLVQTYNQLFEENPINASGVDAKAILSARLSKSRRLENLIAQLPGEKKNGLFGNLIALSLGLTPNFKSNFDLAEDAKLQLSKDTYDDDLDNLLAQIGDQYADLFLAAKNLSDAILLSDILRVNTEITKAPLSASMIKRYDEHHQDLTLLKALVRQQLPEKYKEIFFDQSKNGYAGYIDGGASQEEFYKFIKPILEKMDGTEELLVKLNREDLLRKQRTFDNGSIPHQIHLGELHAILRRQEDFYPFLKDNREKIEKILTFRIPYYVGPLARGNSRFAWMTRKSEETITPWNFEEVVDKGASAQSFIERMTNFDKNLPNEKVLPKHSLLYEYFTVYNELTKVKYVTEGMRKPAFLSGEQKKAIVDLLFKTNRKVTVKQLKEDYFKKIECFDSVEISGVEDRFNASLGTYHDLLKIIKDKDFLDNEENEDILEDIVLTLTLFEDREMIEERLKTYAHLFDDKVMKQLKRRRYTGWGRLSRKLINGIRDKQSGKTILDFLKSDGFANRNFMQLIHDDSLTFKEDIQKAQVSGQGDSLHEHIANLAGSPAIKKGILQTVKVVDELVKVMGRHKPENIVIEMARENQTTQKGQKNSRERMKRIEEGIKELGSQILKEHPVENTQLQNEKLYLYYLQNGRDMYVDQELDINRLSDYDVDHIVPQSFLKDDSIDNKVLTRSDKARGKSDNVPSEEVVKKMKNYWRQLLNAKLITQRKFDNLTKAERGGLSELDKAGFIKRQLVETRQITKHVAQILDSRMNTKYDENDKLIREVKVITLKSKLVSDFRKDFQFYKVREINNYHHAHDAYLNAVVGTALIKKYPKLESEFVYGDYKVYDVRKMIAKSEQEIGKATAKYFFYSNIMNFFKTEITLANGEIRKRPLIETNGETGEIVWDKGRDFATVRKVLSMPQVNIVKKTEVQTGGFSKESILPKRNSDKLIARKKDWDPKKYGGFDSPTVAYSVLVVAKVEKGKSKKLKSVKELLGITIMERSSFEKNPIDFLEAKGYKEVKKDLIIKLPKYSLFELENGRKRMLASAGELQKGNELALPSKYVNFLYLASHYEKLKGSPEDNEQKQLFVEQHKHYLDEIIEQISEFSKRVILADANLDKVLSAYNKHRDKPIREQAENIIHLFTLTNLGAPAAFKYFDTTIDRKRYTSTKEVLDATLIHQSITGLYETRIDLSQLGGDAEAAAKEAAAKEAAAKEAAAKALEAEAAAKEAAAKEAAAKEAAAKAMASNFTQFVLVDNGGTGDVTVAPSNFANGIAEWISSNSRSQAYKVTCSVRQSSAQNRKYTIKVEVPKGAWRSYLNMELTIPIFATNSDCELIVKAMQGLLKDGNPIPSAIAANSGIYGSSGGGEAAAKTLNIEDEHRLHETSKEPDVSLGSTWLSDFPQAWAETGGMGLAVRQAPLIIPLKATSTPVSIKQYPMSQEARLGIKPHIQRLLDQGILVPCQSPWNTPLLPVKKPGTNDYRPVQDLREVNKRVEDIHPTVPNPYNLLSGLPPSHQWYTVLDLKDAFFCLRLHPTSQPLFAFEWRDPEMGISGQLTWTRLPQGFKNSPTLFNEALHRDLADFRIQHPDLILLQYVDDLLLAATSELDCQQGTRALLQTLGNLGYRASAKKAQICQKQVKYLGYLLKEGQRWLTEARKETVMGQPTPKTPRQLREFLGKAGFCRLFIPGFAEMAAPLYPLTKPGTLFNWGPDQQKAYQEIKQALLTAPALGLPDLTKPFELFVDEKQGYAKGVLTQKLGPWRRPVAYLSKKLDPVAAGWPPCLRMVAAIAVLTKDAGKLTMGQPLVILAPHAVEALVKQPPDRWLSNARMTHYQALLLDTDRVQFGPVVALNPATLLPLPEEGLQHNCLDILAEAHGTRPDLTDQPLPDADHTWYTDGSSLLQEGQRKAGAAVTTETEVIWAKALPAGTSAQRAELIALTQALKMAEGKKLNVYTDSRYAFATAHIHGEIYRRRGWLTSEGKEIKNKDEILALLKALFLPKRLSIIHCPGHQKGHSAEARGNRMADQAARKAAITETPDTSTLLKRTADGSEFESPKKKAKVE

SEQ ID NO: 16053 - protein, 2401 aa, synthetic construct
MPAAKRVKLDGGDKKYSIGLDIGTNSVGWAVITDEYKVPSKKFKVLGNTDRHSIKKNLIGALLFDSGETAEATRLKRTARRRYTRRKNRICYLQEIFSNEMAKVDDSFFHRLEESFLVEEDKKHERHPIFGNIVDEVAYHEKYPTIYHLRKKLVDSTDKADLRLIYLALAHMIKFRGHFLIEGDLNPDNSDVDKLFIQLVQTYNQLFEENPINASGVDAKAILSARLSKSRRLENLIAQLPGEKKNGLFGNLIALSLGLTPNFKSNFDLAEDAKLQLSKDTYDDDLDNLLAQIGDQYADLFLAAKNLSDAILLSDILRVNTEITKAPLSASMIKRYDEHHQDLTLLKALVRQQLPEKYKEIFFDQSKNGYAGYIDGGASQEEFYKFIKPILEKMDGTEELLVKLNREDLLRKQRTFDNGSIPHQIHLGELHAILRRQEDFYPFLKDNREKIEKILTFRIPYYVGPLARGNSRFAWMTRKSEETITPWNFEEVVDKGASAQSFIERMTNFDKNLPNEKVLPKHSLLYEYFTVYNELTKVKYVTEGMRKPAFLSGEQKKAIVDLLFKTNRKVTVKQLKEDYFKKIECFDSVEISGVEDRFNASLGTYHDLLKIIKDKDFLDNEENEDILEDIVLTLTLFEDREMIEERLKTYAHLFDDKVMKQLKRRRYTGWGRLSRKLINGIRDKQSGKTILDFLKSDGFANRNFMQLIHDDSLTFKEDIQKAQVSGQGDSLHEHIANLAGSPAIKKGILQTVKVVDELVKVMGRHKPENIVIEMARENQTTQKGQKNSRERMKRIEEGIKELGSQILKEHPVENTQLQNEKLYLYYLQNGRDMYVDQELDINRLSDYDVDHIVPQSFLKDDSIDNKVLTRSDKARGKSDNVPSEEVVKKMKNYWRQLLNAKLITQRKFDNLTKAERGGLSELDKAGFIKRQLVETRQITKHVAQILDSRMNTKYDENDKLIREVKVITLKSKLVSDFRKDFQFYKVREINNYHHAHDAYLNAVVGTALIKKYPKLESEFVYGDYKVYDVRKMIAKSEQEIGKATAKYFFYSNIMNFFKTEITLANGEIRKRPLIETNGETGEIVWDKGRDFATVRKVLSMPQVNIVKKTEVQTGGFSKESILPKRNSDKLIARKKDWDPKKYGGFDSPTVAYSVLVVAKVEKGKSKKLKSVKELLGITIMERSSFEKNPIDFLEAKGYKEVKKDLIIKLPKYSLFELENGRKRMLASAGELQKGNELALPSKYVNFLYLASHYEKLKGSPEDNEQKQLFVEQHKHYLDEIIEQISEFSKRVILADANLDKVLSAYNKHRDKPIREQAENIIHLFTLTNLGAPAAFKYFDTTIDRKRYTSTKEVLDATLIHQSITGLYETRIDLSQLGGDAEAAAKEAAAKEAAAKEAAAKALEAEAAAKEAAAKEAAAKEAAAKAMASNFTQFVLVDNGGTGDVTVAPSNFANGIAEWISSNSRSQAYKVTCSVRQSSAQNRKYTIKVEVPKGAWRSYLNMELTIPIFATNSDCELIVKAMQGLLKDGNPIPSAIAANSGIYGGSGGSMASNFTQFVLVDNGGTGDVTVAPSNFANGIAEWISSNSRSQAYKVTCSVRQSSAQNRKYTIKVEVPKGAWRSYLNMELTIPIFATNSDCELIVKAMQGLLKDGNPIPSAIAANSGIYAEAAAKEAAAKEAAAKEAAAKALEAEAAAKEAAAKEAAAKEAAAKATLNIEDEHRLHETSKEPDVSLGSTWLSDFPQAWAETGGMGLAVRQAPLIIPLKATSTPVSIKQYPMSQEARLGIKPHIQRLLDQGILVPCQSPWNTPLLPVKKPGTNDYRPVQDLREVNKRVEDIHPTVPNPYNLLSGLPPSHQWYTVLDLKDAFFCLRLHPTSQPLFAFEWRDPEMGISGQLTWTRLPQGFKNSPTLFNEALHRDLADFRIQHPDLILLQYVDDLLLAATSELDCQQGTRALLQTLGNLGYRASAKKAQICQKQVKYLGYLLKEGQRWLTEARKETVMGQPTPKTPRQLREFLGKAGFCRLFIPGFAEMAAPLYPLTKPGTLFNWGPDQQKAYQEIKQALLTAPALGLPDLTKPFELFVDEKQGYAKGVLTQKLGPWRRPVAYLSKKLDPVAAGWPPCLRMVAAIAVLTKDAGKLTMGQPLVILAPHAVEALVKQPPDRWLSNARMTHYQALLLDTDRVQFGPVVALNPATLLPLPEEGLQHNCLDILAEAHGTRPDLTDQPLPDADHTWYTDGSSLLQEGQRKAGAAVTTETEVIWAKALPAGTSAQRAELIALTQALKMAEGKKLNVYTDSRYAFATAHIHGEIYRRRGWLTSEGKEIKNKDEILALLKALFLPKRLSIIHCPGHQKGHSAEARGNRMADQAARKAAITETPDTSTLLKRTADGSEFESPKKKAKVE

SEQ ID NO: 16054 - protein, 2388 aa, synthetic construct
MPAAKRVKLDGGDKKYSIGLDIGTNSVGWAVITDEYKVPSKKFKVLGNTDRHSIKKNLIGALLFDSGETAEATRLKRTARRRYTRRKNRICYLQEIFSNEMAKVDDSFFHRLEESFLVEEDKKHERHPIFGNIVDEVAYHEKYPTIYHLRKKLVDSTDKADLRLIYLALAHMIKFRGHFLIEGDLNPDNSDVDKLFIQLVQTYNQLFEENPINASGVDAKAILSARLSKSRRLENLIAQLPGEKKNGLFGNLIALSLGLTPNFKSNFDLAEDAKLQLSKDTYDDDLDNLLAQIGDQYADLFLAAKNLSDAILLSDILRVNTEITKAPLSASMIKRYDEHHQDLTLLKALVRQQLPEKYKEIFFDQSKNGYAGYIDGGASQEEFYKFIKPILEKMDGTEELLVKLNREDLLRKQRTFDNGSIPHQIHLGELHAILRRQEDFYPFLKDNREKIEKILTFRIPYYVGPLARGNSRFAWMTRKSEETITPWNFEEVVDKGASAQSFIERMTNFDKNLPNEKVLPKHSLLYEYFTVYNELTKVKYVTEGMRKPAFLSGEQKKAIVDLLFKTNRKVTVKQLKEDYFKKIECFDSVEISGVEDRFNASLGTYHDLLKIIKDKDFLDNEENEDILEDIVLTLTLFEDREMIEERLKTYAHLFDDKVMKQLKRRRYTGWGRLSRKLINGIRDKQSGKTILDFLKSDGFANRNFMQLIHDDSLTFKEDIQKAQVSGQGDSLHEHIANLAGSPAIKKGILQTVKVVDELVKVMGRHKPENIVIEMARENQTTQKGQKNSRERMKRIEEGIKELGSQILKEHPVENTQLQNEKLYLYYLQNGRDMYVDQELDINRLSDYDVDHIVPQSFLKDDSIDNKVLTRSDKARGKSDNVPSEEVVKKMKNYWRQLLNAKLITQRKFDNLTKAERGGLSELDKAGFIKRQLVETRQITKHVAQILDSRMNTKYDENDKLIREVKVITLKSKLVSDFRKDFQFYKVREINNYHHAHDAYLNAVVGTALIKKYPKLESEFVYGDYKVYDVRKMIAKSEQEIGKATAKYFFYSNIMNFFKTEITLANGEIRKRPLIETNGETGEIVWDKGRDFATVRKVLSMPQVNIVKKTEVQTGGFSKESILPKRNSDKLIARKKDWDPKKYGGFDSPTVAYSVLVVAKVEKGKSKKLKSVKELLGITIMERSSFEKNPIDFLEAKGYKEVKKDLIIKLPKYSLFELENGRKRMLASAGELQKGNELALPSKYVNFLYLASHYEKLKGSPEDNEQKQLFVEQHKHYLDEIIEQISEFSKRVILADANLDKVLSAYNKHRDKPIREQAENIIHLFTLTNLGAPAAFKYFDTTIDRKRYTSTKEVLDATLIHQSITGLYETRIDLSQLGGDAEAAAKEAAAKEAAAKEAAAKALEAEAAAKEAAAKEAAAKEAAAKAMASNFTQFVLVDNGGTGDVTVAPSNFANGIAEWISSNSRSQAYKVTCSVRQSSAQNRKYTIKVEVPKGAWRSYLNMELTIPIFATNSDCELIVKAMQGLLKDGNPIPSAIAANSGIYGGSGGSMASNFTQFVLVDNGGTGDVTVAPSNFANGIAEWISSNSRSQAYKVTCSVRQSSAQNRKYTIKVEVPKGAWRSYLNMELTIPIFATNSDCELIVKAMQGLLKDGNPIPSAIAANSGIYSGGSSGGSSGSETPGTSESATPESSGGSSGGSSTLNIEDEHRLHETSKEPDVSLGSTWLSDFPQAWAETGGMGLAVRQAPLIIPLKATSTPVSIKQYPMSQEARLGIKPHIQRLLDQGILVPCQSPWNTPLLPVKKPGTNDYRPVQDLREVNKRVEDIHPTVPNPYNLLSGLPPSHQWYTVLDLKDAFFCLRLHPTSQPLFAFEWRDPEMGISGQLTWTRLPQGFKNSPTLFNEALHRDLADFRIQHPDLILLQYVDDLLLAATSELDCQQGTRALLQTLGNLGYRASAKKAQICQKQVKYLGYLLKEGQRWLTEARKETVMGQPTPKTPRQLREFLGKAGFCRLFIPGFAEMAAPLYPLTKPGTLFNWGPDQQKAYQEIKQALLTAPALGLPDLTKPFELFVDEKQGYAKGVLTQKLGPWRRPVAYLSKKLDPVAAGWPPCLRMVAAIAVLTKDAGKLTMGQPLVILAPHAVEALVKQPPDRWLSNARMTHYQALLLDTDRVQFGPVVALNPATLLPLPEEGLQHNCLDILAEAHGTRPDLTDQPLPDADHTWYTDGSSLLQEGQRKAGAAVTTETEVIWAKALPAGTSAQRAELIALTQALKMAEGKKLNVYTDSRYAFATAHIHGEIYRRRGWLTSEGKEIKNKDEILALLKALFLPKRLSIIHCPGHQKGHSAEARGNRMADQAARKAAITETPDTSTLLKRTADGSEFESPKKKAKVE

SEQ ID NO: 16055 - protein, 2373 aa, synthetic construct
MPAAKRVKLDGGDKKYSIGLDIGTNSVGWAVITDEYKVPSKKFKVLGNTDRHSIKKNLIGALLFDSGETAEATRLKRTARRRYTRRKNRICYLQEIFSNEMAKVDDSFFHRLEESFLVEEDKKHERHPIFGNIVDEVAYHEKYPTIYHLRKKLVDSTDKADLRLIYLALAHMIKFRGHFLIEGDLNPDNSDVDKLFIQLVQTYNQLFEENPINASGVDAKAILSARLSKSRRLENLIAQLPGEKKNGLFGNLIALSLGLTPNFKSNFDLAEDAKLQLSKDTYDDDLDNLLAQIGDQYADLFLAAKNLSDAILLSDILRVNTEITKAPLSASMIKRYDEHHQDLTLLKALVRQQLPEKYKEIFFDQSKNGYAGYIDGGASQEEFYKFIKPILEKMDGTEELLVKLNREDLLRKQRTFDNGSIPHQIHLGELHAILRRQEDFYPFLKDNREKIEKILTFRIPYYVGPLARGNSRFAWMTRKSEETITPWNFEEVVDKGASAQSFIERMTNFDKNLPNEKVLPKHSLLYEYFTVYNELTKVKYVTEGMRKPAFLSGEQKKAIVDLLFKTNRKVTVKQLKEDYFKKIECFDSVEISGVEDRFNASLGTYHDLLKIIKDKDFLDNEENEDILEDIVLTLTLFEDREMIEERLKTYAHLFDDKVMKQLKRRRYTGWGRLSRKLINGIRDKQSGKTILDFLKSDGFANRNFMQLIHDDSLTFKEDIQKAQVSGQGDSLHEHIANLAGSPAIKKGILQTVKVVDELVKVMGRHKPENIVIEMARENQTTQKGQKNSRERMKRIEEGIKELGSQILKEHPVENTQLQNEKLYLYYLQNGRDMYVDQELDINRLSDYDVDHIVPQSFLKDDSIDNKVLTRSDKARGKSDNVPSEEVVKKMKNYWRQLLNAKLITQRKFDNLTKAERGGLSELDKAGFIKRQLVETRQITKHVAQILDSRMNTKYDENDKLIREVKVITLKSKLVSDFRKDFQFYKVREINNYHHAHDAYLNAVVGTALIKKYPKLESEFVYGDYKVYDVRKMIAKSEQEIGKATAKYFFYSNIMNFFKTEITLANGEIRKRPLIETNGETGEIVWDKGRDFATVRKVLSMPQVNIVKKTEVQTGGFSKESILPKRNSDKLIARKKDWDPKKYGGFDSPTVAYSVLVVAKVEKGKSKKLKSVKELLGITIMERSSFEKNPIDFLEAKGYKEVKKDLIIKLPKYSLFELENGRKRMLASAGELQKGNELALPSKYVNFLYLASHYEKLKGSPEDNEQKQLFVEQHKHYLDEIIEQISEFSKRVILADANLDKVLSAYNKHRDKPIREQAENIIHLFTLTNLGAPAAFKYFDTTIDRKRYTSTKEVLDATLIHQSITGLYETRIDLSQLGGDAEAAAKEAAAKEAAAKEAAAKALEAEAAAKEAAAKEAAAKEAAAKAMASNFTQFVLVDNGGTGDVTVAPSNFANGIAEWISSNSRSQAYKVTCSVRQSSAQNRKYTIKVEVPKGAWRSYLNMELTIPIFATNSDCELIVKAMQGLLKDGNPIPSAIAANSGIYGGSGGSMASNFTQFVLVDNGGTGDVTVAPSNFANGIAEWISSNSRSQAYKVTCSVRQSSAQNRKYTIKVEVPKGAWRSYLNMELTIPIFATNSDCELIVKAMQGLLKDGNPIPSAIAANSGIYGSSGSSGSSGSSGSSGSSTLNIEDEHRLHETSKEPDVSLGSTWLSDFPQAWAETGGMGLAVRQAPLIIPLKATSTPVSIKQYPMSQEARLGIKPHIQRLLDQGILVPCQSPWNTPLLPVKKPGTNDYRPVQDLREVNKRVEDIHPTVPNPYNLLSGLPPSHQWYTVLDLKDAFFCLRLHPTSQPLFAFEWRDPEMGISGQLTWTRLPQGFKNSPTLFNEALHRDLADFRIQHPDLILLQYVDDLLLAATSELDCQQGTRALLQTLGNLGYRASAKKAQICQKQVKYLGYLLKEGQRWLTEARKETVMGQPTPKTPRQLREFLGKAGFCRLFIPGFAEMAAPLYPLTKPGTLFNWGPDQQKAYQEIKQALLTAPALGLPDLTKPFELFVDEKQGYAKGVLTQKLGPWRRPVAYLSKKLDPVAAGWPPCLRMVAAIAVLTKDAGKLTMGQPLVILAPHAVEALVKQPPDRWLSNARMTHYQALLLDTDRVQFGPVVALNPATLLPLPEEGLQHNCLDILAEAHGTRPDLTDQPLPDADHTWYTDGSSLLQEGQRKAGAAVTTETEVIWAKALPAGTSAQRAELIALTQALKMAEGKKLNVYTDSRYAFATAHIHGEIYRRRGWLTSEGKEIKNKDEILALLKALFLPKRLSIIHCPGHQKGHSAEARGNRMADQAARKAAITETPDTSTLLKRTADGSEFESPKKKAKVE

SEQ ID NO: 16056 - protein, 2366 aa, synthetic construct
MPAAKRVKLDGGDKKYSIGLDIGTNSVGWAVITDEYKVPSKKFKVLGNTDRHSIKKNLIGALLFDSGETAEATRLKRTARRRYTRRKNRICYLQEIFSNEMAKVDDSFFHRLEESFLVEEDKKHERHPIFGNIVDEVAYHEKYPTIYHLRKKLVDSTDKADLRLIYLALAHMIKFRGHFLIEGDLNPDNSDVDKLFIQLVQTYNQLFEENPINASGVDAKAILSARLSKSRRLENLIAQLPGEKKNGLFGNLIALSLGLTPNFKSNFDLAEDAKLQLSKDTYDDDLDNLLAQIGDQYADLFLAAKNLSDAILLSDILRVNTEITKAPLSASMIKRYDEHHQDLTLLKALVRQQLPEKYKEIFFDQSKNGYAGYIDGGASQEEFYKFIKPILEKMDGTEELLVKLNREDLLRKQRTFDNGSIPHQIHLGELHAILRRQEDFYPFLKDNREKIEKILTFRIPYYVGPLARGNSRFAWMTRKSEETITPWNFEEVVDKGASAQSFIERMTNFDKNLPNEKVLPKHSLLYEYFTVYNELTKVKYVTEGMRKPAFLSGEQKKAIVDLLFKTNRKVTVKQLKEDYFKKIECFDSVEISGVEDRFNASLGTYHDLLKIIKDKDFLDNEENEDILEDIVLTLTLFEDREMIEERLKTYAHLFDDKVMKQLKRRRYTGWGRLSRKLINGIRDKQSGKTILDFLKSDGFANRNFMQLIHDDSLTFKEDIQKAQVSGQGDSLHEHIANLAGSPAIKKGILQTVKVVDELVKVMGRHKPENIVIEMARENQTTQKGQKNSRERMKRIEEGIKELGSQILKEHPVENTQLQNEKLYLYYLQNGRDMYVDQELDINRLSDYDVDHIVPQSFLKDDSIDNKVLTRSDKARGKSDNVPSEEVVKKMKNYWRQLLNAKLITQRKFDNLTKAERGGLSELDKAGFIKRQLVETRQITKHVAQILDSRMNTKYDENDKLIREVKVITLKSKLVSDFRKDFQFYKVREINNYHHAHDAYLNAVVGTALIKKYPKLESEFVYGDYKVYDVRKMIAKSEQEIGKATAKYFFYSNIMNFFKTEITLANGEIRKRPLIETNGETGEIVWDKGRDFATVRKVLSMPQVNIVKKTEVQTGGFSKESILPKRNSDKLIARKKDWDPKKYGGFDSPTVAYSVLVVAKVEKGKSKKLKSVKELLGITIMERSSFEKNPIDFLEAKGYKEVKKDLIIKLPKYSLFELENGRKRMLASAGELQKGNELALPSKYVNFLYLASHYEKLKGSPEDNEQKQLFVEQHKHYLDEIIEQISEFSKRVILADANLDKVLSAYNKHRDKPIREQAENIIHLFTLTNLGAPAAFKYFDTTIDRKRYTSTKEVLDATLIHQSITGLYETRIDLSQLGGDAEAAAKEAAAKEAAAKEAAAKALEAEAAAKEAAAKEAAAKEAAAKAMASNFTQFVLVDNGGTGDVTVAPSNFANGIAEWISSNSRSQAYKVTCSVRQSSAQNRKYTIKVEVPKGAWRSYLNMELTIPIFATNSDCELIVKAMQGLLKDGNPIPSAIAANSGIYGGSGGSMASNFTQFVLVDNGGTGDVTVAPSNFANGIAEWISSNSRSQAYKVTCSVRQSSAQNRKYTIKVEVPKGAWRSYLNMELTIPIFATNSDCELIVKAMQGLLKDGNPIPSAIAANSGIYGSSGGGEAAAKTLNIEDEHRLHETSKEPDVSLGSTWLSDFPQAWAETGGMGLAVRQAPLIIPLKATSTPVSIKQYPMSQEARLGIKPHIQRLLDQGILVPCQSPWNTPLLPVKKPGTNDYRPVQDLREVNKRVEDIHPTVPNPYNLLSGLPPSHQWYTVLDLKDAFFCLRLHPTSQPLFAFEWRDPEMGISGQLTWTRLPQGFKNSPTLFNEALHRDLADFRIQHPDLILLQYVDDLLLAATSELDCQQGTRALLQTLGNLGYRASAKKAQICQKQVKYLGYLLKEGQRWLTEARKETVMGQPTPKTPRQLREFLGKAGFCRLFIPGFAEMAAPLYPLTKPGTLFNWGPDQQKAYQEIKQALLTAPALGLPDLTKPFELFVDEKQGYAKGVLTQKLGPWRRPVAYLSKKLDPVAAGWPPCLRMVAAIAVLTKDAGKLTMGQPLVILAPHAVEALVKQPPDRWLSNARMTHYQALLLDTDRVQFGPVVALNPATLLPLPEEGLQHNCLDILAEAHGTRPDLTDQPLPDADHTWYTDGSSLLQEGQRKAGAAVTTETEVIWAKALPAGTSAQRAELIALTQALKMAEGKKLNVYTDSRYAFATAHIHGEIYRRRGWLTSEGKEIKNKDEILALLKALFLPKRLSIIHCPGHQKGHSAEARGNRMADQAARKAAITETPDTSTLLKRTADGSEFESPKKKAKVE

SEQ ID NO: 16057 - protein, 2657 aa, synthetic construct
MPAAKRVKLDGGDKKYSIGLDIGTNSVGWAVITDEYKVPSKKFKVLGNTDRHSIKKNLIGALLFDSGETAEATRLKRTARRRYTRRKNRICYLQEIFSNEMAKVDDSFFHRLEESFLVEEDKKHERHPIFGNIVDEVAYHEKYPTIYHLRKKLVDSTDKADLRLIYLALAHMIKFRGHFLIEGDLNPDNSDVDKLFIQLVQTYNQLFEENPINASGVDAKAILSARLSKSRRLENLIAQLPGEKKNGLFGNLIALSLGLTPNFKSNFDLAEDAKLQLSKDTYDDDLDNLLAQIGDQYADLFLAAKNLSDAILLSDILRVNTEITKAPLSASMIKRYDEHHQDLTLLKALVRQQLPEKYKEIFFDQSKNGYAGYIDGGASQEEFYKFIKPILEKMDGTEELLVKLNREDLLRKQRTFDNGSIPHQIHLGELHAILRRQEDFYPFLKDNREKIEKILTFRIPYYVGPLARGNSRFAWMTRKSEETITPWNFEEVVDKGASAQSFIERMTNFDKNLPNEKVLPKHSLLYEYFTVYNELTKVKYVTEGMRKPAFLSGEQKKAIVDLLFKTNRKVTVKQLKEDYFKKIECFDSVEISGVEDRFNASLGTYHDLLKIIKDKDFLDNEENEDILEDIVLTLTLFEDREMIEERLKTYAHLFDDKVMKQLKRRRYTGWGRLSRKLINGIRDKQSGKTILDFLKSDGFANRNFMQLIHDDSLTFKEDIQKAQVSGQGDSLHEHIANLAGSPAIKKGILQTVKVVDELVKVMGRHKPENIVIEMARENQTTQKGQKNSRERMKRIEEGIKELGSQILKEHPVENTQLQNEKLYLYYLQNGRDMYVDQELDINRLSDYDVDHIVPQSFLKDDSIDNKVLTRSDKARGKSDNVPSEEVVKKMKNYWRQLLNAKLITQRKFDNLTKAERGGLSELDKAGFIKRQLVETRQITKHVAQILDSRMNTKYDENDKLIREVKVITLKSKLVSDFRKDFQFYKVREINNYHHAHDAYLNAVVGTALIKKYPKLESEFVYGDYKVYDVRKMIAKSEQEIGKATAKYFFYSNIMNFFKTEITLANGEIRKRPLIETNGETGEIVWDKGRDFATVRKVLSMPQVNIVKKTEVQTGGFSKESILPKRNSDKLIARKKDWDPKKYGGFDSPTVAYSVLVVAKVEKGKSKKLKSVKELLGITIMERSSFEKNPIDFLEAKGYKEVKKDLIIKLPKYSLFELENGRKRMLASAGELQKGNELALPSKYVNFLYLASHYEKLKGSPEDNEQKQLFVEQHKHYLDEIIEQISEFSKRVILADANLDKVLSAYNKHRDKPIREQAENIIHLFTLTNLGAPAAFKYFDTTIDRKRYTSTKEVLDATLIHQSITGLYETRIDLSQLGGDAEAAAKEAAAKEAAAKEAAAKALEAEAAAKEAAAKEAAAKEAAAKAMASNFTQFVLVDNGGTGDVTVAPSNFANGIAEWISSNSRSQAYKVTCSVRQSSAQNRKYTIKVEVPKGAWRSYLNMELTIPIFATNSDCELIVKAMQGLLKDGNPIPSAIAANSGIYGGSGGSMASNFTQFVLVDNGGTGDVTVAPSNFANGIAEWISSNSRSQAYKVTCSVRQSSAQNRKYTIKVEVPKGAWRSYLNMELTIPIFATNSDCELIVKAMQGLLKDGNPIPSAIAANSGIYGGGSGGGSGGGSGGGSMASNFTQFVLVDNGGTGDVTVAPSNFANGIAEWISSNSRSQAYKVTCSVRQSSAQNRKYTIKVEVPKGAWRSYLNMELTIPIFATNSDCELIVKAMQGLLKDGNPIPSAIAANSGIYGGSGGSMASNFTQFVLVDNGGTGDVTVAPSNFANGIAEWISSNSRSQAYKVTCSVRQSSAQNRKYTIKVEVPKGAWRSYLNMELTIPIFATNSDCELIVKAMQGLLKDGNPIPSAIAANSGIYAEAAAKEAAAKEAAAKEAAAKALEAEAAAKEAAAKEAAAKEAAAKATLNIEDEHRLHETSKEPDVSLGSTWLSDFPQAWAETGGMGLAVRQAPLIIPLKATSTPVSIKQYPMSQEARLGIKPHIQRLLDQGILVPCQSPWNTPLLPVKKPGTNDYRPVQDLREVNKRVEDIHPTVPNPYNLLSGLPPSHQWYTVLDLKDAFFCLRLHPTSQPLFAFEWRDPEMGISGQLTWTRLPQGFKNSPTLFNEALHRDLADFRIQHPDLILLQYVDDLLLAATSELDCQQGTRALLQTLGNLGYRASAKKAQICQKQVKYLGYLLKEGQRWLTEARKETVMGQPTPKTPRQLREFLGKAGFCRLFIPGFAEMAAPLYPLTKPGTLFNWGPDQQKAYQEIKQALLTAPALGLPDLTKPFELFVDEKQGYAKGVLTQKLGPWRRPVAYLSKKLDPVAAGWPPCLRMVAAIAVLTKDAGKLTMGQPLVILAPHAVEALVKQPPDRWLSNARMTHYQALLLDTDRVQFGPVVALNPATLLPLPEEGLQHNCLDILAEAHGTRPDLTDQPLPDADHTWYTDGSSLLQEGQRKAGAAVTTETEVIWAKALPAGTSAQRAELIALTQALKMAEGKKLNVYTDSRYAFATAHIHGEIYRRRGWLTSEGKEIKNKDEILALLKALFLPKRLSIIHCPGHQKGHSAEARGNRMADQAARKAAITETPDTSTLLKRTADGSEFESPKKKAKVE

SEQ ID NO: 16058 - protein, 2644 aa, synthetic construct
MPAAKRVKLDGGDKKYSIGLDIGTNSVGWAVITDEYKVPSKKFKVLGNTDRHSIKKNLIGALLFDSGETAEATRLKRTARRRYTRRKNRICYLQEIFSNEMAKVDDSFFHRLEESFLVEEDKKHERHPIFGNIVDEVAYHEKYPTIYHLRKKLVDSTDKADLRLIYLALAHMIKFRGHFLIEGDLNPDNSDVDKLFIQLVQTYNQLFEENPINASGVDAKAILSARLSKSRRLENLIAQLPGEKKNGLFGNLIALSLGLTPNFKSNFDLAEDAKLQLSKDTYDDDLDNLLAQIGDQYADLFLAAKNLSDAILLSDILRVNTEITKAPLSASMIKRYDEHHQDLTLLKALVRQQLPEKYKEIFFDQSKNGYAGYIDGGASQEEFYKFIKPILEKMDGTEELLVKLNREDLLRKQRTFDNGSIPHQIHLGELHAILRRQEDFYPFLKDNREKIEKILTFRIPYYVGPLARGNSRFAWMTRKSEETITPWNFEEVVDKGASAQSFIERMTNFDKNLPNEKVLPKHSLLYEYFTVYNELTKVKYVTEGMRKPAFLSGEQKKAIVDLLFKTNRKVTVKQLKEDYFKKIECFDSVEISGVEDRFNASLGTYHDLLKIIKDKDFLDNEENEDILEDIVLTLTLFEDREMIEERLKTYAHLFDDKVMKQLKRRRYTGWGRLSRKLINGIRDKQSGKTILDFLKSDGFANRNFMQLIHDDSLTFKEDIQKAQVSGQGDSLHEHIANLAGSPAIKKGILQTVKVVDELVKVMGRHKPENIVIEMARENQTTQKGQKNSRERMKRIEEGIKELGSQILKEHPVENTQLQNEKLYLYYLQNGRDMYVDQELDINRLSDYDVDHIVPQSFLKDDSIDNKVLTRSDKARGKSDNVPSEEVVKKMKNYWRQLLNAKLITQRKFDNLTKAERGGLSELDKAGFIKRQLVETRQITKHVAQILDSRMNTKYDENDKLIREVKVITLKSKLVSDFRKDFQFYKVREINNYHHAHDAYLNAVVGTALIKKYPKLESEFVYGDYKVYDVRKMIAKSEQEIGKATAKYFFYSNIMNFFKTEITLANGEIRKRPLIETNGETGEIVWDKGRDFATVRKVLSMPQVNIVKKTEVQTGGFSKESILPKRNSDKLIARKKDWDPKKYGGFDSPTVAYSVLVVAKVEKGKSKKLKSVKELLGITIMERSSFEKNPIDFLEAKGYKEVKKDLIIKLPKYSLFELENGRKRMLASAGELQKGNELALPSKYVNFLYLASHYEKLKGSPEDNEQKQLFVEQHKHYLDEIIEQISEFSKRVILADANLDKVLSAYNKHRDKPIREQAENIIHLFTLTNLGAPAAFKYFDTTIDRKRYTSTKEVLDATLIHQSITGLYETRIDLSQLGGDAEAAAKEAAAKEAAAKEAAAKALEAEAAAKEAAAKEAAAKEAAAKAMASNFTQFVLVDNGGTGDVTVAPSNFANGIAEWISSNSRSQAYKVTCSVRQSSAQNRKYTIKVEVPKGAWRSYLNMELTIPIFATNSDCELIVKAMQGLLKDGNPIPSAIAANSGIYGGSGGSMASNFTQFVLVDNGGTGDVTVAPSNFANGIAEWISSNSRSQAYKVTCSVRQSSAQNRKYTIKVEVPKGAWRSYLNMELTIPIFATNSDCELIVKAMQGLLKDGNPIPSAIAANSGIYGGGSGGGSGGGSGGGSMASNFTQFVLVDNGGTGDVTVAPSNFANGIAEWISSNSRSQAYKVTCSVRQSSAQNRKYTIKVEVPKGAWRSYLNMELTIPIFATNSDCELIVKAMQGLLKDGNPIPSAIAANSGIYGGSGGSMASNFTQFVLVDNGGTGDVTVAPSNFANGIAEWISSNSRSQAYKVTCSVRQSSAQNRKYTIKVEVPKGAWRSYLNMELTIPIFATNSDCELIVKAMQGLLKDGNPIPSAIAANSGIYSGGSSGGSSGSETPGTSESATPESSGGSSGGSSTLNIEDEHRLHETSKEPDVSLGSTWLSDFPQAWAETGGMGLAVRQAPLIIPLKATSTPVSIKQYPMSQEARLGIKPHIQRLLDQGILVPCQSPWNTPLLPVKKPGTNDYRPVQDLREVNKRVEDIHPTVPNPYNLLSGLPPSHQWYTVLDLKDAFFCLRLHPTSQPLFAFEWRDPEMGISGQLTWTRLPQGFKNSPTLFNEALHRDLADFRIQHPDLILLQYVDDLLLAATSELDCQQGTRALLQTLGNLGYRASAKKAQICQKQVKYLGYLLKEGQRWLTEARKETVMGQPTPKTPRQLREFLGKAGFCRLFIPGFAEMAAPLYPLTKPGTLFNWGPDQQKAYQEIKQALLTAPALGLPDLTKPFELFVDEKQGYAKGVLTQKLGPWRRPVAYLSKKLDPVAAGWPPCLRMVAAIAVLTKDAGKLTMGQPLVILAPHAVEALVKQPPDRWLSNARMTHYQALLLDTDRVQFGPVVALNPATLLPLPEEGLQHNCLDILAEAHGTRPDLTDQPLPDADHTWYTDGSSLLQEGQRKAGAAVTTETEVIWAKALPAGTSAQRAELIALTQALKMAEGKKLNVYTDSRYAFATAHIHGEIYRRRGWLTSEGKEIKNKDEILALLKALFLPKRLSIIHCPGHQKGHSAEARGNRMADQAARKAAITETPDTSTLLKRTADGSEFESPKKKAKVE

SEQ ID NO: 16059 - protein, 2629 aa, synthetic construct
MPAAKRVKLDGGDKKYSIGLDIGTNSVGWAVITDEYKVPSKKFKVLGNTDRHSIKKNLIGALLFDSGETAEATRLKRTARRRYTRRKNRICYLQEIFSNEMAKVDDSFFHRLEESFLVEEDKKHERHPIFGNIVDEVAYHEKYPTIYHLRKKLVDSTDKADLRLIYLALAHMIKFRGHFLIEGDLNPDNSDVDKLFIQLVQTYNQLFEENPINASGVDAKAILSARLSKSRRLENLIAQLPGEKKNGLFGNLIALSLGLTPNFKSNFDLAEDAKLQLSKDTYDDDLDNLLAQIGDQYADLFLAAKNLSDAILLSDILRVNTEITKAPLSASMIKRYDEHHQDLTLLKALVRQQLPEKYKEIFFDQSKNGYAGYIDGGASQEEFYKFIKPILEKMDGTEELLVKLNREDLLRKQRTFDNGSIPHQIHLGELHAILRRQEDFYPFLKDNREKIEKILTFRIPYYVGPLARGNSRFAWMTRKSEETITPWNFEEVVDKGASAQSFIERMTNFDKNLPNEKVLPKHSLLYEYFTVYNELTKVKYVTEGMRKPAFLSGEQKKAIVDLLFKTNRKVTVKQLKEDYFKKIECFDSVEISGVEDRFNASLGTYHDLLKIIKDKDFLDNEENEDILEDIVLTLTLFEDREMIEERLKTYAHLFDDKVMKQLKRRRYTGWGRLSRKLINGIRDKQSGKTILDFLKSDGFANRNFMQLIHDDSLTFKEDIQKAQVSGQGDSLHEHIANLAGSPAIKKGILQTVKVVDELVKVMGRHKPENIVIEMARENQTTQKGQKNSRERMKRIEEGIKELGSQILKEHPVENTQLQNEKLYLYYLQNGRDMYVDQELDINRLSDYDVDHIVPQSFLKDDSIDNKVLTRSDKARGKSDNVPSEEVVKKMKNYWRQLLNAKLITQRKFDNLTKAERGGLSELDKAGFIKRQLVETRQITKHVAQILDSRMNTKYDENDKLIREVKVITLKSKLVSDFRKDFQFYKVREINNYHHAHDAYLNAVVGTALIKKYPKLESEFVYGDYKVYDVRKMIAKSEQEIGKATAKYFFYSNIMNFFKTEITLANGEIRKRPLIETNGETGEIVWDKGRDFATVRKVLSMPQVNIVKKTEVQTGGFSKESILPKRNSDKLIARKKDWDPKKYGGFDSPTVAYSVLVVAKVEKGKSKKLKSVKELLGITIMERSSFEKNPIDFLEAKGYKEVKKDLIIKLPKYSLFELENGRKRMLASAGELQKGNELALPSKYVNFLYLASHYEKLKGSPEDNEQKQLFVEQHKHYLDEIIEQISEFSKRVILADANLDKVLSAYNKHRDKPIREQAENIIHLFTLTNLGAPAAFKYFDTTIDRKRYTSTKEVLDATLIHQSITGLYETRIDLSQLGGDAEAAAKEAAAKEAAAKEAAAKALEAEAAAKEAAAKEAAAKEAAAKAMASNFTQFVLVDNGGTGDVTVAPSNFANGIAEWISSNSRSQAYKVTCSVRQSSAQNRKYTIKVEVPKGAWRSYLNMELTIPIFATNSDCELIVKAMQGLLKDGNPIPSAIAANSGIYGGSGGSMASNFTQFVLVDNGGTGDVTVAPSNFANGIAEWISSNSRSQAYKVTCSVRQSSAQNRKYTIKVEVPKGAWRSYLNMELTIPIFATNSDCELIVKAMQGLLKDGNPIPSAIAANSGIYGGGSGGGSGGGSGGGSMASNFTQFVLVDNGGTGDVTVAPSNFANGIAEWISSNSRSQAYKVTCSVRQSSAQNRKYTIKVEVPKGAWRSYLNMELTIPIFATNSDCELIVKAMQGLLKDGNPIPSAIAANSGIYGGSGGSMASNFTQFVLVDNGGTGDVTVAPSNFANGIAEWISSNSRSQAYKVTCSVRQSSAQNRKYTIKVEVPKGAWRSYLNMELTIPIFATNSDCELIVKAMQGLLKDGNPIPSAIAANSGIYGSSGSSGSSGSSGSSGSSTLNIEDEHRLHETSKEPDVSLGSTWLSDFPQAWAETGGMGLAVRQAPLIIPLKATSTPVSIKQYPMSQEARLGIKPHIQRLLDQGILVPCQSPWNTPLLPVKKPGTNDYRPVQDLREVNKRVEDIHPTVPNPYNLLSGLPPSHQWYTVLDLKDAFFCLRLHPTSQPLFAFEWRDPEMGISGQLTWTRLPQGFKNSPTLFNEALHRDLADFRIQHPDLILLQYVDDLLLAATSELDCQQGTRALLQTLGNLGYRASAKKAQICQKQVKYLGYLLKEGQRWLTEARKETVMGQPTPKTPRQLREFLGKAGFCRLFIPGFAEMAAPLYPLTKPGTLFNWGPDQQKAYQEIKQALLTAPALGLPDLTKPFELFVDEKQGYAKGVLTQKLGPWRRPVAYLSKKLDPVAAGWPPCLRMVAAIAVLTKDAGKLTMGQPLVILAPHAVEALVKQPPDRWLSNARMTHYQALLLDTDRVQFGPVVALNPATLLPLPEEGLQHNCLDILAEAHGTRPDLTDQPLPDADHTWYTDGSSLLQEGQRKAGAAVTTETEVIWAKALPAGTSAQRAELIALTQALKMAEGKKLNVYTDSRYAFATAHIHGEIYRRRGWLTSEGKEIKNKDEILALLKALFLPKRLSIIHCPGHQKGHSAEARGNRMADQAARKAAITETPDTSTLLKRTADGSEFESPKKKAKVE

SEQ ID NO: 16060 - protein, 2622 aa, synthetic construct
MPAAKRVKLDGGDKKYSIGLDIGTNSVGWAVITDEYKVPSKKFKVLGNTDRHSIKKNLIGALLFDSGETAEATRLKRTARRRYTRRKNRICYLQEIFSNEMAKVDDSFFHRLEESFLVEEDKKHERHPIFGNIVDEVAYHEKYPTIYHLRKKLVDSTDKADLRLIYLALAHMIKFRGHFLIEGDLNPDNSDVDKLFIQLVQTYNQLFEENPINASGVDAKAILSARLSKSRRLENLIAQLPGEKKNGLFGNLIALSLGLTPNFKSNFDLAEDAKLQLSKDTYDDDLDNLLAQIGDQYADLFLAAKNLSDAILLSDILRVNTEITKAPLSASMIKRYDEHHQDLTLLKALVRQQLPEKYKEIFFDQSKNGYAGYIDGGASQEEFYKFIKPILEKMDGTEELLVKLNREDLLRKQRTFDNGSIPHQIHLGELHAILRRQEDFYPFLKDNREKIEKILTFRIPYYVGPLARGNSRFAWMTRKSEETITPWNFEEVVDKGASAQSFIERMTNFDKNLPNEKVLPKHSLLYEYFTVYNELTKVKYVTEGMRKPAFLSGEQKKAIVDLLFKTNRKVTVKQLKEDYFKKIECFDSVEISGVEDRFNASLGTYHDLLKIIKDKDFLDNEENEDILEDIVLTLTLFEDREMIEERLKTYAHLFDDKVMKQLKRRRYTGWGRLSRKLINGIRDKQSGKTILDFLKSDGFANRNFMQLIHDDSLTFKEDIQKAQVSGQGDSLHEHIANLAGSPAIKKGILQTVKVVDELVKVMGRHKPENIVIEMARENQTTQKGQKNSRERMKRIEEGIKELGSQILKEHPVENTQLQNEKLYLYYLQNGRDMYVDQELDINRLSDYDVDHIVPQSFLKDDSIDNKVLTRSDKARGKSDNVPSEEVVKKMKNYWRQLLNAKLITQRKFDNLTKAERGGLSELDKAGFIKRQLVETRQITKHVAQILDSRMNTKYDENDKLIREVKVITLKSKLVSDFRKDFQFYKVREINNYHHAHDAYLNAVVGTALIKKYPKLESEFVYGDYKVYDVRKMIAKSEQEIGKATAKYFFYSNIMNFFKTEITLANGEIRKRPLIETNGETGEIVWDKGRDFATVRKVLSMPQVNIVKKTEVQTGGFSKESILPKRNSDKLIARKKDWDPKKYGGFDSPTVAYSVLVVAKVEKGKSKKLKSVKELLGITIMERSSFEKNPIDFLEAKGYKEVKKDLIIKLPKYSLFELENGRKRMLASAGELQKGNELALPSKYVNFLYLASHYEKLKGSPEDNEQKQLFVEQHKHYLDEIIEQISEFSKRVILADANLDKVLSAYNKHRDKPIREQAENIIHLFTLTNLGAPAAFKYFDTTIDRKRYTSTKEVLDATLIHQSITGLYETRIDLSQLGGDAEAAAKEAAAKEAAAKEAAAKALEAEAAAKEAAAKEAAAKEAAAKAMASNFTQFVLVDNGGTGDVTVAPSNFANGIAEWISSNSRSQAYKVTCSVRQSSAQNRKYTIKVEVPKGAWRSYLNMELTIPIFATNSDCELIVKAMQGLLKDGNPIPSAIAANSGIYGGSGGSMASNFTQFVLVDNGGTGDVTVAPSNFANGIAEWISSNSRSQAYKVTCSVRQSSAQNRKYTIKVEVPKGAWRSYLNMELTIPIFATNSDCELIVKAMQGLLKDGNPIPSAIAANSGIYGGGSGGGSGGGSGGGSMASNFTQFVLVDNGGTGDVTVAPSNFANGIAEWISSNSRSQAYKVTCSVRQSSAQNRKYTIKVEVPKGAWRSYLNMELTIPIFATNSDCELIVKAMQGLLKDGNPIPSAIAANSGIYGGSGGSMASNFTQFVLVDNGGTGDVTVAPSNFANGIAEWISSNSRSQAYKVTCSVRQSSAQNRKYTIKVEVPKGAWRSYLNMELTIPIFATNSDCELIVKAMQGLLKDGNPIPSAIAANSGIYGSSGGGEAAAKTLNIEDEHRLHETSKEPDVSLGSTWLSDFPQAWAETGGMGLAVRQAPLIIPLKATSTPVSIKQYPMSQEARLGIKPHIQRLLDQGILVPCQSPWNTPLLPVKKPGTNDYRPVQDLREVNKRVEDIHPTVPNPYNLLSGLPPSHQWYTVLDLKDAFFCLRLHPTSQPLFAFEWRDPEMGISGQLTWTRLPQGFKNSPTLFNEALHRDLADFRIQHPDLILLQYVDDLLLAATSELDCQQGTRALLQTLGNLGYRASAKKAQICQKQVKYLGYLLKEGQRWLTEARKETVMGQPTPKTPRQLREFLGKAGFCRLFIPGFAEMAAPLYPLTKPGTLFNWGPDQQKAYQEIKQALLTAPALGLPDLTKPFELFVDEKQGYAKGVLTQKLGPWRRPVAYLSKKLDPVAAGWPPCLRMVAAIAVLTKDAGKLTMGQPLVILAPHAVEALVKQPPDRWLSNARMTHYQALLLDTDRVQFGPVVALNPATLLPLPEEGLQHNCLDILAEAHGTRPDLTDQPLPDADHTWYTDGSSLLQEGQRKAGAAVTTETEVIWAKALPAGTSAQRAELIALTQALKMAEGKKLNVYTDSRYAFATAHIHGEIYRRRGWLTSEGKEIKNKDEILALLKALFLPKRLSIIHCPGHQKGHSAEARGNRMADQAARKAAITETPDTSTLLKRTADGSEFESPKKKAKVE

SEQ ID NO: 16061 - protein, 2265 aa, synthetic construct
MPAAKRVKLDGGDKKYSIGLDIGTNSVGWAVITDEYKVPSKKFKVLGNTDRHSIKKNLIGALLFDSGETAEATRLKRTARRRYTRRKNRICYLQEIFSNEMAKVDDSFFHRLEESFLVEEDKKHERHPIFGNIVDEVAYHEKYPTIYHLRKKLVDSTDKADLRLIYLALAHMIKFRGHFLIEGDLNPDNSDVDKLFIQLVQTYNQLFEENPINASGVDAKAILSARLSKSRRLENLIAQLPGEKKNGLFGNLIALSLGLTPNFKSNFDLAEDAKLQLSKDTYDDDLDNLLAQIGDQYADLFLAAKNLSDAILLSDILRVNTEITKAPLSASMIKRYDEHHQDLTLLKALVRQQLPEKYKEIFFDQSKNGYAGYIDGGASQEEFYKFIKPILEKMDGTEELLVKLNREDLLRKQRTFDNGSIPHQIHLGELHAILRRQEDFYPFLKDNREKIEKILTFRIPYYVGPLARGNSRFAWMTRKSEETITPWNFEEVVDKGASAQSFIERMTNFDKNLPNEKVLPKHSLLYEYFTVYNELTKVKYVTEGMRKPAFLSGEQKKAIVDLLFKTNRKVTVKQLKEDYFKKIECFDSVEISGVEDRFNASLGTYHDLLKIIKDKDFLDNEENEDILEDIVLTLTLFEDREMIEERLKTYAHLFDDKVMKQLKRRRYTGWGRLSRKLINGIRDKQSGKTILDFLKSDGFANRNFMQLIHDDSLTFKEDIQKAQVSGQGDSLHEHIANLAGSPAIKKGILQTVKVVDELVKVMGRHKPENIVIEMARENQTTQKGQKNSRERMKRIEEGIKELGSQILKEHPVENTQLQNEKLYLYYLQNGRDMYVDQELDINRLSDYDVDHIVPQSFLKDDSIDNKVLTRSDKARGKSDNVPSEEVVKKMKNYWRQLLNAKLITQRKFDNLTKAERGGLSELDKAGFIKRQLVETRQITKHVAQILDSRMNTKYDENDKLIREVKVITLKSKLVSDFRKDFQFYKVREINNYHHAHDAYLNAVVGTALIKKYPKLESEFVYGDYKVYDVRKMIAKSEQEIGKATAKYFFYSNIMNFFKTEITLANGEIRKRPLIETNGETGEIVWDKGRDFATVRKVLSMPQVNIVKKTEVQTGGFSKESILPKRNSDKLIARKKDWDPKKYGGFDSPTVAYSVLVVAKVEKGKSKKLKSVKELLGITIMERSSFEKNPIDFLEAKGYKEVKKDLIIKLPKYSLFELENGRKRMLASAGELQKGNELALPSKYVNFLYLASHYEKLKGSPEDNEQKQLFVEQHKHYLDEIIEQISEFSKRVILADANLDKVLSAYNKHRDKPIREQAENIIHLFTLTNLGAPAAFKYFDTTIDRKRYTSTKEVLDATLIHQSITGLYETRIDLSQLGGDSGGSSGGSSGSETPGTSESATPESSGGSSGGSSMASNFTQFVLVDNGGTGDVTVAPSNFANGIAEWISSNSRSQAYKVTCSVRQSSAQNRKYTIKVEVPKGAWRSYLNMELTIPIFATNSDCELIVKAMQGLLKDGNPIPSAIAANSGIYAEAAAKEAAAKEAAAKEAAAKALEAEAAAKEAAAKEAAAKEAAAKATLNIEDEHRLHETSKEPDVSLGSTWLSDFPQAWAETGGMGLAVRQAPLIIPLKATSTPVSIKQYPMSQEARLGIKPHIQRLLDQGILVPCQSPWNTPLLPVKKPGTNDYRPVQDLREVNKRVEDIHPTVPNPYNLLSGLPPSHQWYTVLDLKDAFFCLRLHPTSQPLFAFEWRDPEMGISGQLTWTRLPQGFKNSPTLFNEALHRDLADFRIQHPDLILLQYVDDLLLAATSELDCQQGTRALLQTLGNLGYRASAKKAQICQKQVKYLGYLLKEGQRWLTEARKETVMGQPTPKTPRQLREFLGKAGFCRLFIPGFAEMAAPLYPLTKPGTLFNWGPDQQKAYQEIKQALLTAPALGLPDLTKPFELFVDEKQGYAKGVLTQKLGPWRRPVAYLSKKLDPVAAGWPPCLRMVAAIAVLTKDAGKLTMGQPLVILAPHAVEALVKQPPDRWLSNARMTHYQALLLDTDRVQFGPVVALNPATLLPLPEEGLQHNCLDILAEAHGTRPDLTDQPLPDADHTWYTDGSSLLQEGQRKAGAAVTTETEVIWAKALPAGTSAQRAELIALTQALKMAEGKKLNVYTDSRYAFATAHIHGEIYRRRGWLTSEGKEIKNKDEILALLKALFLPKRLSIIHCPGHQKGHSAEARGNRMADQAARKAAITETPDTSTLLKRTADGSEFESPKKKAKVE

SEQ ID NO: 16062 - protein, 2252 aa, synthetic construct
MPAAKRVKLDGGDKKYSIGLDIGTNSVGWAVITDEYKVPSKKFKVLGNTDRHSIKKNLIGALLFDSGETAEATRLKRTARRRYTRRKNRICYLQEIFSNEMAKVDDSFFHRLEESFLVEEDKKHERHPIFGNIVDEVAYHEKYPTIYHLRKKLVDSTDKADLRLIYLALAHMIKFRGHFLIEGDLNPDNSDVDKLFIQLVQTYNQLFEENPINASGVDAKAILSARLSKSRRLENLIAQLPGEKKNGLFGNLIALSLGLTPNFKSNFDLAEDAKLQLSKDTYDDDLDNLLAQIGDQYADLFLAAKNLSDAILLSDILRVNTEITKAPLSASMIKRYDEHHQDLTLLKALVRQQLPEKYKEIFFDQSKNGYAGYIDGGASQEEFYKFIKPILEKMDGTEELLVKLNREDLLRKQRTFDNGSIPHQIHLGELHAILRRQEDFYPFLKDNREKIEKILTFRIPYYVGPLARGNSRFAWMTRKSEETITPWNFEEVVDKGASAQSFIERMTNFDKNLPNEKVLPKHSLLYEYFTVYNELTKVKYVTEGMRKPAFLSGEQKKAIVDLLFKTNRKVTVKQLKEDYFKKIECFDSVEISGVEDRFNASLGTYHDLLKIIKDKDFLDNEENEDILEDIVLTLTLFEDREMIEERLKTYAHLFDDKVMKQLKRRRYTGWGRLSRKLINGIRDKQSGKTILDFLKSDGFANRNFMQLIHDDSLTFKEDIQKAQVSGQGDSLHEHIANLAGSPAIKKGILQTVKVVDELVKVMGRHKPENIVIEMARENQTTQKGQKNSRERMKRIEEGIKELGSQILKEHPVENTQLQNEKLYLYYLQNGRDMYVDQELDINRLSDYDVDHIVPQSFLKDDSIDNKVLTRSDKARGKSDNVPSEEVVKKMKNYWRQLLNAKLITQRKFDNLTKAERGGLSELDKAGFIKRQLVETRQITKHVAQILDSRMNTKYDENDKLIREVKVITLKSKLVSDFRKDFQFYKVREINNYHHAHDAYLNAVVGTALIKKYPKLESEFVYGDYKVYDVRKMIAKSEQEIGKATAKYFFYSNIMNFFKTEITLANGEIRKRPLIETNGETGEIVWDKGRDFATVRKVLSMPQVNIVKKTEVQTGGFSKESILPKRNSDKLIARKKDWDPKKYGGFDSPTVAYSVLVVAKVEKGKSKKLKSVKELLGITIMERSSFEKNPIDFLEAKGYKEVKKDLIIKLPKYSLFELENGRKRMLASAGELQKGNELALPSKYVNFLYLASHYEKLKGSPEDNEQKQLFVEQHKHYLDEIIEQISEFSKRVILADANLDKVLSAYNKHRDKPIREQAENIIHLFTLTNLGAPAAFKYFDTTIDRKRYTSTKEVLDATLIHQSITGLYETRIDLSQLGGDSGGSSGGSSGSETPGTSESATPESSGGSSGGSSMASNFTQFVLVDNGGTGDVTVAPSNFANGIAEWISSNSRSQAYKVTCSVRQSSAQNRKYTIKVEVPKGAWRSYLNMELTIPIFATNSDCELIVKAMQGLLKDGNPIPSAIAANSGIYSGGSSGGSSGSETPGTSESATPESSGGSSGGSSTLNIEDEHRLHETSKEPDVSLGSTWLSDFPQAWAETGGMGLAVRQAPLIIPLKATSTPVSIKQYPMSQEARLGIKPHIQRLLDQGILVPCQSPWNTPLLPVKKPGTNDYRPVQDLREVNKRVEDIHPTVPNPYNLLSGLPPSHQWYTVLDLKDAFFCLRLHPTSQPLFAFEWRDPEMGISGQLTWTRLPQGFKNSPTLFNEALHRDLADFRIQHPDLILLQYVDDLLLAATSELDCQQGTRALLQTLGNLGYRASAKKAQICQKQVKYLGYLLKEGQRWLTEARKETVMGQPTPKTPRQLREFLGKAGFCRLFIPGFAEMAAPLYPLTKPGTLFNWGPDQQKAYQEIKQALLTAPALGLPDLTKPFELFVDEKQGYAKGVLTQKLGPWRRPVAYLSKKLDPVAAGWPPCLRMVAAIAVLTKDAGKLTMGQPLVILAPHAVEALVKQPPDRWLSNARMTHYQALLLDTDRVQFGPVVALNPATLLPLPEEGLQHNCLDILAEAHGTRPDLTDQPLPDADHTWYTDGSSLLQEGQRKAGAAVTTETEVIWAKALPAGTSAQRAELIALTQALKMAEGKKLNVYTDSRYAFATAHIHGEIYRRRGWLTSEGKEIKNKDEILALLKALFLPKRLSIIHCPGHQKGHSAEARGNRMADQAARKAAITETPDTSTLLKRTADGSEFESPKKKAKVE

SEQ ID NO: 16063 - protein, 2237 aa, synthetic construct
MPAAKRVKLDGGDKKYSIGLDIGTNSVGWAVITDEYKVPSKKFKVLGNTDRHSIKKNLIGALLFDSGETAEATRLKRTARRRYTRRKNRICYLQEIFSNEMAKVDDSFFHRLEESFLVEEDKKHERHPIFGNIVDEVAYHEKYPTIYHLRKKLVDSTDKADLRLIYLALAHMIKFRGHFLIEGDLNPDNSDVDKLFIQLVQTYNQLFEENPINASGVDAKAILSARLSKSRRLENLIAQLPGEKKNGLFGNLIALSLGLTPNFKSNFDLAEDAKLQLSKDTYDDDLDNLLAQIGDQYADLFLAAKNLSDAILLSDILRVNTEITKAPLSASMIKRYDEHHQDLTLLKALVRQQLPEKYKEIFFDQSKNGYAGYIDGGASQEEFYKFIKPILEKMDGTEELLVKLNREDLLRKQRTFDNGSIPHQIHLGELHAILRRQEDFYPFLKDNREKIEKILTFRIPYYVGPLARGNSRFAWMTRKSEETITPWNFEEVVDKGASAQSFIERMTNFDKNLPNEKVLPKHSLLYEYFTVYNELTKVKYVTEGMRKPAFLSGEQKKAIVDLLFKTNRKVTVKQLKEDYFKKIECFDSVEISGVEDRFNASLGTYHDLLKIIKDKDFLDNEENEDILEDIVLTLTLFEDREMIEERLKTYAHLFDDKVMKQLKRRRYTGWGRLSRKLINGIRDKQSGKTILDFLKSDGFANRNFMQLIHDDSLTFKEDIQKAQVSGQGDSLHEHIANLAGSPAIKKGILQTVKVVDELVKVMGRHKPENIVIEMARENQTTQKGQKNSRERMKRIEEGIKELGSQILKEHPVENTQLQNEKLYLYYLQNGRDMYVDQELDINRLSDYDVDHIVPQSFLKDDSIDNKVLTRSDKARGKSDNVPSEEVVKKMKNYWRQLLNAKLITQRKFDNLTKAERGGLSELDKAGFIKRQLVETRQITKHVAQILDSRMNTKYDENDKLIREVKVITLKSKLVSDFRKDFQFYKVREINNYHHAHDAYLNAVVGTALIKKYPKLESEFVYGDYKVYDVRKMIAKSEQEIGKATAKYFFYSNIMNFFKTEITLANGEIRKRPLIETNGETGEIVWDKGRDFATVRKVLSMPQVNIVKKTEVQTGGFSKESILPKRNSDKLIARKKDWDPKKYGGFDSPTVAYSVLVVAKVEKGKSKKLKSVKELLGITIMERSSFEKNPIDFLEAKGYKEVKKDLIIKLPKYSLFELENGRKRMLASAGELQKGNELALPSKYVNFLYLASHYEKLKGSPEDNEQKQLFVEQHKHYLDEIIEQISEFSKRVILADANLDKVLSAYNKHRDKPIREQAENIIHLFTLTNLGAPAAFKYFDTTIDRKRYTSTKEVLDATLIHQSITGLYETRIDLSQLGGDSGGSSGGSSGSETPGTSESATPESSGGSSGGSSMASNFTQFVLVDNGGTGDVTVAPSNFANGIAEWISSNSRSQAYKVTCSVRQSSAQNRKYTIKVEVPKGAWRSYLNMELTIPIFATNSDCELIVKAMQGLLKDGNPIPSAIAANSGIYGSSGSSGSSGSSGSSGSSTLNIEDEHRLHETSKEPDVSLGSTWLSDFPQAWAETGGMGLAVRQAPLIIPLKATSTPVSIKQYPMSQEARLGIKPHIQRLLDQGILVPCQSPWNTPLLPVKKPGTNDYRPVQDLREVNKRVEDIHPTVPNPYNLLSGLPPSHQWYTVLDLKDAFFCLRLHPTSQPLFAFEWRDPEMGISGQLTWTRLPQGFKNSPTLFNEALHRDLADFRIQHPDLILLQYVDDLLLAATSELDCQQGTRALLQTLGNLGYRASAKKAQICQKQVKYLGYLLKEGQRWLTEARKETVMGQPTPKTPRQLREFLGKAGFCRLFIPGFAEMAAPLYPLTKPGTLFNWGPDQQKAYQEIKQALLTAPALGLPDLTKPFELFVDEKQGYAKGVLTQKLGPWRRPVAYLSKKLDPVAAGWPPCLRMVAAIAVLTKDAGKLTMGQPLVILAPHAVEALVKQPPDRWLSNARMTHYQALLLDTDRVQFGPVVALNPATLLPLPEEGLQHNCLDILAEAHGTRPDLTDQPLPDADHTWYTDGSSLLQEGQRKAGAAVTTETEVIWAKALPAGTSAQRAELIALTQALKMAEGKKLNVYTDSRYAFATAHIHGEIYRRRGWLTSEGKEIKNKDEILALLKALFLPKRLSIIHCPGHQKGHSAEARGNRMADQAARKAAITETPDTSTLLKRTADGSEFESPKKKAKVE

SEQ ID NO: 16064 - protein, 2230 aa, synthetic construct
MPAAKRVKLDGGDKKYSIGLDIGTNSVGWAVITDEYKVPSKKFKVLGNTDRHSIKKNLIGALLFDSGETAEATRLKRTARRRYTRRKNRICYLQEIFSNEMAKVDDSFFHRLEESFLVEEDKKHERHPIFGNIVDEVAYHEKYPTIYHLRKKLVDSTDKADLRLIYLALAHMIKFRGHFLIEGDLNPDNSDVDKLFIQLVQTYNQLFEENPINASGVDAKAILSARLSKSRRLENLIAQLPGEKKNGLFGNLIALSLGLTPNFKSNFDLAEDAKLQLSKDTYDDDLDNLLAQIGDQYADLFLAAKNLSDAILLSDILRVNTEITKAPLSASMIKRYDEHHQDLTLLKALVRQQLPEKYKEIFFDQSKNGYAGYIDGGASQEEFYKFIKPILEKMDGTEELLVKLNREDLLRKQRTFDNGSIPHQIHLGELHAILRRQEDFYPFLKDNREKIEKILTFRIPYYVGPLARGNSRFAWMTRKSEETITPWNFEEVVDKGASAQSFIERMTNFDKNLPNEKVLPKHSLLYEYFTVYNELTKVKYVTEGMRKPAFLSGEQKKAIVDLLFKTNRKVTVKQLKEDYFKKIECFDSVEISGVEDRFNASLGTYHDLLKIIKDKDFLDNEENEDILEDIVLTLTLFEDREMIEERLKTYAHLFDDKVMKQLKRRRYTGWGRLSRKLINGIRDKQSGKTILDFLKSDGFANRNFMQLIHDDSLTFKEDIQKAQVSGQGDSLHEHIANLAGSPAIKKGILQTVKVVDELVKVMGRHKPENIVIEMARENQTTQKGQKNSRERMKRIEEGIKELGSQILKEHPVENTQLQNEKLYLYYLQNGRDMYVDQELDINRLSDYDVDHIVPQSFLKDDSIDNKVLTRSDKARGKSDNVPSEEVVKKMKNYWRQLLNAKLITQRKFDNLTKAERGGLSELDKAGFIKRQLVETRQITKHVAQILDSRMNTKYDENDKLIREVKVITLKSKLVSDFRKDFQFYKVREINNYHHAHDAYLNAVVGTALIKKYPKLESEFVYGDYKVYDVRKMIAKSEQEIGKATAKYFFYSNIMNFFKTEITLANGEIRKRPLIETNGETGEIVWDKGRDFATVRKVLSMPQVNIVKKTEVQTGGFSKESILPKRNSDKLIARKKDWDPKKYGGFDSPTVAYSVLVVAKVEKGKSKKLKSVKELLGITIMERSSFEKNPIDFLEAKGYKEVKKDLIIKLPKYSLFELENGRKRMLASAGELQKGNELALPSKYVNFLYLASHYEKLKGSPEDNEQKQLFVEQHKHYLDEIIEQISEFSKRVILADANLDKVLSAYNKHRDKPIREQAENIIHLFTLTNLGAPAAFKYFDTTIDRKRYTSTKEVLDATLIHQSITGLYETRIDLSQLGGDSGGSSGGSSGSETPGTSESATPESSGGSSGGSSMASNFTQFVLVDNGGTGDVTVAPSNFANGIAEWISSNSRSQAYKVTCSVRQSSAQNRKYTIKVEVPKGAWRSYLNMELTIPIFATNSDCELIVKAMQGLLKDGNPIPSAIAANSGIYGSSGGGEAAAKTLNIEDEHRLHETSKEPDVSLGSTWLSDFPQAWAETGGMGLAVRQAPLIIPLKATSTPVSIKQYPMSQEARLGIKPHIQRLLDQGILVPCQSPWNTPLLPVKKPGTNDYRPVQDLREVNKRVEDIHPTVPNPYNLLSGLPPSHQWYTVLDLKDAFFCLRLHPTSQPLFAFEWRDPEMGISGQLTWTRLPQGFKNSPTLFNEALHRDLADFRIQHPDLILLQYVDDLLLAATSELDCQQGTRALLQTLGNLGYRASAKKAQICQKQVKYLGYLLKEGQRWLTEARKETVMGQPTPKTPRQLREFLGKAGFCRLFIPGFAEMAAPLYPLTKPGTLFNWGPDQQKAYQEIKQALLTAPALGLPDLTKPFELFVDEKQGYAKGVLTQKLGPWRRPVAYLSKKLDPVAAGWPPCLRMVAAIAVLTKDAGKLTMGQPLVILAPHAVEALVKQPPDRWLSNARMTHYQALLLDTDRVQFGPVVALNPATLLPLPEEGLQHNCLDILAEAHGTRPDLTDQPLPDADHTWYTDGSSLLQEGQRKAGAAVTTETEVIWAKALPAGTSAQRAELIALTQALKMAEGKKLNVYTDSRYAFATAHIHGEIYRRRGWLTSEGKEIKNKDEILALLKALFLPKRLSIIHCPGHQKGHSAEARGNRMADQAARKAAITETPDTSTLLKRTADGSEFESPKKKAKVE

SEQ ID NO: 16065 - protein, 2388 aa, synthetic construct
MPAAKRVKLDGGDKKYSIGLDIGTNSVGWAVITDEYKVPSKKFKVLGNTDRHSIKKNLIGALLFDSGETAEATRLKRTARRRYTRRKNRICYLQEIFSNEMAKVDDSFFHRLEESFLVEEDKKHERHPIFGNIVDEVAYHEKYPTIYHLRKKLVDSTDKADLRLIYLALAHMIKFRGHFLIEGDLNPDNSDVDKLFIQLVQTYNQLFEENPINASGVDAKAILSARLSKSRRLENLIAQLPGEKKNGLFGNLIALSLGLTPNFKSNFDLAEDAKLQLSKDTYDDDLDNLLAQIGDQYADLFLAAKNLSDAILLSDILRVNTEITKAPLSASMIKRYDEHHQDLTLLKALVRQQLPEKYKEIFFDQSKNGYAGYIDGGASQEEFYKFIKPILEKMDGTEELLVKLNREDLLRKQRTFDNGSIPHQIHLGELHAILRRQEDFYPFLKDNREKIEKILTFRIPYYVGPLARGNSRFAWMTRKSEETITPWNFEEVVDKGASAQSFIERMTNFDKNLPNEKVLPKHSLLYEYFTVYNELTKVKYVTEGMRKPAFLSGEQKKAIVDLLFKTNRKVTVKQLKEDYFKKIECFDSVEISGVEDRFNASLGTYHDLLKIIKDKDFLDNEENEDILEDIVLTLTLFEDREMIEERLKTYAHLFDDKVMKQLKRRRYTGWGRLSRKLINGIRDKQSGKTILDFLKSDGFANRNFMQLIHDDSLTFKEDIQKAQVSGQGDSLHEHIANLAGSPAIKKGILQTVKVVDELVKVMGRHKPENIVIEMARENQTTQKGQKNSRERMKRIEEGIKELGSQILKEHPVENTQLQNEKLYLYYLQNGRDMYVDQELDINRLSDYDVDHIVPQSFLKDDSIDNKVLTRSDKARGKSDNVPSEEVVKKMKNYWRQLLNAKLITQRKFDNLTKAERGGLSELDKAGFIKRQLVETRQITKHVAQILDSRMNTKYDENDKLIREVKVITLKSKLVSDFRKDFQFYKVREINNYHHAHDAYLNAVVGTALIKKYPKLESEFVYGDYKVYDVRKMIAKSEQEIGKATAKYFFYSNIMNFFKTEITLANGEIRKRPLIETNGETGEIVWDKGRDFATVRKVLSMPQVNIVKKTEVQTGGFSKESILPKRNSDKLIARKKDWDPKKYGGFDSPTVAYSVLVVAKVEKGKSKKLKSVKELLGITIMERSSFEKNPIDFLEAKGYKEVKKDLIIKLPKYSLFELENGRKRMLASAGELQKGNELALPSKYVNFLYLASHYEKLKGSPEDNEQKQLFVEQHKHYLDEIIEQISEFSKRVILADANLDKVLSAYNKHRDKPIREQAENIIHLFTLTNLGAPAAFKYFDTTIDRKRYTSTKEVLDATLIHQSITGLYETRIDLSQLGGDSGGSSGGSSGSETPGTSESATPESSGGSSGGSSMASNFTQFVLVDNGGTGDVTVAPSNFANGIAEWISSNSRSQAYKVTCSVRQSSAQNRKYTIKVEVPKGAWRSYLNMELTIPIFATNSDCELIVKAMQGLLKDGNPIPSAIAANSGIYGGSGGSMASNFTQFVLVDNGGTGDVTVAPSNFANGIAEWISSNSRSQAYKVTCSVRQSSAQNRKYTIKVEVPKGAWRSYLNMELTIPIFATNSDCELIVKAMQGLLKDGNPIPSAIAANSGIYAEAAAKEAAAKEAAAKEAAAKALEAEAAAKEAAAKEAAAKEAAAKATLNIEDEHRLHETSKEPDVSLGSTWLSDFPQAWAETGGMGLAVRQAPLIIPLKATSTPVSIKQYPMSQEARLGIKPHIQRLLDQGILVPCQSPWNTPLLPVKKPGTNDYRPVQDLREVNKRVEDIHPTVPNPYNLLSGLPPSHQWYTVLDLKDAFFCLRLHPTSQPLFAFEWRDPEMGISGQLTWTRLPQGFKNSPTLFNEALHRDLADFRIQHPDLILLQYVDDLLLAATSELDCQQGTRALLQTLGNLGYRASAKKAQICQKQVKYLGYLLKEGQRWLTEARKETVMGQPTPKTPRQLREFLGKAGFCRLFIPGFAEMAAPLYPLTKPGTLFNWGPDQQKAYQEIKQALLTAPALGLPDLTKPFELFVDEKQGYAKGVLTQKLGPWRRPVAYLSKKLDPVAAGWPPCLRMVAAIAVLTKDAGKLTMGQPLVILAPHAVEALVKQPPDRWLSNARMTHYQALLLDTDRVQFGPVVALNPATLLPLPEEGLQHNCLDILAEAHGTRPDLTDQPLPDADHTWYTDGSSLLQEGQRKAGAAVTTETEVIWAKALPAGTSAQRAELIALTQALKMAEGKKLNVYTDSRYAFATAHIHGEIYRRRGWLTSEGKEIKNKDEILALLKALFLPKRLSIIHCPGHQKGHSAEARGNRMADQAARKAAITETPDTSTLLKRTADGSEFESPKKKAKVE

SEQ ID NO: 16066 - protein, 2375 aa, synthetic construct
MPAAKRVKLDGGDKKYSIGLDIGTNSVGWAVITDEYKVPSKKFKVLGNTDRHSIKKNLIGALLFDSGETAEATRLKRTARRRYTRRKNRICYLQEIFSNEMAKVDDSFFHRLEESFLVEEDKKHERHPIFGNIVDEVAYHEKYPTIYHLRKKLVDSTDKADLRLIYLALAHMIKFRGHFLIEGDLNPDNSDVDKLFIQLVQTYNQLFEENPINASGVDAKAILSARLSKSRRLENLIAQLPGEKKNGLFGNLIALSLGLTPNFKSNFDLAEDAKLQLSKDTYDDDLDNLLAQIGDQYADLFLAAKNLSDAILLSDILRVNTEITKAPLSASMIKRYDEHHQDLTLLKALVRQQLPEKYKEIFFDQSKNGYAGYIDGGASQEEFYKFIKPILEKMDGTEELLVKLNREDLLRKQRTFDNGSIPHQIHLGELHAILRRQEDFYPFLKDNREKIEKILTFRIPYYVGPLARGNSRFAWMTRKSEETITPWNFEEVVDKGASAQSFIERMTNFDKNLPNEKVLPKHSLLYEYFTVYNELTKVKYVTEGMRKPAFLSGEQKKAIVDLLFKTNRKVTVKQLKEDYFKKIECFDSVEISGVEDRFNASLGTYHDLLKIIKDKDFLDNEENEDILEDIVLTLTLFEDREMIEERLKTYAHLFDDKVMKQLKRRRYTGWGRLSRKLINGIRDKQSGKTILDFLKSDGFANRNFMQLIHDDSLTFKEDIQKAQVSGQGDSLHEHIANLAGSPAIKKGILQTVKVVDELVKVMGRHKPENIVIEMARENQTTQKGQKNSRERMKRIEEGIKELGSQILKEHPVENTQLQNEKLYLYYLQNGRDMYVDQELDINRLSDYDVDHIVPQSFLKDDSIDNKVLTRSDKARGKSDNVPSEEVVKKMKNYWRQLLNAKLITQRKFDNLTKAERGGLSELDKAGFIKRQLVETRQITKHVAQILDSRMNTKYDENDKLIREVKVITLKSKLVSDFRKDFQFYKVREINNYHHAHDAYLNAVVGTALIKKYPKLESEFVYGDYKVYDVRKMIAKSEQEIGKATAKYFFYSNIMNFFKTEITLANGEIRKRPLIETNGETGEIVWDKGRDFATVRKVLSMPQVNIVKKTEVQTGGFSKESILPKRNSDKLIARKKDWDPKKYGGFDSPTVAYSVLVVAKVEKGKSKKLKSVKELLGITIMERSSFEKNPIDFLEAKGYKEVKKDLIIKLPKYSLFELENGRKRMLASAGELQKGNELALPSKYVNFLYLASHYEKLKGSPEDNEQKQLFVEQHKHYLDEIIEQISEFSKRVILADANLDKVLSAYNKHRDKPIREQAENIIHLFTLTNLGAPAAFKYFDTTIDRKRYTSTKEVLDATLIHQSITGLYETRIDLSQLGGDSGGSSGGSSGSETPGTSESATPESSGGSSGGSSMASNFTQFVLVDNGGTGDVTVAPSNFANGIAEWISSNSRSQAYKVTCSVRQSSAQNRKYTIKVEVPKGAWRSYLNMELTIPIFATNSDCELIVKAMQGLLKDGNPIPSAIAANSGIYGGSGGSMASNFTQFVLVDNGGTGDVTVAPSNFANGIAEWISSNSRSQAYKVTCSVRQSSAQNRKYTIKVEVPKGAWRSYLNMELTIPIFATNSDCELIVKAMQGLLKDGNPIPSAIAANSGIYSGGSSGGSSGSETPGTSESATPESSGGSSGGSSTLNIEDEHRLHETSKEPDVSLGSTWLSDFPQAWAETGGMGLAVRQAPLIIPLKATSTPVSIKQYPMSQEARLGIKPHIQRLLDQGILVPCQSPWNTPLLPVKKPGTNDYRPVQDLREVNKRVEDIHPTVPNPYNLLSGLPPSHQWYTVLDLKDAFFCLRLHPTSQPLFAFEWRDPEMGISGQLTWTRLPQGFKNSPTLFNEALHRDLADFRIQHPDLILLQYVDDLLLAATSELDCQQGTRALLQTLGNLGYRASAKKAQICQKQVKYLGYLLKEGQRWLTEARKETVMGQPTPKTPRQLREFLGKAGFCRLFIPGFAEMAAPLYPLTKPGTLFNWGPDQQKAYQEIKQALLTAPALGLPDLTKPFELFVDEKQGYAKGVLTQKLGPWRRPVAYLSKKLDPVAAGWPPCLRMVAAIAVLTKDAGKLTMGQPLVILAPHAVEALVKQPPDRWLSNARMTHYQALLLDTDRVQFGPVVALNPATLLPLPEEGLQHNCLDILAEAHGTRPDLTDQPLPDADHTWYTDGSSLLQEGQRKAGAAVTTETEVIWAKALPAGTSAQRAELIALTQALKMAEGKKLNVYTDSRYAFATAHIHGEIYRRRGWLTSEGKEIKNKDEILALLKALFLPKRLSIIHCPGHQKGHSAEARGNRMADQAARKAAITETPDTSTLLKRTADGSEFESPKKKAKVE

SEQ ID NO: 16067 - protein, 2360 aa, synthetic construct
MPAAKRVKLDGGDKKYSIGLDIGTNSVGWAVITDEYKVPSKKFKVLGNTDRHSIKKNLIGALLFDSGETAEATRLKRTARRRYTRRKNRICYLQEIFSNEMAKVDDSFFHRLEESFLVEEDKKHERHPIFGNIVDEVAYHEKYPTIYHLRKKLVDSTDKADLRLIYLALAHMIKFRGHFLIEGDLNPDNSDVDKLFIQLVQTYNQLFEENPINASGVDAKAILSARLSKSRRLENLIAQLPGEKKNGLFGNLIALSLGLTPNFKSNFDLAEDAKLQLSKDTYDDDLDNLLAQIGDQYADLFLAAKNLSDAILLSDILRVNTEITKAPLSASMIKRYDEHHQDLTLLKALVRQQLPEKYKEIFFDQSKNGYAGYIDGGASQEEFYKFIKPILEKMDGTEELLVKLNREDLLRKQRTFDNGSIPHQIHLGELHAILRRQEDFYPFLKDNREKIEKILTFRIPYYVGPLARGNSRFAWMTRKSEETITPWNFEEVVDKGASAQSFIERMTNFDKNLPNEKVLPKHSLLYEYFTVYNELTKVKYVTEGMRKPAFLSGEQKKAIVDLLFKTNRKVTVKQLKEDYFKKIECFDSVEISGVEDRFNASLGTYHDLLKIIKDKDFLDNEENEDILEDIVLTLTLFEDREMIEERLKTYAHLFDDKVMKQLKRRRYTGWGRLSRKLINGIRDKQSGKTILDFLKSDGFANRNFMQLIHDDSLTFKEDIQKAQVSGQGDSLHEHIANLAGSPAIKKGILQTVKVVDELVKVMGRHKPENIVIEMARENQTTQKGQKNSRERMKRIEEGIKELGSQILKEHPVENTQLQNEKLYLYYLQNGRDMYVDQELDINRLSDYDVDHIVPQSFLKDDSIDNKVLTRSDKARGKSDNVPSEEVVKKMKNYWRQLLNAKLITQRKFDNLTKAERGGLSELDKAGFIKRQLVETRQITKHVAQILDSRMNTKYDENDKLIREVKVITLKSKLVSDFRKDFQFYKVREINNYHHAHDAYLNAVVGTALIKKYPKLESEFVYGDYKVYDVRKMIAKSEQEIGKATAKYFFYSNIMNFFKTEITLANGEIRKRPLIETNGETGEIVWDKGRDFATVRKVLSMPQVNIVKKTEVQTGGFSKESILPKRNSDKLIARKKDWDPKKYGGFDSPTVAYSVLVVAKVEKGKSKKLKSVKELLGITIMERSSFEKNPIDFLEAKGYKEVKKDLIIKLPKYSLFELENGRKRMLASAGELQKGNELALPSKYVNFLYLASHYEKLKGSPEDNEQKQLFVEQHKHYLDEIIEQISEFSKRVILADANLDKVLSAYNKHRDKPIREQAENIIHLFTLTNLGAPAAFKYFDTTIDRKRYTSTKEVLDATLIHQSITGLYETRIDLSQLGGDSGGSSGGSSGSETPGTSESATPESSGGSSGGSSMASNFTQFVLVDNGGTGDVTVAPSNFANGIAEWISSNSRSQAYKVTCSVRQSSAQNRKYTIKVEVPKGAWRSYLNMELTIPIFATNSDCELIVKAMQGLLKDGNPIPSAIAANSGIYGGSGGSMASNFTQFVLVDNGGTGDVTVAPSNFANGIAEWISSNSRSQAYKVTCSVRQSSAQNRKYTIKVEVPKGAWRSYLNMELTIPIFATNSDCELIVKAMQGLLKDGNPIPSAIAANSGIYGSSGSSGSSGSSGSSGSSTLNIEDEHRLHETSKEPDVSLGSTWLSDFPQAWAETGGMGLAVRQAPLIIPLKATSTPVSIKQYPMSQEARLGIKPHIQRLLDQGILVPCQSPWNTPLLPVKKPGTNDYRPVQDLREVNKRVEDIHPTVPNPYNLLSGLPPSHQWYTVLDLKDAFFCLRLHPTSQPLFAFEWRDPEMGISGQLTWTRLPQGFKNSPTLFNEALHRDLADFRIQHPDLILLQYVDDLLLAATSELDCQQGTRALLQTLGNLGYRASAKKAQICQKQVKYLGYLLKEGQRWLTEARKETVMGQPTPKTPRQLREFLGKAGFCRLFIPGFAEMAAPLYPLTKPGTLFNWGPDQQKAYQEIKQALLTAPALGLPDLTKPFELFVDEKQGYAKGVLTQKLGPWRRPVAYLSKKLDPVAAGWPPCLRMVAAIAVLTKDAGKLTMGQPLVILAPHAVEALVKQPPDRWLSNARMTHYQALLLDTDRVQFGPVVALNPATLLPLPEEGLQHNCLDILAEAHGTRPDLTDQPLPDADHTWYTDGSSLLQEGQRKAGAAVTTETEVIWAKALPAGTSAQRAELIALTQALKMAEGKKLNVYTDSRYAFATAHIHGEIYRRRGWLTSEGKEIKNKDEILALLKALFLPKRLSIIHCPGHQKGHSAEARGNRMADQAARKAAITETPDTSTLLKRTADGSEFESPKKKAKVE

SEQ ID NO: 16068 - protein, 2353 aa, synthetic construct
MPAAKRVKLDGGDKKYSIGLDIGTNSVGWAVITDEYKVPSKKFKVLGNTDRHSIKKNLIGALLFDSGETAEATRLKRTARRRYTRRKNRICYLQEIFSNEMAKVDDSFFHRLEESFLVEEDKKHERHPIFGNIVDEVAYHEKYPTIYHLRKKLVDSTDKADLRLIYLALAHMIKFRGHFLIEGDLNPDNSDVDKLFIQLVQTYNQLFEENPINASGVDAKAILSARLSKSRRLENLIAQLPGEKKNGLFGNLIALSLGLTPNFKSNFDLAEDAKLQLSKDTYDDDLDNLLAQIGDQYADLFLAAKNLSDAILLSDILRVNTEITKAPLSASMIKRYDEHHQDLTLLKALVRQQLPEKYKEIFFDQSKNGYAGYIDGGASQEEFYKFIKPILEKMDGTEELLVKLNREDLLRKQRTFDNGSIPHQIHLGELHAILRRQEDFYPFLKDNREKIEKILTFRIPYYVGPLARGNSRFAWMTRKSEETITPWNFEEVVDKGASAQSFIERMTNFDKNLPNEKVLPKHSLLYEYFTVYNELTKVKYVTEGMRKPAFLSGEQKKAIVDLLFKTNRKVTVKQLKEDYFKKIECFDSVEISGVEDRFNASLGTYHDLLKIIKDKDFLDNEENEDILEDIVLTLTLFEDREMIEERLKTYAHLFDDKVMKQLKRRRYTGWGRLSRKLINGIRDKQSGKTILDFLKSDGFANRNFMQLIHDDSLTFKEDIQKAQVSGQGDSLHEHIANLAGSPAIKKGILQTVKVVDELVKVMGRHKPENIVIEMARENQTTQKGQKNSRERMKRIEEGIKELGSQILKEHPVENTQLQNEKLYLYYLQNGRDMYVDQELDINRLSDYDVDHIVPQSFLKDDSIDNKVLTRSDKARGKSDNVPSEEVVKKMKNYWRQLLNAKLITQRKFDNLTKAERGGLSELDKAGFIKRQLVETRQITKHVAQILDSRMNTKYDENDKLIREVKVITLKSKLVSDFRKDFQFYKVREINNYHHAHDAYLNAVVGTALIKKYPKLESEFVYGDYKVYDVRKMIAKSEQEIGKATAKYFFYSNIMNFFKTEITLANGEIRKRPLIETNGETGEIVWDKGRDFATVRKVLSMPQVNIVKKTEVQTGGFSKESILPKRNSDKLIARKKDWDPKKYGGFDSPTVAYSVLVVAKVEKGKSKKLKSVKELLGITIMERSSFEKNPIDFLEAKGYKEVKKDLIIKLPKYSLFELENGRKRMLASAGELQKGNELALPSKYVNFLYLASHYEKLKGSPEDNEQKQLFVEQHKHYLDEIIEQISEFSKRVILADANLDKVLSAYNKHRDKPIREQAENIIHLFTLTNLGAPAAFKYFDTTIDRKRYTSTKEVLDATLIHQSITGLYETRIDLSQLGGDSGGSSGGSSGSETPGTSESATPESSGGSSGGSSMASNFTQFVLVDNGGTGDVTVAPSNFANGIAEWISSNSRSQAYKVTCSVRQSSAQNRKYTIKVEVPKGAWRSYLNMELTIPIFATNSDCELIVKAMQGLLKDGNPIPSAIAANSGIYGGSGGSMASNFTQFVLVDNGGTGDVTVAPSNFANGIAEWISSNSRSQAYKVTCSVRQSSAQNRKYTIKVEVPKGAWRSYLNMELTIPIFATNSDCELIVKAMQGLLKDGNPIPSAIAANSGIYGSSGGGEAAAKTLNIEDEHRLHETSKEPDVSLGSTWLSDFPQAWAETGGMGLAVRQAPLIIPLKATSTPVSIKQYPMSQEARLGIKPHIQRLLDQGILVPCQSPWNTPLLPVKKPGTNDYRPVQDLREVNKRVEDIHPTVPNPYNLLSGLPPSHQWYTVLDLKDAFFCLRLHPTSQPLFAFEWRDPEMGISGQLTWTRLPQGFKNSPTLFNEALHRDLADFRIQHPDLILLQYVDDLLLAATSELDCQQGTRALLQTLGNLGYRASAKKAQICQKQVKYLGYLLKEGQRWLTEARKETVMGQPTPKTPRQLREFLGKAGFCRLFIPGFAEMAAPLYPLTKPGTLFNWGPDQQKAYQEIKQALLTAPALGLPDLTKPFELFVDEKQGYAKGVLTQKLGPWRRPVAYLSKKLDPVAAGWPPCLRMVAAIAVLTKDAGKLTMGQPLVILAPHAVEALVKQPPDRWLSNARMTHYQALLLDTDRVQFGPVVALNPATLLPLPEEGLQHNCLDILAEAHGTRPDLTDQPLPDADHTWYTDGSSLLQEGQRKAGAAVTTETEVIWAKALPAGTSAQRAELIALTQALKMAEGKKLNVYTDSRYAFATAHIHGEIYRRRGWLTSEGKEIKNKDEILALLKALFLPKRLSIIHCPGHQKGHSAEARGNRMADQAARKAAITETPDTSTLLKRTADGSEFESPKKKAKVE

SEQ ID NO: 16069 - protein, 2644 aa, synthetic construct
MPAAKRVKLDGGDKKYSIGLDIGTNSVGWAVITDEYKVPSKKFKVLGNTDRHSIKKNLIGALLFDSGETAEATRLKRTARRRYTRRKNRICYLQEIFSNEMAKVDDSFFHRLEESFLVEEDKKHERHPIFGNIVDEVAYHEKYPTIYHLRKKLVDSTDKADLRLIYLALAHMIKFRGHFLIEGDLNPDNSDVDKLFIQLVQTYNQLFEENPINASGVDAKAILSARLSKSRRLENLIAQLPGEKKNGLFGNLIALSLGLTPNFKSNFDLAEDAKLQLSKDTYDDDLDNLLAQIGDQYADLFLAAKNLSDAILLSDILRVNTEITKAPLSASMIKRYDEHHQDLTLLKALVRQQLPEKYKEIFFDQSKNGYAGYIDGGASQEEFYKFIKPILEKMDGTEELLVKLNREDLLRKQRTFDNGSIPHQIHLGELHAILRRQEDFYPFLKDNREKIEKILTFRIPYYVGPLARGNSRFAWMTRKSEETITPWNFEEVVDKGASAQSFIERMTNFDKNLPNEKVLPKHSLLYEYFTVYNELTKVKYVTEGMRKPAFLSGEQKKAIVDLLFKTNRKVTVKQLKEDYFKKIECFDSVEISGVEDRFNASLGTYHDLLKIIKDKDFLDNEENEDILEDIVLTLTLFEDREMIEERLKTYAHLFDDKVMKQLKRRRYTGWGRLSRKLINGIRDKQSGKTILDFLKSDGFANRNFMQLIHDDSLTFKEDIQKAQVSGQGDSLHEHIANLAGSPAIKKGILQTVKVVDELVKVMGRHKPENIVIEMARENQTTQKGQKNSRERMKRIEEGIKELGSQILKEHPVENTQLQNEKLYLYYLQNGRDMYVDQELDINRLSDYDVDHIVPQSFLKDDSIDNKVLTRSDKARGKSDNVPSEEVVKKMKNYWRQLLNAKLITQRKFDNLTKAERGGLSELDKAGFIKRQLVETRQITKHVAQILDSRMNTKYDENDKLIREVKVITLKSKLVSDFRKDFQFYKVREINNYHHAHDAYLNAVVGTALIKKYPKLESEFVYGDYKVYDVRKMIAKSEQEIGKATAKYFFYSNIMNFFKTEITLANGEIRKRPLIETNGETGEIVWDKGRDFATVRKVLSMPQVNIVKKTEVQTGGFSKESILPKRNSDKLIARKKDWDPKKYGGFDSPTVAYSVLVVAKVEKGKSKKLKSVKELLGITIMERSSFEKNPIDFLEAKGYKEVKKDLIIKLPKYSLFELENGRKRMLASAGELQKGNELALPSKYVNFLYLASHYEKLKGSPEDNEQKQLFVEQHKHYLDEIIEQISEFSKRVILADANLDKVLSAYNKHRDKPIREQAENIIHLFTLTNLGAPAAFKYFDTTIDRKRYTSTKEVLDATLIHQSITGLYETRIDLSQLGGDSGGSSGGSSGSETPGTSESATPESSGGSSGGSSMASNFTQFVLVDNGGTGDVTVAPSNFANGIAEWISSNSRSQAYKVTCSVRQSSAQNRKYTIKVEVPKGAWRSYLNMELTIPIFATNSDCELIVKAMQGLLKDGNPIPSAIAANSGIYGGSGGSMASNFTQFVLVDNGGTGDVTVAPSNFANGIAEWISSNSRSQAYKVTCSVRQSSAQNRKYTIKVEVPKGAWRSYLNMELTIPIFATNSDCELIVKAMQGLLKDGNPIPSAIAANSGIYGGGSGGGSGGGSGGGSMASNFTQFVLVDNGGTGDVTVAPSNFANGIAEWISSNSRSQAYKVTCSVRQSSAQNRKYTIKVEVPKGAWRSYLNMELTIPIFATNSDCELIVKAMQGLLKDGNPIPSAIAANSGIYGGSGGSMASNFTQFVLVDNGGTGDVTVAPSNFANGIAEWISSNSRSQAYKVTCSVRQSSAQNRKYTIKVEVPKGAWRSYLNMELTIPIFATNSDCELIVKAMQGLLKDGNPIPSAIAANSGIYAEAAAKEAAAKEAAAKEAAAKALEAEAAAKEAAAKEAAAKEAAAKATLNIEDEHRLHETSKEPDVSLGSTWLSDFPQAWAETGGMGLAVRQAPLIIPLKATSTPVSIKQYPMSQEARLGIKPHIQRLLDQGILVPCQSPWNTPLLPVKKPGTNDYRPVQDLREVNKRVEDIHPTVPNPYNLLSGLPPSHQWYTVLDLKDAFFCLRLHPTSQPLFAFEWRDPEMGISGQLTWTRLPQGFKNSPTLFNEALHRDLADFRIQHPDLILLQYVDDLLLAATSELDCQQGTRALLQTLGNLGYRASAKKAQICQKQVKYLGYLLKEGQRWLTEARKETVMGQPTPKTPRQLREFLGKAGFCRLFIPGFAEMAAPLYPLTKPGTLFNWGPDQQKAYQEIKQALLTAPALGLPDLTKPFELFVDEKQGYAKGVLTQKLGPWRRPVAYLSKKLDPVAAGWPPCLRMVAAIAVLTKDAGKLTMGQPLVILAPHAVEALVKQPPDRWLSNARMTHYQALLLDTDRVQFGPVVALNPATLLPLPEEGLQHNCLDILAEAHGTRPDLTDQPLPDADHTWYTDGSSLLQEGQRKAGAAVTTETEVIWAKALPAGTSAQRAELIALTQALKMAEGKKLNVYTDSRYAFATAHIHGEIYRRRGWLTSEGKEIKNKDEILALLKALFLPKRLSIIHCPGHQKGHSAEARGNRMADQAARKAAITETPDTSTLLKRTADGSEFESPKKKAKVE

SEQ ID NO: 16070 - protein, 2631 aa, synthetic construct
MPAAKRVKLDGGDKKYSIGLDIGTNSVGWAVITDEYKVPSKKFKVLGNTDRHSIKKNLIGALLFDSGETAEATRLKRTARRRYTRRKNRICYLQEIFSNEMAKVDDSFFHRLEESFLVEEDKKHERHPIFGNIVDEVAYHEKYPTIYHLRKKLVDSTDKADLRLIYLALAHMIKFRGHFLIEGDLNPDNSDVDKLFIQLVQTYNQLFEENPINASGVDAKAILSARLSKSRRLENLIAQLPGEKKNGLFGNLIALSLGLTPNFKSNFDLAEDAKLQLSKDTYDDDLDNLLAQIGDQYADLFLAAKNLSDAILLSDILRVNTEITKAPLSASMIKRYDEHHQDLTLLKALVRQQLPEKYKEIFFDQSKNGYAGYIDGGASQEEFYKFIKPILEKMDGTEELLVKLNREDLLRKQRTFDNGSIPHQIHLGELHAILRRQEDFYPFLKDNREKIEKILTFRIPYYVGPLARGNSRFAWMTRKSEETITPWNFEEVVDKGASAQSFIERMTNFDKNLPNEKVLPKHSLLYEYFTVYNELTKVKYVTEGMRKPAFLSGEQKKAIVDLLFKTNRKVTVKQLKEDYFKKIECFDSVEISGVEDRFNASLGTYHDLLKIIKDKDFLDNEENEDILEDIVLTLTLFEDREMIEERLKTYAHLFDDKVMKQLKRRRYTGWGRLSRKLINGIRDKQSGKTILDFLKSDGFANRNFMQLIHDDSLTFKEDIQKAQVSGQGDSLHEHIANLAGSPAIKKGILQTVKVVDELVKVMGRHKPENIVIEMARENQTTQKGQKNSRERMKRIEEGIKELGSQILKEHPVENTQLQNEKLYLYYLQNGRDMYVDQELDINRLSDYDVDHIVPQSFLKDDSIDNKVLTRSDKARGKSDNVPSEEVVKKMKNYWRQLLNAKLITQRKFDNLTKAERGGLSELDKAGFIKRQLVETRQITKHVAQILDSRMNTKYDENDKLIREVKVITLKSKLVSDFRKDFQFYKVREINNYHHAHDAYLNAVVGTALIKKYPKLESEFVYGDYKVYDVRKMIAKSEQEIGKATAKYFFYSNIMNFFKTEITLANGEIRKRPLIETNGETGEIVWDKGRDFATVRKVLSMPQVNIVKKTEVQTGGFSKESILPKRNSDKLIARKKDWDPKKYGGFDSPTVAYSVLVVAKVEKGKSKKLKSVKELLGITIMERSSFEKNPIDFLEAKGYKEVKKDLIIKLPKYSLFELENGRKRMLASAGELQKGNELALPSKYVNFLYLASHYEKLKGSPEDNEQKQLFVEQHKHYLDEIIEQISEFSKRVILADANLDKVLSAYNKHRDKPIREQAENIIHLFTLTNLGAPAAFKYFDTTIDRKRYTSTKEVLDATLIHQSITGLYETRIDLSQLGGDSGGSSGGSSGSETPGTSESATPESSGGSSGGSSMASNFTQFVLVDNGGTGDVTVAPSNFANGIAEWISSNSRSQAYKVTCSVRQSSAQNRKYTIKVEVPKGAWRSYLNMELTIPIFATNSDCELIVKAMQGLLKDGNPIPSAIAANSGIYGGSGGSMASNFTQFVLVDNGGTGDVTVAPSNFANGIAEWISSNSRSQAYKVTCSVRQSSAQNRKYTIKVEVPKGAWRSYLNMELTIPIFATNSDCELIVKAMQGLLKDGNPIPSAIAANSGIYGGGSGGGSGGGSGGGSMASNFTQFVLVDNGGTGDVTVAPSNFANGIAEWISSNSRSQAYKVTCSVRQSSAQNRKYTIKVEVPKGAWRSYLNMELTIPIFATNSDCELIVKAMQGLLKDGNPIPSAIAANSGIYGGSGGSMASNFTQFVLVDNGGTGDVTVAPSNFANGIAEWISSNSRSQAYKVTCSVRQSSAQNRKYTIKVEVPKGAWRSYLNMELTIPIFATNSDCELIVKAMQGLLKDGNPIPSAIAANSGIYSGGSSGGSSGSETPGTSESATPESSGGSSGGSSTLNIEDEHRLHETSKEPDVSLGSTWLSDFPQAWAETGGMGLAVRQAPLIIPLKATSTPVSIKQYPMSQEARLGIKPHIQRLLDQGILVPCQSPWNTPLLPVKKPGTNDYRPVQDLREVNKRVEDIHPTVPNPYNLLSGLPPSHQWYTVLDLKDAFFCLRLHPTSQPLFAFEWRDPEMGISGQLTWTRLPQGFKNSPTLFNEALHRDLADFRIQHPDLILLQYVDDLLLAATSELDCQQGTRALLQTLGNLGYRASAKKAQICQKQVKYLGYLLKEGQRWLTEARKETVMGQPTPKTPRQLREFLGKAGFCRLFIPGFAEMAAPLYPLTKPGTLFNWGPDQQKAYQEIKQALLTAPALGLPDLTKPFELFVDEKQGYAKGVLTQKLGPWRRPVAYLSKKLDPVAAGWPPCLRMVAAIAVLTKDAGKLTMGQPLVILAPHAVEALVKQPPDRWLSNARMTHYQALLLDTDRVQFGPVVALNPATLLPLPEEGLQHNCLDILAEAHGTRPDLTDQPLPDADHTWYTDGSSLLQEGQRKAGAAVTTETEVIWAKALPAGTSAQRAELIALTQALKMAEGKKLNVYTDSRYAFATAHIHGEIYRRRGWLTSEGKEIKNKDEILALLKALFLPKRLSIIHCPGHQKGHSAEARGNRMADQAARKAAITETPDTSTLLKRTADGSEFESPKKKAKVE

SEQ ID NO: 16071 - protein, 2616 aa, synthetic construct
MPAAKRVKLDGGDKKYSIGLDIGTNSVGWAVITDEYKVPSKKFKVLGNTDRHSIKKNLIGALLFDSGETAEATRLKRTARRRYTRRKNRICYLQEIFSNEMAKVDDSFFHRLEESFLVEEDKKHERHPIFGNIVDEVAYHEKYPTIYHLRKKLVDSTDKADLRLIYLALAHMIKFRGHFLIEGDLNPDNSDVDKLFIQLVQTYNQLFEENPINASGVDAKAILSARLSKSRRLENLIAQLPGEKKNGLFGNLIALSLGLTPNFKSNFDLAEDAKLQLSKDTYDDDLDNLLAQIGDQYADLFLAAKNLSDAILLSDILRVNTEITKAPLSASMIKRYDEHHQDLTLLKALVRQQLPEKYKEIFFDQSKNGYAGYIDGGASQEEFYKFIKPILEKMDGTEELLVKLNREDLLRKQRTFDNGSIPHQIHLGELHAILRRQEDFYPFLKDNREKIEKILTFRIPYYVGPLARGNSRFAWMTRKSEETITPWNFEEVVDKGASAQSFIERMTNFDKNLPNEKVLPKHSLLYEYFTVYNELTKVKYVTEGMRKPAFLSGEQKKAIVDLLFKTNRKVTVKQLKEDYFKKIECFDSVEISGVEDRFNASLGTYHDLLKIIKDKDFLDNEENEDILEDIVLTLTLFEDREMIEERLKTYAHLFDDKVMKQLKRRRYTGWGRLSRKLINGIRDKQSGKTILDFLKSDGFANRNFMQLIHDDSLTFKEDIQKAQVSGQGDSLHEHIANLAGSPAIKKGILQTVKVVDELVKVMGRHKPENIVIEMARENQTTQKGQKNSRERMKRIEEGIKELGSQILKEHPVENTQLQNEKLYLYYLQNGRDMYVDQELDINRLSDYDVDHIVPQSFLKDDSIDNKVLTRSDKARGKSDNVPSEEVVKKMKNYWRQLLNAKLITQRKFDNLTKAERGGLSELDKAGFIKRQLVETRQITKHVAQILDSRMNTKYDENDKLIREVKVITLKSKLVSDFRKDFQFYKVREINNYHHAHDAYLNAVVGTALIKKYPKLESEFVYGDYKVYDVRKMIAKSEQEIGKATAKYFFYSNIMNFFKTEITLANGEIRKRPLIETNGETGEIVWDKGRDFATVRKVLSMPQVNIVKKTEVQTGGFSKESILPKRNSDKLIARKKDWDPKKYGGFDSPTVAYSVLVVAKVEKGKSKKLKSVKELLGITIMERSSFEKNPIDFLEAKGYKEVKKDLIIKLPKYSLFELENGRKRMLASAGELQKGNELALPSKYVNFLYLASHYEKLKGSPEDNEQKQLFVEQHKHYLDEIIEQISEFSKRVILADANLDKVLSAYNKHRDKPIREQAENIIHLFTLTNLGAPAAFKYFDTTIDRKRYTSTKEVLDATLIHQSITGLYETRIDLSQLGGDSGGSSGGSSGSETPGTSESATPESSGGSSGGSSMASNFTQFVLVDNGGTGDVTVAPSNFANGIAEWISSNSRSQAYKVTCSVRQSSAQNRKYTIKVEVPKGAWRSYLNMELTIPIFATNSDCELIVKAMQGLLKDGNPIPSAIAANSGIYGGSGGSMASNFTQFVLVDNGGTGDVTVAPSNFANGIAEWISSNSRSQAYKVTCSVRQSSAQNRKYTIKVEVPKGAWRSYLNMELTIPIFATNSDCELIVKAMQGLLKDGNPIPSAIAANSGIYGGGSGGGSGGGSGGGSMASNFTQFVLVDNGGTGDVTVAPSNFANGIAEWISSNSRSQAYKVTCSVRQSSAQNRKYTIKVEVPKGAWRSYLNMELTIPIFATNSDCELIVKAMQGLLKDGNPIPSAIAANSGIYGGSGGSMASNFTQFVLVDNGGTGDVTVAPSNFANGIAEWISSNSRSQAYKVTCSVRQSSAQNRKYTIKVEVPKGAWRSYLNMELTIPIFATNSDCELIVKAMQGLLKDGNPIPSAIAANSGIYGSSGSSGSSGSSGSSGSSTLNIEDEHRLHETSKEPDVSLGSTWLSDFPQAWAETGGMGLAVRQAPLIIPLKATSTPVSIKQYPMSQEARLGIKPHIQRLLDQGILVPCQSPWNTPLLPVKKPGTNDYRPVQDLREVNKRVEDIHPTVPNPYNLLSGLPPSHQWYTVLDLKDAFFCLRLHPTSQPLFAFEWRDPEMGISGQLTWTRLPQGFKNSPTLFNEALHRDLADFRIQHPDLILLQYVDDLLLAATSELDCQQGTRALLQTLGNLGYRASAKKAQICQKQVKYLGYLLKEGQRWLTEARKETVMGQPTPKTPRQLREFLGKAGFCRLFIPGFAEMAAPLYPLTKPGTLFNWGPDQQKAYQEIKQALLTAPALGLPDLTKPFELFVDEKQGYAKGVLTQKLGPWRRPVAYLSKKLDPVAAGWPPCLRMVAAIAVLTKDAGKLTMGQPLVILAPHAVEALVKQPPDRWLSNARMTHYQALLLDTDRVQFGPVVALNPATLLPLPEEGLQHNCLDILAEAHGTRPDLTDQPLPDADHTWYTDGSSLLQEGQRKAGAAVTTETEVIWAKALPAGTSAQRAELIALTQALKMAEGKKLNVYTDSRYAFATAHIHGEIYRRRGWLTSEGKEIKNKDEILALLKALFLPKRLSIIHCPGHQKGHSAEARGNRMADQAARKAAITETPDTSTLLKRTADGSEFESPKKKAKVE

SEQ ID NO: 16072 - protein, 2609 aa, synthetic construct
MPAAKRVKLDGGDKKYSIGLDIGTNSVGWAVITDEYKVPSKKFKVLGNTDRHSIKKNLIGALLFDSGETAEATRLKRTARRRYTRRKNRICYLQEIFSNEMAKVDDSFFHRLEESFLVEEDKKHERHPIFGNIVDEVAYHEKYPTIYHLRKKLVDSTDKADLRLIYLALAHMIKFRGHFLIEGDLNPDNSDVDKLFIQLVQTYNQLFEENPINASGVDAKAILSARLSKSRRLENLIAQLPGEKKNGLFGNLIALSLGLTPNFKSNFDLAEDAKLQLSKDTYDDDLDNLLAQIGDQYADLFLAAKNLSDAILLSDILRVNTEITKAPLSASMIKRYDEHHQDLTLLKALVRQQLPEKYKEIFFDQSKNGYAGYIDGGASQEEFYKFIKPILEKMDGTEELLVKLNREDLLRKQRTFDNGSIPHQIHLGELHAILRRQEDFYPFLKDNREKIEKILTFRIPYYVGPLARGNSRFAWMTRKSEETITPWNFEEVVDKGASAQSFIERMTNFDKNLPNEKVLPKHSLLYEYFTVYNELTKVKYVTEGMRKPAFLSGEQKKAIVDLLFKTNRKVTVKQLKEDYFKKIECFDSVEISGVEDRFNASLGTYHDLLKIIKDKDFLDNEENEDILEDIVLTLTLFEDREMIEERLKTYAHLFDDKVMKQLKRRRYTGWGRLSRKLINGIRDKQSGKTILDFLKSDGFANRNFMQLIHDDSLTFKEDIQKAQVSGQGDSLHEHIANLAGSPAIKKGILQTVKVVDELVKVMGRHKPENIVIEMARENQTTQKGQKNSRERMKRIEEGIKELGSQILKEHPVENTQLQNEKLYLYYLQNGRDMYVDQELDINRLSDYDVDHIVPQSFLKDDSIDNKVLTRSDKARGKSDNVPSEEVVKKMKNYWRQLLNAKLITQRKFDNLTKAERGGLSELDKAGFIKRQLVETRQITKHVAQILDSRMNTKYDENDKLIREVKVITLKSKLVSDFRKDFQFYKVREINNYHHAHDAYLNAVVGTALIKKYPKLESEFVYGDYKVYDVRKMIAKSEQEIGKATAKYFFYSNIMNFFKTEITLANGEIRKRPLIETNGETGEIVWDKGRDFATVRKVLSMPQVNIVKKTEVQTGGFSKESILPKRNSDKLIARKKDWDPKKYGGFDSPTVAYSVLVVAKVEKGKSKKLKSVKELLGITIMERSSFEKNPIDFLEAKGYKEVKKDLIIKLPKYSLFELENGRKRMLASAGELQKGNELALPSKYVNFLYLASHYEKLKGSPEDNEQKQLFVEQHKHYLDEIIEQISEFSKRVILADANLDKVLSAYNKHRDKPIREQAENIIHLFTLTNLGAPAAFKYFDTTIDRKRYTSTKEVLDATLIHQSITGLYETRIDLSQLGGDSGGSSGGSSGSETPGTSESATPESSGGSSGGSSMASNFTQFVLVDNGGTGDVTVAPSNFANGIAEWISSNSRSQAYKVTCSVRQSSAQNRKYTIKVEVPKGAWRSYLNMELTIPIFATNSDCELIVKAMQGLLKDGNPIPSAIAANSGIYGGSGGSMASNFTQFVLVDNGGTGDVTVAPSNFANGIAEWISSNSRSQAYKVTCSVRQSSAQNRKYTIKVEVPKGAWRSYLNMELTIPIFATNSDCELIVKAMQGLLKDGNPIPSAIAANSGIYGGGSGGGSGGGSGGGSMASNFTQFVLVDNGGTGDVTVAPSNFANGIAEWISSNSRSQAYKVTCSVRQSSAQNRKYTIKVEVPKGAWRSYLNMELTIPIFATNSDCELIVKAMQGLLKDGNPIPSAIAANSGIYGGSGGSMASNFTQFVLVDNGGTGDVTVAPSNFANGIAEWISSNSRSQAYKVTCSVRQSSAQNRKYTIKVEVPKGAWRSYLNMELTIPIFATNSDCELIVKAMQGLLKDGNPIPSAIAANSGIYGSSGGGEAAAKTLNIEDEHRLHETSKEPDVSLGSTWLSDFPQAWAETGGMGLAVRQAPLIIPLKATSTPVSIKQYPMSQEARLGIKPHIQRLLDQGILVPCQSPWNTPLLPVKKPGTNDYRPVQDLREVNKRVEDIHPTVPNPYNLLSGLPPSHQWYTVLDLKDAFFCLRLHPTSQPLFAFEWRDPEMGISGQLTWTRLPQGFKNSPTLFNEALHRDLADFRIQHPDLILLQYVDDLLLAATSELDCQQGTRALLQTLGNLGYRASAKKAQICQKQVKYLGYLLKEGQRWLTEARKETVMGQPTPKTPRQLREFLGKAGFCRLFIPGFAEMAAPLYPLTKPGTLFNWGPDQQKAYQEIKQALLTAPALGLPDLTKPFELFVDEKQGYAKGVLTQKLGPWRRPVAYLSKKLDPVAAGWPPCLRMVAAIAVLTKDAGKLTMGQPLVILAPHAVEALVKQPPDRWLSNARMTHYQALLLDTDRVQFGPVVALNPATLLPLPEEGLQHNCLDILAEAHGTRPDLTDQPLPDADHTWYTDGSSLLQEGQRKAGAAVTTETEVIWAKALPAGTSAQRAELIALTQALKMAEGKKLNVYTDSRYAFATAHIHGEIYRRRGWLTSEGKEIKNKDEILALLKALFLPKRLSIIHCPGHQKGHSAEARGNRMADQAARKAAITETPDTSTLLKRTADGSEFESPKKKAKVE

SEQ ID NO: 16073 - protein, 2250 aa, synthetic construct
MPAAKRVKLDGGDKKYSIGLDIGTNSVGWAVITDEYKVPSKKFKVLGNTDRHSIKKNLIGALLFDSGETAEATRLKRTARRRYTRRKNRICYLQEIFSNEMAKVDDSFFHRLEESFLVEEDKKHERHPIFGNIVDEVAYHEKYPTIYHLRKKLVDSTDKADLRLIYLALAHMIKFRGHFLIEGDLNPDNSDVDKLFIQLVQTYNQLFEENPINASGVDAKAILSARLSKSRRLENLIAQLPGEKKNGLFGNLIALSLGLTPNFKSNFDLAEDAKLQLSKDTYDDDLDNLLAQIGDQYADLFLAAKNLSDAILLSDILRVNTEITKAPLSASMIKRYDEHHQDLTLLKALVRQQLPEKYKEIFFDQSKNGYAGYIDGGASQEEFYKFIKPILEKMDGTEELLVKLNREDLLRKQRTFDNGSIPHQIHLGELHAILRRQEDFYPFLKDNREKIEKILTFRIPYYVGPLARGNSRFAWMTRKSEETITPWNFEEVVDKGASAQSFIERMTNFDKNLPNEKVLPKHSLLYEYFTVYNELTKVKYVTEGMRKPAFLSGEQKKAIVDLLFKTNRKVTVKQLKEDYFKKIECFDSVEISGVEDRFNASLGTYHDLLKIIKDKDFLDNEENEDILEDIVLTLTLFEDREMIEERLKTYAHLFDDKVMKQLKRRRYTGWGRLSRKLINGIRDKQSGKTILDFLKSDGFANRNFMQLIHDDSLTFKEDIQKAQVSGQGDSLHEHIANLAGSPAIKKGILQTVKVVDELVKVMGRHKPENIVIEMARENQTTQKGQKNSRERMKRIEEGIKELGSQILKEHPVENTQLQNEKLYLYYLQNGRDMYVDQELDINRLSDYDVDHIVPQSFLKDDSIDNKVLTRSDKARGKSDNVPSEEVVKKMKNYWRQLLNAKLITQRKFDNLTKAERGGLSELDKAGFIKRQLVETRQITKHVAQILDSRMNTKYDENDKLIREVKVITLKSKLVSDFRKDFQFYKVREINNYHHAHDAYLNAVVGTALIKKYPKLESEFVYGDYKVYDVRKMIAKSEQEIGKATAKYFFYSNIMNFFKTEITLANGEIRKRPLIETNGETGEIVWDKGRDFATVRKVLSMPQVNIVKKTEVQTGGFSKESILPKRNSDKLIARKKDWDPKKYGGFDSPTVAYSVLVVAKVEKGKSKKLKSVKELLGITIMERSSFEKNPIDFLEAKGYKEVKKDLIIKLPKYSLFELENGRKRMLASAGELQKGNELALPSKYVNFLYLASHYEKLKGSPEDNEQKQLFVEQHKHYLDEIIEQISEFSKRVILADANLDKVLSAYNKHRDKPIREQAENIIHLFTLTNLGAPAAFKYFDTTIDRKRYTSTKEVLDATLIHQSITGLYETRIDLSQLGGDGSSGSSGSSGSSGSSGSSMASNFTQFVLVDNGGTGDVTVAPSNFANGIAEWISSNSRSQAYKVTCSVRQSSAQNRKYTIKVEVPKGAWRSYLNMELTIPIFATNSDCELIVKAMQGLLKDGNPIPSAIAANSGIYAEAAAKEAAAKEAAAKEAAAKALEAEAAAKEAAAKEAAAKEAAAKATLNIEDEHRLHETSKEPDVSLGSTWLSDFPQAWAETGGMGLAVRQAPLIIPLKATSTPVSIKQYPMSQEARLGIKPHIQRLLDQGILVPCQSPWNTPLLPVKKPGTNDYRPVQDLREVNKRVEDIHPTVPNPYNLLSGLPPSHQWYTVLDLKDAFFCLRLHPTSQPLFAFEWRDPEMGISGQLTWTRLPQGFKNSPTLFNEALHRDLADFRIQHPDLILLQYVDDLLLAATSELDCQQGTRALLQTLGNLGYRASAKKAQICQKQVKYLGYLLKEGQRWLTEARKETVMGQPTPKTPRQLREFLGKAGFCRLFIPGFAEMAAPLYPLTKPGTLFNWGPDQQKAYQEIKQALLTAPALGLPDLTKPFELFVDEKQGYAKGVLTQKLGPWRRPVAYLSKKLDPVAAGWPPCLRMVAAIAVLTKDAGKLTMGQPLVILAPHAVEALVKQPPDRWLSNARMTHYQALLLDTDRVQFGPVVALNPATLLPLPEEGLQHNCLDILAEAHGTRPDLTDQPLPDADHTWYTDGSSLLQEGQRKAGAAVTTETEVIWAKALPAGTSAQRAELIALTQALKMAEGKKLNVYTDSRYAFATAHIHGEIYRRRGWLTSEGKEIKNKDEILALLKALFLPKRLSIIHCPGHQKGHSAEARGNRMADQAARKAAITETPDTSTLLKRTADGSEFESPKKKAKVE

SEQ ID NO: 16074 - protein, 2237 aa, synthetic construct
MPAAKRVKLDGGDKKYSIGLDIGTNSVGWAVITDEYKVPSKKFKVLGNTDRHSIKKNLIGALLFDSGETAEATRLKRTARRRYTRRKNRICYLQEIFSNEMAKVDDSFFHRLEESFLVEEDKKHERHPIFGNIVDEVAYHEKYPTIYHLRKKLVDSTDKADLRLIYLALAHMIKFRGHFLIEGDLNPDNSDVDKLFIQLVQTYNQLFEENPINASGVDAKAILSARLSKSRRLENLIAQLPGEKKNGLFGNLIALSLGLTPNFKSNFDLAEDAKLQLSKDTYDDDLDNLLAQIGDQYADLFLAAKNLSDAILLSDILRVNTEITKAPLSASMIKRYDEHHQDLTLLKALVRQQLPEKYKEIFFDQSKNGYAGYIDGGASQEEFYKFIKPILEKMDGTEELLVKLNREDLLRKQRTFDNGSIPHQIHLGELHAILRRQEDFYPFLKDNREKIEKILTFRIPYYVGPLARGNSRFAWMTRKSEETITPWNFEEVVDKGASAQSFIERMTNFDKNLPNEKVLPKHSLLYEYFTVYNELTKVKYVTEGMRKPAFLSGEQKKAIVDLLFKTNRKVTVKQLKEDYFKKIECFDSVEISGVEDRFNASLGTYHDLLKIIKDKDFLDNEENEDILEDIVLTLTLFEDREMIEERLKTYAHLFDDKVMKQLKRRRYTGWGRLSRKLINGIRDKQSGKTILDFLKSDGFANRNFMQLIHDDSLTFKEDIQKAQVSGQGDSLHEHIANLAGSPAIKKGILQTVKVVDELVKVMGRHKPENIVIEMARENQTTQKGQKNSRERMKRIEEGIKELGSQILKEHPVENTQLQNEKLYLYYLQNGRDMYVDQELDINRLSDYDVDHIVPQSFLKDDSIDNKVLTRSDKARGKSDNVPSEEVVKKMKNYWRQLLNAKLITQRKFDNLTKAERGGLSELDKAGFIKRQLVETRQITKHVAQILDSRMNTKYDENDKLIREVKVITLKSKLVSDFRKDFQFYKVREINNYHHAHDAYLNAVVGTALIKKYPKLESEFVYGDYKVYDVRKMIAKSEQEIGKATAKYFFYSNIMNFFKTEITLANGEIRKRPLIETNGETGEIVWDKGRDFATVRKVLSMPQVNIVKKTEVQTGGFSKESILPKRNSDKLIARKKDWDPKKYGGFDSPTVAYSVLVVAKVEKGKSKKLKSVKELLGITIMERSSFEKNPIDFLEAKGYKEVKKDLIIKLPKYSLFELENGRKRMLASAGELQKGNELALPSKYVNFLYLASHYEKLKGSPEDNEQKQLFVEQHKHYLDEIIEQISEFSKRVILADANLDKVLSAYNKHRDKPIREQAENIIHLFTLTNLGAPAAFKYFDTTIDRKRYTSTKEVLDATLIHQSITGLYETRIDLSQLGGDGSSGSSGSSGSSGSSGSSMASNFTQFVLVDNGGTGDVTVAPSNFANGIAEWISSNSRSQAYKVTCSVRQSSAQNRKYTIKVEVPKGAWRSYLNMELTIPIFATNSDCELIVKAMQGLLKDGNPIPSAIAANSGIYSGGSSGGSSGSETPGTSESATPESSGGSSGGSSTLNIEDEHRLHETSKEPDVSLGSTWLSDFPQAWAETGGMGLAVRQAPLIIPLKATSTPVSIKQYPMSQEARLGIKPHIQRLLDQGILVPCQSPWNTPLLPVKKPGTNDYRPVQDLREVNKRVEDIHPTVPNPYNLLSGLPPSHQWYTVLDLKDAFFCLRLHPTSQPLFAFEWRDPEMGISGQLTWTRLPQGFKNSPTLFNEALHRDLADFRIQHPDLILLQYVDDLLLAATSELDCQQGTRALLQTLGNLGYRASAKKAQICQKQVKYLGYLLKEGQRWLTEARKETVMGQPTPKTPRQLREFLGKAGFCRLFIPGFAEMAAPLYPLTKPGTLFNWGPDQQKAYQEIKQALLTAPALGLPDLTKPFELFVDEKQGYAKGVLTQKLGPWRRPVAYLSKKLDPVAAGWPPCLRMVAAIAVLTKDAGKLTMGQPLVILAPHAVEALVKQPPDRWLSNARMTHYQALLLDTDRVQFGPVVALNPATLLPLPEEGLQHNCLDILAEAHGTRPDLTDQPLPDADHTWYTDGSSLLQEGQRKAGAAVTTETEVIWAKALPAGTSAQRAELIALTQALKMAEGKKLNVYTDSRYAFATAHIHGEIYRRRGWLTSEGKEIKNKDEILALLKALFLPKRLSIIHCPGHQKGHSAEARGNRMADQAARKAAITETPDTSTLLKRTADGSEFESPKKKAKVE

SEQ ID NO: 16075 - protein, 2222 aa, synthetic construct
MPAAKRVKLDGGDKKYSIGLDIGTNSVGWAVITDEYKVPSKKFKVLGNTDRHSIKKNLIGALLFDSGETAEATRLKRTARRRYTRRKNRICYLQEIFSNEMAKVDDSFFHRLEESFLVEEDKKHERHPIFGNIVDEVAYHEKYPTIYHLRKKLVDSTDKADLRLIYLALAHMIKFRGHFLIEGDLNPDNSDVDKLFIQLVQTYNQLFEENPINASGVDAKAILSARLSKSRRLENLIAQLPGEKKNGLFGNLIALSLGLTPNFKSNFDLAEDAKLQLSKDTYDDDLDNLLAQIGDQYADLFLAAKNLSDAILLSDILRVNTEITKAPLSASMIKRYDEHHQDLTLLKALVRQQLPEKYKEIFFDQSKNGYAGYIDGGASQEEFYKFIKPILEKMDGTEELLVKLNREDLLRKQRTFDNGSIPHQIHLGELHAILRRQEDFYPFLKDNREKIEKILTFRIPYYVGPLARGNSRFAWMTRKSEETITPWNFEEVVDKGASAQSFIERMTNFDKNLPNEKVLPKHSLLYEYFTVYNELTKVKYVTEGMRKPAFLSGEQKKAIVDLLFKTNRKVTVKQLKEDYFKKIECFDSVEISGVEDRFNASLGTYHDLLKIIKDKDFLDNEENEDILEDIVLTLTLFEDREMIEERLKTYAHLFDDKVMKQLKRRRYTGWGRLSRKLINGIRDKQSGKTILDFLKSDGFANRNFMQLIHDDSLTFKEDIQKAQVSGQGDSLHEHIANLAGSPAIKKGILQTVKVVDELVKVMGRHKPENIVIEMARENQTTQKGQKNSRERMKRIEEGIKELGSQILKEHPVENTQLQNEKLYLYYLQNGRDMYVDQELDINRLSDYDVDHIVPQSFLKDDSIDNKVLTRSDKARGKSDNVPSEEVVKKMKNYWRQLLNAKLITQRKFDNLTKAERGGLSELDKAGFIKRQLVETRQITKHVAQILDSRMNTKYDENDKLIREVKVITLKSKLVSDFRKDFQFYKVREINNYHHAHDAYLNAVVGTALIKKYPKLESEFVYGDYKVYDVRKMIAKSEQEIGKATAKYFFYSNIMNFFKTEITLANGEIRKRPLIETNGETGEIVWDKGRDFATVRKVLSMPQVNIVKKTEVQTGGFSKESILPKRNSDKLIARKKDWDPKKYGGFDSPTVAYSVLVVAKVEKGKSKKLKSVKELLGITIMERSSFEKNPIDFLEAKGYKEVKKDLIIKLPKYSLFELENGRKRMLASAGELQKGNELALPSKYVNFLYLASHYEKLKGSPEDNEQKQLFVEQHKHYLDEIIEQISEFSKRVILADANLDKVLSAYNKHRDKPIREQAENIIHLFTLTNLGAPAAFKYFDTTIDRKRYTSTKEVLDATLIHQSITGLYETRIDLSQLGGDGSSGSSGSSGSSGSSGSSMASNFTQFVLVDNGGTGDVTVAPSNFANGIAEWISSNSRSQAYKVTCSVRQSSAQNRKYTIKVEVPKGAWRSYLNMELTIPIFATNSDCELIVKAMQGLLKDGNPIPSAIAANSGIYGSSGSSGSSGSSGSSGSSTLNIEDEHRLHETSKEPDVSLGSTWLSDFPQAWAETGGMGLAVRQAPLIIPLKATSTPVSIKQYPMSQEARLGIKPHIQRLLDQGILVPCQSPWNTPLLPVKKPGTNDYRPVQDLREVNKRVEDIHPTVPNPYNLLSGLPPSHQWYTVLDLKDAFFCLRLHPTSQPLFAFEWRDPEMGISGQLTWTRLPQGFKNSPTLFNEALHRDLADFRIQHPDLILLQYVDDLLLAATSELDCQQGTRALLQTLGNLGYRASAKKAQICQKQVKYLGYLLKEGQRWLTEARKETVMGQPTPKTPRQLREFLGKAGFCRLFIPGFAEMAAPLYPLTKPGTLFNWGPDQQKAYQEIKQALLTAPALGLPDLTKPFELFVDEKQGYAKGVLTQKLGPWRRPVAYLSKKLDPVAAGWPPCLRMVAAIAVLTKDAGKLTMGQPLVILAPHAVEALVKQPPDRWLSNARMTHYQALLLDTDRVQFGPVVALNPATLLPLPEEGLQHNCLDILAEAHGTRPDLTDQPLPDADHTWYTDGSSLLQEGQRKAGAAVTTETEVIWAKALPAGTSAQRAELIALTQALKMAEGKKLNVYTDSRYAFATAHIHGEIYRRRGWLTSEGKEIKNKDEILALLKALFLPKRLSIIHCPGHQKGHSAEARGNRMADQAARKAAITETPDTSTLLKRTADGSEFESPKKKAKVE

SEQ ID NO: 16076 - protein, 2215 aa, synthetic construct
MPAAKRVKLDGGDKKYSIGLDIGTNSVGWAVITDEYKVPSKKFKVLGNTDRHSIKKNLIGALLFDSGETAEATRLKRTARRRYTRRKNRICYLQEIFSNEMAKVDDSFFHRLEESFLVEEDKKHERHPIFGNIVDEVAYHEKYPTIYHLRKKLVDSTDKADLRLIYLALAHMIKFRGHFLIEGDLNPDNSDVDKLFIQLVQTYNQLFEENPINASGVDAKAILSARLSKSRRLENLIAQLPGEKKNGLFGNLIALSLGLTPNFKSNFDLAEDAKLQLSKDTYDDDLDNLLAQIGDQYADLFLAAKNLSDAILLSDILRVNTEITKAPLSASMIKRYDEHHQDLTLLKALVRQQLPEKYKEIFFDQSKNGYAGYIDGGASQEEFYKFIKPILEKMDGTEELLVKLNREDLLRKQRTFDNGSIPHQIHLGELHAILRRQEDFYPFLKDNREKIEKILTFRIPYYVGPLARGNSRFAWMTRKSEETITPWNFEEVVDKGASAQSFIERMTNFDKNLPNEKVLPKHSLLYEYFTVYNELTKVKYVTEGMRKPAFLSGEQKKAIVDLLFKTNRKVTVKQLKEDYFKKIECFDSVEISGVEDRFNASLGTYHDLLKIIKDKDFLDNEENEDILEDIVLTLTLFEDREMIEERLKTYAHLFDDKVMKQLKRRRYTGWGRLSRKLINGIRDKQSGKTILDFLKSDGFANRNFMQLIHDDSLTFKEDIQKAQVSGQGDSLHEHIANLAGSPAIKKGILQTVKVVDELVKVMGRHKPENIVIEMARENQTTQKGQKNSRERMKRIEEGIKELGSQILKEHPVENTQLQNEKLYLYYLQNGRDMYVDQELDINRLSDYDVDHIVPQSFLKDDSIDNKVLTRSDKARGKSDNVPSEEVVKKMKNYWRQLLNAKLITQRKFDNLTKAERGGLSELDKAGFIKRQLVETRQITKHVAQILDSRMNTKYDENDKLIREVKVITLKSKLVSDFRKDFQFYKVREINNYHHAHDAYLNAVVGTALIKKYPKLESEFVYGDYKVYDVRKMIAKSEQEIGKATAKYFFYSNIMNFFKTEITLANGEIRKRPLIETNGETGEIVWDKGRDFATVRKVLSMPQVNIVKKTEVQTGGFSKESILPKRNSDKLIARKKDWDPKKYGGFDSPTVAYSVLVVAKVEKGKSKKLKSVKELLGITIMERSSFEKNPIDFLEAKGYKEVKKDLIIKLPKYSLFELENGRKRMLASAGELQKGNELALPSKYVNFLYLASHYEKLKGSPEDNEQKQLFVEQHKHYLDEIIEQISEFSKRVILADANLDKVLSAYNKHRDKPIREQAENIIHLFTLTNLGAPAAFKYFDTTIDRKRYTSTKEVLDATLIHQSITGLYETRIDLSQLGGDGSSGSSGSSGSSGSSGSSMASNFTQFVLVDNGGTGDVTVAPSNFANGIAEWISSNSRSQAYKVTCSVRQSSAQNRKYTIKVEVPKGAWRSYLNMELTIPIFATNSDCELIVKAMQGLLKDGNPIPSAIAANSGIYGSSGGGEAAAKTLNIEDEHRLHETSKEPDVSLGSTWLSDFPQAWAETGGMGLAVRQAPLIIPLKATSTPVSIKQYPMSQEARLGIKPHIQRLLDQGILVPCQSPWNTPLLPVKKPGTNDYRPVQDLREVNKRVEDIHPTVPNPYNLLSGLPPSHQWYTVLDLKDAFFCLRLHPTSQPLFAFEWRDPEMGISGQLTWTRLPQGFKNSPTLFNEALHRDLADFRIQHPDLILLQYVDDLLLAATSELDCQQGTRALLQTLGNLGYRASAKKAQICQKQVKYLGYLLKEGQRWLTEARKETVMGQPTPKTPRQLREFLGKAGFCRLFIPGFAEMAAPLYPLTKPGTLFNWGPDQQKAYQEIKQALLTAPALGLPDLTKPFELFVDEKQGYAKGVLTQKLGPWRRPVAYLSKKLDPVAAGWPPCLRMVAAIAVLTKDAGKLTMGQPLVILAPHAVEALVKQPPDRWLSNARMTHYQALLLDTDRVQFGPVVALNPATLLPLPEEGLQHNCLDILAEAHGTRPDLTDQPLPDADHTWYTDGSSLLQEGQRKAGAAVTTETEVIWAKALPAGTSAQRAELIALTQALKMAEGKKLNVYTDSRYAFATAHIHGEIYRRRGWLTSEGKEIKNKDEILALLKALFLPKRLSIIHCPGHQKGHSAEARGNRMADQAARKAAITETPDTSTLLKRTADGSEFESPKKKAKVE

SEQ ID NO: 16077 - protein, 2373 aa, synthetic construct
MPAAKRVKLDGGDKKYSIGLDIGTNSVGWAVITDEYKVPSKKFKVLGNTDRHSIKKNLIGALLFDSGETAEATRLKRTARRRYTRRKNRICYLQEIFSNEMAKVDDSFFHRLEESFLVEEDKKHERHPIFGNIVDEVAYHEKYPTIYHLRKKLVDSTDKADLRLIYLALAHMIKFRGHFLIEGDLNPDNSDVDKLFIQLVQTYNQLFEENPINASGVDAKAILSARLSKSRRLENLIAQLPGEKKNGLFGNLIALSLGLTPNFKSNFDLAEDAKLQLSKDTYDDDLDNLLAQIGDQYADLFLAAKNLSDAILLSDILRVNTEITKAPLSASMIKRYDEHHQDLTLLKALVRQQLPEKYKEIFFDQSKNGYAGYIDGGASQEEFYKFIKPILEKMDGTEELLVKLNREDLLRKQRTFDNGSIPHQIHLGELHAILRRQEDFYPFLKDNREKIEKILTFRIPYYVGPLARGNSRFAWMTRKSEETITPWNFEEVVDKGASAQSFIERMTNFDKNLPNEKVLPKHSLLYEYFTVYNELTKVKYVTEGMRKPAFLSGEQKKAIVDLLFKTNRKVTVKQLKEDYFKKIECFDSVEISGVEDRFNASLGTYHDLLKIIKDKDFLDNEENEDILEDIVLTLTLFEDREMIEERLKTYAHLFDDKVMKQLKRRRYTGWGRLSRKLINGIRDKQSGKTILDFLKSDGFANRNFMQLIHDDSLTFKEDIQKAQVSGQGDSLHEHIANLAGSPAIKKGILQTVKVVDELVKVMGRHKPENIVIEMARENQTTQKGQKNSRERMKRIEEGIKELGSQILKEHPVENTQLQNEKLYLYYLQNGRDMYVDQELDINRLSDYDVDHIVPQSFLKDDSIDNKVLTRSDKARGKSDNVPSEEVVKKMKNYWRQLLNAKLITQRKFDNLTKAERGGLSELDKAGFIKRQLVETRQITKHVAQILDSRMNTKYDENDKLIREVKVITLKSKLVSDFRKDFQFYKVREINNYHHAHDAYLNAVVGTALIKKYPKLESEFVYGDYKVYDVRKMIAKSEQEIGKATAKYFFYSNIMNFFKTEITLANGEIRKRPLIETNGETGEIVWDKGRDFATVRKVLSMPQVNIVKKTEVQTGGFSKESILPKRNSDKLIARKKDWDPKKYGGFDSPTVAYSVLVVAKVEKGKSKKLKSVKELLGITIMERSSFEKNPIDFLEAKGYKEVKKDLIIKLPKYSLFELENGRKRMLASAGELQKGNELALPSKYVNFLYLASHYEKLKGSPEDNEQKQLFVEQHKHYLDEIIEQISEFSKRVILADANLDKVLSAYNKHRDKPIREQAENIIHLFTLTNLGAPAAFKYFDTTIDRKRYTSTKEVLDATLIHQSITGLYETRIDLSQLGGDGSSGSSGSSGSSGSSGSSMASNFTQFVLVDNGGTGDVTVAPSNFANGIAEWISSNSRSQAYKVTCSVRQSSAQNRKYTIKVEVPKGAWRSYLNMELTIPIFATNSDCELIVKAMQGLLKDGNPIPSAIAANSGIYGGSGGSMASNFTQFVLVDNGGTGDVTVAPSNFANGIAEWISSNSRSQAYKVTCSVRQSSAQNRKYTIKVEVPKGAWRSYLNMELTIPIFATNSDCELIVKAMQGLLKDGNPIPSAIAANSGIYAEAAAKEAAAKEAAAKEAAAKALEAEAAAKEAAAKEAAAKEAAAKATLNIEDEHRLHETSKEPDVSLGSTWLSDFPQAWAETGGMGLAVRQAPLIIPLKATSTPVSIKQYPMSQEARLGIKPHIQRLLDQGILVPCQSPWNTPLLPVKKPGTNDYRPVQDLREVNKRVEDIHPTVPNPYNLLSGLPPSHQWYTVLDLKDAFFCLRLHPTSQPLFAFEWRDPEMGISGQLTWTRLPQGFKNSPTLFNEALHRDLADFRIQHPDLILLQYVDDLLLAATSELDCQQGTRALLQTLGNLGYRASAKKAQICQKQVKYLGYLLKEGQRWLTEARKETVMGQPTPKTPRQLREFLGKAGFCRLFIPGFAEMAAPLYPLTKPGTLFNWGPDQQKAYQEIKQALLTAPALGLPDLTKPFELFVDEKQGYAKGVLTQKLGPWRRPVAYLSKKLDPVAAGWPPCLRMVAAIAVLTKDAGKLTMGQPLVILAPHAVEALVKQPPDRWLSNARMTHYQALLLDTDRVQFGPVVALNPATLLPLPEEGLQHNCLDILAEAHGTRPDLTDQPLPDADHTWYTDGSSLLQEGQRKAGAAVTTETEVIWAKALPAGTSAQRAELIALTQALKMAEGKKLNVYTDSRYAFATAHIHGEIYRRRGWLTSEGKEIKNKDEILALLKALFLPKRLSIIHCPGHQKGHSAEARGNRMADQAARKAAITETPDTSTLLKRTADGSEFESPKKKAKVE

SEQ ID NO: 16078 - protein, 2360 aa, synthetic construct
MPAAKRVKLDGGDKKYSIGLDIGTNSVGWAVITDEYKVPSKKFKVLGNTDRHSIKKNLIGALLFDSGETAEATRLKRTARRRYTRRKNRICYLQEIFSNEMAKVDDSFFHRLEESFLVEEDKKHERHPIFGNIVDEVAYHEKYPTIYHLRKKLVDSTDKADLRLIYLALAHMIKFRGHFLIEGDLNPDNSDVDKLFIQLVQTYNQLFEENPINASGVDAKAILSARLSKSRRLENLIAQLPGEKKNGLFGNLIALSLGLTPNFKSNFDLAEDAKLQLSKDTYDDDLDNLLAQIGDQYADLFLAAKNLSDAILLSDILRVNTEITKAPLSASMIKRYDEHHQDLTLLKALVRQQLPEKYKEIFFDQSKNGYAGYIDGGASQEEFYKFIKPILEKMDGTEELLVKLNREDLLRKQRTFDNGSIPHQIHLGELHAILRRQEDFYPFLKDNREKIEKILTFRIPYYVGPLARGNSRFAWMTRKSEETITPWNFEEVVDKGASAQSFIERMTNFDKNLPNEKVLPKHSLLYEYFTVYNELTKVKYVTEGMRKPAFLSGEQKKAIVDLLFKTNRKVTVKQLKEDYFKKIECFDSVEISGVEDRFNASLGTYHDLLKIIKDKDFLDNEENEDILEDIVLTLTLFEDREMIEERLKTYAHLFDDKVMKQLKRRRYTGWGRLSRKLINGIRDKQSGKTILDFLKSDGFANRNFMQLIHDDSLTFKEDIQKAQVSGQGDSLHEHIANLAGSPAIKKGILQTVKVVDELVKVMGRHKPENIVIEMARENQTTQKGQKNSRERMKRIEEGIKELGSQILKEHPVENTQLQNEKLYLYYLQNGRDMYVDQELDINRLSDYDVDHIVPQSFLKDDSIDNKVLTRSDKARGKSDNVPSEEVVKKMKNYWRQLLNAKLITQRKFDNLTKAERGGLSELDKAGFIKRQLVETRQITKHVAQILDSRMNTKYDENDKLIREVKVITLKSKLVSDFRKDFQFYKVREINNYHHAHDAYLNAVVGTALIKKYPKLESEFVYGDYKVYDVRKMIAKSEQEIGKATAKYFFYSNIMNFFKTEITLANGEIRKRPLIETNGETGEIVWDKGRDFATVRKVLSMPQVNIVKKTEVQTGGFSKESILPKRNSDKLIARKKDWDPKKYGGFDSPTVAYSVLVVAKVEKGKSKKLKSVKELLGITIMERSSFEKNPIDFLEAKGYKEVKKDLIIKLPKYSLFELENGRKRMLASAGELQKGNELALPSKYVNFLYLASHYEKLKGSPEDNEQKQLFVEQHKHYLDEIIEQISEFSKRVILADANLDKVLSAYNKHRDKPIREQAENIIHLFTLTNLGAPAAFKYFDTTIDRKRYTSTKEVLDATLIHQSITGLYETRIDLSQLGGDGSSGSSGSSGSSGSSGSSMASNFTQFVLVDNGGTGDVTVAPSNFANGIAEWISSNSRSQAYKVTCSVRQSSAQNRKYTIKVEVPKGAWRSYLNMELTIPIFATNSDCELIVKAMQGLLKDGNPIPSAIAANSGIYGGSGGSMASNFTQFVLVDNGGTGDVTVAPSNFANGIAEWISSNSRSQAYKVTCSVRQSSAQNRKYTIKVEVPKGAWRSYLNMELTIPIFATNSDCELIVKAMQGLLKDGNPIPSAIAANSGIYSGGSSGGSSGSETPGTSESATPESSGGSSGGSSTLNIEDEHRLHETSKEPDVSLGSTWLSDFPQAWAETGGMGLAVRQAPLIIPLKATSTPVSIKQYPMSQEARLGIKPHIQRLLDQGILVPCQSPWNTPLLPVKKPGTNDYRPVQDLREVNKRVEDIHPTVPNPYNLLSGLPPSHQWYTVLDLKDAFFCLRLHPTSQPLFAFEWRDPEMGISGQLTWTRLPQGFKNSPTLFNEALHRDLADFRIQHPDLILLQYVDDLLLAATSELDCQQGTRALLQTLGNLGYRASAKKAQICQKQVKYLGYLLKEGQRWLTEARKETVMGQPTPKTPRQLREFLGKAGFCRLFIPGFAEMAAPLYPLTKPGTLFNWGPDQQKAYQEIKQALLTAPALGLPDLTKPFELFVDEKQGYAKGVLTQKLGPWRRPVAYLSKKLDPVAAGWPPCLRMVAAIAVLTKDAGKLTMGQPLVILAPHAVEALVKQPPDRWLSNARMTHYQALLLDTDRVQFGPVVALNPATLLPLPEEGLQHNCLDILAEAHGTRPDLTDQPLPDADHTWYTDGSSLLQEGQRKAGAAVTTETEVIWAKALPAGTSAQRAELIALTQALKMAEGKKLNVYTDSRYAFATAHIHGEIYRRRGWLTSEGKEIKNKDEILALLKALFLPKRLSIIHCPGHQKGHSAEARGNRMADQAARKAAITETPDTSTLLKRTADGSEFESPKKKAKVE

SEQ ID NO: 16079 - protein, 2345 aa, synthetic construct
MPAAKRVKLDGGDKKYSIGLDIGTNSVGWAVITDEYKVPSKKFKVLGNTDRHSIKKNLIGALLFDSGETAEATRLKRTARRRYTRRKNRICYLQEIFSNEMAKVDDSFFHRLEESFLVEEDKKHERHPIFGNIVDEVAYHEKYPTIYHLRKKLVDSTDKADLRLIYLALAHMIKFRGHFLIEGDLNPDNSDVDKLFIQLVQTYNQLFEENPINASGVDAKAILSARLSKSRRLENLIAQLPGEKKNGLFGNLIALSLGLTPNFKSNFDLAEDAKLQLSKDTYDDDLDNLLAQIGDQYADLFLAAKNLSDAILLSDILRVNTEITKAPLSASMIKRYDEHHQDLTLLKALVRQQLPEKYKEIFFDQSKNGYAGYIDGGASQEEFYKFIKPILEKMDGTEELLVKLNREDLLRKQRTFDNGSIPHQIHLGELHAILRRQEDFYPFLKDNREKIEKILTFRIPYYVGPLARGNSRFAWMTRKSEETITPWNFEEVVDKGASAQSFIERMTNFDKNLPNEKVLPKHSLLYEYFTVYNELTKVKYVTEGMRKPAFLSGEQKKAIVDLLFKTNRKVTVKQLKEDYFKKIECFDSVEISGVEDRFNASLGTYHDLLKIIKDKDFLDNEENEDILEDIVLTLTLFEDREMIEERLKTYAHLFDDKVMKQLKRRRYTGWGRLSRKLINGIRDKQSGKTILDFLKSDGFANRNFMQLIHDDSLTFKEDIQKAQVSGQGDSLHEHIANLAGSPAIKKGILQTVKVVDELVKVMGRHKPENIVIEMARENQTTQKGQKNSRERMKRIEEGIKELGSQILKEHPVENTQLQNEKLYLYYLQNGRDMYVDQELDINRLSDYDVDHIVPQSFLKDDSIDNKVLTRSDKARGKSDNVPSEEVVKKMKNYWRQLLNAKLITQRKFDNLTKAERGGLSELDKAGFIKRQLVETRQITKHVAQILDSRMNTKYDENDKLIREVKVITLKSKLVSDFRKDFQFYKVREINNYHHAHDAYLNAVVGTALIKKYPKLESEFVYGDYKVYDVRKMIAKSEQEIGKATAKYFFYSNIMNFFKTEITLANGEIRKRPLIETNGETGEIVWDKGRDFATVRKVLSMPQVNIVKKTEVQTGGFSKESILPKRNSDKLIARKKDWDPKKYGGFDSPTVAYSVLVVAKVEKGKSKKLKSVKELLGITIMERSSFEKNPIDFLEAKGYKEVKKDLIIKLPKYSLFELENGRKRMLASAGELQKGNELALPSKYVNFLYLASHYEKLKGSPEDNEQKQLFVEQHKHYLDEIIEQISEFSKRVILADANLDKVLSAYNKHRDKPIREQAENIIHLFTLTNLGAPAAFKYFDTTIDRKRYTSTKEVLDATLIHQSITGLYETRIDLSQLGGDGSSGSSGSSGSSGSSGSSMASNFTQFVLVDNGGTGDVTVAPSNFANGIAEWISSNSRSQAYKVTCSVRQSSAQNRKYTIKVEVPKGAWRSYLNMELTIPIFATNSDCELIVKAMQGLLKDGNPIPSAIAANSGIYGGSGGSMASNFTQFVLVDNGGTGDVTVAPSNFANGIAEWISSNSRSQAYKVTCSVRQSSAQNRKYTIKVEVPKGAWRSYLNMELTIPIFATNSDCELIVKAMQGLLKDGNPIPSAIAANSGIYGSSGSSGSSGSSGSSGSSTLNIEDEHRLHETSKEPDVSLGSTWLSDFPQAWAETGGMGLAVRQAPLIIPLKATSTPVSIKQYPMSQEARLGIKPHIQRLLDQGILVPCQSPWNTPLLPVKKPGTNDYRPVQDLREVNKRVEDIHPTVPNPYNLLSGLPPSHQWYTVLDLKDAFFCLRLHPTSQPLFAFEWRDPEMGISGQLTWTRLPQGFKNSPTLFNEALHRDLADFRIQHPDLILLQYVDDLLLAATSELDCQQGTRALLQTLGNLGYRASAKKAQICQKQVKYLGYLLKEGQRWLTEARKETVMGQPTPKTPRQLREFLGKAGFCRLFIPGFAEMAAPLYPLTKPGTLFNWGPDQQKAYQEIKQALLTAPALGLPDLTKPFELFVDEKQGYAKGVLTQKLGPWRRPVAYLSKKLDPVAAGWPPCLRMVAAIAVLTKDAGKLTMGQPLVILAPHAVEALVKQPPDRWLSNARMTHYQALLLDTDRVQFGPVVALNPATLLPLPEEGLQHNCLDILAEAHGTRPDLTDQPLPDADHTWYTDGSSLLQEGQRKAGAAVTTETEVIWAKALPAGTSAQRAELIALTQALKMAEGKKLNVYTDSRYAFATAHIHGEIYRRRGWLTSEGKEIKNKDEILALLKALFLPKRLSIIHCPGHQKGHSAEARGNRMADQAARKAAITETPDTSTLLKRTADGSEFESPKKKAKVE

SEQ ID NO: 16080 - protein, 2338 aa, synthetic construct
MPAAKRVKLDGGDKKYSIGLDIGTNSVGWAVITDEYKVPSKKFKVLGNTDRHSIKKNLIGALLFDSGETAEATRLKRTARRRYTRRKNRICYLQEIFSNEMAKVDDSFFHRLEESFLVEEDKKHERHPIFGNIVDEVAYHEKYPTIYHLRKKLVDSTDKADLRLIYLALAHMIKFRGHFLIEGDLNPDNSDVDKLFIQLVQTYNQLFEENPINASGVDAKAILSARLSKSRRLENLIAQLPGEKKNGLFGNLIALSLGLTPNFKSNFDLAEDAKLQLSKDTYDDDLDNLLAQIGDQYADLFLAAKNLSDAILLSDILRVNTEITKAPLSASMIKRYDEHHQDLTLLKALVRQQLPEKYKEIFFDQSKNGYAGYIDGGASQEEFYKFIKPILEKMDGTEELLVKLNREDLLRKQRTFDNGSIPHQIHLGELHAILRRQEDFYPFLKDNREKIEKILTFRIPYYVGPLARGNSRFAWMTRKSEETITPWNFEEVVDKGASAQSFIERMTNFDKNLPNEKVLPKHSLLYEYFTVYNELTKVKYVTEGMRKPAFLSGEQKKAIVDLLFKTNRKVTVKQLKEDYFKKIECFDSVEISGVEDRFNASLGTYHDLLKIIKDKDFLDNEENEDILEDIVLTLTLFEDREMIEERLKTYAHLFDDKVMKQLKRRRYTGWGRLSRKLINGIRDKQSGKTILDFLKSDGFANRNFMQLIHDDSLTFKEDIQKAQVSGQGDSLHEHIANLAGSPAIKKGILQTVKVVDELVKVMGRHKPENIVIEMARENQTTQKGQKNSRERMKRIEEGIKELGSQILKEHPVENTQLQNEKLYLYYLQNGRDMYVDQELDINRLSDYDVDHIVPQSFLKDDSIDNKVLTRSDKARGKSDNVPSEEVVKKMKNYWRQLLNAKLITQRKFDNLTKAERGGLSELDKAGFIKRQLVETRQITKHVAQILDSRMNTKYDENDKLIREVKVITLKSKLVSDFRKDFQFYKVREINNYHHAHDAYLNAVVGTALIKKYPKLESEFVYGDYKVYDVRKMIAKSEQEIGKATAKYFFYSNIMNFFKTEITLANGEIRKRPLIETNGETGEIVWDKGRDFATVRKVLSMPQVNIVKKTEVQTGGFSKESILPKRNSDKLIARKKDWDPKKYGGFDSPTVAYSVLVVAKVEKGKSKKLKSVKELLGITIMERSSFEKNPIDFLEAKGYKEVKKDLIIKLPKYSLFELENGRKRMLASAGELQKGNELALPSKYVNFLYLASHYEKLKGSPEDNEQKQLFVEQHKHYLDEIIEQISEFSKRVILADANLDKVLSAYNKHRDKPIREQAENIIHLFTLTNLGAPAAFKYFDTTIDRKRYTSTKEVLDATLIHQSITGLYETRIDLSQLGGDGSSGSSGSSGSSGSSGSSMASNFTQFVLVDNGGTGDVTVAPSNFANGIAEWISSNSRSQAYKVTCSVRQSSAQNRKYTIKVEVPKGAWRSYLNMELTIPIFATNSDCELIVKAMQGLLKDGNPIPSAIAANSGIYGGSGGSMASNFTQFVLVDNGGTGDVTVAPSNFANGIAEWISSNSRSQAYKVTCSVRQSSAQNRKYTIKVEVPKGAWRSYLNMELTIPIFATNSDCELIVKAMQGLLKDGNPIPSAIAANSGIYGSSGGGEAAAKTLNIEDEHRLHETSKEPDVSLGSTWLSDFPQAWAETGGMGLAVRQAPLIIPLKATSTPVSIKQYPMSQEARLGIKPHIQRLLDQGILVPCQSPWNTPLLPVKKPGTNDYRPVQDLREVNKRVEDIHPTVPNPYNLLSGLPPSHQWYTVLDLKDAFFCLRLHPTSQPLFAFEWRDPEMGISGQLTWTRLPQGFKNSPTLFNEALHRDLADFRIQHPDLILLQYVDDLLLAATSELDCQQGTRALLQTLGNLGYRASAKKAQICQKQVKYLGYLLKEGQRWLTEARKETVMGQPTPKTPRQLREFLGKAGFCRLFIPGFAEMAAPLYPLTKPGTLFNWGPDQQKAYQEIKQALLTAPALGLPDLTKPFELFVDEKQGYAKGVLTQKLGPWRRPVAYLSKKLDPVAAGWPPCLRMVAAIAVLTKDAGKLTMGQPLVILAPHAVEALVKQPPDRWLSNARMTHYQALLLDTDRVQFGPVVALNPATLLPLPEEGLQHNCLDILAEAHGTRPDLTDQPLPDADHTWYTDGSSLLQEGQRKAGAAVTTETEVIWAKALPAGTSAQRAELIALTQALKMAEGKKLNVYTDSRYAFATAHIHGEIYRRRGWLTSEGKEIKNKDEILALLKALFLPKRLSIIHCPGHQKGHSAEARGNRMADQAARKAAITETPDTSTLLKRTADGSEFESPKKKAKVE

SEQ ID NO: 16081 - protein, 2629 aa, synthetic construct
MPAAKRVKLDGGDKKYSIGLDIGTNSVGWAVITDEYKVPSKKFKVLGNTDRHSIKKNLIGALLFDSGETAEATRLKRTARRRYTRRKNRICYLQEIFSNEMAKVDDSFFHRLEESFLVEEDKKHERHPIFGNIVDEVAYHEKYPTIYHLRKKLVDSTDKADLRLIYLALAHMIKFRGHFLIEGDLNPDNSDVDKLFIQLVQTYNQLFEENPINASGVDAKAILSARLSKSRRLENLIAQLPGEKKNGLFGNLIALSLGLTPNFKSNFDLAEDAKLQLSKDTYDDDLDNLLAQIGDQYADLFLAAKNLSDAILLSDILRVNTEITKAPLSASMIKRYDEHHQDLTLLKALVRQQLPEKYKEIFFDQSKNGYAGYIDGGASQEEFYKFIKPILEKMDGTEELLVKLNREDLLRKQRTFDNGSIPHQIHLGELHAILRRQEDFYPFLKDNREKIEKILTFRIPYYVGPLARGNSRFAWMTRKSEETITPWNFEEVVDKGASAQSFIERMTNFDKNLPNEKVLPKHSLLYEYFTVYNELTKVKYVTEGMRKPAFLSGEQKKAIVDLLFKTNRKVTVKQLKEDYFKKIECFDSVEISGVEDRFNASLGTYHDLLKIIKDKDFLDNEENEDILEDIVLTLTLFEDREMIEERLKTYAHLFDDKVMKQLKRRRYTGWGRLSRKLINGIRDKQSGKTILDFLKSDGFANRNFMQLIHDDSLTFKEDIQKAQVSGQGDSLHEHIANLAGSPAIKKGILQTVKVVDELVKVMGRHKPENIVIEMARENQTTQKGQKNSRERMKRIEEGIKELGSQILKEHPVENTQLQNEKLYLYYLQNGRDMYVDQELDINRLSDYDVDHIVPQSFLKDDSIDNKVLTRSDKARGKSDNVPSEEVVKKMKNYWRQLLNAKLITQRKFDNLTKAERGGLSELDKAGFIKRQLVETRQITKHVAQILDSRMNTKYDENDKLIREVKVITLKSKLVSDFRKDFQFYKVREINNYHHAHDAYLNAVVGTALIKKYPKLESEFVYGDYKVYDVRKMIAKSEQEIGKATAKYFFYSNIMNFFKTEITLANGEIRKRPLIETNGETGEIVWDKGRDFATVRKVLSMPQVNIVKKTEVQTGGFSKESILPKRNSDKLIARKKDWDPKKYGGFDSPTVAYSVLVVAKVEKGKSKKLKSVKELLGITIMERSSFEKNPIDFLEAKGYKEVKKDLIIKLPKYSLFELENGRKRMLASAGELQKGNELALPSKYVNFLYLASHYEKLKGSPEDNEQKQLFVEQHKHYLDEIIEQISEFSKRVILADANLDKVLSAYNKHRDKPIREQAENIIHLFTLTNLGAPAAFKYFDTTIDRKRYTSTKEVLDATLIHQSITGLYETRIDLSQLGGDGSSGSSGSSGSSGSSGSSMASNFTQFVLVDNGGTGDVTVAPSNFANGIAEWISSNSRSQAYKVTCSVRQSSAQNRKYTIKVEVPKGAWRSYLNMELTIPIFATNSDCELIVKAMQGLLKDGNPIPSAIAANSGIYGGSGGSMASNFTQFVLVDNGGTGDVTVAPSNFANGIAEWISSNSRSQAYKVTCSVRQSSAQNRKYTIKVEVPKGAWRSYLNMELTIPIFATNSDCELIVKAMQGLLKDGNPIPSAIAANSGIYGGGSGGGSGGGSGGGSMASNFTQFVLVDNGGTGDVTVAPSNFANGIAEWISSNSRSQAYKVTCSVRQSSAQNRKYTIKVEVPKGAWRSYLNMELTIPIFATNSDCELIVKAMQGLLKDGNPIPSAIAANSGIYGGSGGSMASNFTQFVLVDNGGTGDVTVAPSNFANGIAEWISSNSRSQAYKVTCSVRQSSAQNRKYTIKVEVPKGAWRSYLNMELTIPIFATNSDCELIVKAMQGLLKDGNPIPSAIAANSGIYAEAAAKEAAAKEAAAKEAAAKALEAEAAAKEAAAKEAAAKEAAAKATLNIEDEHRLHETSKEPDVSLGSTWLSDFPQAWAETGGMGLAVRQAPLIIPLKATSTPVSIKQYPMSQEARLGIKPHIQRLLDQGILVPCQSPWNTPLLPVKKPGTNDYRPVQDLREVNKRVEDIHPTVPNPYNLLSGLPPSHQWYTVLDLKDAFFCLRLHPTSQPLFAFEWRDPEMGISGQLTWTRLPQGFKNSPTLFNEALHRDLADFRIQHPDLILLQYVDDLLLAATSELDCQQGTRALLQTLGNLGYRASAKKAQICQKQVKYLGYLLKEGQRWLTEARKETVMGQPTPKTPRQLREFLGKAGFCRLFIPGFAEMAAPLYPLTKPGTLFNWGPDQQKAYQEIKQALLTAPALGLPDLTKPFELFVDEKQGYAKGVLTQKLGPWRRPVAYLSKKLDPVAAGWPPCLRMVAAIAVLTKDAGKLTMGQPLVILAPHAVEALVKQPPDRWLSNARMTHYQALLLDTDRVQFGPVVALNPATLLPLPEEGLQHNCLDILAEAHGTRPDLTDQPLPDADHTWYTDGSSLLQEGQRKAGAAVTTETEVIWAKALPAGTSAQRAELIALTQALKMAEGKKLNVYTDSRYAFATAHIHGEIYRRRGWLTSEGKEIKNKDEILALLKALFLPKRLSIIHCPGHQKGHSAEARGNRMADQAARKAAITETPDTSTLLKRTADGSEFESPKKKAKVE

SEQ ID NO: 16082 - protein, 2616 aa, synthetic construct
MPAAKRVKLDGGDKKYSIGLDIGTNSVGWAVITDEYKVPSKKFKVLGNTDRHSIKKNLIGALLFDSGETAEATRLKRTARRRYTRRKNRICYLQEIFSNEMAKVDDSFFHRLEESFLVEEDKKHERHPIFGNIVDEVAYHEKYPTIYHLRKKLVDSTDKADLRLIYLALAHMIKFRGHFLIEGDLNPDNSDVDKLFIQLVQTYNQLFEENPINASGVDAKAILSARLSKSRRLENLIAQLPGEKKNGLFGNLIALSLGLTPNFKSNFDLAEDAKLQLSKDTYDDDLDNLLAQIGDQYADLFLAAKNLSDAILLSDILRVNTEITKAPLSASMIKRYDEHHQDLTLLKALVRQQLPEKYKEIFFDQSKNGYAGYIDGGASQEEFYKFIKPILEKMDGTEELLVKLNREDLLRKQRTFDNGSIPHQIHLGELHAILRRQEDFYPFLKDNREKIEKILTFRIPYYVGPLARGNSRFAWMTRKSEETITPWNFEEVVDKGASAQSFIERMTNFDKNLPNEKVLPKHSLLYEYFTVYNELTKVKYVTEGMRKPAFLSGEQKKAIVDLLFKTNRKVTVKQLKEDYFKKIECFDSVEISGVEDRFNASLGTYHDLLKIIKDKDFLDNEENEDILEDIVLTLTLFEDREMIEERLKTYAHLFDDKVMKQLKRRRYTGWGRLSRKLINGIRDKQSGKTILDFLKSDGFANRNFMQLIHDDSLTFKEDIQKAQVSGQGDSLHEHIANLAGSPAIKKGILQTVKVVDELVKVMGRHKPENIVIEMARENQTTQKGQKNSRERMKRIEEGIKELGSQILKEHPVENTQLQNEKLYLYYLQNGRDMYVDQELDINRLSDYDVDHIVPQSFLKDDSIDNKVLTRSDKARGKSDNVPSEEVVKKMKNYWRQLLNAKLITQRKFDNLTKAERGGLSELDKAGFIKRQLVETRQITKHVAQILDSRMNTKYDENDKLIREVKVITLKSKLVSDFRKDFQFYKVREINNYHHAHDAYLNAVVGTALIKKYPKLESEFVYGDYKVYDVRKMIAKSEQEIGKATAKYFFYSNIMNFFKTEITLANGEIRKRPLIETNGETGEIVWDKGRDFATVRKVLSMPQVNIVKKTEVQTGGFSKESILPKRNSDKLIARKKDWDPKKYGGFDSPTVAYSVLVVAKVEKGKSKKLKSVKELLGITIMERSSFEKNPIDFLEAKGYKEVKKDLIIKLPKYSLFELENGRKRMLASAGELQKGNELALPSKYVNFLYLASHYEKLKGSPEDNEQKQLFVEQHKHYLDEIIEQISEFSKRVILADANLDKVLSAYNKHRDKPIREQAENIIHLFTLTNLGAPAAFKYFDTTIDRKRYTSTKEVLDATLIHQSITGLYETRIDLSQLGGDGSSGSSGSSGSSGSSGSSMASNFTQFVLVDNGGTGDVTVAPSNFANGIAEWISSNSRSQAYKVTCSVRQSSAQNRKYTIKVEVPKGAWRSYLNMELTIPIFATNSDCELIVKAMQGLLKDGNPIPSAIAANSGIYGGSGGSMASNFTQFVLVDNGGTGDVTVAPSNFANGIAEWISSNSRSQAYKVTCSVRQSSAQNRKYTIKVEVPKGAWRSYLNMELTIPIFATNSDCELIVKAMQGLLKDGNPIPSAIAANSGIYGGGSGGGSGGGSGGGSMASNFTQFVLVDNGGTGDVTVAPSNFANGIAEWISSNSRSQAYKVTCSVRQSSAQNRKYTIKVEVPKGAWRSYLNMELTIPIFATNSDCELIVKAMQGLLKDGNPIPSAIAANSGIYGGSGGSMASNFTQFVLVDNGGTGDVTVAPSNFANGIAEWISSNSRSQAYKVTCSVRQSSAQNRKYTIKVEVPKGAWRSYLNMELTIPIFATNSDCELIVKAMQGLLKDGNPIPSAIAANSGIYSGGSSGGSSGSETPGTSESATPESSGGSSGGSSTLNIEDEHRLHETSKEPDVSLGSTWLSDFPQAWAETGGMGLAVRQAPLIIPLKATSTPVSIKQYPMSQEARLGIKPHIQRLLDQGILVPCQSPWNTPLLPVKKPGTNDYRPVQDLREVNKRVEDIHPTVPNPYNLLSGLPPSHQWYTVLDLKDAFFCLRLHPTSQPLFAFEWRDPEMGISGQLTWTRLPQGFKNSPTLFNEALHRDLADFRIQHPDLILLQYVDDLLLAATSELDCQQGTRALLQTLGNLGYRASAKKAQICQKQVKYLGYLLKEGQRWLTEARKETVMGQPTPKTPRQLREFLGKAGFCRLFIPGFAEMAAPLYPLTKPGTLFNWGPDQQKAYQEIKQALLTAPALGLPDLTKPFELFVDEKQGYAKGVLTQKLGPWRRPVAYLSKKLDPVAAGWPPCLRMVAAIAVLTKDAGKLTMGQPLVILAPHAVEALVKQPPDRWLSNARMTHYQALLLDTDRVQFGPVVALNPATLLPLPEEGLQHNCLDILAEAHGTRPDLTDQPLPDADHTWYTDGSSLLQEGQRKAGAAVTTETEVIWAKALPAGTSAQRAELIALTQALKMAEGKKLNVYTDSRYAFATAHIHGEIYRRRGWLTSEGKEIKNKDEILALLKALFLPKRLSIIHCPGHQKGHSAEARGNRMADQAARKAAITETPDTSTLLKRTADGSEFESPKKKAKVE

SEQ ID NO: 16083 - protein, 2601 aa, synthetic construct
MPAAKRVKLDGGDKKYSIGLDIGTNSVGWAVITDEYKVPSKKFKVLGNTDRHSIKKNLIGALLFDSGETAEATRLKRTARRRYTRRKNRICYLQEIFSNEMAKVDDSFFHRLEESFLVEEDKKHERHPIFGNIVDEVAYHEKYPTIYHLRKKLVDSTDKADLRLIYLALAHMIKFRGHFLIEGDLNPDNSDVDKLFIQLVQTYNQLFEENPINASGVDAKAILSARLSKSRRLENLIAQLPGEKKNGLFGNLIALSLGLTPNFKSNFDLAEDAKLQLSKDTYDDDLDNLLAQIGDQYADLFLAAKNLSDAILLSDILRVNTEITKAPLSASMIKRYDEHHQDLTLLKALVRQQLPEKYKEIFFDQSKNGYAGYIDGGASQEEFYKFIKPILEKMDGTEELLVKLNREDLLRKQRTFDNGSIPHQIHLGELHAILRRQEDFYPFLKDNREKIEKILTFRIPYYVGPLARGNSRFAWMTRKSEETITPWNFEEVVDKGASAQSFIERMTNFDKNLPNEKVLPKHSLLYEYFTVYNELTKVKYVTEGMRKPAFLSGEQKKAIVDLLFKTNRKVTVKQLKEDYFKKIECFDSVEISGVEDRFNASLGTYHDLLKIIKDKDFLDNEENEDILEDIVLTLTLFEDREMIEERLKTYAHLFDDKVMKQLKRRRYTGWGRLSRKLINGIRDKQSGKTILDFLKSDGFANRNFMQLIHDDSLTFKEDIQKAQVSGQGDSLHEHIANLAGSPAIKKGILQTVKVVDELVKVMGRHKPENIVIEMARENQTTQKGQKNSRERMKRIEEGIKELGSQILKEHPVENTQLQNEKLYLYYLQNGRDMYVDQELDINRLSDYDVDHIVPQSFLKDDSIDNKVLTRSDKARGKSDNVPSEEVVKKMKNYWRQLLNAKLITQRKFDNLTKAERGGLSELDKAGFIKRQLVETRQITKHVAQILDSRMNTKYDENDKLIREVKVITLKSKLVSDFRKDFQFYKVREINNYHHAHDAYLNAVVGTALIKKYPKLESEFVYGDYKVYDVRKMIAKSEQEIGKATAKYFFYSNIMNFFKTEITLANGEIRKRPLIETNGETGEIVWDKGRDFATVRKVLSMPQVNIVKKTEVQTGGFSKESILPKRNSDKLIARKKDWDPKKYGGFDSPTVAYSVLVVAKVEKGKSKKLKSVKELLGITIMERSSFEKNPIDFLEAKGYKEVKKDLIIKLPKYSLFELENGRKRMLASAGELQKGNELALPSKYVNFLYLASHYEKLKGSPEDNEQKQLFVEQHKHYLDEIIEQISEFSKRVILADANLDKVLSAYNKHRDKPIREQAENIIHLFTLTNLGAPAAFKYFDTTIDRKRYTSTKEVLDATLIHQSITGLYETRIDLSQLGGDGSSGSSGSSGSSGSSGSSMASNFTQFVLVDNGGTGDVTVAPSNFANGIAEWISSNSRSQAYKVTCSVRQSSAQNRKYTIKVEVPKGAWRSYLNMELTIPIFATNSDCELIVKAMQGLLKDGNPIPSAIAANSGIYGGSGGSMASNFTQFVLVDNGGTGDVTVAPSNFANGIAEWISSNSRSQAYKVTCSVRQSSAQNRKYTIKVEVPKGAWRSYLNMELTIPIFATNSDCELIVKAMQGLLKDGNPIPSAIAANSGIYGGGSGGGSGGGSGGGSMASNFTQFVLVDNGGTGDVTVAPSNFANGIAEWISSNSRSQAYKVTCSVRQSSAQNRKYTIKVEVPKGAWRSYLNMELTIPIFATNSDCELIVKAMQGLLKDGNPIPSAIAANSGIYGGSGGSMASNFTQFVLVDNGGTGDVTVAPSNFANGIAEWISSNSRSQAYKVTCSVRQSSAQNRKYTIKVEVPKGAWRSYLNMELTIPIFATNSDCELIVKAMQGLLKDGNPIPSAIAANSGIYGSSGSSGSSGSSGSSGSSTLNIEDEHRLHETSKEPDVSLGSTWLSDFPQAWAETGGMGLAVRQAPLIIPLKATSTPVSIKQYPMSQEARLGIKPHIQRLLDQGILVPCQSPWNTPLLPVKKPGTNDYRPVQDLREVNKRVEDIHPTVPNPYNLLSGLPPSHQWYTVLDLKDAFFCLRLHPTSQPLFAFEWRDPEMGISGQLTWTRLPQGFKNSPTLFNEALHRDLADFRIQHPDLILLQYVDDLLLAATSELDCQQGTRALLQTLGNLGYRASAKKAQICQKQVKYLGYLLKEGQRWLTEARKETVMGQPTPKTPRQLREFLGKAGFCRLFIPGFAEMAAPLYPLTKPGTLFNWGPDQQKAYQEIKQALLTAPALGLPDLTKPFELFVDEKQGYAKGVLTQKLGPWRRPVAYLSKKLDPVAAGWPPCLRMVAAIAVLTKDAGKLTMGQPLVILAPHAVEALVKQPPDRWLSNARMTHYQALLLDTDRVQFGPVVALNPATLLPLPEEGLQHNCLDILAEAHGTRPDLTDQPLPDADHTWYTDGSSLLQEGQRKAGAAVTTETEVIWAKALPAGTSAQRAELIALTQALKMAEGKKLNVYTDSRYAFATAHIHGEIYRRRGWLTSEGKEIKNKDEILALLKALFLPKRLSIIHCPGHQKGHSAEARGNRMADQAARKAAITETPDTSTLLKRTADGSEFESPKKKAKVE

SEQ ID NO: 16084 - protein, 2594 aa, synthetic construct
MPAAKRVKLDGGDKKYSIGLDIGTNSVGWAVITDEYKVPSKKFKVLGNTDRHSIKKNLIGALLFDSGETAEATRLKRTARRRYTRRKNRICYLQEIFSNEMAKVDDSFFHRLEESFLVEEDKKHERHPIFGNIVDEVAYHEKYPTIYHLRKKLVDSTDKADLRLIYLALAHMIKFRGHFLIEGDLNPDNSDVDKLFIQLVQTYNQLFEENPINASGVDAKAILSARLSKSRRLENLIAQLPGEKKNGLFGNLIALSLGLTPNFKSNFDLAEDAKLQLSKDTYDDDLDNLLAQIGDQYADLFLAAKNLSDAILLSDILRVNTEITKAPLSASMIKRYDEHHQDLTLLKALVRQQLPEKYKEIFFDQSKNGYAGYIDGGASQEEFYKFIKPILEKMDGTEELLVKLNREDLLRKQRTFDNGSIPHQIHLGELHAILRRQEDFYPFLKDNREKIEKILTFRIPYYVGPLARGNSRFAWMTRKSEETITPWNFEEVVDKGASAQSFIERMTNFDKNLPNEKVLPKHSLLYEYFTVYNELTKVKYVTEGMRKPAFLSGEQKKAIVDLLFKTNRKVTVKQLKEDYFKKIECFDSVEISGVEDRFNASLGTYHDLLKIIKDKDFLDNEENEDILEDIVLTLTLFEDREMIEERLKTYAHLFDDKVMKQLKRRRYTGWGRLSRKLINGIRDKQSGKTILDFLKSDGFANRNFMQLIHDDSLTFKEDIQKAQVSGQGDSLHEHIANLAGSPAIKKGILQTVKVVDELVKVMGRHKPENIVIEMARENQTTQKGQKNSRERMKRIEEGIKELGSQILKEHPVENTQLQNEKLYLYYLQNGRDMYVDQELDINRLSDYDVDHIVPQSFLKDDSIDNKVLTRSDKARGKSDNVPSEEVVKKMKNYWRQLLNAKLITQRKFDNLTKAERGGLSELDKAGFIKRQLVETRQITKHVAQILDSRMNTKYDENDKLIREVKVITLKSKLVSDFRKDFQFYKVREINNYHHAHDAYLNAVVGTALIKKYPKLESEFVYGDYKVYDVRKMIAKSEQEIGKATAKYFFYSNIMNFFKTEITLANGEIRKRPLIETNGETGEIVWDKGRDFATVRKVLSMPQVNIVKKTEVQTGGFSKESILPKRNSDKLIARKKDWDPKKYGGFDSPTVAYSVLVVAKVEKGKSKKLKSVKELLGITIMERSSFEKNPIDFLEAKGYKEVKKDLIIKLPKYSLFELENGRKRMLASAGELQKGNELALPSKYVNFLYLASHYEKLKGSPEDNEQKQLFVEQHKHYLDEIIEQISEFSKRVILADANLDKVLSAYNKHRDKPIREQAENIIHLFTLTNLGAPAAFKYFDTTIDRKRYTSTKEVLDATLIHQSITGLYETRIDLSQLGGDGSSGSSGSSGSSGSSGSSMASNFTQFVLVDNGGTGDVTVAPSNFANGIAEWISSNSRSQAYKVTCSVRQSSAQNRKYTIKVEVPKGAWRSYLNMELTIPIFATNSDCELIVKAMQGLLKDGNPIPSAIAANSGIYGGSGGSMASNFTQFVLVDNGGTGDVTVAPSNFANGIAEWISSNSRSQAYKVTCSVRQSSAQNRKYTIKVEVPKGAWRSYLNMELTIPIFATNSDCELIVKAMQGLLKDGNPIPSAIAANSGIYGGGSGGGSGGGSGGGSMASNFTQFVLVDNGGTGDVTVAPSNFANGIAEWISSNSRSQAYKVTCSVRQSSAQNRKYTIKVEVPKGAWRSYLNMELTIPIFATNSDCELIVKAMQGLLKDGNPIPSAIAANSGIYGGSGGSMASNFTQFVLVDNGGTGDVTVAPSNFANGIAEWISSNSRSQAYKVTCSVRQSSAQNRKYTIKVEVPKGAWRSYLNMELTIPIFATNSDCELIVKAMQGLLKDGNPIPSAIAANSGIYGSSGGGEAAAKTLNIEDEHRLHETSKEPDVSLGSTWLSDFPQAWAETGGMGLAVRQAPLIIPLKATSTPVSIKQYPMSQEARLGIKPHIQRLLDQGILVPCQSPWNTPLLPVKKPGTNDYRPVQDLREVNKRVEDIHPTVPNPYNLLSGLPPSHQWYTVLDLKDAFFCLRLHPTSQPLFAFEWRDPEMGISGQLTWTRLPQGFKNSPTLFNEALHRDLADFRIQHPDLILLQYVDDLLLAATSELDCQQGTRALLQTLGNLGYRASAKKAQICQKQVKYLGYLLKEGQRWLTEARKETVMGQPTPKTPRQLREFLGKAGFCRLFIPGFAEMAAPLYPLTKPGTLFNWGPDQQKAYQEIKQALLTAPALGLPDLTKPFELFVDEKQGYAKGVLTQKLGPWRRPVAYLSKKLDPVAAGWPPCLRMVAAIAVLTKDAGKLTMGQPLVILAPHAVEALVKQPPDRWLSNARMTHYQALLLDTDRVQFGPVVALNPATLLPLPEEGLQHNCLDILAEAHGTRPDLTDQPLPDADHTWYTDGSSLLQEGQRKAGAAVTTETEVIWAKALPAGTSAQRAELIALTQALKMAEGKKLNVYTDSRYAFATAHIHGEIYRRRGWLTSEGKEIKNKDEILALLKALFLPKRLSIIHCPGHQKGHSAEARGNRMADQAARKAAITETPDTSTLLKRTADGSEFESPKKKAKVE

SEQ ID NO: 16085 - protein, 2243 aa, synthetic construct
MPAAKRVKLDGGDKKYSIGLDIGTNSVGWAVITDEYKVPSKKFKVLGNTDRHSIKKNLIGALLFDSGETAEATRLKRTARRRYTRRKNRICYLQEIFSNEMAKVDDSFFHRLEESFLVEEDKKHERHPIFGNIVDEVAYHEKYPTIYHLRKKLVDSTDKADLRLIYLALAHMIKFRGHFLIEGDLNPDNSDVDKLFIQLVQTYNQLFEENPINASGVDAKAILSARLSKSRRLENLIAQLPGEKKNGLFGNLIALSLGLTPNFKSNFDLAEDAKLQLSKDTYDDDLDNLLAQIGDQYADLFLAAKNLSDAILLSDILRVNTEITKAPLSASMIKRYDEHHQDLTLLKALVRQQLPEKYKEIFFDQSKNGYAGYIDGGASQEEFYKFIKPILEKMDGTEELLVKLNREDLLRKQRTFDNGSIPHQIHLGELHAILRRQEDFYPFLKDNREKIEKILTFRIPYYVGPLARGNSRFAWMTRKSEETITPWNFEEVVDKGASAQSFIERMTNFDKNLPNEKVLPKHSLLYEYFTVYNELTKVKYVTEGMRKPAFLSGEQKKAIVDLLFKTNRKVTVKQLKEDYFKKIECFDSVEISGVEDRFNASLGTYHDLLKIIKDKDFLDNEENEDILEDIVLTLTLFEDREMIEERLKTYAHLFDDKVMKQLKRRRYTGWGRLSRKLINGIRDKQSGKTILDFLKSDGFANRNFMQLIHDDSLTFKEDIQKAQVSGQGDSLHEHIANLAGSPAIKKGILQTVKVVDELVKVMGRHKPENIVIEMARENQTTQKGQKNSRERMKRIEEGIKELGSQILKEHPVENTQLQNEKLYLYYLQNGRDMYVDQELDINRLSDYDVDHIVPQSFLKDDSIDNKVLTRSDKARGKSDNVPSEEVVKKMKNYWRQLLNAKLITQRKFDNLTKAERGGLSELDKAGFIKRQLVETRQITKHVAQILDSRMNTKYDENDKLIREVKVITLKSKLVSDFRKDFQFYKVREINNYHHAHDAYLNAVVGTALIKKYPKLESEFVYGDYKVYDVRKMIAKSEQEIGKATAKYFFYSNIMNFFKTEITLANGEIRKRPLIETNGETGEIVWDKGRDFATVRKVLSMPQVNIVKKTEVQTGGFSKESILPKRNSDKLIARKKDWDPKKYGGFDSPTVAYSVLVVAKVEKGKSKKLKSVKELLGITIMERSSFEKNPIDFLEAKGYKEVKKDLIIKLPKYSLFELENGRKRMLASAGELQKGNELALPSKYVNFLYLASHYEKLKGSPEDNEQKQLFVEQHKHYLDEIIEQISEFSKRVILADANLDKVLSAYNKHRDKPIREQAENIIHLFTLTNLGAPAAFKYFDTTIDRKRYTSTKEVLDATLIHQSITGLYETRIDLSQLGGDGSSGGGEAAAKMASNFTQFVLVDNGGTGDVTVAPSNFANGIAEWISSNSRSQAYKVTCSVRQSSAQNRKYTIKVEVPKGAWRSYLNMELTIPIFATNSDCELIVKAMQGLLKDGNPIPSAIAANSGIYAEAAAKEAAAKEAAAKEAAAKALEAEAAAKEAAAKEAAAKEAAAKATLNIEDEHRLHETSKEPDVSLGSTWLSDFPQAWAETGGMGLAVRQAPLIIPLKATSTPVSIKQYPMSQEARLGIKPHIQRLLDQGILVPCQSPWNTPLLPVKKPGTNDYRPVQDLREVNKRVEDIHPTVPNPYNLLSGLPPSHQWYTVLDLKDAFFCLRLHPTSQPLFAFEWRDPEMGISGQLTWTRLPQGFKNSPTLFNEALHRDLADFRIQHPDLILLQYVDDLLLAATSELDCQQGTRALLQTLGNLGYRASAKKAQICQKQVKYLGYLLKEGQRWLTEARKETVMGQPTPKTPRQLREFLGKAGFCRLFIPGFAEMAAPLYPLTKPGTLFNWGPDQQKAYQEIKQALLTAPALGLPDLTKPFELFVDEKQGYAKGVLTQKLGPWRRPVAYLSKKLDPVAAGWPPCLRMVAAIAVLTKDAGKLTMGQPLVILAPHAVEALVKQPPDRWLSNARMTHYQALLLDTDRVQFGPVVALNPATLLPLPEEGLQHNCLDILAEAHGTRPDLTDQPLPDADHTWYTDGSSLLQEGQRKAGAAVTTETEVIWAKALPAGTSAQRAELIALTQALKMAEGKKLNVYTDSRYAFATAHIHGEIYRRRGWLTSEGKEIKNKDEILALLKALFLPKRLSIIHCPGHQKGHSAEARGNRMADQAARKAAITETPDTSTLLKRTADGSEFESPKKKAKVE

SEQ ID NO: 16086 - protein, 2230 aa, synthetic construct
MPAAKRVKLDGGDKKYSIGLDIGTNSVGWAVITDEYKVPSKKFKVLGNTDRHSIKKNLIGALLFDSGETAEATRLKRTARRRYTRRKNRICYLQEIFSNEMAKVDDSFFHRLEESFLVEEDKKHERHPIFGNIVDEVAYHEKYPTIYHLRKKLVDSTDKADLRLIYLALAHMIKFRGHFLIEGDLNPDNSDVDKLFIQLVQTYNQLFEENPINASGVDAKAILSARLSKSRRLENLIAQLPGEKKNGLFGNLIALSLGLTPNFKSNFDLAEDAKLQLSKDTYDDDLDNLLAQIGDQYADLFLAAKNLSDAILLSDILRVNTEITKAPLSASMIKRYDEHHQDLTLLKALVRQQLPEKYKEIFFDQSKNGYAGYIDGGASQEEFYKFIKPILEKMDGTEELLVKLNREDLLRKQRTFDNGSIPHQIHLGELHAILRRQEDFYPFLKDNREKIEKILTFRIPYYVGPLARGNSRFAWMTRKSEETITPWNFEEVVDKGASAQSFIERMTNFDKNLPNEKVLPKHSLLYEYFTVYNELTKVKYVTEGMRKPAFLSGEQKKAIVDLLFKTNRKVTVKQLKEDYFKKIECFDSVEISGVEDRFNASLGTYHDLLKIIKDKDFLDNEENEDILEDIVLTLTLFEDREMIEERLKTYAHLFDDKVMKQLKRRRYTGWGRLSRKLINGIRDKQSGKTILDFLKSDGFANRNFMQLIHDDSLTFKEDIQKAQVSGQGDSLHEHIANLAGSPAIKKGILQTVKVVDELVKVMGRHKPENIVIEMARENQTTQKGQKNSRERMKRIEEGIKELGSQILKEHPVENTQLQNEKLYLYYLQNGRDMYVDQELDINRLSDYDVDHIVPQSFLKDDSIDNKVLTRSDKARGKSDNVPSEEVVKKMKNYWRQLLNAKLITQRKFDNLTKAERGGLSELDKAGFIKRQLVETRQITKHVAQILDSRMNTKYDENDKLIREVKVITLKSKLVSDFRKDFQFYKVREINNYHHAHDAYLNAVVGTALIKKYPKLESEFVYGDYKVYDVRKMIAKSEQEIGKATAKYFFYSNIMNFFKTEITLANGEIRKRPLIETNGETGEIVWDKGRDFATVRKVLSMPQVNIVKKTEVQTGGFSKESILPKRNSDKLIARKKDWDPKKYGGFDSPTVAYSVLVVAKVEKGKSKKLKSVKELLGITIMERSSFEKNPIDFLEAKGYKEVKKDLIIKLPKYSLFELENGRKRMLASAGELQKGNELALPSKYVNFLYLASHYEKLKGSPEDNEQKQLFVEQHKHYLDEIIEQISEFSKRVILADANLDKVLSAYNKHRDKPIREQAENIIHLFTLTNLGAPAAFKYFDTTIDRKRYTSTKEVLDATLIHQSITGLYETRIDLSQLGGDGSSGGGEAAAKMASNFTQFVLVDNGGTGDVTVAPSNFANGIAEWISSNSRSQAYKVTCSVRQSSAQNRKYTIKVEVPKGAWRSYLNMELTIPIFATNSDCELIVKAMQGLLKDGNPIPSAIAANSGIYSGGSSGGSSGSETPGTSESATPESSGGSSGGSSTLNIEDEHRLHETSKEPDVSLGSTWLSDFPQAWAETGGMGLAVRQAPLIIPLKATSTPVSIKQYPMSQEARLGIKPHIQRLLDQGILVPCQSPWNTPLLPVKKPGTNDYRPVQDLREVNKRVEDIHPTVPNPYNLLSGLPPSHQWYTVLDLKDAFFCLRLHPTSQPLFAFEWRDPEMGISGQLTWTRLPQGFKNSPTLFNEALHRDLADFRIQHPDLILLQYVDDLLLAATSELDCQQGTRALLQTLGNLGYRASAKKAQICQKQVKYLGYLLKEGQRWLTEARKETVMGQPTPKTPRQLREFLGKAGFCRLFIPGFAEMAAPLYPLTKPGTLFNWGPDQQKAYQEIKQALLTAPALGLPDLTKPFELFVDEKQGYAKGVLTQKLGPWRRPVAYLSKKLDPVAAGWPPCLRMVAAIAVLTKDAGKLTMGQPLVILAPHAVEALVKQPPDRWLSNARMTHYQALLLDTDRVQFGPVVALNPATLLPLPEEGLQHNCLDILAEAHGTRPDLTDQPLPDADHTWYTDGSSLLQEGQRKAGAAVTTETEVIWAKALPAGTSAQRAELIALTQALKMAEGKKLNVYTDSRYAFATAHIHGEIYRRRGWLTSEGKEIKNKDEILALLKALFLPKRLSIIHCPGHQKGHSAEARGNRMADQAARKAAITETPDTSTLLKRTADGSEFESPKKKAKVE

SEQ ID NO: 16087 - protein, 2215 aa, synthetic construct
MPAAKRVKLDGGDKKYSIGLDIGTNSVGWAVITDEYKVPSKKFKVLGNTDRHSIKKNLIGALLFDSGETAEATRLKRTARRRYTRRKNRICYLQEIFSNEMAKVDDSFFHRLEESFLVEEDKKHERHPIFGNIVDEVAYHEKYPTIYHLRKKLVDSTDKADLRLIYLALAHMIKFRGHFLIEGDLNPDNSDVDKLFIQLVQTYNQLFEENPINASGVDAKAILSARLSKSRRLENLIAQLPGEKKNGLFGNLIALSLGLTPNFKSNFDLAEDAKLQLSKDTYDDDLDNLLAQIGDQYADLFLAAKNLSDAILLSDILRVNTEITKAPLSASMIKRYDEHHQDLTLLKALVRQQLPEKYKEIFFDQSKNGYAGYIDGGASQEEFYKFIKPILEKMDGTEELLVKLNREDLLRKQRTFDNGSIPHQIHLGELHAILRRQEDFYPFLKDNREKIEKILTFRIPYYVGPLARGNSRFAWMTRKSEETITPWNFEEVVDKGASAQSFIERMTNFDKNLPNEKVLPKHSLLYEYFTVYNELTKVKYVTEGMRKPAFLSGEQKKAIVDLLFKTNRKVTVKQLKEDYFKKIECFDSVEISGVEDRFNASLGTYHDLLKIIKDKDFLDNEENEDILEDIVLTLTLFEDREMIEERLKTYAHLFDDKVMKQLKRRRYTGWGRLSRKLINGIRDKQSGKTILDFLKSDGFANRNFMQLIHDDSLTFKEDIQKAQVSGQGDSLHEHIANLAGSPAIKKGILQTVKVVDELVKVMGRHKPENIVIEMARENQTTQKGQKNSRERMKRIEEGIKELGSQILKEHPVENTQLQNEKLYLYYLQNGRDMYVDQELDINRLSDYDVDHIVPQSFLKDDSIDNKVLTRSDKARGKSDNVPSEEVVKKMKNYWRQLLNAKLITQRKFDNLTKAERGGLSELDKAGFIKRQLVETRQITKHVAQILDSRMNTKYDENDKLIREVKVITLKSKLVSDFRKDFQFYKVREINNYHHAHDAYLNAVVGTALIKKYPKLESEFVYGDYKVYDVRKMIAKSEQEIGKATAKYFFYSNIMNFFKTEITLANGEIRKRPLIETNGETGEIVWDKGRDFATVRKVLSMPQVNIVKKTEVQTGGFSKESILPKRNSDKLIARKKDWDPKKYGGFDSPTVAYSVLVVAKVEKGKSKKLKSVKELLGITIMERSSFEKNPIDFLEAKGYKEVKKDLIIKLPKYSLFELENGRKRMLASAGELQKGNELALPSKYVNFLYLASHYEKLKGSPEDNEQKQLFVEQHKHYLDEIIEQISEFSKRVILADANLDKVLSAYNKHRDKPIREQAENIIHLFTLTNLGAPAAFKYFDTTIDRKRYTSTKEVLDATLIHQSITGLYETRIDLSQLGGDGSSGGGEAAAKMASNFTQFVLVDNGGTGDVTVAPSNFANGIAEWISSNSRSQAYKVTCSVRQSSAQNRKYTIKVEVPKGAWRSYLNMELTIPIFATNSDCELIVKAMQGLLKDGNPIPSAIAANSGIYGSSGSSGSSGSSGSSGSSTLNIEDEHRLHETSKEPDVSLGSTWLSDFPQAWAETGGMGLAVRQAPLIIPLKATSTPVSIKQYPMSQEARLGIKPHIQRLLDQGILVPCQSPWNTPLLPVKKPGTNDYRPVQDLREVNKRVEDIHPTVPNPYNLLSGLPPSHQWYTVLDLKDAFFCLRLHPTSQPLFAFEWRDPEMGISGQLTWTRLPQGFKNSPTLFNEALHRDLADFRIQHPDLILLQYVDDLLLAATSELDCQQGTRALLQTLGNLGYRASAKKAQICQKQVKYLGYLLKEGQRWLTEARKETVMGQPTPKTPRQLREFLGKAGFCRLFIPGFAEMAAPLYPLTKPGTLFNWGPDQQKAYQEIKQALLTAPALGLPDLTKPFELFVDEKQGYAKGVLTQKLGPWRRPVAYLSKKLDPVAAGWPPCLRMVAAIAVLTKDAGKLTMGQPLVILAPHAVEALVKQPPDRWLSNARMTHYQALLLDTDRVQFGPVVALNPATLLPLPEEGLQHNCLDILAEAHGTRPDLTDQPLPDADHTWYTDGSSLLQEGQRKAGAAVTTETEVIWAKALPAGTSAQRAELIALTQALKMAEGKKLNVYTDSRYAFATAHIHGEIYRRRGWLTSEGKEIKNKDEILALLKALFLPKRLSIIHCPGHQKGHSAEARGNRMADQAARKAAITETPDTSTLLKRTADGSEFESPKKKAKVE

SEQ ID NO: 16088 - protein, 2208 aa, synthetic construct
MPAAKRVKLDGGDKKYSIGLDIGTNSVGWAVITDEYKVPSKKFKVLGNTDRHSIKKNLIGALLFDSGETAEATRLKRTARRRYTRRKNRICYLQEIFSNEMAKVDDSFFHRLEESFLVEEDKKHERHPIFGNIVDEVAYHEKYPTIYHLRKKLVDSTDKADLRLIYLALAHMIKFRGHFLIEGDLNPDNSDVDKLFIQLVQTYNQLFEENPINASGVDAKAILSARLSKSRRLENLIAQLPGEKKNGLFGNLIALSLGLTPNFKSNFDLAEDAKLQLSKDTYDDDLDNLLAQIGDQYADLFLAAKNLSDAILLSDILRVNTEITKAPLSASMIKRYDEHHQDLTLLKALVRQQLPEKYKEIFFDQSKNGYAGYIDGGASQEEFYKFIKPILEKMDGTEELLVKLNREDLLRKQRTFDNGSIPHQIHLGELHAILRRQEDFYPFLKDNREKIEKILTFRIPYYVGPLARGNSRFAWMTRKSEETITPWNFEEVVDKGASAQSFIERMTNFDKNLPNEKVLPKHSLLYEYFTVYNELTKVKYVTEGMRKPAFLSGEQKKAIVDLLFKTNRKVTVKQLKEDYFKKIECFDSVEISGVEDRFNASLGTYHDLLKIIKDKDFLDNEENEDILEDIVLTLTLFEDREMIEERLKTYAHLFDDKVMKQLKRRRYTGWGRLSRKLINGIRDKQSGKTILDFLKSDGFANRNFMQLIHDDSLTFKEDIQKAQVSGQGDSLHEHIANLAGSPAIKKGILQTVKVVDELVKVMGRHKPENIVIEMARENQTTQKGQKNSRERMKRIEEGIKELGSQILKEHPVENTQLQNEKLYLYYLQNGRDMYVDQELDINRLSDYDVDHIVPQSFLKDDSIDNKVLTRSDKARGKSDNVPSEEVVKKMKNYWRQLLNAKLITQRKFDNLTKAERGGLSELDKAGFIKRQLVETRQITKHVAQILDSRMNTKYDENDKLIREVKVITLKSKLVSDFRKDFQFYKVREINNYHHAHDAYLNAVVGTALIKKYPKLESEFVYGDYKVYDVRKMIAKSEQEIGKATAKYFFYSNIMNFFKTEITLANGEIRKRPLIETNGETGEIVWDKGRDFATVRKVLSMPQVNIVKKTEVQTGGFSKESILPKRNSDKLIARKKDWDPKKYGGFDSPTVAYSVLVVAKVEKGKSKKLKSVKELLGITIMERSSFEKNPIDFLEAKGYKEVKKDLIIKLPKYSLFELENGRKRMLASAGELQKGNELALPSKYVNFLYLASHYEKLKGSPEDNEQKQLFVEQHKHYLDEIIEQISEFSKRVILADANLDKVLSAYNKHRDKPIREQAENIIHLFTLTNLGAPAAFKYFDTTIDRKRYTSTKEVLDATLIHQSITGLYETRIDLSQLGGDGSSGGGEAAAKMASNFTQFVLVDNGGTGDVTVAPSNFANGIAEWISSNSRSQAYKVTCSVRQSSAQNRKYTIKVEVPKGAWRSYLNMELTIPIFATNSDCELIVKAMQGLLKDGNPIPSAIAANSGIYGSSGGGEAAAKTLNIEDEHRLHETSKEPDVSLGSTWLSDFPQAWAETGGMGLAVRQAPLIIPLKATSTPVSIKQYPMSQEARLGIKPHIQRLLDQGILVPCQSPWNTPLLPVKKPGTNDYRPVQDLREVNKRVEDIHPTVPNPYNLLSGLPPSHQWYTVLDLKDAFFCLRLHPTSQPLFAFEWRDPEMGISGQLTWTRLPQGFKNSPTLFNEALHRDLADFRIQHPDLILLQYVDDLLLAATSELDCQQGTRALLQTLGNLGYRASAKKAQICQKQVKYLGYLLKEGQRWLTEARKETVMGQPTPKTPRQLREFLGKAGFCRLFIPGFAEMAAPLYPLTKPGTLFNWGPDQQKAYQEIKQALLTAPALGLPDLTKPFELFVDEKQGYAKGVLTQKLGPWRRPVAYLSKKLDPVAAGWPPCLRMVAAIAVLTKDAGKLTMGQPLVILAPHAVEALVKQPPDRWLSNARMTHYQALLLDTDRVQFGPVVALNPATLLPLPEEGLQHNCLDILAEAHGTRPDLTDQPLPDADHTWYTDGSSLLQEGQRKAGAAVTTETEVIWAKALPAGTSAQRAELIALTQALKMAEGKKLNVYTDSRYAFATAHIHGEIYRRRGWLTSEGKEIKNKDEILALLKALFLPKRLSIIHCPGHQKGHSAEARGNRMADQAARKAAITETPDTSTLLKRTADGSEFESPKKKAKVE

SEQ ID NO: 16089 - protein, 2366 aa, synthetic construct
MPAAKRVKLDGGDKKYSIGLDIGTNSVGWAVITDEYKVPSKKFKVLGNTDRHSIKKNLIGALLFDSGETAEATRLKRTARRRYTRRKNRICYLQEIFSNEMAKVDDSFFHRLEESFLVEEDKKHERHPIFGNIVDEVAYHEKYPTIYHLRKKLVDSTDKADLRLIYLALAHMIKFRGHFLIEGDLNPDNSDVDKLFIQLVQTYNQLFEENPINASGVDAKAILSARLSKSRRLENLIAQLPGEKKNGLFGNLIALSLGLTPNFKSNFDLAEDAKLQLSKDTYDDDLDNLLAQIGDQYADLFLAAKNLSDAILLSDILRVNTEITKAPLSASMIKRYDEHHQDLTLLKALVRQQLPEKYKEIFFDQSKNGYAGYIDGGASQEEFYKFIKPILEKMDGTEELLVKLNREDLLRKQRTFDNGSIPHQIHLGELHAILRRQEDFYPFLKDNREKIEKILTFRIPYYVGPLARGNSRFAWMTRKSEETITPWNFEEVVDKGASAQSFIERMTNFDKNLPNEKVLPKHSLLYEYFTVYNELTKVKYVTEGMRKPAFLSGEQKKAIVDLLFKTNRKVTVKQLKEDYFKKIECFDSVEISGVEDRFNASLGTYHDLLKIIKDKDFLDNEENEDILEDIVLTLTLFEDREMIEERLKTYAHLFDDKVMKQLKRRRYTGWGRLSRKLINGIRDKQSGKTILDFLKSDGFANRNFMQLIHDDSLTFKEDIQKAQVSGQGDSLHEHIANLAGSPAIKKGILQTVKVVDELVKVMGRHKPENIVIEMARENQTTQKGQKNSRERMKRIEEGIKELGSQILKEHPVENTQLQNEKLYLYYLQNGRDMYVDQELDINRLSDYDVDHIVPQSFLKDDSIDNKVLTRSDKARGKSDNVPSEEVVKKMKNYWRQLLNAKLITQRKFDNLTKAERGGLSELDKAGFIKRQLVETRQITKHVAQILDSRMNTKYDENDKLIREVKVITLKSKLVSDFRKDFQFYKVREINNYHHAHDAYLNAVVGTALIKKYPKLESEFVYGDYKVYDVRKMIAKSEQEIGKATAKYFFYSNIMNFFKTEITLANGEIRKRPLIETNGETGEIVWDKGRDFATVRKVLSMPQVNIVKKTEVQTGGFSKESILPKRNSDKLIARKKDWDPKKYGGFDSPTVAYSVLVVAKVEKGKSKKLKSVKELLGITIMERSSFEKNPIDFLEAKGYKEVKKDLIIKLPKYSLFELENGRKRMLASAGELQKGNELALPSKYVNFLYLASHYEKLKGSPEDNEQKQLFVEQHKHYLDEIIEQISEFSKRVILADANLDKVLSAYNKHRDKPIREQAENIIHLFTLTNLGAPAAFKYFDTTIDRKRYTSTKEVLDATLIHQSITGLYETRIDLSQLGGDGSSGGGEAAAKMASNFTQFVLVDNGGTGDVTVAPSNFANGIAEWISSNSRSQAYKVTCSVRQSSAQNRKYTIKVEVPKGAWRSYLNMELTIPIFATNSDCELIVKAMQGLLKDGNPIPSAIAANSGIYGGSGGSMASNFTQFVLVDNGGTGDVTVAPSNFANGIAEWISSNSRSQAYKVTCSVRQSSAQNRKYTIKVEVPKGAWRSYLNMELTIPIFATNSDCELIVKAMQGLLKDGNPIPSAIAANSGIYAEAAAKEAAAKEAAAKEAAAKALEAEAAAKEAAAKEAAAKEAAAKATLNIEDEHRLHETSKEPDVSLGSTWLSDFPQAWAETGGMGLAVRQAPLIIPLKATSTPVSIKQYPMSQEARLGIKPHIQRLLDQGILVPCQSPWNTPLLPVKKPGTNDYRPVQDLREVNKRVEDIHPTVPNPYNLLSGLPPSHQWYTVLDLKDAFFCLRLHPTSQPLFAFEWRDPEMGISGQLTWTRLPQGFKNSPTLFNEALHRDLADFRIQHPDLILLQYVDDLLLAATSELDCQQGTRALLQTLGNLGYRASAKKAQICQKQVKYLGYLLKEGQRWLTEARKETVMGQPTPKTPRQLREFLGKAGFCRLFIPGFAEMAAPLYPLTKPGTLFNWGPDQQKAYQEIKQALLTAPALGLPDLTKPFELFVDEKQGYAKGVLTQKLGPWRRPVAYLSKKLDPVAAGWPPCLRMVAAIAVLTKDAGKLTMGQPLVILAPHAVEALVKQPPDRWLSNARMTHYQALLLDTDRVQFGPVVALNPATLLPLPEEGLQHNCLDILAEAHGTRPDLTDQPLPDADHTWYTDGSSLLQEGQRKAGAAVTTETEVIWAKALPAGTSAQRAELIALTQALKMAEGKKLNVYTDSRYAFATAHIHGEIYRRRGWLTSEGKEIKNKDEILALLKALFLPKRLSIIHCPGHQKGHSAEARGNRMADQAARKAAITETPDTSTLLKRTADGSEFESPKKKAKVE

SEQ ID NO: 16090 - protein, 2353 aa, synthetic construct
MPAAKRVKLDGGDKKYSIGLDIGTNSVGWAVITDEYKVPSKKFKVLGNTDRHSIKKNLIGALLFDSGETAEATRLKRTARRRYTRRKNRICYLQEIFSNEMAKVDDSFFHRLEESFLVEEDKKHERHPIFGNIVDEVAYHEKYPTIYHLRKKLVDSTDKADLRLIYLALAHMIKFRGHFLIEGDLNPDNSDVDKLFIQLVQTYNQLFEENPINASGVDAKAILSARLSKSRRLENLIAQLPGEKKNGLFGNLIALSLGLTPNFKSNFDLAEDAKLQLSKDTYDDDLDNLLAQIGDQYADLFLAAKNLSDAILLSDILRVNTEITKAPLSASMIKRYDEHHQDLTLLKALVRQQLPEKYKEIFFDQSKNGYAGYIDGGASQEEFYKFIKPILEKMDGTEELLVKLNREDLLRKQRTFDNGSIPHQIHLGELHAILRRQEDFYPFLKDNREKIEKILTFRIPYYVGPLARGNSRFAWMTRKSEETITPWNFEEVVDKGASAQSFIERMTNFDKNLPNEKVLPKHSLLYEYFTVYNELTKVKYVTEGMRKPAFLSGEQKKAIVDLLFKTNRKVTVKQLKEDYFKKIECFDSVEISGVEDRFNASLGTYHDLLKIIKDKDFLDNEENEDILEDIVLTLTLFEDREMIEERLKTYAHLFDDKVMKQLKRRRYTGWGRLSRKLINGIRDKQSGKTILDFLKSDGFANRNFMQLIHDDSLTFKEDIQKAQVSGQGDSLHEHIANLAGSPAIKKGILQTVKVVDELVKVMGRHKPENIVIEMARENQTTQKGQKNSRERMKRIEEGIKELGSQILKEHPVENTQLQNEKLYLYYLQNGRDMYVDQELDINRLSDYDVDHIVPQSFLKDDSIDNKVLTRSDKARGKSDNVPSEEVVKKMKNYWRQLLNAKLITQRKFDNLTKAERGGLSELDKAGFIKRQLVETRQITKHVAQILDSRMNTKYDENDKLIREVKVITLKSKLVSDFRKDFQFYKVREINNYHHAHDAYLNAVVGTALIKKYPKLESEFVYGDYKVYDVRKMIAKSEQEIGKATAKYFFYSNIMNFFKTEITLANGEIRKRPLIETNGETGEIVWDKGRDFATVRKVLSMPQVNIVKKTEVQTGGFSKESILPKRNSDKLIARKKDWDPKKYGGFDSPTVAYSVLVVAKVEKGKSKKLKSVKELLGITIMERSSFEKNPIDFLEAKGYKEVKKDLIIKLPKYSLFELENGRKRMLASAGELQKGNELALPSKYVNFLYLASHYEKLKGSPEDNEQKQLFVEQHKHYLDEIIEQISEFSKRVILADANLDKVLSAYNKHRDKPIREQAENIIHLFTLTNLGAPAAFKYFDTTIDRKRYTSTKEVLDATLIHQSITGLYETRIDLSQLGGDGSSGGGEAAAKMASNFTQFVLVDNGGTGDVTVAPSNFANGIAEWISSNSRSQAYKVTCSVRQSSAQNRKYTIKVEVPKGAWRSYLNMELTIPIFATNSDCELIVKAMQGLLKDGNPIPSAIAANSGIYGGSGGSMASNFTQFVLVDNGGTGDVTVAPSNFANGIAEWISSNSRSQAYKVTCSVRQSSAQNRKYTIKVEVPKGAWRSYLNMELTIPIFATNSDCELIVKAMQGLLKDGNPIPSAIAANSGIYSGGSSGGSSGSETPGTSESATPESSGGSSGGSSTLNIEDEHRLHETSKEPDVSLGSTWLSDFPQAWAETGGMGLAVRQAPLIIPLKATSTPVSIKQYPMSQEARLGIKPHIQRLLDQGILVPCQSPWNTPLLPVKKPGTNDYRPVQDLREVNKRVEDIHPTVPNPYNLLSGLPPSHQWYTVLDLKDAFFCLRLHPTSQPLFAFEWRDPEMGISGQLTWTRLPQGFKNSPTLFNEALHRDLADFRIQHPDLILLQYVDDLLLAATSELDCQQGTRALLQTLGNLGYRASAKKAQICQKQVKYLGYLLKEGQRWLTEARKETVMGQPTPKTPRQLREFLGKAGFCRLFIPGFAEMAAPLYPLTKPGTLFNWGPDQQKAYQEIKQALLTAPALGLPDLTKPFELFVDEKQGYAKGVLTQKLGPWRRPVAYLSKKLDPVAAGWPPCLRMVAAIAVLTKDAGKLTMGQPLVILAPHAVEALVKQPPDRWLSNARMTHYQALLLDTDRVQFGPVVALNPATLLPLPEEGLQHNCLDILAEAHGTRPDLTDQPLPDADHTWYTDGSSLLQEGQRKAGAAVTTETEVIWAKALPAGTSAQRAELIALTQALKMAEGKKLNVYTDSRYAFATAHIHGEIYRRRGWLTSEGKEIKNKDEILALLKALFLPKRLSIIHCPGHQKGHSAEARGNRMADQAARKAAITETPDTSTLLKRTADGSEFESPKKKAKVE

SEQ ID NO: 16091 - protein, 2338 aa, synthetic construct
MPAAKRVKLDGGDKKYSIGLDIGTNSVGWAVITDEYKVPSKKFKVLGNTDRHSIKKNLIGALLFDSGETAEATRLKRTARRRYTRRKNRICYLQEIFSNEMAKVDDSFFHRLEESFLVEEDKKHERHPIFGNIVDEVAYHEKYPTIYHLRKKLVDSTDKADLRLIYLALAHMIKFRGHFLIEGDLNPDNSDVDKLFIQLVQTYNQLFEENPINASGVDAKAILSARLSKSRRLENLIAQLPGEKKNGLFGNLIALSLGLTPNFKSNFDLAEDAKLQLSKDTYDDDLDNLLAQIGDQYADLFLAAKNLSDAILLSDILRVNTEITKAPLSASMIKRYDEHHQDLTLLKALVRQQLPEKYKEIFFDQSKNGYAGYIDGGASQEEFYKFIKPILEKMDGTEELLVKLNREDLLRKQRTFDNGSIPHQIHLGELHAILRRQEDFYPFLKDNREKIEKILTFRIPYYVGPLARGNSRFAWMTRKSEETITPWNFEEVVDKGASAQSFIERMTNFDKNLPNEKVLPKHSLLYEYFTVYNELTKVKYVTEGMRKPAFLSGEQKKAIVDLLFKTNRKVTVKQLKEDYFKKIECFDSVEISGVEDRFNASLGTYHDLLKIIKDKDFLDNEENEDILEDIVLTLTLFEDREMIEERLKTYAHLFDDKVMKQLKRRRYTGWGRLSRKLINGIRDKQSGKTILDFLKSDGFANRNFMQLIHDDSLTFKEDIQKAQVSGQGDSLHEHIANLAGSPAIKKGILQTVKVVDELVKVMGRHKPENIVIEMARENQTTQKGQKNSRERMKRIEEGIKELGSQILKEHPVENTQLQNEKLYLYYLQNGRDMYVDQELDINRLSDYDVDHIVPQSFLKDDSIDNKVLTRSDKARGKSDNVPSEEVVKKMKNYWRQLLNAKLITQRKFDNLTKAERGGLSELDKAGFIKRQLVETRQITKHVAQILDSRMNTKYDENDKLIREVKVITLKSKLVSDFRKDFQFYKVREINNYHHAHDAYLNAVVGTALIKKYPKLESEFVYGDYKVYDVRKMIAKSEQEIGKATAKYFFYSNIMNFFKTEITLANGEIRKRPLIETNGETGEIVWDKGRDFATVRKVLSMPQVNIVKKTEVQTGGFSKESILPKRNSDKLIARKKDWDPKKYGGFDSPTVAYSVLVVAKVEKGKSKKLKSVKELLGITIMERSSFEKNPIDFLEAKGYKEVKKDLIIKLPKYSLFELENGRKRMLASAGELQKGNELALPSKYVNFLYLASHYEKLKGSPEDNEQKQLFVEQHKHYLDEIIEQISEFSKRVILADANLDKVLSAYNKHRDKPIREQAENIIHLFTLTNLGAPAAFKYFDTTIDRKRYTSTKEVLDATLIHQSITGLYETRIDLSQLGGDGSSGGGEAAAKMASNFTQFVLVDNGGTGDVTVAPSNFANGIAEWISSNSRSQAYKVTCSVRQSSAQNRKYTIKVEVPKGAWRSYLNMELTIPIFATNSDCELIVKAMQGLLKDGNPIPSAIAANSGIYGGSGGSMASNFTQFVLVDNGGTGDVTVAPSNFANGIAEWISSNSRSQAYKVTCSVRQSSAQNRKYTIKVEVPKGAWRSYLNMELTIPIFATNSDCELIVKAMQGLLKDGNPIPSAIAANSGIYGSSGSSGSSGSSGSSGSSTLNIEDEHRLHETSKEPDVSLGSTWLSDFPQAWAETGGMGLAVRQAPLIIPLKATSTPVSIKQYPMSQEARLGIKPHIQRLLDQGILVPCQSPWNTPLLPVKKPGTNDYRPVQDLREVNKRVEDIHPTVPNPYNLLSGLPPSHQWYTVLDLKDAFFCLRLHPTSQPLFAFEWRDPEMGISGQLTWTRLPQGFKNSPTLFNEALHRDLADFRIQHPDLILLQYVDDLLLAATSELDCQQGTRALLQTLGNLGYRASAKKAQICQKQVKYLGYLLKEGQRWLTEARKETVMGQPTPKTPRQLREFLGKAGFCRLFIPGFAEMAAPLYPLTKPGTLFNWGPDQQKAYQEIKQALLTAPALGLPDLTKPFELFVDEKQGYAKGVLTQKLGPWRRPVAYLSKKLDPVAAGWPPCLRMVAAIAVLTKDAGKLTMGQPLVILAPHAVEALVKQPPDRWLSNARMTHYQALLLDTDRVQFGPVVALNPATLLPLPEEGLQHNCLDILAEAHGTRPDLTDQPLPDADHTWYTDGSSLLQEGQRKAGAAVTTETEVIWAKALPAGTSAQRAELIALTQALKMAEGKKLNVYTDSRYAFATAHIHGEIYRRRGWLTSEGKEIKNKDEILALLKALFLPKRLSIIHCPGHQKGHSAEARGNRMADQAARKAAITETPDTSTLLKRTADGSEFESPKKKAKVE

SEQ ID NO: 16092 - protein, 2331 aa, synthetic construct
MPAAKRVKLDGGDKKYSIGLDIGTNSVGWAVITDEYKVPSKKFKVLGNTDRHSIKKNLIGALLFDSGETAEATRLKRTARRRYTRRKNRICYLQEIFSNEMAKVDDSFFHRLEESFLVEEDKKHERHPIFGNIVDEVAYHEKYPTIYHLRKKLVDSTDKADLRLIYLALAHMIKFRGHFLIEGDLNPDNSDVDKLFIQLVQTYNQLFEENPINASGVDAKAILSARLSKSRRLENLIAQLPGEKKNGLFGNLIALSLGLTPNFKSNFDLAEDAKLQLSKDTYDDDLDNLLAQIGDQYADLFLAAKNLSDAILLSDILRVNTEITKAPLSASMIKRYDEHHQDLTLLKALVRQQLPEKYKEIFFDQSKNGYAGYIDGGASQEEFYKFIKPILEKMDGTEELLVKLNREDLLRKQRTFDNGSIPHQIHLGELHAILRRQEDFYPFLKDNREKIEKILTFRIPYYVGPLARGNSRFAWMTRKSEETITPWNFEEVVDKGASAQSFIERMTNFDKNLPNEKVLPKHSLLYEYFTVYNELTKVKYVTEGMRKPAFLSGEQKKAIVDLLFKTNRKVTVKQLKEDYFKKIECFDSVEISGVEDRFNASLGTYHDLLKIIKDKDFLDNEENEDILEDIVLTLTLFEDREMIEERLKTYAHLFDDKVMKQLKRRRYTGWGRLSRKLINGIRDKQSGKTILDFLKSDGFANRNFMQLIHDDSLTFKEDIQKAQVSGQGDSLHEHIANLAGSPAIKKGILQTVKVVDELVKVMGRHKPENIVIEMARENQTTQKGQKNSRERMKRIEEGIKELGSQILKEHPVENTQLQNEKLYLYYLQNGRDMYVDQELDINRLSDYDVDHIVPQSFLKDDSIDNKVLTRSDKARGKSDNVPSEEVVKKMKNYWRQLLNAKLITQRKFDNLTKAERGGLSELDKAGFIKRQLVETRQITKHVAQILDSRMNTKYDENDKLIREVKVITLKSKLVSDFRKDFQFYKVREINNYHHAHDAYLNAVVGTALIKKYPKLESEFVYGDYKVYDVRKMIAKSEQEIGKATAKYFFYSNIMNFFKTEITLANGEIRKRPLIETNGETGEIVWDKGRDFATVRKVLSMPQVNIVKKTEVQTGGFSKESILPKRNSDKLIARKKDWDPKKYGGFDSPTVAYSVLVVAKVEKGKSKKLKSVKELLGITIMERSSFEKNPIDFLEAKGYKEVKKDLIIKLPKYSLFELENGRKRMLASAGELQKGNELALPSKYVNFLYLASHYEKLKGSPEDNEQKQLFVEQHKHYLDEIIEQISEFSKRVILADANLDKVLSAYNKHRDKPIREQAENIIHLFTLTNLGAPAAFKYFDTTIDRKRYTSTKEVLDATLIHQSITGLYETRIDLSQLGGDGSSGGGEAAAKMASNFTQFVLVDNGGTGDVTVAPSNFANGIAEWISSNSRSQAYKVTCSVRQSSAQNRKYTIKVEVPKGAWRSYLNMELTIPIFATNSDCELIVKAMQGLLKDGNPIPSAIAANSGIYGGSGGSMASNFTQFVLVDNGGTGDVTVAPSNFANGIAEWISSNSRSQAYKVTCSVRQSSAQNRKYTIKVEVPKGAWRSYLNMELTIPIFATNSDCELIVKAMQGLLKDGNPIPSAIAANSGIYGSSGGGEAAAKTLNIEDEHRLHETSKEPDVSLGSTWLSDFPQAWAETGGMGLAVRQAPLIIPLKATSTPVSIKQYPMSQEARLGIKPHIQRLLDQGILVPCQSPWNTPLLPVKKPGTNDYRPVQDLREVNKRVEDIHPTVPNPYNLLSGLPPSHQWYTVLDLKDAFFCLRLHPTSQPLFAFEWRDPEMGISGQLTWTRLPQGFKNSPTLFNEALHRDLADFRIQHPDLILLQYVDDLLLAATSELDCQQGTRALLQTLGNLGYRASAKKAQICQKQVKYLGYLLKEGQRWLTEARKETVMGQPTPKTPRQLREFLGKAGFCRLFIPGFAEMAAPLYPLTKPGTLFNWGPDQQKAYQEIKQALLTAPALGLPDLTKPFELFVDEKQGYAKGVLTQKLGPWRRPVAYLSKKLDPVAAGWPPCLRMVAAIAVLTKDAGKLTMGQPLVILAPHAVEALVKQPPDRWLSNARMTHYQALLLDTDRVQFGPVVALNPATLLPLPEEGLQHNCLDILAEAHGTRPDLTDQPLPDADHTWYTDGSSLLQEGQRKAGAAVTTETEVIWAKALPAGTSAQRAELIALTQALKMAEGKKLNVYTDSRYAFATAHIHGEIYRRRGWLTSEGKEIKNKDEILALLKALFLPKRLSIIHCPGHQKGHSAEARGNRMADQAARKAAITETPDTSTLLKRTADGSEFESPKKKAKVE

SEQ ID NO: 16093 - protein, 2622 aa, synthetic construct
MPAAKRVKLDGGDKKYSIGLDIGTNSVGWAVITDEYKVPSKKFKVLGNTDRHSIKKNLIGALLFDSGETAEATRLKRTARRRYTRRKNRICYLQEIFSNEMAKVDDSFFHRLEESFLVEEDKKHERHPIFGNIVDEVAYHEKYPTIYHLRKKLVDSTDKADLRLIYLALAHMIKFRGHFLIEGDLNPDNSDVDKLFIQLVQTYNQLFEENPINASGVDAKAILSARLSKSRRLENLIAQLPGEKKNGLFGNLIALSLGLTPNFKSNFDLAEDAKLQLSKDTYDDDLDNLLAQIGDQYADLFLAAKNLSDAILLSDILRVNTEITKAPLSASMIKRYDEHHQDLTLLKALVRQQLPEKYKEIFFDQSKNGYAGYIDGGASQEEFYKFIKPILEKMDGTEELLVKLNREDLLRKQRTFDNGSIPHQIHLGELHAILRRQEDFYPFLKDNREKIEKILTFRIPYYVGPLARGNSRFAWMTRKSEETITPWNFEEVVDKGASAQSFIERMTNFDKNLPNEKVLPKHSLLYEYFTVYNELTKVKYVTEGMRKPAFLSGEQKKAIVDLLFKTNRKVTVKQLKEDYFKKIECFDSVEISGVEDRFNASLGTYHDLLKIIKDKDFLDNEENEDILEDIVLTLTLFEDREMIEERLKTYAHLFDDKVMKQLKRRRYTGWGRLSRKLINGIRDKQSGKTILDFLKSDGFANRNFMQLIHDDSLTFKEDIQKAQVSGQGDSLHEHIANLAGSPAIKKGILQTVKVVDELVKVMGRHKPENIVIEMARENQTTQKGQKNSRERMKRIEEGIKELGSQILKEHPVENTQLQNEKLYLYYLQNGRDMYVDQELDINRLSDYDVDHIVPQSFLKDDSIDNKVLTRSDKARGKSDNVPSEEVVKKMKNYWRQLLNAKLITQRKFDNLTKAERGGLSELDKAGFIKRQLVETRQITKHVAQILDSRMNTKYDENDKLIREVKVITLKSKLVSDFRKDFQFYKVREINNYHHAHDAYLNAVVGTALIKKYPKLESEFVYGDYKVYDVRKMIAKSEQEIGKATAKYFFYSNIMNFFKTEITLANGEIRKRPLIETNGETGEIVWDKGRDFATVRKVLSMPQVNIVKKTEVQTGGFSKESILPKRNSDKLIARKKDWDPKKYGGFDSPTVAYSVLVVAKVEKGKSKKLKSVKELLGITIMERSSFEKNPIDFLEAKGYKEVKKDLIIKLPKYSLFELENGRKRMLASAGELQKGNELALPSKYVNFLYLASHYEKLKGSPEDNEQKQLFVEQHKHYLDEIIEQISEFSKRVILADANLDKVLSAYNKHRDKPIREQAENIIHLFTLTNLGAPAAFKYFDTTIDRKRYTSTKEVLDATLIHQSITGLYETRIDLSQLGGDGSSGGGEAAAKMASNFTQFVLVDNGGTGDVTVAPSNFANGIAEWISSNSRSQAYKVTCSVRQSSAQNRKYTIKVEVPKGAWRSYLNMELTIPIFATNSDCELIVKAMQGLLKDGNPIPSAIAANSGIYGGSGGSMASNFTQFVLVDNGGTGDVTVAPSNFANGIAEWISSNSRSQAYKVTCSVRQSSAQNRKYTIKVEVPKGAWRSYLNMELTIPIFATNSDCELIVKAMQGLLKDGNPIPSAIAANSGIYGGGSGGGSGGGSGGGSMASNFTQFVLVDNGGTGDVTVAPSNFANGIAEWISSNSRSQAYKVTCSVRQSSAQNRKYTIKVEVPKGAWRSYLNMELTIPIFATNSDCELIVKAMQGLLKDGNPIPSAIAANSGIYGGSGGSMASNFTQFVLVDNGGTGDVTVAPSNFANGIAEWISSNSRSQAYKVTCSVRQSSAQNRKYTIKVEVPKGAWRSYLNMELTIPIFATNSDCELIVKAMQGLLKDGNPIPSAIAANSGIYAEAAAKEAAAKEAAAKEAAAKALEAEAAAKEAAAKEAAAKEAAAKATLNIEDEHRLHETSKEPDVSLGSTWLSDFPQAWAETGGMGLAVRQAPLIIPLKATSTPVSIKQYPMSQEARLGIKPHIQRLLDQGILVPCQSPWNTPLLPVKKPGTNDYRPVQDLREVNKRVEDIHPTVPNPYNLLSGLPPSHQWYTVLDLKDAFFCLRLHPTSQPLFAFEWRDPEMGISGQLTWTRLPQGFKNSPTLFNEALHRDLADFRIQHPDLILLQYVDDLLLAATSELDCQQGTRALLQTLGNLGYRASAKKAQICQKQVKYLGYLLKEGQRWLTEARKETVMGQPTPKTPRQLREFLGKAGFCRLFIPGFAEMAAPLYPLTKPGTLFNWGPDQQKAYQEIKQALLTAPALGLPDLTKPFELFVDEKQGYAKGVLTQKLGPWRRPVAYLSKKLDPVAAGWPPCLRMVAAIAVLTKDAGKLTMGQPLVILAPHAVEALVKQPPDRWLSNARMTHYQALLLDTDRVQFGPVVALNPATLLPLPEEGLQHNCLDILAEAHGTRPDLTDQPLPDADHTWYTDGSSLLQEGQRKAGAAVTTETEVIWAKALPAGTSAQRAELIALTQALKMAEGKKLNVYTDSRYAFATAHIHGEIYRRRGWLTSEGKEIKNKDEILALLKALFLPKRLSIIHCPGHQKGHSAEARGNRMADQAARKAAITETPDTSTLLKRTADGSEFESPKKKAKVE

SEQ ID NO: 16094 - protein, 2609 aa, synthetic construct
MPAAKRVKLDGGDKKYSIGLDIGTNSVGWAVITDEYKVPSKKFKVLGNTDRHSIKKNLIGALLFDSGETAEATRLKRTARRRYTRRKNRICYLQEIFSNEMAKVDDSFFHRLEESFLVEEDKKHERHPIFGNIVDEVAYHEKYPTIYHLRKKLVDSTDKADLRLIYLALAHMIKFRGHFLIEGDLNPDNSDVDKLFIQLVQTYNQLFEENPINASGVDAKAILSARLSKSRRLENLIAQLPGEKKNGLFGNLIALSLGLTPNFKSNFDLAEDAKLQLSKDTYDDDLDNLLAQIGDQYADLFLAAKNLSDAILLSDILRVNTEITKAPLSASMIKRYDEHHQDLTLLKALVRQQLPEKYKEIFFDQSKNGYAGYIDGGASQEEFYKFIKPILEKMDGTEELLVKLNREDLLRKQRTFDNGSIPHQIHLGELHAILRRQEDFYPFLKDNREKIEKILTFRIPYYVGPLARGNSRFAWMTRKSEETITPWNFEEVVDKGASAQSFIERMTNFDKNLPNEKVLPKHSLLYEYFTVYNELTKVKYVTEGMRKPAFLSGEQKKAIVDLLFKTNRKVTVKQLKEDYFKKIECFDSVEISGVEDRFNASLGTYHDLLKIIKDKDFLDNEENEDILEDIVLTLTLFEDREMIEERLKTYAHLFDDKVMKQLKRRRYTGWGRLSRKLINGIRDKQSGKTILDFLKSDGFANRNFMQLIHDDSLTFKEDIQKAQVSGQGDSLHEHIANLAGSPAIKKGILQTVKVVDELVKVMGRHKPENIVIEMARENQTTQKGQKNSRERMKRIEEGIKELGSQILKEHPVENTQLQNEKLYLYYLQNGRDMYVDQELDINRLSDYDVDHIVPQSFLKDDSIDNKVLTRSDKARGKSDNVPSEEVVKKMKNYWRQLLNAKLITQRKFDNLTKAERGGLSELDKAGFIKRQLVETRQITKHVAQILDSRMNTKYDENDKLIREVKVITLKSKLVSDFRKDFQFYKVREINNYHHAHDAYLNAVVGTALIKKYPKLESEFVYGDYKVYDVRKMIAKSEQEIGKATAKYFFYSNIMNFFKTEITLANGEIRKRPLIETNGETGEIVWDKGRDFATVRKVLSMPQVNIVKKTEVQTGGFSKESILPKRNSDKLIARKKDWDPKKYGGFDSPTVAYSVLVVAKVEKGKSKKLKSVKELLGITIMERSSFEKNPIDFLEAKGYKEVKKDLIIKLPKYSLFELENGRKRMLASAGELQKGNELALPSKYVNFLYLASHYEKLKGSPEDNEQKQLFVEQHKHYLDEIIEQISEFSKRVILADANLDKVLSAYNKHRDKPIREQAENIIHLFTLTNLGAPAAFKYFDTTIDRKRYTSTKEVLDATLIHQSITGLYETRIDLSQLGGDGSSGGGEAAAKMASNFTQFVLVDNGGTGDVTVAPSNFANGIAEWISSNSRSQAYKVTCSVRQSSAQNRKYTIKVEVPKGAWRSYLNMELTIPIFATNSDCELIVKAMQGLLKDGNPIPSAIAANSGIYGGSGGSMASNFTQFVLVDNGGTGDVTVAPSNFANGIAEWISSNSRSQAYKVTCSVRQSSAQNRKYTIKVEVPKGAWRSYLNMELTIPIFATNSDCELIVKAMQGLLKDGNPIPSAIAANSGIYGGGSGGGSGGGSGGGSMASNFTQFVLVDNGGTGDVTVAPSNFANGIAEWISSNSRSQAYKVTCSVRQSSAQNRKYTIKVEVPKGAWRSYLNMELTIPIFATNSDCELIVKAMQGLLKDGNPIPSAIAANSGIYGGSGGSMASNFTQFVLVDNGGTGDVTVAPSNFANGIAEWISSNSRSQAYKVTCSVRQSSAQNRKYTIKVEVPKGAWRSYLNMELTIPIFATNSDCELIVKAMQGLLKDGNPIPSAIAANSGIYSGGSSGGSSGSETPGTSESATPESSGGSSGGSSTLNIEDEHRLHETSKEPDVSLGSTWLSDFPQAWAETGGMGLAVRQAPLIIPLKATSTPVSIKQYPMSQEARLGIKPHIQRLLDQGILVPCQSPWNTPLLPVKKPGTNDYRPVQDLREVNKRVEDIHPTVPNPYNLLSGLPPSHQWYTVLDLKDAFFCLRLHPTSQPLFAFEWRDPEMGISGQLTWTRLPQGFKNSPTLFNEALHRDLADFRIQHPDLILLQYVDDLLLAATSELDCQQGTRALLQTLGNLGYRASAKKAQICQKQVKYLGYLLKEGQRWLTEARKETVMGQPTPKTPRQLREFLGKAGFCRLFIPGFAEMAAPLYPLTKPGTLFNWGPDQQKAYQEIKQALLTAPALGLPDLTKPFELFVDEKQGYAKGVLTQKLGPWRRPVAYLSKKLDPVAAGWPPCLRMVAAIAVLTKDAGKLTMGQPLVILAPHAVEALVKQPPDRWLSNARMTHYQALLLDTDRVQFGPVVALNPATLLPLPEEGLQHNCLDILAEAHGTRPDLTDQPLPDADHTWYTDGSSLLQEGQRKAGAAVTTETEVIWAKALPAGTSAQRAELIALTQALKMAEGKKLNVYTDSRYAFATAHIHGEIYRRRGWLTSEGKEIKNKDEILALLKALFLPKRLSIIHCPGHQKGHSAEARGNRMADQAARKAAITETPDTSTLLKRTADGSEFESPKKKAKVE

SEQ ID NO: 16095 - protein, 2594 aa, synthetic construct
MPAAKRVKLDGGDKKYSIGLDIGTNSVGWAVITDEYKVPSKKFKVLGNTDRHSIKKNLIGALLFDSGETAEATRLKRTARRRYTRRKNRICYLQEIFSNEMAKVDDSFFHRLEESFLVEEDKKHERHPIFGNIVDEVAYHEKYPTIYHLRKKLVDSTDKADLRLIYLALAHMIKFRGHFLIEGDLNPDNSDVDKLFIQLVQTYNQLFEENPINASGVDAKAILSARLSKSRRLENLIAQLPGEKKNGLFGNLIALSLGLTPNFKSNFDLAEDAKLQLSKDTYDDDLDNLLAQIGDQYADLFLAAKNLSDAILLSDILRVNTEITKAPLSASMIKRYDEHHQDLTLLKALVRQQLPEKYKEIFFDQSKNGYAGYIDGGASQEEFYKFIKPILEKMDGTEELLVKLNREDLLRKQRTFDNGSIPHQIHLGELHAILRRQEDFYPFLKDNREKIEKILTFRIPYYVGPLARGNSRFAWMTRKSEETITPWNFEEVVDKGASAQSFIERMTNFDKNLPNEKVLPKHSLLYEYFTVYNELTKVKYVTEGMRKPAFLSGEQKKAIVDLLFKTNRKVTVKQLKEDYFKKIECFDSVEISGVEDRFNASLGTYHDLLKIIKDKDFLDNEENEDILEDIVLTLTLFEDREMIEERLKTYAHLFDDKVMKQLKRRRYTGWGRLSRKLINGIRDKQSGKTILDFLKSDGFANRNFMQLIHDDSLTFKEDIQKAQVSGQGDSLHEHIANLAGSPAIKKGILQTVKVVDELVKVMGRHKPENIVIEMARENQTTQKGQKNSRERMKRIEEGIKELGSQILKEHPVENTQLQNEKLYLYYLQNGRDMYVDQELDINRLSDYDVDHIVPQSFLKDDSIDNKVLTRSDKARGKSDNVPSEEVVKKMKNYWRQLLNAKLITQRKFDNLTKAERGGLSELDKAGFIKRQLVETRQITKHVAQILDSRMNTKYDENDKLIREVKVITLKSKLVSDFRKDFQFYKVREINNYHHAHDAYLNAVVGTALIKKYPKLESEFVYGDYKVYDVRKMIAKSEQEIGKATAKYFFYSNIMNFFKTEITLANGEIRKRPLIETNGETGEIVWDKGRDFATVRKVLSMPQVNIVKKTEVQTGGFSKESILPKRNSDKLIARKKDWDPKKYGGFDSPTVAYSVLVVAKVEKGKSKKLKSVKELLGITIMERSSFEKNPIDFLEAKGYKEVKKDLIIKLPKYSLFELENGRKRMLASAGELQKGNELALPSKYVNFLYLASHYEKLKGSPEDNEQKQLFVEQHKHYLDEIIEQISEFSKRVILADANLDKVLSAYNKHRDKPIREQAENIIHLFTLTNLGAPAAFKYFDTTIDRKRYTSTKEVLDATLIHQSITGLYETRIDLSQLGGDGSSGGGEAAAKMASNFTQFVLVDNGGTGDVTVAPSNFANGIAEWISSNSRSQAYKVTCSVRQSSAQNRKYTIKVEVPKGAWRSYLNMELTIPIFATNSDCELIVKAMQGLLKDGNPIPSAIAANSGIYGGSGGSMASNFTQFVLVDNGGTGDVTVAPSNFANGIAEWISSNSRSQAYKVTCSVRQSSAQNRKYTIKVEVPKGAWRSYLNMELTIPIFATNSDCELIVKAMQGLLKDGNPIPSAIAANSGIYGGGSGGGSGGGSGGGSMASNFTQFVLVDNGGTGDVTVAPSNFANGIAEWISSNSRSQAYKVTCSVRQSSAQNRKYTIKVEVPKGAWRSYLNMELTIPIFATNSDCELIVKAMQGLLKDGNPIPSAIAANSGIYGGSGGSMASNFTQFVLVDNGGTGDVTVAPSNFANGIAEWISSNSRSQAYKVTCSVRQSSAQNRKYTIKVEVPKGAWRSYLNMELTIPIFATNSDCELIVKAMQGLLKDGNPIPSAIAANSGIYGSSGSSGSSGSSGSSGSSTLNIEDEHRLHETSKEPDVSLGSTWLSDFPQAWAETGGMGLAVRQAPLIIPLKATSTPVSIKQYPMSQEARLGIKPHIQRLLDQGILVPCQSPWNTPLLPVKKPGTNDYRPVQDLREVNKRVEDIHPTVPNPYNLLSGLPPSHQWYTVLDLKDAFFCLRLHPTSQPLFAFEWRDPEMGISGQLTWTRLPQGFKNSPTLFNEALHRDLADFRIQHPDLILLQYVDDLLLAATSELDCQQGTRALLQTLGNLGYRASAKKAQICQKQVKYLGYLLKEGQRWLTEARKETVMGQPTPKTPRQLREFLGKAGFCRLFIPGFAEMAAPLYPLTKPGTLFNWGPDQQKAYQEIKQALLTAPALGLPDLTKPFELFVDEKQGYAKGVLTQKLGPWRRPVAYLSKKLDPVAAGWPPCLRMVAAIAVLTKDAGKLTMGQPLVILAPHAVEALVKQPPDRWLSNARMTHYQALLLDTDRVQFGPVVALNPATLLPLPEEGLQHNCLDILAEAHGTRPDLTDQPLPDADHTWYTDGSSLLQEGQRKAGAAVTTETEVIWAKALPAGTSAQRAELIALTQALKMAEGKKLNVYTDSRYAFATAHIHGEIYRRRGWLTSEGKEIKNKDEILALLKALFLPKRLSIIHCPGHQKGHSAEARGNRMADQAARKAAITETPDTSTLLKRTADGSEFESPKKKAKVE

SEQ ID NO: 16096 - protein, 2587 aa, synthetic construct
MPAAKRVKLDGGDKKYSIGLDIGTNSVGWAVITDEYKVPSKKFKVLGNTDRHSIKKNLIGALLFDSGETAEATRLKRTARRRYTRRKNRICYLQEIFSNEMAKVDDSFFHRLEESFLVEEDKKHERHPIFGNIVDEVAYHEKYPTIYHLRKKLVDSTDKADLRLIYLALAHMIKFRGHFLIEGDLNPDNSDVDKLFIQLVQTYNQLFEENPINASGVDAKAILSARLSKSRRLENLIAQLPGEKKNGLFGNLIALSLGLTPNFKSNFDLAEDAKLQLSKDTYDDDLDNLLAQIGDQYADLFLAAKNLSDAILLSDILRVNTEITKAPLSASMIKRYDEHHQDLTLLKALVRQQLPEKYKEIFFDQSKNGYAGYIDGGASQEEFYKFIKPILEKMDGTEELLVKLNREDLLRKQRTFDNGSIPHQIHLGELHAILRRQEDFYPFLKDNREKIEKILTFRIPYYVGPLARGNSRFAWMTRKSEETITPWNFEEVVDKGASAQSFIERMTNFDKNLPNEKVLPKHSLLYEYFTVYNELTKVKYVTEGMRKPAFLSGEQKKAIVDLLFKTNRKVTVKQLKEDYFKKIECFDSVEISGVEDRFNASLGTYHDLLKIIKDKDFLDNEENEDILEDIVLTLTLFEDREMIEERLKTYAHLFDDKVMKQLKRRRYTGWGRLSRKLINGIRDKQSGKTILDFLKSDGFANRNFMQLIHDDSLTFKEDIQKAQVSGQGDSLHEHIANLAGSPAIKKGILQTVKVVDELVKVMGRHKPENIVIEMARENQTTQKGQKNSRERMKRIEEGIKELGSQILKEHPVENTQLQNEKLYLYYLQNGRDMYVDQELDINRLSDYDVDHIVPQSFLKDDSIDNKVLTRSDKARGKSDNVPSEEVVKKMKNYWRQLLNAKLITQRKFDNLTKAERGGLSELDKAGFIKRQLVETRQITKHVAQILDSRMNTKYDENDKLIREVKVITLKSKLVSDFRKDFQFYKVREINNYHHAHDAYLNAVVGTALIKKYPKLESEFVYGDYKVYDVRKMIAKSEQEIGKATAKYFFYSNIMNFFKTEITLANGEIRKRPLIETNGETGEIVWDKGRDFATVRKVLSMPQVNIVKKTEVQTGGFSKESILPKRNSDKLIARKKDWDPKKYGGFDSPTVAYSVLVVAKVEKGKSKKLKSVKELLGITIMERSSFEKNPIDFLEAKGYKEVKKDLIIKLPKYSLFELENGRKRMLASAGELQKGNELALPSKYVNFLYLASHYEKLKGSPEDNEQKQLFVEQHKHYLDEIIEQISEFSKRVILADANLDKVLSAYNKHRDKPIREQAENIIHLFTLTNLGAPAAFKYFDTTIDRKRYTSTKEVLDATLIHQSITGLYETRIDLSQLGGDGSSGGGEAAAKMASNFTQFVLVDNGGTGDVTVAPSNFANGIAEWISSNSRSQAYKVTCSVRQSSAQNRKYTIKVEVPKGAWRSYLNMELTIPIFATNSDCELIVKAMQGLLKDGNPIPSAIAANSGIYGGSGGSMASNFTQFVLVDNGGTGDVTVAPSNFANGIAEWISSNSRSQAYKVTCSVRQSSAQNRKYTIKVEVPKGAWRSYLNMELTIPIFATNSDCELIVKAMQGLLKDGNPIPSAIAANSGIYGGGSGGGSGGGSGGGSMASNFTQFVLVDNGGTGDVTVAPSNFANGIAEWISSNSRSQAYKVTCSVRQSSAQNRKYTIKVEVPKGAWRSYLNMELTIPIFATNSDCELIVKAMQGLLKDGNPIPSAIAANSGIYGGSGGSMASNFTQFVLVDNGGTGDVTVAPSNFANGIAEWISSNSRSQAYKVTCSVRQSSAQNRKYTIKVEVPKGAWRSYLNMELTIPIFATNSDCELIVKAMQGLLKDGNPIPSAIAANSGIYGSSGGGEAAAKTLNIEDEHRLHETSKEPDVSLGSTWLSDFPQAWAETGGMGLAVRQAPLIIPLKATSTPVSIKQYPMSQEARLGIKPHIQRLLDQGILVPCQSPWNTPLLPVKKPGTNDYRPVQDLREVNKRVEDIHPTVPNPYNLLSGLPPSHQWYTVLDLKDAFFCLRLHPTSQPLFAFEWRDPEMGISGQLTWTRLPQGFKNSPTLFNEALHRDLADFRIQHPDLILLQYVDDLLLAATSELDCQQGTRALLQTLGNLGYRASAKKAQICQKQVKYLGYLLKEGQRWLTEARKETVMGQPTPKTPRQLREFLGKAGFCRLFIPGFAEMAAPLYPLTKPGTLFNWGPDQQKAYQEIKQALLTAPALGLPDLTKPFELFVDEKQGYAKGVLTQKLGPWRRPVAYLSKKLDPVAAGWPPCLRMVAAIAVLTKDAGKLTMGQPLVILAPHAVEALVKQPPDRWLSNARMTHYQALLLDTDRVQFGPVVALNPATLLPLPEEGLQHNCLDILAEAHGTRPDLTDQPLPDADHTWYTDGSSLLQEGQRKAGAAVTTETEVIWAKALPAGTSAQRAELIALTQALKMAEGKKLNVYTDSRYAFATAHIHGEIYRRRGWLTSEGKEIKNKDEILALLKALFLPKRLSIIHCPGHQKGHSAEARGNRMADQAARKAAITETPDTSTLLKRTADGSEFESPKKKAKVE

SEQ ID NO: 16097-16099 - skipped (3 entries)

SEQ ID NO: 16100 - protein, 2278 aa, synthetic construct
MPAAKRVKLDGGTLNIEDEHRLHETSKEPDVSLGSTWLSDFPQAWAETGGMGLAVRQAPLIIPLKATSTPVSIKQYPMSQEARLGIKPHIQRLLDQGILVPCQSPWNTPLLPVKKPGTNDYRPVQDLREVNKRVEDIHPTVPNPYNLLSGLPPSHQWYTVLDLKDAFFCLRLHPTSQPLFAFEWRDPEMGISGQLTWTRLPQGFKNSPTLFNEALHRDLADFRIQHPDLILLQYVDDLLLAATSELDCQQGTRALLQTLGNLGYRASAKKAQICQKQVKYLGYLLKEGQRWLTEARKETVMGQPTPKTPRQLREFLGKAGFCRLFIPGFAEMAAPLYPLTKPGTLFNWGPDQQKAYQEIKQALLTAPALGLPDLTKPFELFVDEKQGYAKGVLTQKLGPWRRPVAYLSKKLDPVAAGWPPCLRMVAAIAVLTKDAGKLTMGQPLVILAPHAVEALVKQPPDRWLSNARMTHYQALLLDTDRVQFGPVVALNPATLLPLPEEGLQHNCLDILAEAHGTRPDLTDQPLPDADHTWYTDGSSLLQEGQRKAGAAVTTETEVIWAKALPAGTSAQRAELIALTQALKMAEGKKLNVYTDSRYAFATAHIHGEIYRRRGWLTSEGKEIKNKDEILALLKALFLPKRLSIIHCPGHQKGHSAEARGNRMADQAARKAAITETPDTSTLLAEAAAKEAAAKEAAAKEAAAKALEAEAAAKEAAAKEAAAKEAAAKAMASNFTQFVLVDNGGTGDVTVAPSNFANGIAEWISSNSRSQAYKVTCSVRQSSAQNRKYTIKVEVPKGAWRSYLNMELTIPIFATNSDCELIVKAMQGLLKDGNPIPSAIAANSGIYAEAAAKEAAAKEAAAKEAAAKALEAEAAAKEAAAKEAAAKEAAAKADKKYSIGLDIGTNSVGWAVITDEYKVPSKKFKVLGNTDRHSIKKNLIGALLFDSGETAEATRLKRTARRRYTRRKNRICYLQEIFSNEMAKVDDSFFHRLEESFLVEEDKKHERHPIFGNIVDEVAYHEKYPTIYHLRKKLVDSTDKADLRLIYLALAHMIKFRGHFLIEGDLNPDNSDVDKLFIQLVQTYNQLFEENPINASGVDAKAILSARLSKSRRLENLIAQLPGEKKNGLFGNLIALSLGLTPNFKSNFDLAEDAKLQLSKDTYDDDLDNLLAQIGDQYADLFLAAKNLSDAILLSDILRVNTEITKAPLSASMIKRYDEHHQDLTLLKALVRQQLPEKYKEIFFDQSKNGYAGYIDGGASQEEFYKFIKPILEKMDGTEELLVKLNREDLLRKQRTFDNGSIPHQIHLGELHAILRRQEDFYPFLKDNREKIEKILTFRIPYYVGPLARGNSRFAWMTRKSEETITPWNFEEVVDKGASAQSFIERMTNFDKNLPNEKVLPKHSLLYEYFTVYNELTKVKYVTEGMRKPAFLSGEQKKAIVDLLFKTNRKVTVKQLKEDYFKKIECFDSVEISGVEDRFNASLGTYHDLLKIIKDKDFLDNEENEDILEDIVLTLTLFEDREMIEERLKTYAHLFDDKVMKQLKRRRYTGWGRLSRKLINGIRDKQSGKTILDFLKSDGFANRNFMQLIHDDSLTFKEDIQKAQVSGQGDSLHEHIANLAGSPAIKKGILQTVKVVDELVKVMGRHKPENIVIEMARENQTTQKGQKNSRERMKRIEEGIKELGSQILKEHPVENTQLQNEKLYLYYLQNGRDMYVDQELDINRLSDYDVDHIVPQSFLKDDSIDNKVLTRSDKARGKSDNVPSEEVVKKMKNYWRQLLNAKLITQRKFDNLTKAERGGLSELDKAGFIKRQLVETRQITKHVAQILDSRMNTKYDENDKLIREVKVITLKSKLVSDFRKDFQFYKVREINNYHHAHDAYLNAVVGTALIKKYPKLESEFVYGDYKVYDVRKMIAKSEQEIGKATAKYFFYSNIMNFFKTEITLANGEIRKRPLIETNGETGEIVWDKGRDFATVRKVLSMPQVNIVKKTEVQTGGFSKESILPKRNSDKLIARKKDWDPKKYGGFDSPTVAYSVLVVAKVEKGKSKKLKSVKELLGITIMERSSFEKNPIDFLEAKGYKEVKKDLIIKLPKYSLFELENGRKRMLASAGELQKGNELALPSKYVNFLYLASHYEKLKGSPEDNEQKQLFVEQHKHYLDEIIEQISEFSKRVILADANLDKVLSAYNKHRDKPIREQAENIIHLFTLTNLGAPAAFKYFDTTIDRKRYTSTKEVLDATLIHQSITGLYETRIDLSQLGGDKRTADGSEFESPKKKAKVE

SEQ ID NO: 16101 - protein, 2265 aa, synthetic construct
MPAAKRVKLDGGTLNIEDEHRLHETSKEPDVSLGSTWLSDFPQAWAETGGMGLAVRQAPLIIPLKATSTPVSIKQYPMSQEARLGIKPHIQRLLDQGILVPCQSPWNTPLLPVKKPGTNDYRPVQDLREVNKRVEDIHPTVPNPYNLLSGLPPSHQWYTVLDLKDAFFCLRLHPTSQPLFAFEWRDPEMGISGQLTWTRLPQGFKNSPTLFNEALHRDLADFRIQHPDLILLQYVDDLLLAATSELDCQQGTRALLQTLGNLGYRASAKKAQICQKQVKYLGYLLKEGQRWLTEARKETVMGQPTPKTPRQLREFLGKAGFCRLFIPGFAEMAAPLYPLTKPGTLFNWGPDQQKAYQEIKQALLTAPALGLPDLTKPFELFVDEKQGYAKGVLTQKLGPWRRPVAYLSKKLDPVAAGWPPCLRMVAAIAVLTKDAGKLTMGQPLVILAPHAVEALVKQPPDRWLSNARMTHYQALLLDTDRVQFGPVVALNPATLLPLPEEGLQHNCLDILAEAHGTRPDLTDQPLPDADHTWYTDGSSLLQEGQRKAGAAVTTETEVIWAKALPAGTSAQRAELIALTQALKMAEGKKLNVYTDSRYAFATAHIHGEIYRRRGWLTSEGKEIKNKDEILALLKALFLPKRLSIIHCPGHQKGHSAEARGNRMADQAARKAAITETPDTSTLLAEAAAKEAAAKEAAAKEAAAKALEAEAAAKEAAAKEAAAKEAAAKAMASNFTQFVLVDNGGTGDVTVAPSNFANGIAEWISSNSRSQAYKVTCSVRQSSAQNRKYTIKVEVPKGAWRSYLNMELTIPIFATNSDCELIVKAMQGLLKDGNPIPSAIAANSGIYSGGSSGGSSGSETPGTSESATPESSGGSSGGSSDKKYSIGLDIGTNSVGWAVITDEYKVPSKKFKVLGNTDRHSIKKNLIGALLFDSGETAEATRLKRTARRRYTRRKNRICYLQEIFSNEMAKVDDSFFHRLEESFLVEEDKKHERHPIFGNIVDEVAYHEKYPTIYHLRKKLVDSTDKADLRLIYLALAHMIKFRGHFLIEGDLNPDNSDVDKLFIQLVQTYNQLFEENPINASGVDAKAILSARLSKSRRLENLIAQLPGEKKNGLFGNLIALSLGLTPNFKSNFDLAEDAKLQLSKDTYDDDLDNLLAQIGDQYADLFLAAKNLSDAILLSDILRVNTEITKAPLSASMIKRYDEHHQDLTLLKALVRQQLPEKYKEIFFDQSKNGYAGYIDGGASQEEFYKFIKPILEKMDGTEELLVKLNREDLLRKQRTFDNGSIPHQIHLGELHAILRRQEDFYPFLKDNREKIEKILTFRIPYYVGPLARGNSRFAWMTRKSEETITPWNFEEVVDKGASAQSFIERMTNFDKNLPNEKVLPKHSLLYEYFTVYNELTKVKYVTEGMRKPAFLSGEQKKAIVDLLFKTNRKVTVKQLKEDYFKKIECFDSVEISGVEDRFNASLGTYHDLLKIIKDKDFLDNEENEDILEDIVLTLTLFEDREMIEERLKTYAHLFDDKVMKQLKRRRYTGWGRLSRKLINGIRDKQSGKTILDFLKSDGFANRNFMQLIHDDSLTFKEDIQKAQVSGQGDSLHEHIANLAGSPAIKKGILQTVKVVDELVKVMGRHKPENIVIEMARENQTTQKGQKNSRERMKRIEEGIKELGSQILKEHPVENTQLQNEKLYLYYLQNGRDMYVDQELDINRLSDYDVDHIVPQSFLKDDSIDNKVLTRSDKARGKSDNVPSEEVVKKMKNYWRQLLNAKLITQRKFDNLTKAERGGLSELDKAGFIKRQLVETRQITKHVAQILDSRMNTKYDENDKLIREVKVITLKSKLVSDFRKDFQFYKVREINNYHHAHDAYLNAVVGTALIKKYPKLESEFVYGDYKVYDVRKMIAKSEQEIGKATAKYFFYSNIMNFFKTEITLANGEIRKRPLIETNGETGEIVWDKGRDFATVRKVLSMPQVNIVKKTEVQTGGFSKESILPKRNSDKLIARKKDWDPKKYGGFDSPTVAYSVLVVAKVEKGKSKKLKSVKELLGITIMERSSFEKNPIDFLEAKGYKEVKKDLIIKLPKYSLFELENGRKRMLASAGELQKGNELALPSKYVNFLYLASHYEKLKGSPEDNEQKQLFVEQHKHYLDEIIEQISEFSKRVILADANLDKVLSAYNKHRDKPIREQAENIIHLFTLTNLGAPAAFKYFDTTIDRKRYTSTKEVLDATLIHQSITGLYETRIDLSQLGGDKRTADGSEFESPKKKAKVE

SEQ ID NO: 16102 - protein, 2250 aa, synthetic construct
MPAAKRVKLDGGTLNIEDEHRLHETSKEPDVSLGSTWLSDFPQAWAETGGMGLAVRQAPLIIPLKATSTPVSIKQYPMSQEARLGIKPHIQRLLDQGILVPCQSPWNTPLLPVKKPGTNDYRPVQDLREVNKRVEDIHPTVPNPYNLLSGLPPSHQWYTVLDLKDAFFCLRLHPTSQPLFAFEWRDPEMGISGQLTWTRLPQGFKNSPTLFNEALHRDLADFRIQHPDLILLQYVDDLLLAATSELDCQQGTRALLQTLGNLGYRASAKKAQICQKQVKYLGYLLKEGQRWLTEARKETVMGQPTPKTPRQLREFLGKAGFCRLFIPGFAEMAAPLYPLTKPGTLFNWGPDQQKAYQEIKQALLTAPALGLPDLTKPFELFVDEKQGYAKGVLTQKLGPWRRPVAYLSKKLDPVAAGWPPCLRMVAAIAVLTKDAGKLTMGQPLVILAPHAVEALVKQPPDRWLSNARMTHYQALLLDTDRVQFGPVVALNPATLLPLPEEGLQHNCLDILAEAHGTRPDLTDQPLPDADHTWYTDGSSLLQEGQRKAGAAVTTETEVIWAKALPAGTSAQRAELIALTQALKMAEGKKLNVYTDSRYAFATAHIHGEIYRRRGWLTSEGKEIKNKDEILALLKALFLPKRLSIIHCPGHQKGHSAEARGNRMADQAARKAAITETPDTSTLLAEAAAKEAAAKEAAAKEAAAKALEAEAAAKEAAAKEAAAKEAAAKAMASNFTQFVLVDNGGTGDVTVAPSNFANGIAEWISSNSRSQAYKVTCSVRQSSAQNRKYTIKVEVPKGAWRSYLNMELTIPIFATNSDCELIVKAMQGLLKDGNPIPSAIAANSGIYGSSGSSGSSGSSGSSGSSDKKYSIGLDIGTNSVGWAVITDEYKVPSKKFKVLGNTDRHSIKKNLIGALLFDSGETAEATRLKRTARRRYTRRKNRICYLQEIFSNEMAKVDDSFFHRLEESFLVEEDKKHERHPIFGNIVDEVAYHEKYPTIYHLRKKLVDSTDKADLRLIYLALAHMIKFRGHFLIEGDLNPDNSDVDKLFIQLVQTYNQLFEENPINASGVDAKAILSARLSKSRRLENLIAQLPGEKKNGLFGNLIALSLGLTPNFKSNFDLAEDAKLQLSKDTYDDDLDNLLAQIGDQYADLFLAAKNLSDAILLSDILRVNTEITKAPLSASMIKRYDEHHQDLTLLKALVRQQLPEKYKEIFFDQSKNGYAGYIDGGASQEEFYKFIKPILEKMDGTEELLVKLNREDLLRKQRTFDNGSIPHQIHLGELHAILRRQEDFYPFLKDNREKIEKILTFRIPYYVGPLARGNSRFAWMTRKSEETITPWNFEEVVDKGASAQSFIERMTNFDKNLPNEKVLPKHSLLYEYFTVYNELTKVKYVTEGMRKPAFLSGEQKKAIVDLLFKTNRKVTVKQLKEDYFKKIECFDSVEISGVEDRFNASLGTYHDLLKIIKDKDFLDNEENEDILEDIVLTLTLFEDREMIEERLKTYAHLFDDKVMKQLKRRRYTGWGRLSRKLINGIRDKQSGKTILDFLKSDGFANRNFMQLIHDDSLTFKEDIQKAQVSGQGDSLHEHIANLAGSPAIKKGILQTVKVVDELVKVMGRHKPENIVIEMARENQTTQKGQKNSRERMKRIEEGIKELGSQILKEHPVENTQLQNEKLYLYYLQNGRDMYVDQELDINRLSDYDVDHIVPQSFLKDDSIDNKVLTRSDKARGKSDNVPSEEVVKKMKNYWRQLLNAKLITQRKFDNLTKAERGGLSELDKAGFIKRQLVETRQITKHVAQILDSRMNTKYDENDKLIREVKVITLKSKLVSDFRKDFQFYKVREINNYHHAHDAYLNAVVGTALIKKYPKLESEFVYGDYKVYDVRKMIAKSEQEIGKATAKYFFYSNIMNFFKTEITLANGEIRKRPLIETNGETGEIVWDKGRDFATVRKVLSMPQVNIVKKTEVQTGGFSKESILPKRNSDKLIARKKDWDPKKYGGFDSPTVAYSVLVVAKVEKGKSKKLKSVKELLGITIMERSSFEKNPIDFLEAKGYKEVKKDLIIKLPKYSLFELENGRKRMLASAGELQKGNELALPSKYVNFLYLASHYEKLKGSPEDNEQKQLFVEQHKHYLDEIIEQISEFSKRVILADANLDKVLSAYNKHRDKPIREQAENIIHLFTLTNLGAPAAFKYFDTTIDRKRYTSTKEVLDATLIHQSITGLYETRIDLSQLGGDKRTADGSEFESPKKKAKVE

SEQ ID NO: 16103 - protein, 2243 aa, synthetic construct
MPAAKRVKLDGGTLNIEDEHRLHETSKEPDVSLGSTWLSDFPQAWAETGGMGLAVRQAPLIIPLKATSTPVSIKQYPMSQEARLGIKPHIQRLLDQGILVPCQSPWNTPLLPVKKPGTNDYRPVQDLREVNKRVEDIHPTVPNPYNLLSGLPPSHQWYTVLDLKDAFFCLRLHPTSQPLFAFEWRDPEMGISGQLTWTRLPQGFKNSPTLFNEALHRDLADFRIQHPDLILLQYVDDLLLAATSELDCQQGTRALLQTLGNLGYRASAKKAQICQKQVKYLGYLLKEGQRWLTEARKETVMGQPTPKTPRQLREFLGKAGFCRLFIPGFAEMAAPLYPLTKPGTLFNWGPDQQKAYQEIKQALLTAPALGLPDLTKPFELFVDEKQGYAKGVLTQKLGPWRRPVAYLSKKLDPVAAGWPPCLRMVAAIAVLTKDAGKLTMGQPLVILAPHAVEALVKQPPDRWLSNARMTHYQALLLDTDRVQFGPVVALNPATLLPLPEEGLQHNCLDILAEAHGTRPDLTDQPLPDADHTWYTDGSSLLQEGQRKAGAAVTTETEVIWAKALPAGTSAQRAELIALTQALKMAEGKKLNVYTDSRYAFATAHIHGEIYRRRGWLTSEGKEIKNKDEILALLKALFLPKRLSIIHCPGHQKGHSAEARGNRMADQAARKAAITETPDTSTLLAEAAAKEAAAKEAAAKEAAAKALEAEAAAKEAAAKEAAAKEAAAKAMASNFTQFVLVDNGGTGDVTVAPSNFANGIAEWISSNSRSQAYKVTCSVRQSSAQNRKYTIKVEVPKGAWRSYLNMELTIPIFATNSDCELIVKAMQGLLKDGNPIPSAIAANSGIYGSSGGGEAAAKDKKYSIGLDIGTNSVGWAVITDEYKVPSKKFKVLGNTDRHSIKKNLIGALLFDSGETAEATRLKRTARRRYTRRKNRICYLQEIFSNEMAKVDDSFFHRLEESFLVEEDKKHERHPIFGNIVDEVAYHEKYPTIYHLRKKLVDSTDKADLRLIYLALAHMIKFRGHFLIEGDLNPDNSDVDKLFIQLVQTYNQLFEENPINASGVDAKAILSARLSKSRRLENLIAQLPGEKKNGLFGNLIALSLGLTPNFKSNFDLAEDAKLQLSKDTYDDDLDNLLAQIGDQYADLFLAAKNLSDAILLSDILRVNTEITKAPLSASMIKRYDEHHQDLTLLKALVRQQLPEKYKEIFFDQSKNGYAGYIDGGASQEEFYKFIKPILEKMDGTEELLVKLNREDLLRKQRTFDNGSIPHQIHLGELHAILRRQEDFYPFLKDNREKIEKILTFRIPYYVGPLARGNSRFAWMTRKSEETITPWNFEEVVDKGASAQSFIERMTNFDKNLPNEKVLPKHSLLYEYFTVYNELTKVKYVTEGMRKPAFLSGEQKKAIVDLLFKTNRKVTVKQLKEDYFKKIECFDSVEISGVEDRFNASLGTYHDLLKIIKDKDFLDNEENEDILEDIVLTLTLFEDREMIEERLKTYAHLFDDKVMKQLKRRRYTGWGRLSRKLINGIRDKQSGKTILDFLKSDGFANRNFMQLIHDDSLTFKEDIQKAQVSGQGDSLHEHIANLAGSPAIKKGILQTVKVVDELVKVMGRHKPENIVIEMARENQTTQKGQKNSRERMKRIEEGIKELGSQILKEHPVENTQLQNEKLYLYYLQNGRDMYVDQELDINRLSDYDVDHIVPQSFLKDDSIDNKVLTRSDKARGKSDNVPSEEVVKKMKNYWRQLLNAKLITQRKFDNLTKAERGGLSELDKAGFIKRQLVETRQITKHVAQILDSRMNTKYDENDKLIREVKVITLKSKLVSDFRKDFQFYKVREINNYHHAHDAYLNAVVGTALIKKYPKLESEFVYGDYKVYDVRKMIAKSEQEIGKATAKYFFYSNIMNFFKTEITLANGEIRKRPLIETNGETGEIVWDKGRDFATVRKVLSMPQVNIVKKTEVQTGGFSKESILPKRNSDKLIARKKDWDPKKYGGFDSPTVAYSVLVVAKVEKGKSKKLKSVKELLGITIMERSSFEKNPIDFLEAKGYKEVKKDLIIKLPKYSLFELENGRKRMLASAGELQKGNELALPSKYVNFLYLASHYEKLKGSPEDNEQKQLFVEQHKHYLDEIIEQISEFSKRVILADANLDKVLSAYNKHRDKPIREQAENIIHLFTLTNLGAPAAFKYFDTTIDRKRYTSTKEVLDATLIHQSITGLYETRIDLSQLGGDKRTADGSEFESPKKKAKVE

SEQ ID NO: 16104 - protein, 2401 aa, synthetic construct
MPAAKRVKLDGGTLNIEDEHRLHETSKEPDVSLGSTWLSDFPQAWAETGGMGLAVRQAPLIIPLKATSTPVSIKQYPMSQEARLGIKPHIQRLLDQGILVPCQSPWNTPLLPVKKPGTNDYRPVQDLREVNKRVEDIHPTVPNPYNLLSGLPPSHQWYTVLDLKDAFFCLRLHPTSQPLFAFEWRDPEMGISGQLTWTRLPQGFKNSPTLFNEALHRDLADFRIQHPDLILLQYVDDLLLAATSELDCQQGTRALLQTLGNLGYRASAKKAQICQKQVKYLGYLLKEGQRWLTEARKETVMGQPTPKTPRQLREFLGKAGFCRLFIPGFAEMAAPLYPLTKPGTLFNWGPDQQKAYQEIKQALLTAPALGLPDLTKPFELFVDEKQGYAKGVLTQKLGPWRRPVAYLSKKLDPVAAGWPPCLRMVAAIAVLTKDAGKLTMGQPLVILAPHAVEALVKQPPDRWLSNARMTHYQALLLDTDRVQFGPVVALNPATLLPLPEEGLQHNCLDILAEAHGTRPDLTDQPLPDADHTWYTDGSSLLQEGQRKAGAAVTTETEVIWAKALPAGTSAQRAELIALTQALKMAEGKKLNVYTDSRYAFATAHIHGEIYRRRGWLTSEGKEIKNKDEILALLKALFLPKRLSIIHCPGHQKGHSAEARGNRMADQAARKAAITETPDTSTLLAEAAAKEAAAKEAAAKEAAAKALEAEAAAKEAAAKEAAAKEAAAKAMASNFTQFVLVDNGGTGDVTVAPSNFANGIAEWISSNSRSQAYKVTCSVRQSSAQNRKYTIKVEVPKGAWRSYLNMELTIPIFATNSDCELIVKAMQGLLKDGNPIPSAIAANSGIYGGSGGSMASNFTQFVLVDNGGTGDVTVAPSNFANGIAEWISSNSRSQAYKVTCSVRQSSAQNRKYTIKVEVPKGAWRSYLNMELTIPIFATNSDCELIVKAMQGLLKDGNPIPSAIAANSGIYAEAAAKEAAAKEAAAKEAAAKALEAEAAAKEAAAKEAAAKEAAAKADKKYSIGLDIGTNSVGWAVITDEYKVPSKKFKVLGNTDRHSIKKNLIGALLFDSGETAEATRLKRTARRRYTRRKNRICYLQEIFSNEMAKVDDSFFHRLEESFLVEEDKKHERHPIFGNIVDEVAYHEKYPTIYHLRKKLVDSTDKADLRLIYLALAHMIKFRGHFLIEGDLNPDNSDVDKLFIQLVQTYNQLFEENPINASGVDAKAILSARLSKSRRLENLIAQLPGEKKNGLFGNLIALSLGLTPNFKSNFDLAEDAKLQLSKDTYDDDLDNLLAQIGDQYADLFLAAKNLSDAILLSDILRVNTEITKAPLSASMIKRYDEHHQDLTLLKALVRQQLPEKYKEIFFDQSKNGYAGYIDGGASQEEFYKFIKPILEKMDGTEELLVKLNREDLLRKQRTFDNGSIPHQIHLGELHAILRRQEDFYPFLKDNREKIEKILTFRIPYYVGPLARGNSRFAWMTRKSEETITPWNFEEVVDKGASAQSFIERMTNFDKNLPNEKVLPKHSLLYEYFTVYNELTKVKYVTEGMRKPAFLSGEQKKAIVDLLFKTNRKVTVKQLKEDYFKKIECFDSVEISGVEDRFNASLGTYHDLLKIIKDKDFLDNEENEDILEDIVLTLTLFEDREMIEERLKTYAHLFDDKVMKQLKRRRYTGWGRLSRKLINGIRDKQSGKTILDFLKSDGFANRNFMQLIHDDSLTFKEDIQKAQVSGQGDSLHEHIANLAGSPAIKKGILQTVKVVDELVKVMGRHKPENIVIEMARENQTTQKGQKNSRERMKRIEEGIKELGSQILKEHPVENTQLQNEKLYLYYLQNGRDMYVDQELDINRLSDYDVDHIVPQSFLKDDSIDNKVLTRSDKARGKSDNVPSEEVVKKMKNYWRQLLNAKLITQRKFDNLTKAERGGLSELDKAGFIKRQLVETRQITKHVAQILDSRMNTKYDENDKLIREVKVITLKSKLVSDFRKDFQFYKVREINNYHHAHDAYLNAVVGTALIKKYPKLESEFVYGDYKVYDVRKMIAKSEQEIGKATAKYFFYSNIMNFFKTEITLANGEIRKRPLIETNGETGEIVWDKGRDFATVRKVLSMPQVNIVKKTEVQTGGFSKESILPKRNSDKLIARKKDWDPKKYGGFDSPTVAYSVLVVAKVEKGKSKKLKSVKELLGITIMERSSFEKNPIDFLEAKGYKEVKKDLIIKLPKYSLFELENGRKRMLASAGELQKGNELALPSKYVNFLYLASHYEKLKGSPEDNEQKQLFVEQHKHYLDEIIEQISEFSKRVILADANLDKVLSAYNKHRDKPIREQAENIIHLFTLTNLGAPAAFKYFDTTIDRKRYTSTKEVLDATLIHQSITGLYETRIDLSQLGGDKRTADGSEFESPKKKAKVE

SEQ ID NO: 16105 - protein, 2388 aa, synthetic construct
MPAAKRVKLDGGTLNIEDEHRLHETSKEPDVSLGSTWLSDFPQAWAETGGMGLAVRQAPLIIPLKATSTPVSIKQYPMSQEARLGIKPHIQRLLDQGILVPCQSPWNTPLLPVKKPGTNDYRPVQDLREVNKRVEDIHPTVPNPYNLLSGLPPSHQWYTVLDLKDAFFCLRLHPTSQPLFAFEWRDPEMGISGQLTWTRLPQGFKNSPTLFNEALHRDLADFRIQHPDLILLQYVDDLLLAATSELDCQQGTRALLQTLGNLGYRASAKKAQICQKQVKYLGYLLKEGQRWLTEARKETVMGQPTPKTPRQLREFLGKAGFCRLFIPGFAEMAAPLYPLTKPGTLFNWGPDQQKAYQEIKQALLTAPALGLPDLTKPFELFVDEKQGYAKGVLTQKLGPWRRPVAYLSKKLDPVAAGWPPCLRMVAAIAVLTKDAGKLTMGQPLVILAPHAVEALVKQPPDRWLSNARMTHYQALLLDTDRVQFGPVVALNPATLLPLPEEGLQHNCLDILAEAHGTRPDLTDQPLPDADHTWYTDGSSLLQEGQRKAGAAVTTETEVIWAKALPAGTSAQRAELIALTQALKMAEGKKLNVYTDSRYAFATAHIHGEIYRRRGWLTSEGKEIKNKDEILALLKALFLPKRLSIIHCPGHQKGHSAEARGNRMADQAARKAAITETPDTSTLLAEAAAKEAAAKEAAAKEAAAKALEAEAAAKEAAAKEAAAKEAAAKAMASNFTQFVLVDNGGTGDVTVAPSNFANGIAEWISSNSRSQAYKVTCSVRQSSAQNRKYTIKVEVPKGAWRSYLNMELTIPIFATNSDCELIVKAMQGLLKDGNPIPSAIAANSGIYGGSGGSMASNFTQFVLVDNGGTGDVTVAPSNFANGIAEWISSNSRSQAYKVTCSVRQSSAQNRKYTIKVEVPKGAWRSYLNMELTIPIFATNSDCELIVKAMQGLLKDGNPIPSAIAANSGIYSGGSSGGSSGSETPGTSESATPESSGGSSGGSSDKKYSIGLDIGTNSVGWAVITDEYKVPSKKFKVLGNTDRHSIKKNLIGALLFDSGETAEATRLKRTARRRYTRRKNRICYLQEIFSNEMAKVDDSFFHRLEESFLVEEDKKHERHPIFGNIVDEVAYHEKYPTIYHLRKKLVDSTDKADLRLIYLALAHMIKFRGHFLIEGDLNPDNSDVDKLFIQLVQTYNQLFEENPINASGVDAKAILSARLSKSRRLENLIAQLPGEKKNGLFGNLIALSLGLTPNFKSNFDLAEDAKLQLSKDTYDDDLDNLLAQIGDQYADLFLAAKNLSDAILLSDILRVNTEITKAPLSASMIKRYDEHHQDLTLLKALVRQQLPEKYKEIFFDQSKNGYAGYIDGGASQEEFYKFIKPILEKMDGTEELLVKLNREDLLRKQRTFDNGSIPHQIHLGELHAILRRQEDFYPFLKDNREKIEKILTFRIPYYVGPLARGNSRFAWMTRKSEETITPWNFEEVVDKGASAQSFIERMTNFDKNLPNEKVLPKHSLLYEYFTVYNELTKVKYVTEGMRKPAFLSGEQKKAIVDLLFKTNRKVTVKQLKEDYFKKIECFDSVEISGVEDRFNASLGTYHDLLKIIKDKDFLDNEENEDILEDIVLTLTLFEDREMIEERLKTYAHLFDDKVMKQLKRRRYTGWGRLSRKLINGIRDKQSGKTILDFLKSDGFANRNFMQLIHDDSLTFKEDIQKAQVSGQGDSLHEHIANLAGSPAIKKGILQTVKVVDELVKVMGRHKPENIVIEMARENQTTQKGQKNSRERMKRIEEGIKELGSQILKEHPVENTQLQNEKLYLYYLQNGRDMYVDQELDINRLSDYDVDHIVPQSFLKDDSIDNKVLTRSDKARGKSDNVPSEEVVKKMKNYWRQLLNAKLITQRKFDNLTKAERGGLSELDKAGFIKRQLVETRQITKHVAQILDSRMNTKYDENDKLIREVKVITLKSKLVSDFRKDFQFYKVREINNYHHAHDAYLNAVVGTALIKKYPKLESEFVYGDYKVYDVRKMIAKSEQEIGKATAKYFFYSNIMNFFKTEITLANGEIRKRPLIETNGETGEIVWDKGRDFATVRKVLSMPQVNIVKKTEVQTGGFSKESILPKRNSDKLIARKKDWDPKKYGGFDSPTVAYSVLVVAKVEKGKSKKLKSVKELLGITIMERSSFEKNPIDFLEAKGYKEVKKDLIIKLPKYSLFELENGRKRMLASAGELQKGNELALPSKYVNFLYLASHYEKLKGSPEDNEQKQLFVEQHKHYLDEIIEQISEFSKRVILADANLDKVLSAYNKHRDKPIREQAENIIHLFTLTNLGAPAAFKYFDTTIDRKRYTSTKEVLDATLIHQSITGLYETRIDLSQLGGDKRTADGSEFESPKKKAKVE

SEQ ID NO: 16106 - protein, 2373 aa, synthetic construct
MPAAKRVKLDGGTLNIEDEHRLHETSKEPDVSLGSTWLSDFPQAWAETGGMGLAVRQAPLIIPLKATSTPVSIKQYPMSQEARLGIKPHIQRLLDQGILVPCQSPWNTPLLPVKKPGTNDYRPVQDLREVNKRVEDIHPTVPNPYNLLSGLPPSHQWYTVLDLKDAFFCLRLHPTSQPLFAFEWRDPEMGISGQLTWTRLPQGFKNSPTLFNEALHRDLADFRIQHPDLILLQYVDDLLLAATSELDCQQGTRALLQTLGNLGYRASAKKAQICQKQVKYLGYLLKEGQRWLTEARKETVMGQPTPKTPRQLREFLGKAGFCRLFIPGFAEMAAPLYPLTKPGTLFNWGPDQQKAYQEIKQALLTAPALGLPDLTKPFELFVDEKQGYAKGVLTQKLGPWRRPVAYLSKKLDPVAAGWPPCLRMVAAIAVLTKDAGKLTMGQPLVILAPHAVEALVKQPPDRWLSNARMTHYQALLLDTDRVQFGPVVALNPATLLPLPEEGLQHNCLDILAEAHGTRPDLTDQPLPDADHTWYTDGSSLLQEGQRKAGAAVTTETEVIWAKALPAGTSAQRAELIALTQALKMAEGKKLNVYTDSRYAFATAHIHGEIYRRRGWLTSEGKEIKNKDEILALLKALFLPKRLSIIHCPGHQKGHSAEARGNRMADQAARKAAITETPDTSTLLAEAAAKEAAAKEAAAKEAAAKALEAEAAAKEAAAKEAAAKEAAAKAMASNFTQFVLVDNGGTGDVTVAPSNFANGIAEWISSNSRSQAYKVTCSVRQSSAQNRKYTIKVEVPKGAWRSYLNMELTIPIFATNSDCELIVKAMQGLLKDGNPIPSAIAANSGIYGGSGGSMASNFTQFVLVDNGGTGDVTVAPSNFANGIAEWISSNSRSQAYKVTCSVRQSSAQNRKYTIKVEVPKGAWRSYLNMELTIPIFATNSDCELIVKAMQGLLKDGNPIPSAIAANSGIYGSSGSSGSSGSSGSSGSSDKKYSIGLDIGTNSVGWAVITDEYKVPSKKFKVLGNTDRHSIKKNLIGALLFDSGETAEATRLKRTARRRYTRRKNRICYLQEIFSNEMAKVDDSFFHRLEESFLVEEDKKHERHPIFGNIVDEVAYHEKYPTIYHLRKKLVDSTDKADLRLIYLALAHMIKFRGHFLIEGDLNPDNSDVDKLFIQLVQTYNQLFEENPINASGVDAKAILSARLSKSRRLENLIAQLPGEKKNGLFGNLIALSLGLTPNFKSNFDLAEDAKLQLSKDTYDDDLDNLLAQIGDQYADLFLAAKNLSDAILLSDILRVNTEITKAPLSASMIKRYDEHHQDLTLLKALVRQQLPEKYKEIFFDQSKNGYAGYIDGGASQEEFYKFIKPILEKMDGTEELLVKLNREDLLRKQRTFDNGSIPHQIHLGELHAILRRQEDFYPFLKDNREKIEKILTFRIPYYVGPLARGNSRFAWMTRKSEETITPWNFEEVVDKGASAQSFIERMTNFDKNLPNEKVLPKHSLLYEYFTVYNELTKVKYVTEGMRKPAFLSGEQKKAIVDLLFKTNRKVTVKQLKEDYFKKIECFDSVEISGVEDRFNASLGTYHDLLKIIKDKDFLDNEENEDILEDIVLTLTLFEDREMIEERLKTYAHLFDDKVMKQLKRRRYTGWGRLSRKLINGIRDKQSGKTILDFLKSDGFANRNFMQLIHDDSLTFKEDIQKAQVSGQGDSLHEHIANLAGSPAIKKGILQTVKVVDELVKVMGRHKPENIVIEMARENQTTQKGQKNSRERMKRIEEGIKELGSQILKEHPVENTQLQNEKLYLYYLQNGRDMYVDQELDINRLSDYDVDHIVPQSFLKDDSIDNKVLTRSDKARGKSDNVPSEEVVKKMKNYWRQLLNAKLITQRKFDNLTKAERGGLSELDKAGFIKRQLVETRQITKHVAQILDSRMNTKYDENDKLIREVKVITLKSKLVSDFRKDFQFYKVREINNYHHAHDAYLNAVVGTALIKKYPKLESEFVYGDYKVYDVRKMIAKSEQEIGKATAKYFFYSNIMNFFKTEITLANGEIRKRPLIETNGETGEIVWDKGRDFATVRKVLSMPQVNIVKKTEVQTGGFSKESILPKRNSDKLIARKKDWDPKKYGGFDSPTVAYSVLVVAKVEKGKSKKLKSVKELLGITIMERSSFEKNPIDFLEAKGYKEVKKDLIIKLPKYSLFELENGRKRMLASAGELQKGNELALPSKYVNFLYLASHYEKLKGSPEDNEQKQLFVEQHKHYLDEIIEQISEFSKRVILADANLDKVLSAYNKHRDKPIREQAENIIHLFTLTNLGAPAAFKYFDTTIDRKRYTSTKEVLDATLIHQSITGLYETRIDLSQLGGDKRTADGSEFESPKKKAKVE

SEQ ID NO: 16107 - protein, 2366 aa, synthetic construct
MPAAKRVKLDGGTLNIEDEHRLHETSKEPDVSLGSTWLSDFPQAWAETGGMGLAVRQAPLIIPLKATSTPVSIKQYPMSQEARLGIKPHIQRLLDQGILVPCQSPWNTPLLPVKKPGTNDYRPVQDLREVNKRVEDIHPTVPNPYNLLSGLPPSHQWYTVLDLKDAFFCLRLHPTSQPLFAFEWRDPEMGISGQLTWTRLPQGFKNSPTLFNEALHRDLADFRIQHPDLILLQYVDDLLLAATSELDCQQGTRALLQTLGNLGYRASAKKAQICQKQVKYLGYLLKEGQRWLTEARKETVMGQPTPKTPRQLREFLGKAGFCRLFIPGFAEMAAPLYPLTKPGTLFNWGPDQQKAYQEIKQALLTAPALGLPDLTKPFELFVDEKQGYAKGVLTQKLGPWRRPVAYLSKKLDPVAAGWPPCLRMVAAIAVLTKDAGKLTMGQPLVILAPHAVEALVKQPPDRWLSNARMTHYQALLLDTDRVQFGPVVALNPATLLPLPEEGLQHNCLDILAEAHGTRPDLTDQPLPDADHTWYTDGSSLLQEGQRKAGAAVTTETEVIWAKALPAGTSAQRAELIALTQALKMAEGKKLNVYTDSRYAFATAHIHGEIYRRRGWLTSEGKEIKNKDEILALLKALFLPKRLSIIHCPGHQKGHSAEARGNRMADQAARKAAITETPDTSTLLAEAAAKEAAAKEAAAKEAAAKALEAEAAAKEAAAKEAAAKEAAAKAMASNFTQFVLVDNGGTGDVTVAPSNFANGIAEWISSNSRSQAYKVTCSVRQSSAQNRKYTIKVEVPKGAWRSYLNMELTIPIFATNSDCELIVKAMQGLLKDGNPIPSAIAANSGIYGGSGGSMASNFTQFVLVDNGGTGDVTVAPSNFANGIAEWISSNSRSQAYKVTCSVRQSSAQNRKYTIKVEVPKGAWRSYLNMELTIPIFATNSDCELIVKAMQGLLKDGNPIPSAIAANSGIYGSSGGGEAAAKDKKYSIGLDIGTNSVGWAVITDEYKVPSKKFKVLGNTDRHSIKKNLIGALLFDSGETAEATRLKRTARRRYTRRKNRICYLQEIFSNEMAKVDDSFFHRLEESFLVEEDKKHERHPIFGNIVDEVAYHEKYPTIYHLRKKLVDSTDKADLRLIYLALAHMIKFRGHFLIEGDLNPDNSDVDKLFIQLVQTYNQLFEENPINASGVDAKAILSARLSKSRRLENLIAQLPGEKKNGLFGNLIALSLGLTPNFKSNFDLAEDAKLQLSKDTYDDDLDNLLAQIGDQYADLFLAAKNLSDAILLSDILRVNTEITKAPLSASMIKRYDEHHQDLTLLKALVRQQLPEKYKEIFFDQSKNGYAGYIDGGASQEEFYKFIKPILEKMDGTEELLVKLNREDLLRKQRTFDNGSIPHQIHLGELHAILRRQEDFYPFLKDNREKIEKILTFRIPYYVGPLARGNSRFAWMTRKSEETITPWNFEEVVDKGASAQSFIERMTNFDKNLPNEKVLPKHSLLYEYFTVYNELTKVKYVTEGMRKPAFLSGEQKKAIVDLLFKTNRKVTVKQLKEDYFKKIECFDSVEISGVEDRFNASLGTYHDLLKIIKDKDFLDNEENEDILEDIVLTLTLFEDREMIEERLKTYAHLFDDKVMKQLKRRRYTGWGRLSRKLINGIRDKQSGKTILDFLKSDGFANRNFMQLIHDDSLTFKEDIQKAQVSGQGDSLHEHIANLAGSPAIKKGILQTVKVVDELVKVMGRHKPENIVIEMARENQTTQKGQKNSRERMKRIEEGIKELGSQILKEHPVENTQLQNEKLYLYYLQNGRDMYVDQELDINRLSDYDVDHIVPQSFLKDDSIDNKVLTRSDKARGKSDNVPSEEVVKKMKNYWRQLLNAKLITQRKFDNLTKAERGGLSELDKAGFIKRQLVETRQITKHVAQILDSRMNTKYDENDKLIREVKVITLKSKLVSDFRKDFQFYKVREINNYHHAHDAYLNAVVGTALIKKYPKLESEFVYGDYKVYDVRKMIAKSEQEIGKATAKYFFYSNIMNFFKTEITLANGEIRKRPLIETNGETGEIVWDKGRDFATVRKVLSMPQVNIVKKTEVQTGGFSKESILPKRNSDKLIARKKDWDPKKYGGFDSPTVAYSVLVVAKVEKGKSKKLKSVKELLGITIMERSSFEKNPIDFLEAKGYKEVKKDLIIKLPKYSLFELENGRKRMLASAGELQKGNELALPSKYVNFLYLASHYEKLKGSPEDNEQKQLFVEQHKHYLDEIIEQISEFSKRVILADANLDKVLSAYNKHRDKPIREQAENIIHLFTLTNLGAPAAFKYFDTTIDRKRYTSTKEVLDATLIHQSITGLYETRIDLSQLGGDKRTADGSEFESPKKKAKVE

SEQ ID NO: 16108 - protein, 2657 aa, synthetic construct
MPAAKRVKLDGGTLNIEDEHRLHETSKEPDVSLGSTWLSDFPQAWAETGGMGLAVRQAPLIIPLKATSTPVSIKQYPMSQEARLGIKPHIQRLLDQGILVPCQSPWNTPLLPVKKPGTNDYRPVQDLREVNKRVEDIHPTVPNPYNLLSGLPPSHQWYTVLDLKDAFFCLRLHPTSQPLFAFEWRDPEMGISGQLTWTRLPQGFKNSPTLFNEALHRDLADFRIQHPDLILLQYVDDLLLAATSELDCQQGTRALLQTLGNLGYRASAKKAQICQKQVKYLGYLLKEGQRWLTEARKETVMGQPTPKTPRQLREFLGKAGFCRLFIPGFAEMAAPLYPLTKPGTLFNWGPDQQKAYQEIKQALLTAPALGLPDLTKPFELFVDEKQGYAKGVLTQKLGPWRRPVAYLSKKLDPVAAGWPPCLRMVAAIAVLTKDAGKLTMGQPLVILAPHAVEALVKQPPDRWLSNARMTHYQALLLDTDRVQFGPVVALNPATLLPLPEEGLQHNCLDILAEAHGTRPDLTDQPLPDADHTWYTDGSSLLQEGQRKAGAAVTTETEVIWAKALPAGTSAQRAELIALTQALKMAEGKKLNVYTDSRYAFATAHIHGEIYRRRGWLTSEGKEIKNKDEILALLKALFLPKRLSIIHCPGHQKGHSAEARGNRMADQAARKAAITETPDTSTLLAEAAAKEAAAKEAAAKEAAAKALEAEAAAKEAAAKEAAAKEAAAKAMASNFTQFVLVDNGGTGDVTVAPSNFANGIAEWISSNSRSQAYKVTCSVRQSSAQNRKYTIKVEVPKGAWRSYLNMELTIPIFATNSDCELIVKAMQGLLKDGNPIPSAIAANSGIYGGSGGSMASNFTQFVLVDNGGTGDVTVAPSNFANGIAEWISSNSRSQAYKVTCSVRQSSAQNRKYTIKVEVPKGAWRSYLNMELTIPIFATNSDCELIVKAMQGLLKDGNPIPSAIAANSGIYGGGSGGGSGGGSGGGSMASNFTQFVLVDNGGTGDVTVAPSNFANGIAEWISSNSRSQAYKVTCSVRQSSAQNRKYTIKVEVPKGAWRSYLNMELTIPIFATNSDCELIVKAMQGLLKDGNPIPSAIAANSGIYGGSGGSMASNFTQFVLVDNGGTGDVTVAPSNFANGIAEWISSNSRSQAYKVTCSVRQSSAQNRKYTIKVEVPKGAWRSYLNMELTIPIFATNSDCELIVKAMQGLLKDGNPIPSAIAANSGIYAEAAAKEAAAKEAAAKEAAAKALEAEAAAKEAAAKEAAAKEAAAKADKKYSIGLDIGTNSVGWAVITDEYKVPSKKFKVLGNTDRHSIKKNLIGALLFDSGETAEATRLKRTARRRYTRRKNRICYLQEIFSNEMAKVDDSFFHRLEESFLVEEDKKHERHPIFGNIVDEVAYHEKYPTIYHLRKKLVDSTDKADLRLIYLALAHMIKFRGHFLIEGDLNPDNSDVDKLFIQLVQTYNQLFEENPINASGVDAKAILSARLSKSRRLENLIAQLPGEKKNGLFGNLIALSLGLTPNFKSNFDLAEDAKLQLSKDTYDDDLDNLLAQIGDQYADLFLAAKNLSDAILLSDILRVNTEITKAPLSASMIKRYDEHHQDLTLLKALVRQQLPEKYKEIFFDQSKNGYAGYIDGGASQEEFYKFIKPILEKMDGTEELLVKLNREDLLRKQRTFDNGSIPHQIHLGELHAILRRQEDFYPFLKDNREKIEKILTFRIPYYVGPLARGNSRFAWMTRKSEETITPWNFEEVVDKGASAQSFIERMTNFDKNLPNEKVLPKHSLLYEYFTVYNELTKVKYVTEGMRKPAFLSGEQKKAIVDLLFKTNRKVTVKQLKEDYFKKIECFDSVEISGVEDRFNASLGTYHDLLKIIKDKDFLDNEENEDILEDIVLTLTLFEDREMIEERLKTYAHLFDDKVMKQLKRRRYTGWGRLSRKLINGIRDKQSGKTILDFLKSDGFANRNFMQLIHDDSLTFKEDIQKAQVSGQGDSLHEHIANLAGSPAIKKGILQTVKVVDELVKVMGRHKPENIVIEMARENQTTQKGQKNSRERMKRIEEGIKELGSQILKEHPVENTQLQNEKLYLYYLQNGRDMYVDQELDINRLSDYDVDHIVPQSFLKDDSIDNKVLTRSDKARGKSDNVPSEEVVKKMKNYWRQLLNAKLITQRKFDNLTKAERGGLSELDKAGFIKRQLVETRQITKHVAQILDSRMNTKYDENDKLIREVKVITLKSKLVSDFRKDFQFYKVREINNYHHAHDAYLNAVVGTALIKKYPKLESEFVYGDYKVYDVRKMIAKSEQEIGKATAKYFFYSNIMNFFKTEITLANGEIRKRPLIETNGETGEIVWDKGRDFATVRKVLSMPQVNIVKKTEVQTGGFSKESILPKRNSDKLIARKKDWDPKKYGGFDSPTVAYSVLVVAKVEKGKSKKLKSVKELLGITIMERSSFEKNPIDFLEAKGYKEVKKDLIIKLPKYSLFELENGRKRMLASAGELQKGNELALPSKYVNFLYLASHYEKLKGSPEDNEQKQLFVEQHKHYLDEIIEQISEFSKRVILADANLDKVLSAYNKHRDKPIREQAENIIHLFTLTNLGAPAAFKYFDTTIDRKRYTSTKEVLDATLIHQSITGLYETRIDLSQLGGDKRTADGSEFESPKKKAKVE

SEQ ID NO: 16109 - protein, 2644 aa, synthetic construct
MPAAKRVKLDGGTLNIEDEHRLHETSKEPDVSLGSTWLSDFPQAWAETGGMGLAVRQAPLIIPLKATSTPVSIKQYPMSQEARLGIKPHIQRLLDQGILVPCQSPWNTPLLPVKKPGTNDYRPVQDLREVNKRVEDIHPTVPNPYNLLSGLPPSHQWYTVLDLKDAFFCLRLHPTSQPLFAFEWRDPEMGISGQLTWTRLPQGFKNSPTLFNEALHRDLADFRIQHPDLILLQYVDDLLLAATSELDCQQGTRALLQTLGNLGYRASAKKAQICQKQVKYLGYLLKEGQRWLTEARKETVMGQPTPKTPRQLREFLGKAGFCRLFIPGFAEMAAPLYPLTKPGTLFNWGPDQQKAYQEIKQALLTAPALGLPDLTKPFELFVDEKQGYAKGVLTQKLGPWRRPVAYLSKKLDPVAAGWPPCLRMVAAIAVLTKDAGKLTMGQPLVILAPHAVEALVKQPPDRWLSNARMTHYQALLLDTDRVQFGPVVALNPATLLPLPEEGLQHNCLDILAEAHGTRPDLTDQPLPDADHTWYTDGSSLLQEGQRKAGAAVTTETEVIWAKALPAGTSAQRAELIALTQALKMAEGKKLNVYTDSRYAFATAHIHGEIYRRRGWLTSEGKEIKNKDEILALLKALFLPKRLSIIHCPGHQKGHSAEARGNRMADQAARKAAITETPDTSTLLAEAAAKEAAAKEAAAKEAAAKALEAEAAAKEAAAKEAAAKEAAAKAMASNFTQFVLVDNGGTGDVTVAPSNFANGIAEWISSNSRSQAYKVTCSVRQSSAQNRKYTIKVEVPKGAWRSYLNMELTIPIFATNSDCELIVKAMQGLLKDGNPIPSAIAANSGIYGGSGGSMASNFTQFVLVDNGGTGDVTVAPSNFANGIAEWISSNSRSQAYKVTCSVRQSSAQNRKYTIKVEVPKGAWRSYLNMELTIPIFATNSDCELIVKAMQGLLKDGNPIPSAIAANSGIYGGGSGGGSGGGSGGGSMASNFTQFVLVDNGGTGDVTVAPSNFANGIAEWISSNSRSQAYKVTCSVRQSSAQNRKYTIKVEVPKGAWRSYLNMELTIPIFATNSDCELIVKAMQGLLKDGNPIPSAIAANSGIYGGSGGSMASNFTQFVLVDNGGTGDVTVAPSNFANGIAEWISSNSRSQAYKVTCSVRQSSAQNRKYTIKVEVPKGAWRSYLNMELTIPIFATNSDCELIVKAMQGLLKDGNPIPSAIAANSGIYSGGSSGGSSGSETPGTSESATPESSGGSSGGSSDKKYSIGLDIGTNSVGWAVITDEYKVPSKKFKVLGNTDRHSIKKNLIGALLFDSGETAEATRLKRTARRRYTRRKNRICYLQEIFSNEMAKVDDSFFHRLEESFLVEEDKKHERHPIFGNIVDEVAYHEKYPTIYHLRKKLVDSTDKADLRLIYLALAHMIKFRGHFLIEGDLNPDNSDVDKLFIQLVQTYNQLFEENPINASGVDAKAILSARLSKSRRLENLIAQLPGEKKNGLFGNLIALSLGLTPNFKSNFDLAEDAKLQLSKDTYDDDLDNLLAQIGDQYADLFLAAKNLSDAILLSDILRVNTEITKAPLSASMIKRYDEHHQDLTLLKALVRQQLPEKYKEIFFDQSKNGYAGYIDGGASQEEFYKFIKPILEKMDGTEELLVKLNREDLLRKQRTFDNGSIPHQIHLGELHAILRRQEDFYPFLKDNREKIEKILTFRIPYYVGPLARGNSRFAWMTRKSEETITPWNFEEVVDKGASAQSFIERMTNFDKNLPNEKVLPKHSLLYEYFTVYNELTKVKYVTEGMRKPAFLSGEQKKAIVDLLFKTNRKVTVKQLKEDYFKKIECFDSVEISGVEDRFNASLGTYHDLLKIIKDKDFLDNEENEDILEDIVLTLTLFEDREMIEERLKTYAHLFDDKVMKQLKRRRYTGWGRLSRKLINGIRDKQSGKTILDFLKSDGFANRNFMQLIHDDSLTFKEDIQKAQVSGQGDSLHEHIANLAGSPAIKKGILQTVKVVDELVKVMGRHKPENIVIEMARENQTTQKGQKNSRERMKRIEEGIKELGSQILKEHPVENTQLQNEKLYLYYLQNGRDMYVDQELDINRLSDYDVDHIVPQSFLKDDSIDNKVLTRSDKARGKSDNVPSEEVVKKMKNYWRQLLNAKLITQRKFDNLTKAERGGLSELDKAGFIKRQLVETRQITKHVAQILDSRMNTKYDENDKLIREVKVITLKSKLVSDFRKDFQFYKVREINNYHHAHDAYLNAVVGTALIKKYPKLESEFVYGDYKVYDVRKMIAKSEQEIGKATAKYFFYSNIMNFFKTEITLANGEIRKRPLIETNGETGEIVWDKGRDFATVRKVLSMPQVNIVKKTEVQTGGFSKESILPKRNSDKLIARKKDWDPKKYGGFDSPTVAYSVLVVAKVEKGKSKKLKSVKELLGITIMERSSFEKNPIDFLEAKGYKEVKKDLIIKLPKYSLFELENGRKRMLASAGELQKGNELALPSKYVNFLYLASHYEKLKGSPEDNEQKQLFVEQHKHYLDEIIEQISEFSKRVILADANLDKVLSAYNKHRDKPIREQAENIIHLFTLTNLGAPAAFKYFDTTIDRKRYTSTKEVLDATLIHQSITGLYETRIDLSQLGGDKRTADGSEFESPKKKAKVE

SEQ ID NO: 16110 - protein, 2629 aa, synthetic construct
MPAAKRVKLDGGTLNIEDEHRLHETSKEPDVSLGSTWLSDFPQAWAETGGMGLAVRQAPLIIPLKATSTPVSIKQYPMSQEARLGIKPHIQRLLDQGILVPCQSPWNTPLLPVKKPGTNDYRPVQDLREVNKRVEDIHPTVPNPYNLLSGLPPSHQWYTVLDLKDAFFCLRLHPTSQPLFAFEWRDPEMGISGQLTWTRLPQGFKNSPTLFNEALHRDLADFRIQHPDLILLQYVDDLLLAATSELDCQQGTRALLQTLGNLGYRASAKKAQICQKQVKYLGYLLKEGQRWLTEARKETVMGQPTPKTPRQLREFLGKAGFCRLFIPGFAEMAAPLYPLTKPGTLFNWGPDQQKAYQEIKQALLTAPALGLPDLTKPFELFVDEKQGYAKGVLTQKLGPWRRPVAYLSKKLDPVAAGWPPCLRMVAAIAVLTKDAGKLTMGQPLVILAPHAVEALVKQPPDRWLSNARMTHYQALLLDTDRVQFGPVVALNPATLLPLPEEGLQHNCLDILAEAHGTRPDLTDQPLPDADHTWYTDGSSLLQEGQRKAGAAVTTETEVIWAKALPAGTSAQRAELIALTQALKMAEGKKLNVYTDSRYAFATAHIHGEIYRRRGWLTSEGKEIKNKDEILALLKALFLPKRLSIIHCPGHQKGHSAEARGNRMADQAARKAAITETPDTSTLLAEAAAKEAAAKEAAAKEAAAKALEAEAAAKEAAAKEAAAKEAAAKAMASNFTQFVLVDNGGTGDVTVAPSNFANGIAEWISSNSRSQAYKVTCSVRQSSAQNRKYTIKVEVPKGAWRSYLNMELTIPIFATNSDCELIVKAMQGLLKDGNPIPSAIAANSGIYGGSGGSMASNFTQFVLVDNGGTGDVTVAPSNFANGIAEWISSNSRSQAYKVTCSVRQSSAQNRKYTIKVEVPKGAWRSYLNMELTIPIFATNSDCELIVKAMQGLLKDGNPIPSAIAANSGIYGGGSGGGSGGGSGGGSMASNFTQFVLVDNGGTGDVTVAPSNFANGIAEWISSNSRSQAYKVTCSVRQSSAQNRKYTIKVEVPKGAWRSYLNMELTIPIFATNSDCELIVKAMQGLLKDGNPIPSAIAANSGIYGGSGGSMASNFTQFVLVDNGGTGDVTVAPSNFANGIAEWISSNSRSQAYKVTCSVRQSSAQNRKYTIKVEVPKGAWRSYLNMELTIPIFATNSDCELIVKAMQGLLKDGNPIPSAIAANSGIYGSSGSSGSSGSSGSSGSSDKKYSIGLDIGTNSVGWAVITDEYKVPSKKFKVLGNTDRHSIKKNLIGALLFDSGETAEATRLKRTARRRYTRRKNRICYLQEIFSNEMAKVDDSFFHRLEESFLVEEDKKHERHPIFGNIVDEVAYHEKYPTIYHLRKKLVDSTDKADLRLIYLALAHMIKFRGHFLIEGDLNPDNSDVDKLFIQLVQTYNQLFEENPINASGVDAKAILSARLSKSRRLENLIAQLPGEKKNGLFGNLIALSLGLTPNFKSNFDLAEDAKLQLSKDTYDDDLDNLLAQIGDQYADLFLAAKNLSDAILLSDILRVNTEITKAPLSASMIKRYDEHHQDLTLLKALVRQQLPEKYKEIFFDQSKNGYAGYIDGGASQEEFYKFIKPILEKMDGTEELLVKLNREDLLRKQRTFDNGSIPHQIHLGELHAILRRQEDFYPFLKDNREKIEKILTFRIPYYVGPLARGNSRFAWMTRKSEETITPWNFEEVVDKGASAQSFIERMTNFDKNLPNEKVLPKHSLLYEYFTVYNELTKVKYVTEGMRKPAFLSGEQKKAIVDLLFKTNRKVTVKQLKEDYFKKIECFDSVEISGVEDRFNASLGTYHDLLKIIKDKDFLDNEENEDILEDIVLTLTLFEDREMIEERLKTYAHLFDDKVMKQLKRRRYTGWGRLSRKLINGIRDKQSGKTILDFLKSDGFANRNFMQLIHDDSLTFKEDIQKAQVSGQGDSLHEHIANLAGSPAIKKGILQTVKVVDELVKVMGRHKPENIVIEMARENQTTQKGQKNSRERMKRIEEGIKELGSQILKEHPVENTQLQNEKLYLYYLQNGRDMYVDQELDINRLSDYDVDHIVPQSFLKDDSIDNKVLTRSDKARGKSDNVPSEEVVKKMKNYWRQLLNAKLITQRKFDNLTKAERGGLSELDKAGFIKRQLVETRQITKHVAQILDSRMNTKYDENDKLIREVKVITLKSKLVSDFRKDFQFYKVREINNYHHAHDAYLNAVVGTALIKKYPKLESEFVYGDYKVYDVRKMIAKSEQEIGKATAKYFFYSNIMNFFKTEITLANGEIRKRPLIETNGETGEIVWDKGRDFATVRKVLSMPQVNIVKKTEVQTGGFSKESILPKRNSDKLIARKKDWDPKKYGGFDSPTVAYSVLVVAKVEKGKSKKLKSVKELLGITIMERSSFEKNPIDFLEAKGYKEVKKDLIIKLPKYSLFELENGRKRMLASAGELQKGNELALPSKYVNFLYLASHYEKLKGSPEDNEQKQLFVEQHKHYLDEIIEQISEFSKRVILADANLDKVLSAYNKHRDKPIREQAENIIHLFTLTNLGAPAAFKYFDTTIDRKRYTSTKEVLDATLIHQSITGLYETRIDLSQLGGDKRTADGSEFESPKKKAKVE

SEQ ID NO: 16111 - protein, 2622 aa, synthetic construct
MPAAKRVKLDGGTLNIEDEHRLHETSKEPDVSLGSTWLSDFPQAWAETGGMGLAVRQAPLIIPLKATSTPVSIKQYPMSQEARLGIKPHIQRLLDQGILVPCQSPWNTPLLPVKKPGTNDYRPVQDLREVNKRVEDIHPTVPNPYNLLSGLPPSHQWYTVLDLKDAFFCLRLHPTSQPLFAFEWRDPEMGISGQLTWTRLPQGFKNSPTLFNEALHRDLADFRIQHPDLILLQYVDDLLLAATSELDCQQGTRALLQTLGNLGYRASAKKAQICQKQVKYLGYLLKEGQRWLTEARKETVMGQPTPKTPRQLREFLGKAGFCRLFIPGFAEMAAPLYPLTKPGTLFNWGPDQQKAYQEIKQALLTAPALGLPDLTKPFELFVDEKQGYAKGVLTQKLGPWRRPVAYLSKKLDPVAAGWPPCLRMVAAIAVLTKDAGKLTMGQPLVILAPHAVEALVKQPPDRWLSNARMTHYQALLLDTDRVQFGPVVALNPATLLPLPEEGLQHNCLDILAEAHGTRPDLTDQPLPDADHTWYTDGSSLLQEGQRKAGAAVTTETEVIWAKALPAGTSAQRAELIALTQALKMAEGKKLNVYTDSRYAFATAHIHGEIYRRRGWLTSEGKEIKNKDEILALLKALFLPKRLSIIHCPGHQKGHSAEARGNRMADQAARKAAITETPDTSTLLAEAAAKEAAAKEAAAKEAAAKALEAEAAAKEAAAKEAAAKEAAAKAMASNFTQFVLVDNGGTGDVTVAPSNFANGIAEWISSNSRSQAYKVTCSVRQSSAQNRKYTIKVEVPKGAWRSYLNMELTIPIFATNSDCELIVKAMQGLLKDGNPIPSAIAANSGIYGGSGGSMASNFTQFVLVDNGGTGDVTVAPSNFANGIAEWISSNSRSQAYKVTCSVRQSSAQNRKYTIKVEVPKGAWRSYLNMELTIPIFATNSDCELIVKAMQGLLKDGNPIPSAIAANSGIYGGGSGGGSGGGSGGGSMASNFTQFVLVDNGGTGDVTVAPSNFANGIAEWISSNSRSQAYKVTCSVRQSSAQNRKYTIKVEVPKGAWRSYLNMELTIPIFATNSDCELIVKAMQGLLKDGNPIPSAIAANSGIYGGSGGSMASNFTQFVLVDNGGTGDVTVAPSNFANGIAEWISSNSRSQAYKVTCSVRQSSAQNRKYTIKVEVPKGAWRSYLNMELTIPIFATNSDCELIVKAMQGLLKDGNPIPSAIAANSGIYGSSGGGEAAAKDKKYSIGLDIGTNSVGWAVITDEYKVPSKKFKVLGNTDRHSIKKNLIGALLFDSGETAEATRLKRTARRRYTRRKNRICYLQEIFSNEMAKVDDSFFHRLEESFLVEEDKKHERHPIFGNIVDEVAYHEKYPTIYHLRKKLVDSTDKADLRLIYLALAHMIKFRGHFLIEGDLNPDNSDVDKLFIQLVQTYNQLFEENPINASGVDAKAILSARLSKSRRLENLIAQLPGEKKNGLFGNLIALSLGLTPNFKSNFDLAEDAKLQLSKDTYDDDLDNLLAQIGDQYADLFLAAKNLSDAILLSDILRVNTEITKAPLSASMIKRYDEHHQDLTLLKALVRQQLPEKYKEIFFDQSKNGYAGYIDGGASQEEFYKFIKPILEKMDGTEELLVKLNREDLLRKQRTFDNGSIPHQIHLGELHAILRRQEDFYPFLKDNREKIEKILTFRIPYYVGPLARGNSRFAWMTRKSEETITPWNFEEVVDKGASAQSFIERMTNFDKNLPNEKVLPKHSLLYEYFTVYNELTKVKYVTEGMRKPAFLSGEQKKAIVDLLFKTNRKVTVKQLKEDYFKKIECFDSVEISGVEDRFNASLGTYHDLLKIIKDKDFLDNEENEDILEDIVLTLTLFEDREMIEERLKTYAHLFDDKVMKQLKRRRYTGWGRLSRKLINGIRDKQSGKTILDFLKSDGFANRNFMQLIHDDSLTFKEDIQKAQVSGQGDSLHEHIANLAGSPAIKKGILQTVKVVDELVKVMGRHKPENIVIEMARENQTTQKGQKNSRERMKRIEEGIKELGSQILKEHPVENTQLQNEKLYLYYLQNGRDMYVDQELDINRLSDYDVDHIVPQSFLKDDSIDNKVLTRSDKARGKSDNVPSEEVVKKMKNYWRQLLNAKLITQRKFDNLTKAERGGLSELDKAGFIKRQLVETRQITKHVAQILDSRMNTKYDENDKLIREVKVITLKSKLVSDFRKDFQFYKVREINNYHHAHDAYLNAVVGTALIKKYPKLESEFVYGDYKVYDVRKMIAKSEQEIGKATAKYFFYSNIMNFFKTEITLANGEIRKRPLIETNGETGEIVWDKGRDFATVRKVLSMPQVNIVKKTEVQTGGFSKESILPKRNSDKLIARKKDWDPKKYGGFDSPTVAYSVLVVAKVEKGKSKKLKSVKELLGITIMERSSFEKNPIDFLEAKGYKEVKKDLIIKLPKYSLFELENGRKRMLASAGELQKGNELALPSKYVNFLYLASHYEKLKGSPEDNEQKQLFVEQHKHYLDEIIEQISEFSKRVILADANLDKVLSAYNKHRDKPIREQAENIIHLFTLTNLGAPAAFKYFDTTIDRKRYTSTKEVLDATLIHQSITGLYETRIDLSQLGGDKRTADGSEFESPKKKAKVE

SEQ ID NO: 16112 - protein, 2265 aa, synthetic construct
MPAAKRVKLDGGTLNIEDEHRLHETSKEPDVSLGSTWLSDFPQAWAETGGMGLAVRQAPLIIPLKATSTPVSIKQYPMSQEARLGIKPHIQRLLDQGILVPCQSPWNTPLLPVKKPGTNDYRPVQDLREVNKRVEDIHPTVPNPYNLLSGLPPSHQWYTVLDLKDAFFCLRLHPTSQPLFAFEWRDPEMGISGQLTWTRLPQGFKNSPTLFNEALHRDLADFRIQHPDLILLQYVDDLLLAATSELDCQQGTRALLQTLGNLGYRASAKKAQICQKQVKYLGYLLKEGQRWLTEARKETVMGQPTPKTPRQLREFLGKAGFCRLFIPGFAEMAAPLYPLTKPGTLFNWGPDQQKAYQEIKQALLTAPALGLPDLTKPFELFVDEKQGYAKGVLTQKLGPWRRPVAYLSKKLDPVAAGWPPCLRMVAAIAVLTKDAGKLTMGQPLVILAPHAVEALVKQPPDRWLSNARMTHYQALLLDTDRVQFGPVVALNPATLLPLPEEGLQHNCLDILAEAHGTRPDLTDQPLPDADHTWYTDGSSLLQEGQRKAGAAVTTETEVIWAKALPAGTSAQRAELIALTQALKMAEGKKLNVYTDSRYAFATAHIHGEIYRRRGWLTSEGKEIKNKDEILALLKALFLPKRLSIIHCPGHQKGHSAEARGNRMADQAARKAAITETPDTSTLLSGGSSGGSSGSETPGTSESATPESSGGSSGGSSMASNFTQFVLVDNGGTGDVTVAPSNFANGIAEWISSNSRSQAYKVTCSVRQSSAQNRKYTIKVEVPKGAWRSYLNMELTIPIFATNSDCELIVKAMQGLLKDGNPIPSAIAANSGIYAEAAAKEAAAKEAAAKEAAAKALEAEAAAKEAAAKEAAAKEAAAKADKKYSIGLDIGTNSVGWAVITDEYKVPSKKFKVLGNTDRHSIKKNLIGALLFDSGETAEATRLKRTARRRYTRRKNRICYLQEIFSNEMAKVDDSFFHRLEESFLVEEDKKHERHPIFGNIVDEVAYHEKYPTIYHLRKKLVDSTDKADLRLIYLALAHMIKFRGHFLIEGDLNPDNSDVDKLFIQLVQTYNQLFEENPINASGVDAKAILSARLSKSRRLENLIAQLPGEKKNGLFGNLIALSLGLTPNFKSNFDLAEDAKLQLSKDTYDDDLDNLLAQIGDQYADLFLAAKNLSDAILLSDILRVNTEITKAPLSASMIKRYDEHHQDLTLLKALVRQQLPEKYKEIFFDQSKNGYAGYIDGGASQEEFYKFIKPILEKMDGTEELLVKLNREDLLRKQRTFDNGSIPHQIHLGELHAILRRQEDFYPFLKDNREKIEKILTFRIPYYVGPLARGNSRFAWMTRKSEETITPWNFEEVVDKGASAQSFIERMTNFDKNLPNEKVLPKHSLLYEYFTVYNELTKVKYVTEGMRKPAFLSGEQKKAIVDLLFKTNRKVTVKQLKEDYFKKIECFDSVEISGVEDRFNASLGTYHDLLKIIKDKDFLDNEENEDILEDIVLTLTLFEDREMIEERLKTYAHLFDDKVMKQLKRRRYTGWGRLSRKLINGIRDKQSGKTILDFLKSDGFANRNFMQLIHDDSLTFKEDIQKAQVSGQGDSLHEHIANLAGSPAIKKGILQTVKVVDELVKVMGRHKPENIVIEMARENQTTQKGQKNSRERMKRIEEGIKELGSQILKEHPVENTQLQNEKLYLYYLQNGRDMYVDQELDINRLSDYDVDHIVPQSFLKDDSIDNKVLTRSDKARGKSDNVPSEEVVKKMKNYWRQLLNAKLITQRKFDNLTKAERGGLSELDKAGFIKRQLVETRQITKHVAQILDSRMNTKYDENDKLIREVKVITLKSKLVSDFRKDFQFYKVREINNYHHAHDAYLNAVVGTALIKKYPKLESEFVYGDYKVYDVRKMIAKSEQEIGKATAKYFFYSNIMNFFKTEITLANGEIRKRPLIETNGETGEIVWDKGRDFATVRKVLSMPQVNIVKKTEVQTGGFSKESILPKRNSDKLIARKKDWDPKKYGGFDSPTVAYSVLVVAKVEKGKSKKLKSVKELLGITIMERSSFEKNPIDFLEAKGYKEVKKDLIIKLPKYSLFELENGRKRMLASAGELQKGNELALPSKYVNFLYLASHYEKLKGSPEDNEQKQLFVEQHKHYLDEIIEQISEFSKRVILADANLDKVLSAYNKHRDKPIREQAENIIHLFTLTNLGAPAAFKYFDTTIDRKRYTSTKEVLDATLIHQSITGLYETRIDLSQLGGDKRTADGSEFESPKKKAKVE

SEQ ID NO: 16113 - protein, 2252 aa, synthetic construct
MPAAKRVKLDGGTLNIEDEHRLHETSKEPDVSLGSTWLSDFPQAWAETGGMGLAVRQAPLIIPLKATSTPVSIKQYPMSQEARLGIKPHIQRLLDQGILVPCQSPWNTPLLPVKKPGTNDYRPVQDLREVNKRVEDIHPTVPNPYNLLSGLPPSHQWYTVLDLKDAFFCLRLHPTSQPLFAFEWRDPEMGISGQLTWTRLPQGFKNSPTLFNEALHRDLADFRIQHPDLILLQYVDDLLLAATSELDCQQGTRALLQTLGNLGYRASAKKAQICQKQVKYLGYLLKEGQRWLTEARKETVMGQPTPKTPRQLREFLGKAGFCRLFIPGFAEMAAPLYPLTKPGTLFNWGPDQQKAYQEIKQALLTAPALGLPDLTKPFELFVDEKQGYAKGVLTQKLGPWRRPVAYLSKKLDPVAAGWPPCLRMVAAIAVLTKDAGKLTMGQPLVILAPHAVEALVKQPPDRWLSNARMTHYQALLLDTDRVQFGPVVALNPATLLPLPEEGLQHNCLDILAEAHGTRPDLTDQPLPDADHTWYTDGSSLLQEGQRKAGAAVTTETEVIWAKALPAGTSAQRAELIALTQALKMAEGKKLNVYTDSRYAFATAHIHGEIYRRRGWLTSEGKEIKNKDEILALLKALFLPKRLSIIHCPGHQKGHSAEARGNRMADQAARKAAITETPDTSTLLSGGSSGGSSGSETPGTSESATPESSGGSSGGSSMASNFTQFVLVDNGGTGDVTVAPSNFANGIAEWISSNSRSQAYKVTCSVRQSSAQNRKYTIKVEVPKGAWRSYLNMELTIPIFATNSDCELIVKAMQGLLKDGNPIPSAIAANSGIYSGGSSGGSSGSETPGTSESATPESSGGSSGGSSDKKYSIGLDIGTNSVGWAVITDEYKVPSKKFKVLGNTDRHSIKKNLIGALLFDSGETAEATRLKRTARRRYTRRKNRICYLQEIFSNEMAKVDDSFFHRLEESFLVEEDKKHERHPIFGNIVDEVAYHEKYPTIYHLRKKLVDSTDKADLRLIYLALAHMIKFRGHFLIEGDLNPDNSDVDKLFIQLVQTYNQLFEENPINASGVDAKAILSARLSKSRRLENLIAQLPGEKKNGLFGNLIALSLGLTPNFKSNFDLAEDAKLQLSKDTYDDDLDNLLAQIGDQYADLFLAAKNLSDAILLSDILRVNTEITKAPLSASMIKRYDEHHQDLTLLKALVRQQLPEKYKEIFFDQSKNGYAGYIDGGASQEEFYKFIKPILEKMDGTEELLVKLNREDLLRKQRTFDNGSIPHQIHLGELHAILRRQEDFYPFLKDNREKIEKILTFRIPYYVGPLARGNSRFAWMTRKSEETITPWNFEEVVDKGASAQSFIERMTNFDKNLPNEKVLPKHSLLYEYFTVYNELTKVKYVTEGMRKPAFLSGEQKKAIVDLLFKTNRKVTVKQLKEDYFKKIECFDSVEISGVEDRFNASLGTYHDLLKIIKDKDFLDNEENEDILEDIVLTLTLFEDREMIEERLKTYAHLFDDKVMKQLKRRRYTGWGRLSRKLINGIRDKQSGKTILDFLKSDGFANRNFMQLIHDDSLTFKEDIQKAQVSGQGDSLHEHIANLAGSPAIKKGILQTVKVVDELVKVMGRHKPENIVIEMARENQTTQKGQKNSRERMKRIEEGIKELGSQILKEHPVENTQLQNEKLYLYYLQNGRDMYVDQELDINRLSDYDVDHIVPQSFLKDDSIDNKVLTRSDKARGKSDNVPSEEVVKKMKNYWRQLLNAKLITQRKFDNLTKAERGGLSELDKAGFIKRQLVETRQITKHVAQILDSRMNTKYDENDKLIREVKVITLKSKLVSDFRKDFQFYKVREINNYHHAHDAYLNAVVGTALIKKYPKLESEFVYGDYKVYDVRKMIAKSEQEIGKATAKYFFYSNIMNFFKTEITLANGEIRKRPLIETNGETGEIVWDKGRDFATVRKVLSMPQVNIVKKTEVQTGGFSKESILPKRNSDKLIARKKDWDPKKYGGFDSPTVAYSVLVVAKVEKGKSKKLKSVKELLGITIMERSSFEKNPIDFLEAKGYKEVKKDLIIKLPKYSLFELENGRKRMLASAGELQKGNELALPSKYVNFLYLASHYEKLKGSPEDNEQKQLFVEQHKHYLDEIIEQISEFSKRVILADANLDKVLSAYNKHRDKPIREQAENIIHLFTLTNLGAPAAFKYFDTTIDRKRYTSTKEVLDATLIHQSITGLYETRIDLSQLGGDKRTADGSEFESPKKKAKVE

SEQ ID NO: 16114 - protein, 2237 aa, synthetic construct
MPAAKRVKLDGGTLNIEDEHRLHETSKEPDVSLGSTWLSDFPQAWAETGGMGLAVRQAPLIIPLKATSTPVSIKQYPMSQEARLGIKPHIQRLLDQGILVPCQSPWNTPLLPVKKPGTNDYRPVQDLREVNKRVEDIHPTVPNPYNLLSGLPPSHQWYTVLDLKDAFFCLRLHPTSQPLFAFEWRDPEMGISGQLTWTRLPQGFKNSPTLFNEALHRDLADFRIQHPDLILLQYVDDLLLAATSELDCQQGTRALLQTLGNLGYRASAKKAQICQKQVKYLGYLLKEGQRWLTEARKETVMGQPTPKTPRQLREFLGKAGFCRLFIPGFAEMAAPLYPLTKPGTLFNWGPDQQKAYQEIKQALLTAPALGLPDLTKPFELFVDEKQGYAKGVLTQKLGPWRRPVAYLSKKLDPVAAGWPPCLRMVAAIAVLTKDAGKLTMGQPLVILAPHAVEALVKQPPDRWLSNARMTHYQALLLDTDRVQFGPVVALNPATLLPLPEEGLQHNCLDILAEAHGTRPDLTDQPLPDADHTWYTDGSSLLQEGQRKAGAAVTTETEVIWAKALPAGTSAQRAELIALTQALKMAEGKKLNVYTDSRYAFATAHIHGEIYRRRGWLTSEGKEIKNKDEILALLKALFLPKRLSIIHCPGHQKGHSAEARGNRMADQAARKAAITETPDTSTLLSGGSSGGSSGSETPGTSESATPESSGGSSGGSSMASNFTQFVLVDNGGTGDVTVAPSNFANGIAEWISSNSRSQAYKVTCSVRQSSAQNRKYTIKVEVPKGAWRSYLNMELTIPIFATNSDCELIVKAMQGLLKDGNPIPSAIAANSGIYGSSGSSGSSGSSGSSGSSDKKYSIGLDIGTNSVGWAVITDEYKVPSKKFKVLGNTDRHSIKKNLIGALLFDSGETAEATRLKRTARRRYTRRKNRICYLQEIFSNEMAKVDDSFFHRLEESFLVEEDKKHERHPIFGNIVDEVAYHEKYPTIYHLRKKLVDSTDKADLRLIYLALAHMIKFRGHFLIEGDLNPDNSDVDKLFIQLVQTYNQLFEENPINASGVDAKAILSARLSKSRRLENLIAQLPGEKKNGLFGNLIALSLGLTPNFKSNFDLAEDAKLQLSKDTYDDDLDNLLAQIGDQYADLFLAAKNLSDAILLSDILRVNTEITKAPLSASMIKRYDEHHQDLTLLKALVRQQLPEKYKEIFFDQSKNGYAGYIDGGASQEEFYKFIKPILEKMDGTEELLVKLNREDLLRKQRTFDNGSIPHQIHLGELHAILRRQEDFYPFLKDNREKIEKILTFRIPYYVGPLARGNSRFAWMTRKSEETITPWNFEEVVDKGASAQSFIERMTNFDKNLPNEKVLPKHSLLYEYFTVYNELTKVKYVTEGMRKPAFLSGEQKKAIVDLLFKTNRKVTVKQLKEDYFKKIECFDSVEISGVEDRFNASLGTYHDLLKIIKDKDFLDNEENEDILEDIVLTLTLFEDREMIEERLKTYAHLFDDKVMKQLKRRRYTGWGRLSRKLINGIRDKQSGKTILDFLKSDGFANRNFMQLIHDDSLTFKEDIQKAQVSGQGDSLHEHIANLAGSPAIKKGILQTVKVVDELVKVMGRHKPENIVIEMARENQTTQKGQKNSRERMKRIEEGIKELGSQILKEHPVENTQLQNEKLYLYYLQNGRDMYVDQELDINRLSDYDVDHIVPQSFLKDDSIDNKVLTRSDKARGKSDNVPSEEVVKKMKNYWRQLLNAKLITQRKFDNLTKAERGGLSELDKAGFIKRQLVETRQITKHVAQILDSRMNTKYDENDKLIREVKVITLKSKLVSDFRKDFQFYKVREINNYHHAHDAYLNAVVGTALIKKYPKLESEFVYGDYKVYDVRKMIAKSEQEIGKATAKYFFYSNIMNFFKTEITLANGEIRKRPLIETNGETGEIVWDKGRDFATVRKVLSMPQVNIVKKTEVQTGGFSKESILPKRNSDKLIARKKDWDPKKYGGFDSPTVAYSVLVVAKVEKGKSKKLKSVKELLGITIMERSSFEKNPIDFLEAKGYKEVKKDLIIKLPKYSLFELENGRKRMLASAGELQKGNELALPSKYVNFLYLASHYEKLKGSPEDNEQKQLFVEQHKHYLDEIIEQISEFSKRVILADANLDKVLSAYNKHRDKPIREQAENIIHLFTLTNLGAPAAFKYFDTTIDRKRYTSTKEVLDATLIHQSITGLYETRIDLSQLGGDKRTADGSEFESPKKKAKVE

SEQ ID NO: 16115 - protein, 2230 aa, synthetic construct
MPAAKRVKLDGGTLNIEDEHRLHETSKEPDVSLGSTWLSDFPQAWAETGGMGLAVRQAPLIIPLKATSTPVSIKQYPMSQEARLGIKPHIQRLLDQGILVPCQSPWNTPLLPVKKPGTNDYRPVQDLREVNKRVEDIHPTVPNPYNLLSGLPPSHQWYTVLDLKDAFFCLRLHPTSQPLFAFEWRDPEMGISGQLTWTRLPQGFKNSPTLFNEALHRDLADFRIQHPDLILLQYVDDLLLAATSELDCQQGTRALLQTLGNLGYRASAKKAQICQKQVKYLGYLLKEGQRWLTEARKETVMGQPTPKTPRQLREFLGKAGFCRLFIPGFAEMAAPLYPLTKPGTLFNWGPDQQKAYQEIKQALLTAPALGLPDLTKPFELFVDEKQGYAKGVLTQKLGPWRRPVAYLSKKLDPVAAGWPPCLRMVAAIAVLTKDAGKLTMGQPLVILAPHAVEALVKQPPDRWLSNARMTHYQALLLDTDRVQFGPVVALNPATLLPLPEEGLQHNCLDILAEAHGTRPDLTDQPLPDADHTWYTDGSSLLQEGQRKAGAAVTTETEVIWAKALPAGTSAQRAELIALTQALKMAEGKKLNVYTDSRYAFATAHIHGEIYRRRGWLTSEGKEIKNKDEILALLKALFLPKRLSIIHCPGHQKGHSAEARGNRMADQAARKAAITETPDTSTLLSGGSSGGSSGSETPGTSESATPESSGGSSGGSSMASNFTQFVLVDNGGTGDVTVAPSNFANGIAEWISSNSRSQAYKVTCSVRQSSAQNRKYTIKVEVPKGAWRSYLNMELTIPIFATNSDCELIVKAMQGLLKDGNPIPSAIAANSGIYGSSGGGEAAAKDKKYSIGLDIGTNSVGWAVITDEYKVPSKKFKVLGNTDRHSIKKNLIGALLFDSGETAEATRLKRTARRRYTRRKNRICYLQEIFSNEMAKVDDSFFHRLEESFLVEEDKKHERHPIFGNIVDEVAYHEKYPTIYHLRKKLVDSTDKADLRLIYLALAHMIKFRGHFLIEGDLNPDNSDVDKLFIQLVQTYNQLFEENPINASGVDAKAILSARLSKSRRLENLIAQLPGEKKNGLFGNLIALSLGLTPNFKSNFDLAEDAKLQLSKDTYDDDLDNLLAQIGDQYADLFLAAKNLSDAILLSDILRVNTEITKAPLSASMIKRYDEHHQDLTLLKALVRQQLPEKYKEIFFDQSKNGYAGYIDGGASQEEFYKFIKPILEKMDGTEELLVKLNREDLLRKQRTFDNGSIPHQIHLGELHAILRRQEDFYPFLKDNREKIEKILTFRIPYYVGPLARGNSRFAWMTRKSEETITPWNFEEVVDKGASAQSFIERMTNFDKNLPNEKVLPKHSLLYEYFTVYNELTKVKYVTEGMRKPAFLSGEQKKAIVDLLFKTNRKVTVKQLKEDYFKKIECFDSVEISGVEDRFNASLGTYHDLLKIIKDKDFLDNEENEDILEDIVLTLTLFEDREMIEERLKTYAHLFDDKVMKQLKRRRYTGWGRLSRKLINGIRDKQSGKTILDFLKSDGFANRNFMQLIHDDSLTFKEDIQKAQVSGQGDSLHEHIANLAGSPAIKKGILQTVKVVDELVKVMGRHKPENIVIEMARENQTTQKGQKNSRERMKRIEEGIKELGSQILKEHPVENTQLQNEKLYLYYLQNGRDMYVDQELDINRLSDYDVDHIVPQSFLKDDSIDNKVLTRSDKARGKSDNVPSEEVVKKMKNYWRQLLNAKLITQRKFDNLTKAERGGLSELDKAGFIKRQLVETRQITKHVAQILDSRMNTKYDENDKLIREVKVITLKSKLVSDFRKDFQFYKVREINNYHHAHDAYLNAVVGTALIKKYPKLESEFVYGDYKVYDVRKMIAKSEQEIGKATAKYFFYSNIMNFFKTEITLANGEIRKRPLIETNGETGEIVWDKGRDFATVRKVLSMPQVNIVKKTEVQTGGFSKESILPKRNSDKLIARKKDWDPKKYGGFDSPTVAYSVLVVAKVEKGKSKKLKSVKELLGITIMERSSFEKNPIDFLEAKGYKEVKKDLIIKLPKYSLFELENGRKRMLASAGELQKGNELALPSKYVNFLYLASHYEKLKGSPEDNEQKQLFVEQHKHYLDEIIEQISEFSKRVILADANLDKVLSAYNKHRDKPIREQAENIIHLFTLTNLGAPAAFKYFDTTIDRKRYTSTKEVLDATLIHQSITGLYETRIDLSQLGGDKRTADGSEFESPKKKAKVE

SEQ ID NO: 16116 - protein, 2388 aa, synthetic construct
MPAAKRVKLDGGTLNIEDEHRLHETSKEPDVSLGSTWLSDFPQAWAETGGMGLAVRQAPLIIPLKATSTPVSIKQYPMSQEARLGIKPHIQRLLDQGILVPCQSPWNTPLLPVKKPGTNDYRPVQDLREVNKRVEDIHPTVPNPYNLLSGLPPSHQWYTVLDLKDAFFCLRLHPTSQPLFAFEWRDPEMGISGQLTWTRLPQGFKNSPTLFNEALHRDLADFRIQHPDLILLQYVDDLLLAATSELDCQQGTRALLQTLGNLGYRASAKKAQICQKQVKYLGYLLKEGQRWLTEARKETVMGQPTPKTPRQLREFLGKAGFCRLFIPGFAEMAAPLYPLTKPGTLFNWGPDQQKAYQEIKQALLTAPALGLPDLTKPFELFVDEKQGYAKGVLTQKLGPWRRPVAYLSKKLDPVAAGWPPCLRMVAAIAVLTKDAGKLTMGQPLVILAPHAVEALVKQPPDRWLSNARMTHYQALLLDTDRVQFGPVVALNPATLLPLPEEGLQHNCLDILAEAHGTRPDLTDQPLPDADHTWYTDGSSLLQEGQRKAGAAVTTETEVIWAKALPAGTSAQRAELIALTQALKMAEGKKLNVYTDSRYAFATAHIHGEIYRRRGWLTSEGKEIKNKDEILALLKALFLPKRLSIIHCPGHQKGHSAEARGNRMADQAARKAAITETPDTSTLLSGGSSGGSSGSETPGTSESATPESSGGSSGGSSMASNFTQFVLVDNGGTGDVTVAPSNFANGIAEWISSNSRSQAYKVTCSVRQSSAQNRKYTIKVEVPKGAWRSYLNMELTIPIFATNSDCELIVKAMQGLLKDGNPIPSAIAANSGIYGGSGGSMASNFTQFVLVDNGGTGDVTVAPSNFANGIAEWISSNSRSQAYKVTCSVRQSSAQNRKYTIKVEVPKGAWRSYLNMELTIPIFATNSDCELIVKAMQGLLKDGNPIPSAIAANSGIYAEAAAKEAAAKEAAAKEAAAKALEAEAAAKEAAAKEAAAKEAAAKADKKYSIGLDIGTNSVGWAVITDEYKVPSKKFKVLGNTDRHSIKKNLIGALLFDSGETAEATRLKRTARRRYTRRKNRICYLQEIFSNEMAKVDDSFFHRLEESFLVEEDKKHERHPIFGNIVDEVAYHEKYPTIYHLRKKLVDSTDKADLRLIYLALAHMIKFRGHFLIEGDLNPDNSDVDKLFIQLVQTYNQLFEENPINASGVDAKAILSARLSKSRRLENLIAQLPGEKKNGLFGNLIALSLGLTPNFKSNFDLAEDAKLQLSKDTYDDDLDNLLAQIGDQYADLFLAAKNLSDAILLSDILRVNTEITKAPLSASMIKRYDEHHQDLTLLKALVRQQLPEKYKEIFFDQSKNGYAGYIDGGASQEEFYKFIKPILEKMDGTEELLVKLNREDLLRKQRTFDNGSIPHQIHLGELHAILRRQEDFYPFLKDNREKIEKILTFRIPYYVGPLARGNSRFAWMTRKSEETITPWNFEEVVDKGASAQSFIERMTNFDKNLPNEKVLPKHSLLYEYFTVYNELTKVKYVTEGMRKPAFLSGEQKKAIVDLLFKTNRKVTVKQLKEDYFKKIECFDSVEISGVEDRFNASLGTYHDLLKIIKDKDFLDNEENEDILEDIVLTLTLFEDREMIEERLKTYAHLFDDKVMKQLKRRRYTGWGRLSRKLINGIRDKQSGKTILDFLKSDGFANRNFMQLIHDDSLTFKEDIQKAQVSGQGDSLHEHIANLAGSPAIKKGILQTVKVVDELVKVMGRHKPENIVIEMARENQTTQKGQKNSRERMKRIEEGIKELGSQILKEHPVENTQLQNEKLYLYYLQNGRDMYVDQELDINRLSDYDVDHIVPQSFLKDDSIDNKVLTRSDKARGKSDNVPSEEVVKKMKNYWRQLLNAKLITQRKFDNLTKAERGGLSELDKAGFIKRQLVETRQITKHVAQILDSRMNTKYDENDKLIREVKVITLKSKLVSDFRKDFQFYKVREINNYHHAHDAYLNAVVGTALIKKYPKLESEFVYGDYKVYDVRKMIAKSEQEIGKATAKYFFYSNIMNFFKTEITLANGEIRKRPLIETNGETGEIVWDKGRDFATVRKVLSMPQVNIVKKTEVQTGGFSKESILPKRNSDKLIARKKDWDPKKYGGFDSPTVAYSVLVVAKVEKGKSKKLKSVKELLGITIMERSSFEKNPIDFLEAKGYKEVKKDLIIKLPKYSLFELENGRKRMLASAGELQKGNELALPSKYVNFLYLASHYEKLKGSPEDNEQKQLFVEQHKHYLDEIIEQISEFSKRVILADANLDKVLSAYNKHRDKPIREQAENIIHLFTLTNLGAPAAFKYFDTTIDRKRYTSTKEVLDATLIHQSITGLYETRIDLSQLGGDKRTADGSEFESPKKKAKVE

SEQ ID NO: 16117 - protein, 2375 aa, synthetic construct
MPAAKRVKLDGGTLNIEDEHRLHETSKEPDVSLGSTWLSDFPQAWAETGGMGLAVRQAPLIIPLKATSTPVSIKQYPMSQEARLGIKPHIQRLLDQGILVPCQSPWNTPLLPVKKPGTNDYRPVQDLREVNKRVEDIHPTVPNPYNLLSGLPPSHQWYTVLDLKDAFFCLRLHPTSQPLFAFEWRDPEMGISGQLTWTRLPQGFKNSPTLFNEALHRDLADFRIQHPDLILLQYVDDLLLAATSELDCQQGTRALLQTLGNLGYRASAKKAQICQKQVKYLGYLLKEGQRWLTEARKETVMGQPTPKTPRQLREFLGKAGFCRLFIPGFAEMAAPLYPLTKPGTLFNWGPDQQKAYQEIKQALLTAPALGLPDLTKPFELFVDEKQGYAKGVLTQKLGPWRRPVAYLSKKLDPVAAGWPPCLRMVAAIAVLTKDAGKLTMGQPLVILAPHAVEALVKQPPDRWLSNARMTHYQALLLDTDRVQFGPVVALNPATLLPLPEEGLQHNCLDILAEAHGTRPDLTDQPLPDADHTWYTDGSSLLQEGQRKAGAAVTTETEVIWAKALPAGTSAQRAELIALTQALKMAEGKKLNVYTDSRYAFATAHIHGEIYRRRGWLTSEGKEIKNKDEILALLKALFLPKRLSIIHCPGHQKGHSAEARGNRMADQAARKAAITETPDTSTLLSGGSSGGSSGSETPGTSESATPESSGGSSGGSSMASNFTQFVLVDNGGTGDVTVAPSNFANGIAEWISSNSRSQAYKVTCSVRQSSAQNRKYTIKVEVPKGAWRSYLNMELTIPIFATNSDCELIVKAMQGLLKDGNPIPSAIAANSGIYGGSGGSMASNFTQFVLVDNGGTGDVTVAPSNFANGIAEWISSNSRSQAYKVTCSVRQSSAQNRKYTIKVEVPKGAWRSYLNMELTIPIFATNSDCELIVKAMQGLLKDGNPIPSAIAANSGIYSGGSSGGSSGSETPGTSESATPESSGGSSGGSSDKKYSIGLDIGTNSVGWAVITDEYKVPSKKFKVLGNTDRHSIKKNLIGALLFDSGETAEATRLKRTARRRYTRRKNRICYLQEIFSNEMAKVDDSFFHRLEESFLVEEDKKHERHPIFGNIVDEVAYHEKYPTIYHLRKKLVDSTDKADLRLIYLALAHMIKFRGHFLIEGDLNPDNSDVDKLFIQLVQTYNQLFEENPINASGVDAKAILSARLSKSRRLENLIAQLPGEKKNGLFGNLIALSLGLTPNFKSNFDLAEDAKLQLSKDTYDDDLDNLLAQIGDQYADLFLAAKNLSDAILLSDILRVNTEITKAPLSASMIKRYDEHHQDLTLLKALVRQQLPEKYKEIFFDQSKNGYAGYIDGGASQEEFYKFIKPILEKMDGTEELLVKLNREDLLRKQRTFDNGSIPHQIHLGELHAILRRQEDFYPFLKDNREKIEKILTFRIPYYVGPLARGNSRFAWMTRKSEETITPWNFEEVVDKGASAQSFIERMTNFDKNLPNEKVLPKHSLLYEYFTVYNELTKVKYVTEGMRKPAFLSGEQKKAIVDLLFKTNRKVTVKQLKEDYFKKIECFDSVEISGVEDRFNASLGTYHDLLKIIKDKDFLDNEENEDILEDIVLTLTLFEDREMIEERLKTYAHLFDDKVMKQLKRRRYTGWGRLSRKLINGIRDKQSGKTILDFLKSDGFANRNFMQLIHDDSLTFKEDIQKAQVSGQGDSLHEHIANLAGSPAIKKGILQTVKVVDELVKVMGRHKPENIVIEMARENQTTQKGQKNSRERMKRIEEGIKELGSQILKEHPVENTQLQNEKLYLYYLQNGRDMYVDQELDINRLSDYDVDHIVPQSFLKDDSIDNKVLTRSDKARGKSDNVPSEEVVKKMKNYWRQLLNAKLITQRKFDNLTKAERGGLSELDKAGFIKRQLVETRQITKHVAQILDSRMNTKYDENDKLIREVKVITLKSKLVSDFRKDFQFYKVREINNYHHAHDAYLNAVVGTALIKKYPKLESEFVYGDYKVYDVRKMIAKSEQEIGKATAKYFFYSNIMNFFKTEITLANGEIRKRPLIETNGETGEIVWDKGRDFATVRKVLSMPQVNIVKKTEVQTGGFSKESILPKRNSDKLIARKKDWDPKKYGGFDSPTVAYSVLVVAKVEKGKSKKLKSVKELLGITIMERSSFEKNPIDFLEAKGYKEVKKDLIIKLPKYSLFELENGRKRMLASAGELQKGNELALPSKYVNFLYLASHYEKLKGSPEDNEQKQLFVEQHKHYLDEIIEQISEFSKRVILADANLDKVLSAYNKHRDKPIREQAENIIHLFTLTNLGAPAAFKYFDTTIDRKRYTSTKEVLDATLIHQSITGLYETRIDLSQLGGDKRTADGSEFESPKKKAKVE

SEQ ID NO: 16118 - protein, 2360 aa, synthetic construct
MPAAKRVKLDGGTLNIEDEHRLHETSKEPDVSLGSTWLSDFPQAWAETGGMGLAVRQAPLIIPLKATSTPVSIKQYPMSQEARLGIKPHIQRLLDQGILVPCQSPWNTPLLPVKKPGTNDYRPVQDLREVNKRVEDIHPTVPNPYNLLSGLPPSHQWYTVLDLKDAFFCLRLHPTSQPLFAFEWRDPEMGISGQLTWTRLPQGFKNSPTLFNEALHRDLADFRIQHPDLILLQYVDDLLLAATSELDCQQGTRALLQTLGNLGYRASAKKAQICQKQVKYLGYLLKEGQRWLTEARKETVMGQPTPKTPRQLREFLGKAGFCRLFIPGFAEMAAPLYPLTKPGTLFNWGPDQQKAYQEIKQALLTAPALGLPDLTKPFELFVDEKQGYAKGVLTQKLGPWRRPVAYLSKKLDPVAAGWPPCLRMVAAIAVLTKDAGKLTMGQPLVILAPHAVEALVKQPPDRWLSNARMTHYQALLLDTDRVQFGPVVALNPATLLPLPEEGLQHNCLDILAEAHGTRPDLTDQPLPDADHTWYTDGSSLLQEGQRKAGAAVTTETEVIWAKALPAGTSAQRAELIALTQALKMAEGKKLNVYTDSRYAFATAHIHGEIYRRRGWLTSEGKEIKNKDEILALLKALFLPKRLSIIHCPGHQKGHSAEARGNRMADQAARKAAITETPDTSTLLSGGSSGGSSGSETPGTSESATPESSGGSSGGSSMASNFTQFVLVDNGGTGDVTVAPSNFANGIAEWISSNSRSQAYKVTCSVRQSSAQNRKYTIKVEVPKGAWRSYLNMELTIPIFATNSDCELIVKAMQGLLKDGNPIPSAIAANSGIYGGSGGSMASNFTQFVLVDNGGTGDVTVAPSNFANGIAEWISSNSRSQAYKVTCSVRQSSAQNRKYTIKVEVPKGAWRSYLNMELTIPIFATNSDCELIVKAMQGLLKDGNPIPSAIAANSGIYGSSGSSGSSGSSGSSGSSDKKYSIGLDIGTNSVGWAVITDEYKVPSKKFKVLGNTDRHSIKKNLIGALLFDSGETAEATRLKRTARRRYTRRKNRICYLQEIFSNEMAKVDDSFFHRLEESFLVEEDKKHERHPIFGNIVDEVAYHEKYPTIYHLRKKLVDSTDKADLRLIYLALAHMIKFRGHFLIEGDLNPDNSDVDKLFIQLVQTYNQLFEENPINASGVDAKAILSARLSKSRRLENLIAQLPGEKKNGLFGNLIALSLGLTPNFKSNFDLAEDAKLQLSKDTYDDDLDNLLAQIGDQYADLFLAAKNLSDAILLSDILRVNTEITKAPLSASMIKRYDEHHQDLTLLKALVRQQLPEKYKEIFFDQSKNGYAGYIDGGASQEEFYKFIKPILEKMDGTEELLVKLNREDLLRKQRTFDNGSIPHQIHLGELHAILRRQEDFYPFLKDNREKIEKILTFRIPYYVGPLARGNSRFAWMTRKSEETITPWNFEEVVDKGASAQSFIERMTNFDKNLPNEKVLPKHSLLYEYFTVYNELTKVKYVTEGMRKPAFLSGEQKKAIVDLLFKTNRKVTVKQLKEDYFKKIECFDSVEISGVEDRFNASLGTYHDLLKIIKDKDFLDNEENEDILEDIVLTLTLFEDREMIEERLKTYAHLFDDKVMKQLKRRRYTGWGRLSRKLINGIRDKQSGKTILDFLKSDGFANRNFMQLIHDDSLTFKEDIQKAQVSGQGDSLHEHIANLAGSPAIKKGILQTVKVVDELVKVMGRHKPENIVIEMARENQTTQKGQKNSRERMKRIEEGIKELGSQILKEHPVENTQLQNEKLYLYYLQNGRDMYVDQELDINRLSDYDVDHIVPQSFLKDDSIDNKVLTRSDKARGKSDNVPSEEVVKKMKNYWRQLLNAKLITQRKFDNLTKAERGGLSELDKAGFIKRQLVETRQITKHVAQILDSRMNTKYDENDKLIREVKVITLKSKLVSDFRKDFQFYKVREINNYHHAHDAYLNAVVGTALIKKYPKLESEFVYGDYKVYDVRKMIAKSEQEIGKATAKYFFYSNIMNFFKTEITLANGEIRKRPLIETNGETGEIVWDKGRDFATVRKVLSMPQVNIVKKTEVQTGGFSKESILPKRNSDKLIARKKDWDPKKYGGFDSPTVAYSVLVVAKVEKGKSKKLKSVKELLGITIMERSSFEKNPIDFLEAKGYKEVKKDLIIKLPKYSLFELENGRKRMLASAGELQKGNELALPSKYVNFLYLASHYEKLKGSPEDNEQKQLFVEQHKHYLDEIIEQISEFSKRVILADANLDKVLSAYNKHRDKPIREQAENIIHLFTLTNLGAPAAFKYFDTTIDRKRYTSTKEVLDATLIHQSITGLYETRIDLSQLGGDKRTADGSEFESPKKKAKVE

SEQ ID NO: 16119 - protein, 2353 aa, synthetic construct
MPAAKRVKLDGGTLNIEDEHRLHETSKEPDVSLGSTWLSDFPQAWAETGGMGLAVRQAPLIIPLKATSTPVSIKQYPMSQEARLGIKPHIQRLLDQGILVPCQSPWNTPLLPVKKPGTNDYRPVQDLREVNKRVEDIHPTVPNPYNLLSGLPPSHQWYTVLDLKDAFFCLRLHPTSQPLFAFEWRDPEMGISGQLTWTRLPQGFKNSPTLFNEALHRDLADFRIQHPDLILLQYVDDLLLAATSELDCQQGTRALLQTLGNLGYRASAKKAQICQKQVKYLGYLLKEGQRWLTEARKETVMGQPTPKTPRQLREFLGKAGFCRLFIPGFAEMAAPLYPLTKPGTLFNWGPDQQKAYQEIKQALLTAPALGLPDLTKPFELFVDEKQGYAKGVLTQKLGPWRRPVAYLSKKLDPVAAGWPPCLRMVAAIAVLTKDAGKLTMGQPLVILAPHAVEALVKQPPDRWLSNARMTHYQALLLDTDRVQFGPVVALNPATLLPLPEEGLQHNCLDILAEAHGTRPDLTDQPLPDADHTWYTDGSSLLQEGQRKAGAAVTTETEVIWAKALPAGTSAQRAELIALTQALKMAEGKKLNVYTDSRYAFATAHIHGEIYRRRGWLTSEGKEIKNKDEILALLKALFLPKRLSIIHCPGHQKGHSAEARGNRMADQAARKAAITETPDTSTLLSGGSSGGSSGSETPGTSESATPESSGGSSGGSSMASNFTQFVLVDNGGTGDVTVAPSNFANGIAEWISSNSRSQAYKVTCSVRQSSAQNRKYTIKVEVPKGAWRSYLNMELTIPIFATNSDCELIVKAMQGLLKDGNPIPSAIAANSGIYGGSGGSMASNFTQFVLVDNGGTGDVTVAPSNFANGIAEWISSNSRSQAYKVTCSVRQSSAQNRKYTIKVEVPKGAWRSYLNMELTIPIFATNSDCELIVKAMQGLLKDGNPIPSAIAANSGIYGSSGGGEAAAKDKKYSIGLDIGTNSVGWAVITDEYKVPSKKFKVLGNTDRHSIKKNLIGALLFDSGETAEATRLKRTARRRYTRRKNRICYLQEIFSNEMAKVDDSFFHRLEESFLVEEDKKHERHPIFGNIVDEVAYHEKYPTIYHLRKKLVDSTDKADLRLIYLALAHMIKFRGHFLIEGDLNPDNSDVDKLFIQLVQTYNQLFEENPINASGVDAKAILSARLSKSRRLENLIAQLPGEKKNGLFGNLIALSLGLTPNFKSNFDLAEDAKLQLSKDTYDDDLDNLLAQIGDQYADLFLAAKNLSDAILLSDILRVNTEITKAPLSASMIKRYDEHHQDLTLLKALVRQQLPEKYKEIFFDQSKNGYAGYIDGGASQEEFYKFIKPILEKMDGTEELLVKLNREDLLRKQRTFDNGSIPHQIHLGELHAILRRQEDFYPFLKDNREKIEKILTFRIPYYVGPLARGNSRFAWMTRKSEETITPWNFEEVVDKGASAQSFIERMTNFDKNLPNEKVLPKHSLLYEYFTVYNELTKVKYVTEGMRKPAFLSGEQKKAIVDLLFKTNRKVTVKQLKEDYFKKIECFDSVEISGVEDRFNASLGTYHDLLKIIKDKDFLDNEENEDILEDIVLTLTLFEDREMIEERLKTYAHLFDDKVMKQLKRRRYTGWGRLSRKLINGIRDKQSGKTILDFLKSDGFANRNFMQLIHDDSLTFKEDIQKAQVSGQGDSLHEHIANLAGSPAIKKGILQTVKVVDELVKVMGRHKPENIVIEMARENQTTQKGQKNSRERMKRIEEGIKELGSQILKEHPVENTQLQNEKLYLYYLQNGRDMYVDQELDINRLSDYDVDHIVPQSFLKDDSIDNKVLTRSDKARGKSDNVPSEEVVKKMKNYWRQLLNAKLITQRKFDNLTKAERGGLSELDKAGFIKRQLVETRQITKHVAQILDSRMNTKYDENDKLIREVKVITLKSKLVSDFRKDFQFYKVREINNYHHAHDAYLNAVVGTALIKKYPKLESEFVYGDYKVYDVRKMIAKSEQEIGKATAKYFFYSNIMNFFKTEITLANGEIRKRPLIETNGETGEIVWDKGRDFATVRKVLSMPQVNIVKKTEVQTGGFSKESILPKRNSDKLIARKKDWDPKKYGGFDSPTVAYSVLVVAKVEKGKSKKLKSVKELLGITIMERSSFEKNPIDFLEAKGYKEVKKDLIIKLPKYSLFELENGRKRMLASAGELQKGNELALPSKYVNFLYLASHYEKLKGSPEDNEQKQLFVEQHKHYLDEIIEQISEFSKRVILADANLDKVLSAYNKHRDKPIREQAENIIHLFTLTNLGAPAAFKYFDTTIDRKRYTSTKEVLDATLIHQSITGLYETRIDLSQLGGDKRTADGSEFESPKKKAKVE

SEQ ID NO: 16120 - protein, 2644 aa, synthetic construct
MPAAKRVKLDGGTLNIEDEHRLHETSKEPDVSLGSTWLSDFPQAWAETGGMGLAVRQAPLIIPLKATSTPVSIKQYPMSQEARLGIKPHIQRLLDQGILVPCQSPWNTPLLPVKKPGTNDYRPVQDLREVNKRVEDIHPTVPNPYNLLSGLPPSHQWYTVLDLKDAFFCLRLHPTSQPLFAFEWRDPEMGISGQLTWTRLPQGFKNSPTLFNEALHRDLADFRIQHPDLILLQYVDDLLLAATSELDCQQGTRALLQTLGNLGYRASAKKAQICQKQVKYLGYLLKEGQRWLTEARKETVMGQPTPKTPRQLREFLGKAGFCRLFIPGFAEMAAPLYPLTKPGTLFNWGPDQQKAYQEIKQALLTAPALGLPDLTKPFELFVDEKQGYAKGVLTQKLGPWRRPVAYLSKKLDPVAAGWPPCLRMVAAIAVLTKDAGKLTMGQPLVILAPHAVEALVKQPPDRWLSNARMTHYQALLLDTDRVQFGPVVALNPATLLPLPEEGLQHNCLDILAEAHGTRPDLTDQPLPDADHTWYTDGSSLLQEGQRKAGAAVTTETEVIWAKALPAGTSAQRAELIALTQALKMAEGKKLNVYTDSRYAFATAHIHGEIYRRRGWLTSEGKEIKNKDEILALLKALFLPKRLSIIHCPGHQKGHSAEARGNRMADQAARKAAITETPDTSTLLSGGSSGGSSGSETPGTSESATPESSGGSSGGSSMASNFTQFVLVDNGGTGDVTVAPSNFANGIAEWISSNSRSQAYKVTCSVRQSSAQNRKYTIKVEVPKGAWRSYLNMELTIPIFATNSDCELIVKAMQGLLKDGNPIPSAIAANSGIYGGSGGSMASNFTQFVLVDNGGTGDVTVAPSNFANGIAEWISSNSRSQAYKVTCSVRQSSAQNRKYTIKVEVPKGAWRSYLNMELTIPIFATNSDCELIVKAMQGLLKDGNPIPSAIAANSGIYGGGSGGGSGGGSGGGSMASNFTQFVLVDNGGTGDVTVAPSNFANGIAEWISSNSRSQAYKVTCSVRQSSAQNRKYTIKVEVPKGAWRSYLNMELTIPIFATNSDCELIVKAMQGLLKDGNPIPSAIAANSGIYGGSGGSMASNFTQFVLVDNGGTGDVTVAPSNFANGIAEWISSNSRSQAYKVTCSVRQSSAQNRKYTIKVEVPKGAWRSYLNMELTIPIFATNSDCELIVKAMQGLLKDGNPIPSAIAANSGIYAEAAAKEAAAKEAAAKEAAAKALEAEAAAKEAAAKEAAAKEAAAKADKKYSIGLDIGTNSVGWAVITDEYKVPSKKFKVLGNTDRHSIKKNLIGALLFDSGETAEATRLKRTARRRYTRRKNRICYLQEIFSNEMAKVDDSFFHRLEESFLVEEDKKHERHPIFGNIVDEVAYHEKYPTIYHLRKKLVDSTDKADLRLIYLALAHMIKFRGHFLIEGDLNPDNSDVDKLFIQLVQTYNQLFEENPINASGVDAKAILSARLSKSRRLENLIAQLPGEKKNGLFGNLIALSLGLTPNFKSNFDLAEDAKLQLSKDTYDDDLDNLLAQIGDQYADLFLAAKNLSDAILLSDILRVNTEITKAPLSASMIKRYDEHHQDLTLLKALVRQQLPEKYKEIFFDQSKNGYAGYIDGGASQEEFYKFIKPILEKMDGTEELLVKLNREDLLRKQRTFDNGSIPHQIHLGELHAILRRQEDFYPFLKDNREKIEKILTFRIPYYVGPLARGNSRFAWMTRKSEETITPWNFEEVVDKGASAQSFIERMTNFDKNLPNEKVLPKHSLLYEYFTVYNELTKVKYVTEGMRKPAFLSGEQKKAIVDLLFKTNRKVTVKQLKEDYFKKIECFDSVEISGVEDRFNASLGTYHDLLKIIKDKDFLDNEENEDILEDIVLTLTLFEDREMIEERLKTYAHLFDDKVMKQLKRRRYTGWGRLSRKLINGIRDKQSGKTILDFLKSDGFANRNFMQLIHDDSLTFKEDIQKAQVSGQGDSLHEHIANLAGSPAIKKGILQTVKVVDELVKVMGRHKPENIVIEMARENQTTQKGQKNSRERMKRIEEGIKELGSQILKEHPVENTQLQNEKLYLYYLQNGRDMYVDQELDINRLSDYDVDHIVPQSFLKDDSIDNKVLTRSDKARGKSDNVPSEEVVKKMKNYWRQLLNAKLITQRKFDNLTKAERGGLSELDKAGFIKRQLVETRQITKHVAQILDSRMNTKYDENDKLIREVKVITLKSKLVSDFRKDFQFYKVREINNYHHAHDAYLNAVVGTALIKKYPKLESEFVYGDYKVYDVRKMIAKSEQEIGKATAKYFFYSNIMNFFKTEITLANGEIRKRPLIETNGETGEIVWDKGRDFATVRKVLSMPQVNIVKKTEVQTGGFSKESILPKRNSDKLIARKKDWDPKKYGGFDSPTVAYSVLVVAKVEKGKSKKLKSVKELLGITIMERSSFEKNPIDFLEAKGYKEVKKDLIIKLPKYSLFELENGRKRMLASAGELQKGNELALPSKYVNFLYLASHYEKLKGSPEDNEQKQLFVEQHKHYLDEIIEQISEFSKRVILADANLDKVLSAYNKHRDKPIREQAENIIHLFTLTNLGAPAAFKYFDTTIDRKRYTSTKEVLDATLIHQSITGLYETRIDLSQLGGDKRTADGSEFESPKKKAKVE

SEQ ID NO: 16121 - protein, 2631 aa, synthetic construct
MPAAKRVKLDGGTLNIEDEHRLHETSKEPDVSLGSTWLSDFPQAWAETGGMGLAVRQAPLIIPLKATSTPVSIKQYPMSQEARLGIKPHIQRLLDQGILVPCQSPWNTPLLPVKKPGTNDYRPVQDLREVNKRVEDIHPTVPNPYNLLSGLPPSHQWYTVLDLKDAFFCLRLHPTSQPLFAFEWRDPEMGISGQLTWTRLPQGFKNSPTLFNEALHRDLADFRIQHPDLILLQYVDDLLLAATSELDCQQGTRALLQTLGNLGYRASAKKAQICQKQVKYLGYLLKEGQRWLTEARKETVMGQPTPKTPRQLREFLGKAGFCRLFIPGFAEMAAPLYPLTKPGTLFNWGPDQQKAYQEIKQALLTAPALGLPDLTKPFELFVDEKQGYAKGVLTQKLGPWRRPVAYLSKKLDPVAAGWPPCLRMVAAIAVLTKDAGKLTMGQPLVILAPHAVEALVKQPPDRWLSNARMTHYQALLLDTDRVQFGPVVALNPATLLPLPEEGLQHNCLDILAEAHGTRPDLTDQPLPDADHTWYTDGSSLLQEGQRKAGAAVTTETEVIWAKALPAGTSAQRAELIALTQALKMAEGKKLNVYTDSRYAFATAHIHGEIYRRRGWLTSEGKEIKNKDEILALLKALFLPKRLSIIHCPGHQKGHSAEARGNRMADQAARKAAITETPDTSTLLSGGSSGGSSGSETPGTSESATPESSGGSSGGSSMASNFTQFVLVDNGGTGDVTVAPSNFANGIAEWISSNSRSQAYKVTCSVRQSSAQNRKYTIKVEVPKGAWRSYLNMELTIPIFATNSDCELIVKAMQGLLKDGNPIPSAIAANSGIYGGSGGSMASNFTQFVLVDNGGTGDVTVAPSNFANGIAEWISSNSRSQAYKVTCSVRQSSAQNRKYTIKVEVPKGAWRSYLNMELTIPIFATNSDCELIVKAMQGLLKDGNPIPSAIAANSGIYGGGSGGGSGGGSGGGSMASNFTQFVLVDNGGTGDVTVAPSNFANGIAEWISSNSRSQAYKVTCSVRQSSAQNRKYTIKVEVPKGAWRSYLNMELTIPIFATNSDCELIVKAMQGLLKDGNPIPSAIAANSGIYGGSGGSMASNFTQFVLVDNGGTGDVTVAPSNFANGIAEWISSNSRSQAYKVTCSVRQSSAQNRKYTIKVEVPKGAWRSYLNMELTIPIFATNSDCELIVKAMQGLLKDGNPIPSAIAANSGIYSGGSSGGSSGSETPGTSESATPESSGGSSGGSSDKKYSIGLDIGTNSVGWAVITDEYKVPSKKFKVLGNTDRHSIKKNLIGALLFDSGETAEATRLKRTARRRYTRRKNRICYLQEIFSNEMAKVDDSFFHRLEESFLVEEDKKHERHPIFGNIVDEVAYHEKYPTIYHLRKKLVDSTDKADLRLIYLALAHMIKFRGHFLIEGDLNPDNSDVDKLFIQLVQTYNQLFEENPINASGVDAKAILSARLSKSRRLENLIAQLPGEKKNGLFGNLIALSLGLTPNFKSNFDLAEDAKLQLSKDTYDDDLDNLLAQIGDQYADLFLAAKNLSDAILLSDILRVNTEITKAPLSASMIKRYDEHHQDLTLLKALVRQQLPEKYKEIFFDQSKNGYAGYIDGGASQEEFYKFIKPILEKMDGTEELLVKLNREDLLRKQRTFDNGSIPHQIHLGELHAILRRQEDFYPFLKDNREKIEKILTFRIPYYVGPLARGNSRFAWMTRKSEETITPWNFEEVVDKGASAQSFIERMTNFDKNLPNEKVLPKHSLLYEYFTVYNELTKVKYVTEGMRKPAFLSGEQKKAIVDLLFKTNRKVTVKQLKEDYFKKIECFDSVEISGVEDRFNASLGTYHDLLKIIKDKDFLDNEENEDILEDIVLTLTLFEDREMIEERLKTYAHLFDDKVMKQLKRRRYTGWGRLSRKLINGIRDKQSGKTILDFLKSDGFANRNFMQLIHDDSLTFKEDIQKAQVSGQGDSLHEHIANLAGSPAIKKGILQTVKVVDELVKVMGRHKPENIVIEMARENQTTQKGQKNSRERMKRIEEGIKELGSQILKEHPVENTQLQNEKLYLYYLQNGRDMYVDQELDINRLSDYDVDHIVPQSFLKDDSIDNKVLTRSDKARGKSDNVPSEEVVKKMKNYWRQLLNAKLITQRKFDNLTKAERGGLSELDKAGFIKRQLVETRQITKHVAQILDSRMNTKYDENDKLIREVKVITLKSKLVSDFRKDFQFYKVREINNYHHAHDAYLNAVVGTALIKKYPKLESEFVYGDYKVYDVRKMIAKSEQEIGKATAKYFFYSNIMNFFKTEITLANGEIRKRPLIETNGETGEIVWDKGRDFATVRKVLSMPQVNIVKKTEVQTGGFSKESILPKRNSDKLIARKKDWDPKKYGGFDSPTVAYSVLVVAKVEKGKSKKLKSVKELLGITIMERSSFEKNPIDFLEAKGYKEVKKDLIIKLPKYSLFELENGRKRMLASAGELQKGNELALPSKYVNFLYLASHYEKLKGSPEDNEQKQLFVEQHKHYLDEIIEQISEFSKRVILADANLDKVLSAYNKHRDKPIREQAENIIHLFTLTNLGAPAAFKYFDTTIDRKRYTSTKEVLDATLIHQSITGLYETRIDLSQLGGDKRTADGSEFESPKKKAKVE

SEQ ID NO: 16122 - protein, 2616 aa, synthetic construct
MPAAKRVKLDGGTLNIEDEHRLHETSKEPDVSLGSTWLSDFPQAWAETGGMGLAVRQAPLIIPLKATSTPVSIKQYPMSQEARLGIKPHIQRLLDQGILVPCQSPWNTPLLPVKKPGTNDYRPVQDLREVNKRVEDIHPTVPNPYNLLSGLPPSHQWYTVLDLKDAFFCLRLHPTSQPLFAFEWRDPEMGISGQLTWTRLPQGFKNSPTLFNEALHRDLADFRIQHPDLILLQYVDDLLLAATSELDCQQGTRALLQTLGNLGYRASAKKAQICQKQVKYLGYLLKEGQRWLTEARKETVMGQPTPKTPRQLREFLGKAGFCRLFIPGFAEMAAPLYPLTKPGTLFNWGPDQQKAYQEIKQALLTAPALGLPDLTKPFELFVDEKQGYAKGVLTQKLGPWRRPVAYLSKKLDPVAAGWPPCLRMVAAIAVLTKDAGKLTMGQPLVILAPHAVEALVKQPPDRWLSNARMTHYQALLLDTDRVQFGPVVALNPATLLPLPEEGLQHNCLDILAEAHGTRPDLTDQPLPDADHTWYTDGSSLLQEGQRKAGAAVTTETEVIWAKALPAGTSAQRAELIALTQALKMAEGKKLNVYTDSRYAFATAHIHGEIYRRRGWLTSEGKEIKNKDEILALLKALFLPKRLSIIHCPGHQKGHSAEARGNRMADQAARKAAITETPDTSTLLSGGSSGGSSGSETPGTSESATPESSGGSSGGSSMASNFTQFVLVDNGGTGDVTVAPSNFANGIAEWISSNSRSQAYKVTCSVRQSSAQNRKYTIKVEVPKGAWRSYLNMELTIPIFATNSDCELIVKAMQGLLKDGNPIPSAIAANSGIYGGSGGSMASNFTQFVLVDNGGTGDVTVAPSNFANGIAEWISSNSRSQAYKVTCSVRQSSAQNRKYTIKVEVPKGAWRSYLNMELTIPIFATNSDCELIVKAMQGLLKDGNPIPSAIAANSGIYGGGSGGGSGGGSGGGSMASNFTQFVLVDNGGTGDVTVAPSNFANGIAEWISSNSRSQAYKVTCSVRQSSAQNRKYTIKVEVPKGAWRSYLNMELTIPIFATNSDCELIVKAMQGLLKDGNPIPSAIAANSGIYGGSGGSMASNFTQFVLVDNGGTGDVTVAPSNFANGIAEWISSNSRSQAYKVTCSVRQSSAQNRKYTIKVEVPKGAWRSYLNMELTIPIFATNSDCELIVKAMQGLLKDGNPIPSAIAANSGIYGSSGSSGSSGSSGSSGSSDKKYSIGLDIGTNSVGWAVITDEYKVPSKKFKVLGNTDRHSIKKNLIGALLFDSGETAEATRLKRTARRRYTRRKNRICYLQEIFSNEMAKVDDSFFHRLEESFLVEEDKKHERHPIFGNIVDEVAYHEKYPTIYHLRKKLVDSTDKADLRLIYLALAHMIKFRGHFLIEGDLNPDNSDVDKLFIQLVQTYNQLFEENPINASGVDAKAILSARLSKSRRLENLIAQLPGEKKNGLFGNLIALSLGLTPNFKSNFDLAEDAKLQLSKDTYDDDLDNLLAQIGDQYADLFLAAKNLSDAILLSDILRVNTEITKAPLSASMIKRYDEHHQDLTLLKALVRQQLPEKYKEIFFDQSKNGYAGYIDGGASQEEFYKFIKPILEKMDGTEELLVKLNREDLLRKQRTFDNGSIPHQIHLGELHAILRRQEDFYPFLKDNREKIEKILTFRIPYYVGPLARGNSRFAWMTRKSEETITPWNFEEVVDKGASAQSFIERMTNFDKNLPNEKVLPKHSLLYEYFTVYNELTKVKYVTEGMRKPAFLSGEQKKAIVDLLFKTNRKVTVKQLKEDYFKKIECFDSVEISGVEDRFNASLGTYHDLLKIIKDKDFLDNEENEDILEDIVLTLTLFEDREMIEERLKTYAHLFDDKVMKQLKRRRYTGWGRLSRKLINGIRDKQSGKTILDFLKSDGFANRNFMQLIHDDSLTFKEDIQKAQVSGQGDSLHEHIANLAGSPAIKKGILQTVKVVDELVKVMGRHKPENIVIEMARENQTTQKGQKNSRERMKRIEEGIKELGSQILKEHPVENTQLQNEKLYLYYLQNGRDMYVDQELDINRLSDYDVDHIVPQSFLKDDSIDNKVLTRSDKARGKSDNVPSEEVVKKMKNYWRQLLNAKLITQRKFDNLTKAERGGLSELDKAGFIKRQLVETRQITKHVAQILDSRMNTKYDENDKLIREVKVITLKSKLVSDFRKDFQFYKVREINNYHHAHDAYLNAVVGTALIKKYPKLESEFVYGDYKVYDVRKMIAKSEQEIGKATAKYFFYSNIMNFFKTEITLANGEIRKRPLIETNGETGEIVWDKGRDFATVRKVLSMPQVNIVKKTEVQTGGFSKESILPKRNSDKLIARKKDWDPKKYGGFDSPTVAYSVLVVAKVEKGKSKKLKSVKELLGITIMERSSFEKNPIDFLEAKGYKEVKKDLIIKLPKYSLFELENGRKRMLASAGELQKGNELALPSKYVNFLYLASHYEKLKGSPEDNEQKQLFVEQHKHYLDEIIEQISEFSKRVILADANLDKVLSAYNKHRDKPIREQAENIIHLFTLTNLGAPAAFKYFDTTIDRKRYTSTKEVLDATLIHQSITGLYETRIDLSQLGGDKRTADGSEFESPKKKAKVE

SEQ ID NO: 16123 - protein, 2609 aa, synthetic construct
MPAAKRVKLDGGTLNIEDEHRLHETSKEPDVSLGSTWLSDFPQAWAETGGMGLAVRQAPLIIPLKATSTPVSIKQYPMSQEARLGIKPHIQRLLDQGILVPCQSPWNTPLLPVKKPGTNDYRPVQDLREVNKRVEDIHPTVPNPYNLLSGLPPSHQWYTVLDLKDAFFCLRLHPTSQPLFAFEWRDPEMGISGQLTWTRLPQGFKNSPTLFNEALHRDLADFRIQHPDLILLQYVDDLLLAATSELDCQQGTRALLQTLGNLGYRASAKKAQICQKQVKYLGYLLKEGQRWLTEARKETVMGQPTPKTPRQLREFLGKAGFCRLFIPGFAEMAAPLYPLTKPGTLFNWGPDQQKAYQEIKQALLTAPALGLPDLTKPFELFVDEKQGYAKGVLTQKLGPWRRPVAYLSKKLDPVAAGWPPCLRMVAAIAVLTKDAGKLTMGQPLVILAPHAVEALVKQPPDRWLSNARMTHYQALLLDTDRVQFGPVVALNPATLLPLPEEGLQHNCLDILAEAHGTRPDLTDQPLPDADHTWYTDGSSLLQEGQRKAGAAVTTETEVIWAKALPAGTSAQRAELIALTQALKMAEGKKLNVYTDSRYAFATAHIHGEIYRRRGWLTSEGKEIKNKDEILALLKALFLPKRLSIIHCPGHQKGHSAEARGNRMADQAARKAAITETPDTSTLLSGGSSGGSSGSETPGTSESATPESSGGSSGGSSMASNFTQFVLVDNGGTGDVTVAPSNFANGIAEWISSNSRSQAYKVTCSVRQSSAQNRKYTIKVEVPKGAWRSYLNMELTIPIFATNSDCELIVKAMQGLLKDGNPIPSAIAANSGIYGGSGGSMASNFTQFVLVDNGGTGDVTVAPSNFANGIAEWISSNSRSQAYKVTCSVRQSSAQNRKYTIKVEVPKGAWRSYLNMELTIPIFATNSDCELIVKAMQGLLKDGNPIPSAIAANSGIYGGGSGGGSGGGSGGGSMASNFTQFVLVDNGGTGDVTVAPSNFANGIAEWISSNSRSQAYKVTCSVRQSSAQNRKYTIKVEVPKGAWRSYLNMELTIPIFATNSDCELIVKAMQGLLKDGNPIPSAIAANSGIYGGSGGSMASNFTQFVLVDNGGTGDVTVAPSNFANGIAEWISSNSRSQAYKVTCSVRQSSAQNRKYTIKVEVPKGAWRSYLNMELTIPIFATNSDCELIVKAMQGLLKDGNPIPSAIAANSGIYGSSGGGEAAAKDKKYSIGLDIGTNSVGWAVITDEYKVPSKKFKVLGNTDRHSIKKNLIGALLFDSGETAEATRLKRTARRRYTRRKNRICYLQEIFSNEMAKVDDSFFHRLEESFLVEEDKKHERHPIFGNIVDEVAYHEKYPTIYHLRKKLVDSTDKADLRLIYLALAHMIKFRGHFLIEGDLNPDNSDVDKLFIQLVQTYNQLFEENPINASGVDAKAILSARLSKSRRLENLIAQLPGEKKNGLFGNLIALSLGLTPNFKSNFDLAEDAKLQLSKDTYDDDLDNLLAQIGDQYADLFLAAKNLSDAILLSDILRVNTEITKAPLSASMIKRYDEHHQDLTLLKALVRQQLPEKYKEIFFDQSKNGYAGYIDGGASQEEFYKFIKPILEKMDGTEELLVKLNREDLLRKQRTFDNGSIPHQIHLGELHAILRRQEDFYPFLKDNREKIEKILTFRIPYYVGPLARGNSRFAWMTRKSEETITPWNFEEVVDKGASAQSFIERMTNFDKNLPNEKVLPKHSLLYEYFTVYNELTKVKYVTEGMRKPAFLSGEQKKAIVDLLFKTNRKVTVKQLKEDYFKKIECFDSVEISGVEDRFNASLGTYHDLLKIIKDKDFLDNEENEDILEDIVLTLTLFEDREMIEERLKTYAHLFDDKVMKQLKRRRYTGWGRLSRKLINGIRDKQSGKTILDFLKSDGFANRNFMQLIHDDSLTFKEDIQKAQVSGQGDSLHEHIANLAGSPAIKKGILQTVKVVDELVKVMGRHKPENIVIEMARENQTTQKGQKNSRERMKRIEEGIKELGSQILKEHPVENTQLQNEKLYLYYLQNGRDMYVDQELDINRLSDYDVDHIVPQSFLKDDSIDNKVLTRSDKARGKSDNVPSEEVVKKMKNYWRQLLNAKLITQRKFDNLTKAERGGLSELDKAGFIKRQLVETRQITKHVAQILDSRMNTKYDENDKLIREVKVITLKSKLVSDFRKDFQFYKVREINNYHHAHDAYLNAVVGTALIKKYPKLESEFVYGDYKVYDVRKMIAKSEQEIGKATAKYFFYSNIMNFFKTEITLANGEIRKRPLIETNGETGEIVWDKGRDFATVRKVLSMPQVNIVKKTEVQTGGFSKESILPKRNSDKLIARKKDWDPKKYGGFDSPTVAYSVLVVAKVEKGKSKKLKSVKELLGITIMERSSFEKNPIDFLEAKGYKEVKKDLIIKLPKYSLFELENGRKRMLASAGELQKGNELALPSKYVNFLYLASHYEKLKGSPEDNEQKQLFVEQHKHYLDEIIEQISEFSKRVILADANLDKVLSAYNKHRDKPIREQAENIIHLFTLTNLGAPAAFKYFDTTIDRKRYTSTKEVLDATLIHQSITGLYETRIDLSQLGGDKRTADGSEFESPKKKAKVE

SEQ ID NO: 16124 - protein, 2250 aa, synthetic construct
MPAAKRVKLDGGTLNIEDEHRLHETSKEPDVSLGSTWLSDFPQAWAETGGMGLAVRQAPLIIPLKATSTPVSIKQYPMSQEARLGIKPHIQRLLDQGILVPCQSPWNTPLLPVKKPGTNDYRPVQDLREVNKRVEDIHPTVPNPYNLLSGLPPSHQWYTVLDLKDAFFCLRLHPTSQPLFAFEWRDPEMGISGQLTWTRLPQGFKNSPTLFNEALHRDLADFRIQHPDLILLQYVDDLLLAATSELDCQQGTRALLQTLGNLGYRASAKKAQICQKQVKYLGYLLKEGQRWLTEARKETVMGQPTPKTPRQLREFLGKAGFCRLFIPGFAEMAAPLYPLTKPGTLFNWGPDQQKAYQEIKQALLTAPALGLPDLTKPFELFVDEKQGYAKGVLTQKLGPWRRPVAYLSKKLDPVAAGWPPCLRMVAAIAVLTKDAGKLTMGQPLVILAPHAVEALVKQPPDRWLSNARMTHYQALLLDTDRVQFGPVVALNPATLLPLPEEGLQHNCLDILAEAHGTRPDLTDQPLPDADHTWYTDGSSLLQEGQRKAGAAVTTETEVIWAKALPAGTSAQRAELIALTQALKMAEGKKLNVYTDSRYAFATAHIHGEIYRRRGWLTSEGKEIKNKDEILALLKALFLPKRLSIIHCPGHQKGHSAEARGNRMADQAARKAAITETPDTSTLLGSSGSSGSSGSSGSSGSSMASNFTQFVLVDNGGTGDVTVAPSNFANGIAEWISSNSRSQAYKVTCSVRQSSAQNRKYTIKVEVPKGAWRSYLNMELTIPIFATNSDCELIVKAMQGLLKDGNPIPSAIAANSGIYAEAAAKEAAAKEAAAKEAAAKALEAEAAAKEAAAKEAAAKEAAAKADKKYSIGLDIGTNSVGWAVITDEYKVPSKKFKVLGNTDRHSIKKNLIGALLFDSGETAEATRLKRTARRRYTRRKNRICYLQEIFSNEMAKVDDSFFHRLEESFLVEEDKKHERHPIFGNIVDEVAYHEKYPTIYHLRKKLVDSTDKADLRLIYLALAHMIKFRGHFLIEGDLNPDNSDVDKLFIQLVQTYNQLFEENPINASGVDAKAILSARLSKSRRLENLIAQLPGEKKNGLFGNLIALSLGLTPNFKSNFDLAEDAKLQLSKDTYDDDLDNLLAQIGDQYADLFLAAKNLSDAILLSDILRVNTEITKAPLSASMIKRYDEHHQDLTLLKALVRQQLPEKYKEIFFDQSKNGYAGYIDGGASQEEFYKFIKPILEKMDGTEELLVKLNREDLLRKQRTFDNGSIPHQIHLGELHAILRRQEDFYPFLKDNREKIEKILTFRIPYYVGPLARGNSRFAWMTRKSEETITPWNFEEVVDKGASAQSFIERMTNFDKNLPNEKVLPKHSLLYEYFTVYNELTKVKYVTEGMRKPAFLSGEQKKAIVDLLFKTNRKVTVKQLKEDYFKKIECFDSVEISGVEDRFNASLGTYHDLLKIIKDKDFLDNEENEDILEDIVLTLTLFEDREMIEERLKTYAHLFDDKVMKQLKRRRYTGWGRLSRKLINGIRDKQSGKTILDFLKSDGFANRNFMQLIHDDSLTFKEDIQKAQVSGQGDSLHEHIANLAGSPAIKKGILQTVKVVDELVKVMGRHKPENIVIEMARENQTTQKGQKNSRERMKRIEEGIKELGSQILKEHPVENTQLQNEKLYLYYLQNGRDMYVDQELDINRLSDYDVDHIVPQSFLKDDSIDNKVLTRSDKARGKSDNVPSEEVVKKMKNYWRQLLNAKLITQRKFDNLTKAERGGLSELDKAGFIKRQLVETRQITKHVAQILDSRMNTKYDENDKLIREVKVITLKSKLVSDFRKDFQFYKVREINNYHHAHDAYLNAVVGTALIKKYPKLESEFVYGDYKVYDVRKMIAKSEQEIGKATAKYFFYSNIMNFFKTEITLANGEIRKRPLIETNGETGEIVWDKGRDFATVRKVLSMPQVNIVKKTEVQTGGFSKESILPKRNSDKLIARKKDWDPKKYGGFDSPTVAYSVLVVAKVEKGKSKKLKSVKELLGITIMERSSFEKNPIDFLEAKGYKEVKKDLIIKLPKYSLFELENGRKRMLASAGELQKGNELALPSKYVNFLYLASHYEKLKGSPEDNEQKQLFVEQHKHYLDEIIEQISEFSKRVILADANLDKVLSAYNKHRDKPIREQAENIIHLFTLTNLGAPAAFKYFDTTIDRKRYTSTKEVLDATLIHQSITGLYETRIDLSQLGGDKRTADGSEFESPKKKAKVE

SEQ ID NO: 16125 - protein, 2237 aa, synthetic construct
MPAAKRVKLDGGTLNIEDEHRLHETSKEPDVSLGSTWLSDFPQAWAETGGMGLAVRQAPLIIPLKATSTPVSIKQYPMSQEARLGIKPHIQRLLDQGILVPCQSPWNTPLLPVKKPGTNDYRPVQDLREVNKRVEDIHPTVPNPYNLLSGLPPSHQWYTVLDLKDAFFCLRLHPTSQPLFAFEWRDPEMGISGQLTWTRLPQGFKNSPTLFNEALHRDLADFRIQHPDLILLQYVDDLLLAATSELDCQQGTRALLQTLGNLGYRASAKKAQICQKQVKYLGYLLKEGQRWLTEARKETVMGQPTPKTPRQLREFLGKAGFCRLFIPGFAEMAAPLYPLTKPGTLFNWGPDQQKAYQEIKQALLTAPALGLPDLTKPFELFVDEKQGYAKGVLTQKLGPWRRPVAYLSKKLDPVAAGWPPCLRMVAAIAVLTKDAGKLTMGQPLVILAPHAVEALVKQPPDRWLSNARMTHYQALLLDTDRVQFGPVVALNPATLLPLPEEGLQHNCLDILAEAHGTRPDLTDQPLPDADHTWYTDGSSLLQEGQRKAGAAVTTETEVIWAKALPAGTSAQRAELIALTQALKMAEGKKLNVYTDSRYAFATAHIHGEIYRRRGWLTSEGKEIKNKDEILALLKALFLPKRLSIIHCPGHQKGHSAEARGNRMADQAARKAAITETPDTSTLLGSSGSSGSSGSSGSSGSSMASNFTQFVLVDNGGTGDVTVAPSNFANGIAEWISSNSRSQAYKVTCSVRQSSAQNRKYTIKVEVPKGAWRSYLNMELTIPIFATNSDCELIVKAMQGLLKDGNPIPSAIAANSGIYSGGSSGGSSGSETPGTSESATPESSGGSSGGSSDKKYSIGLDIGTNSVGWAVITDEYKVPSKKFKVLGNTDRHSIKKNLIGALLFDSGETAEATRLKRTARRRYTRRKNRICYLQEIFSNEMAKVDDSFFHRLEESFLVEEDKKHERHPIFGNIVDEVAYHEKYPTIYHLRKKLVDSTDKADLRLIYLALAHMIKFRGHFLIEGDLNPDNSDVDKLFIQLVQTYNQLFEENPINASGVDAKAILSARLSKSRRLENLIAQLPGEKKNGLFGNLIALSLGLTPNFKSNFDLAEDAKLQLSKDTYDDDLDNLLAQIGDQYADLFLAAKNLSDAILLSDILRVNTEITKAPLSASMIKRYDEHHQDLTLLKALVRQQLPEKYKEIFFDQSKNGYAGYIDGGASQEEFYKFIKPILEKMDGTEELLVKLNREDLLRKQRTFDNGSIPHQIHLGELHAILRRQEDFYPFLKDNREKIEKILTFRIPYYVGPLARGNSRFAWMTRKSEETITPWNFEEVVDKGASAQSFIERMTNFDKNLPNEKVLPKHSLLYEYFTVYNELTKVKYVTEGMRKPAFLSGEQKKAIVDLLFKTNRKVTVKQLKEDYFKKIECFDSVEISGVEDRFNASLGTYHDLLKIIKDKDFLDNEENEDILEDIVLTLTLFEDREMIEERLKTYAHLFDDKVMKQLKRRRYTGWGRLSRKLINGIRDKQSGKTILDFLKSDGFANRNFMQLIHDDSLTFKEDIQKAQVSGQGDSLHEHIANLAGSPAIKKGILQTVKVVDELVKVMGRHKPENIVIEMARENQTTQKGQKNSRERMKRIEEGIKELGSQILKEHPVENTQLQNEKLYLYYLQNGRDMYVDQELDINRLSDYDVDHIVPQSFLKDDSIDNKVLTRSDKARGKSDNVPSEEVVKKMKNYWRQLLNAKLITQRKFDNLTKAERGGLSELDKAGFIKRQLVETRQITKHVAQILDSRMNTKYDENDKLIREVKVITLKSKLVSDFRKDFQFYKVREINNYHHAHDAYLNAVVGTALIKKYPKLESEFVYGDYKVYDVRKMIAKSEQEIGKATAKYFFYSNIMNFFKTEITLANGEIRKRPLIETNGETGEIVWDKGRDFATVRKVLSMPQVNIVKKTEVQTGGFSKESILPKRNSDKLIARKKDWDPKKYGGFDSPTVAYSVLVVAKVEKGKSKKLKSVKELLGITIMERSSFEKNPIDFLEAKGYKEVKKDLIIKLPKYSLFELENGRKRMLASAGELQKGNELALPSKYVNFLYLASHYEKLKGSPEDNEQKQLFVEQHKHYLDEIIEQISEFSKRVILADANLDKVLSAYNKHRDKPIREQAENIIHLFTLTNLGAPAAFKYFDTTIDRKRYTSTKEVLDATLIHQSITGLYETRIDLSQLGGDKRTADGSEFESPKKKAKVE

SEQ ID NO: 16126 - protein, 2222 aa, synthetic construct
MPAAKRVKLDGGTLNIEDEHRLHETSKEPDVSLGSTWLSDFPQAWAETGGMGLAVRQAPLIIPLKATSTPVSIKQYPMSQEARLGIKPHIQRLLDQGILVPCQSPWNTPLLPVKKPGTNDYRPVQDLREVNKRVEDIHPTVPNPYNLLSGLPPSHQWYTVLDLKDAFFCLRLHPTSQPLFAFEWRDPEMGISGQLTWTRLPQGFKNSPTLFNEALHRDLADFRIQHPDLILLQYVDDLLLAATSELDCQQGTRALLQTLGNLGYRASAKKAQICQKQVKYLGYLLKEGQRWLTEARKETVMGQPTPKTPRQLREFLGKAGFCRLFIPGFAEMAAPLYPLTKPGTLFNWGPDQQKAYQEIKQALLTAPALGLPDLTKPFELFVDEKQGYAKGVLTQKLGPWRRPVAYLSKKLDPVAAGWPPCLRMVAAIAVLTKDAGKLTMGQPLVILAPHAVEALVKQPPDRWLSNARMTHYQALLLDTDRVQFGPVVALNPATLLPLPEEGLQHNCLDILAEAHGTRPDLTDQPLPDADHTWYTDGSSLLQEGQRKAGAAVTTETEVIWAKALPAGTSAQRAELIALTQALKMAEGKKLNVYTDSRYAFATAHIHGEIYRRRGWLTSEGKEIKNKDEILALLKALFLPKRLSIIHCPGHQKGHSAEARGNRMADQAARKAAITETPDTSTLLGSSGSSGSSGSSGSSGSSMASNFTQFVLVDNGGTGDVTVAPSNFANGIAEWISSNSRSQAYKVTCSVRQSSAQNRKYTIKVEVPKGAWRSYLNMELTIPIFATNSDCELIVKAMQGLLKDGNPIPSAIAANSGIYGSSGSSGSSGSSGSSGSSDKKYSIGLDIGTNSVGWAVITDEYKVPSKKFKVLGNTDRHSIKKNLIGALLFDSGETAEATRLKRTARRRYTRRKNRICYLQEIFSNEMAKVDDSFFHRLEESFLVEEDKKHERHPIFGNIVDEVAYHEKYPTIYHLRKKLVDSTDKADLRLIYLALAHMIKFRGHFLIEGDLNPDNSDVDKLFIQLVQTYNQLFEENPINASGVDAKAILSARLSKSRRLENLIAQLPGEKKNGLFGNLIALSLGLTPNFKSNFDLAEDAKLQLSKDTYDDDLDNLLAQIGDQYADLFLAAKNLSDAILLSDILRVNTEITKAPLSASMIKRYDEHHQDLTLLKALVRQQLPEKYKEIFFDQSKNGYAGYIDGGASQEEFYKFIKPILEKMDGTEELLVKLNREDLLRKQRTFDNGSIPHQIHLGELHAILRRQEDFYPFLKDNREKIEKILTFRIPYYVGPLARGNSRFAWMTRKSEETITPWNFEEVVDKGASAQSFIERMTNFDKNLPNEKVLPKHSLLYEYFTVYNELTKVKYVTEGMRKPAFLSGEQKKAIVDLLFKTNRKVTVKQLKEDYFKKIECFDSVEISGVEDRFNASLGTYHDLLKIIKDKDFLDNEENEDILEDIVLTLTLFEDREMIEERLKTYAHLFDDKVMKQLKRRRYTGWGRLSRKLINGIRDKQSGKTILDFLKSDGFANRNFMQLIHDDSLTFKEDIQKAQVSGQGDSLHEHIANLAGSPAIKKGILQTVKVVDELVKVMGRHKPENIVIEMARENQTTQKGQKNSRERMKRIEEGIKELGSQILKEHPVENTQLQNEKLYLYYLQNGRDMYVDQELDINRLSDYDVDHIVPQSFLKDDSIDNKVLTRSDKARGKSDNVPSEEVVKKMKNYWRQLLNAKLITQRKFDNLTKAERGGLSELDKAGFIKRQLVETRQITKHVAQILDSRMNTKYDENDKLIREVKVITLKSKLVSDFRKDFQFYKVREINNYHHAHDAYLNAVVGTALIKKYPKLESEFVYGDYKVYDVRKMIAKSEQEIGKATAKYFFYSNIMNFFKTEITLANGEIRKRPLIETNGETGEIVWDKGRDFATVRKVLSMPQVNIVKKTEVQTGGFSKESILPKRNSDKLIARKKDWDPKKYGGFDSPTVAYSVLVVAKVEKGKSKKLKSVKELLGITIMERSSFEKNPIDFLEAKGYKEVKKDLIIKLPKYSLFELENGRKRMLASAGELQKGNELALPSKYVNFLYLASHYEKLKGSPEDNEQKQLFVEQHKHYLDEIIEQISEFSKRVILADANLDKVLSAYNKHRDKPIREQAENIIHLFTLTNLGAPAAFKYFDTTIDRKRYTSTKEVLDATLIHQSITGLYETRIDLSQLGGDKRTADGSEFESPKKKAKVE

SEQ ID NO: 16127 - protein, 2215 aa, synthetic construct
MPAAKRVKLDGGTLNIEDEHRLHETSKEPDVSLGSTWLSDFPQAWAETGGMGLAVRQAPLIIPLKATSTPVSIKQYPMSQEARLGIKPHIQRLLDQGILVPCQSPWNTPLLPVKKPGTNDYRPVQDLREVNKRVEDIHPTVPNPYNLLSGLPPSHQWYTVLDLKDAFFCLRLHPTSQPLFAFEWRDPEMGISGQLTWTRLPQGFKNSPTLFNEALHRDLADFRIQHPDLILLQYVDDLLLAATSELDCQQGTRALLQTLGNLGYRASAKKAQICQKQVKYLGYLLKEGQRWLTEARKETVMGQPTPKTPRQLREFLGKAGFCRLFIPGFAEMAAPLYPLTKPGTLFNWGPDQQKAYQEIKQALLTAPALGLPDLTKPFELFVDEKQGYAKGVLTQKLGPWRRPVAYLSKKLDPVAAGWPPCLRMVAAIAVLTKDAGKLTMGQPLVILAPHAVEALVKQPPDRWLSNARMTHYQALLLDTDRVQFGPVVALNPATLLPLPEEGLQHNCLDILAEAHGTRPDLTDQPLPDADHTWYTDGSSLLQEGQRKAGAAVTTETEVIWAKALPAGTSAQRAELIALTQALKMAEGKKLNVYTDSRYAFATAHIHGEIYRRRGWLTSEGKEIKNKDEILALLKALFLPKRLSIIHCPGHQKGHSAEARGNRMADQAARKAAITETPDTSTLLGSSGSSGSSGSSGSSGSSMASNFTQFVLVDNGGTGDVTVAPSNFANGIAEWISSNSRSQAYKVTCSVRQSSAQNRKYTIKVEVPKGAWRSYLNMELTIPIFATNSDCELIVKAMQGLLKDGNPIPSAIAANSGIYGSSGGGEAAAKDKKYSIGLDIGTNSVGWAVITDEYKVPSKKFKVLGNTDRHSIKKNLIGALLFDSGETAEATRLKRTARRRYTRRKNRICYLQEIFSNEMAKVDDSFFHRLEESFLVEEDKKHERHPIFGNIVDEVAYHEKYPTIYHLRKKLVDSTDKADLRLIYLALAHMIKFRGHFLIEGDLNPDNSDVDKLFIQLVQTYNQLFEENPINASGVDAKAILSARLSKSRRLENLIAQLPGEKKNGLFGNLIALSLGLTPNFKSNFDLAEDAKLQLSKDTYDDDLDNLLAQIGDQYADLFLAAKNLSDAILLSDILRVNTEITKAPLSASMIKRYDEHHQDLTLLKALVRQQLPEKYKEIFFDQSKNGYAGYIDGGASQEEFYKFIKPILEKMDGTEELLVKLNREDLLRKQRTFDNGSIPHQIHLGELHAILRRQEDFYPFLKDNREKIEKILTFRIPYYVGPLARGNSRFAWMTRKSEETITPWNFEEVVDKGASAQSFIERMTNFDKNLPNEKVLPKHSLLYEYFTVYNELTKVKYVTEGMRKPAFLSGEQKKAIVDLLFKTNRKVTVKQLKEDYFKKIECFDSVEISGVEDRFNASLGTYHDLLKIIKDKDFLDNEENEDILEDIVLTLTLFEDREMIEERLKTYAHLFDDKVMKQLKRRRYTGWGRLSRKLINGIRDKQSGKTILDFLKSDGFANRNFMQLIHDDSLTFKEDIQKAQVSGQGDSLHEHIANLAGSPAIKKGILQTVKVVDELVKVMGRHKPENIVIEMARENQTTQKGQKNSRERMKRIEEGIKELGSQILKEHPVENTQLQNEKLYLYYLQNGRDMYVDQELDINRLSDYDVDHIVPQSFLKDDSIDNKVLTRSDKARGKSDNVPSEEVVKKMKNYWRQLLNAKLITQRKFDNLTKAERGGLSELDKAGFIKRQLVETRQITKHVAQILDSRMNTKYDENDKLIREVKVITLKSKLVSDFRKDFQFYKVREINNYHHAHDAYLNAVVGTALIKKYPKLESEFVYGDYKVYDVRKMIAKSEQEIGKATAKYFFYSNIMNFFKTEITLANGEIRKRPLIETNGETGEIVWDKGRDFATVRKVLSMPQVNIVKKTEVQTGGFSKESILPKRNSDKLIARKKDWDPKKYGGFDSPTVAYSVLVVAKVEKGKSKKLKSVKELLGITIMERSSFEKNPIDFLEAKGYKEVKKDLIIKLPKYSLFELENGRKRMLASAGELQKGNELALPSKYVNFLYLASHYEKLKGSPEDNEQKQLFVEQHKHYLDEIIEQISEFSKRVILADANLDKVLSAYNKHRDKPIREQAENIIHLFTLTNLGAPAAFKYFDTTIDRKRYTSTKEVLDATLIHQSITGLYETRIDLSQLGGDKRTADGSEFESPKKKAKVE

SEQ ID NO: 16128 - protein, 2373 aa, synthetic construct
MPAAKRVKLDGGTLNIEDEHRLHETSKEPDVSLGSTWLSDFPQAWAETGGMGLAVRQAPLIIPLKATSTPVSIKQYPMSQEARLGIKPHIQRLLDQGILVPCQSPWNTPLLPVKKPGTNDYRPVQDLREVNKRVEDIHPTVPNPYNLLSGLPPSHQWYTVLDLKDAFFCLRLHPTSQPLFAFEWRDPEMGISGQLTWTRLPQGFKNSPTLFNEALHRDLADFRIQHPDLILLQYVDDLLLAATSELDCQQGTRALLQTLGNLGYRASAKKAQICQKQVKYLGYLLKEGQRWLTEARKETVMGQPTPKTPRQLREFLGKAGFCRLFIPGFAEMAAPLYPLTKPGTLFNWGPDQQKAYQEIKQALLTAPALGLPDLTKPFELFVDEKQGYAKGVLTQKLGPWRRPVAYLSKKLDPVAAGWPPCLRMVAAIAVLTKDAGKLTMGQPLVILAPHAVEALVKQPPDRWLSNARMTHYQALLLDTDRVQFGPVVALNPATLLPLPEEGLQHNCLDILAEAHGTRPDLTDQPLPDADHTWYTDGSSLLQEGQRKAGAAVTTETEVIWAKALPAGTSAQRAELIALTQALKMAEGKKLNVYTDSRYAFATAHIHGEIYRRRGWLTSEGKEIKNKDEILALLKALFLPKRLSIIHCPGHQKGHSAEARGNRMADQAARKAAITETPDTSTLLGSSGSSGSSGSSGSSGSSMASNFTQFVLVDNGGTGDVTVAPSNFANGIAEWISSNSRSQAYKVTCSVRQSSAQNRKYTIKVEVPKGAWRSYLNMELTIPIFATNSDCELIVKAMQGLLKDGNPIPSAIAANSGIYGGSGGSMASNFTQFVLVDNGGTGDVTVAPSNFANGIAEWISSNSRSQAYKVTCSVRQSSAQNRKYTIKVEVPKGAWRSYLNMELTIPIFATNSDCELIVKAMQGLLKDGNPIPSAIAANSGIYAEAAAKEAAAKEAAAKEAAAKALEAEAAAKEAAAKEAAAKEAAAKADKKYSIGLDIGTNSVGWAVITDEYKVPSKKFKVLGNTDRHSIKKNLIGALLFDSGETAEATRLKRTARRRYTRRKNRICYLQEIFSNEMAKVDDSFFHRLEESFLVEEDKKHERHPIFGNIVDEVAYHEKYPTIYHLRKKLVDSTDKADLRLIYLALAHMIKFRGHFLIEGDLNPDNSDVDKLFIQLVQTYNQLFEENPINASGVDAKAILSARLSKSRRLENLIAQLPGEKKNGLFGNLIALSLGLTPNFKSNFDLAEDAKLQLSKDTYDDDLDNLLAQIGDQYADLFLAAKNLSDAILLSDILRVNTEITKAPLSASMIKRYDEHHQDLTLLKALVRQQLPEKYKEIFFDQSKNGYAGYIDGGASQEEFYKFIKPILEKMDGTEELLVKLNREDLLRKQRTFDNGSIPHQIHLGELHAILRRQEDFYPFLKDNREKIEKILTFRIPYYVGPLARGNSRFAWMTRKSEETITPWNFEEVVDKGASAQSFIERMTNFDKNLPNEKVLPKHSLLYEYFTVYNELTKVKYVTEGMRKPAFLSGEQKKAIVDLLFKTNRKVTVKQLKEDYFKKIECFDSVEISGVEDRFNASLGTYHDLLKIIKDKDFLDNEENEDILEDIVLTLTLFEDREMIEERLKTYAHLFDDKVMKQLKRRRYTGWGRLSRKLINGIRDKQSGKTILDFLKSDGFANRNFMQLIHDDSLTFKEDIQKAQVSGQGDSLHEHIANLAGSPAIKKGILQTVKVVDELVKVMGRHKPENIVIEMARENQTTQKGQKNSRERMKRIEEGIKELGSQILKEHPVENTQLQNEKLYLYYLQNGRDMYVDQELDINRLSDYDVDHIVPQSFLKDDSIDNKVLTRSDKARGKSDNVPSEEVVKKMKNYWRQLLNAKLITQRKFDNLTKAERGGLSELDKAGFIKRQLVETRQITKHVAQILDSRMNTKYDENDKLIREVKVITLKSKLVSDFRKDFQFYKVREINNYHHAHDAYLNAVVGTALIKKYPKLESEFVYGDYKVYDVRKMIAKSEQEIGKATAKYFFYSNIMNFFKTEITLANGEIRKRPLIETNGETGEIVWDKGRDFATVRKVLSMPQVNIVKKTEVQTGGFSKESILPKRNSDKLIARKKDWDPKKYGGFDSPTVAYSVLVVAKVEKGKSKKLKSVKELLGITIMERSSFEKNPIDFLEAKGYKEVKKDLIIKLPKYSLFELENGRKRMLASAGELQKGNELALPSKYVNFLYLASHYEKLKGSPEDNEQKQLFVEQHKHYLDEIIEQISEFSKRVILADANLDKVLSAYNKHRDKPIREQAENIIHLFTLTNLGAPAAFKYFDTTIDRKRYTSTKEVLDATLIHQSITGLYETRIDLSQLGGDKRTADGSEFESPKKKAKVE

SEQ ID NO: 16129 - skipped

SEQ ID NO: 16130 - protein, 2345 aa, synthetic construct
MPAAKRVKLDGGTLNIEDEHRLHETSKEPDVSLGSTWLSDFPQAWAETGGMGLAVRQAPLIIPLKATSTPVSIKQYPMSQEARLGIKPHIQRLLDQGILVPCQSPWNTPLLPVKKPGTNDYRPVQDLREVNKRVEDIHPTVPNPYNLLSGLPPSHQWYTVLDLKDAFFCLRLHPTSQPLFAFEWRDPEMGISGQLTWTRLPQGFKNSPTLFNEALHRDLADFRIQHPDLILLQYVDDLLLAATSELDCQQGTRALLQTLGNLGYRASAKKAQICQKQVKYLGYLLKEGQRWLTEARKETVMGQPTPKTPRQLREFLGKAGFCRLFIPGFAEMAAPLYPLTKPGTLFNWGPDQQKAYQEIKQALLTAPALGLPDLTKPFELFVDEKQGYAKGVLTQKLGPWRRPVAYLSKKLDPVAAGWPPCLRMVAAIAVLTKDAGKLTMGQPLVILAPHAVEALVKQPPDRWLSNARMTHYQALLLDTDRVQFGPVVALNPATLLPLPEEGLQHNCLDILAEAHGTRPDLTDQPLPDADHTWYTDGSSLLQEGQRKAGAAVTTETEVIWAKALPAGTSAQRAELIALTQALKMAEGKKLNVYTDSRYAFATAHIHGEIYRRRGWLTSEGKEIKNKDEILALLKALFLPKRLSIIHCPGHQKGHSAEARGNRMADQAARKAAITETPDTSTLLGSSGSSGSSGSSGSSGSSMASNFTQFVLVDNGGTGDVTVAPSNFANGIAEWISSNSRSQAYKVTCSVRQSSAQNRKYTIKVEVPKGAWRSYLNMELTIPIFATNSDCELIVKAMQGLLKDGNPIPSAIAANSGIYGGSGGSMASNFTQFVLVDNGGTGDVTVAPSNFANGIAEWISSNSRSQAYKVTCSVRQSSAQNRKYTIKVEVPKGAWRSYLNMELTIPIFATNSDCELIVKAMQGLLKDGNPIPSAIAANSGIYGSSGSSGSSGSSGSSGSSDKKYSIGLDIGTNSVGWAVITDEYKVPSKKFKVLGNTDRHSIKKNLIGALLFDSGETAEATRLKRTARRRYTRRKNRICYLQEIFSNEMAKVDDSFFHRLEESFLVEEDKKHERHPIFGNIVDEVAYHEKYPTIYHLRKKLVDSTDKADLRLIYLALAHMIKFRGHFLIEGDLNPDNSDVDKLFIQLVQTYNQLFEENPINASGVDAKAILSARLSKSRRLENLIAQLPGEKKNGLFGNLIALSLGLTPNFKSNFDLAEDAKLQLSKDTYDDDLDNLLAQIGDQYADLFLAAKNLSDAILLSDILRVNTEITKAPLSASMIKRYDEHHQDLTLLKALVRQQLPEKYKEIFFDQSKNGYAGYIDGGASQEEFYKFIKPILEKMDGTEELLVKLNREDLLRKQRTFDNGSIPHQIHLGELHAILRRQEDFYPFLKDNREKIEKILTFRIPYYVGPLARGNSRFAWMTRKSEETITPWNFEEVVDKGASAQSFIERMTNFDKNLPNEKVLPKHSLLYEYFTVYNELTKVKYVTEGMRKPAFLSGEQKKAIVDLLFKTNRKVTVKQLKEDYFKKIECFDSVEISGVEDRFNASLGTYHDLLKIIKDKDFLDNEENEDILEDIVLTLTLFEDREMIEERLKTYAHLFDDKVMKQLKRRRYTGWGRLSRKLINGIRDKQSGKTILDFLKSDGFANRNFMQLIHDDSLTFKEDIQKAQVSGQGDSLHEHIANLAGSPAIKKGILQTVKVVDELVKVMGRHKPENIVIEMARENQTTQKGQKNSRERMKRIEEGIKELGSQILKEHPVENTQLQNEKLYLYYLQNGRDMYVDQELDINRLSDYDVDHIVPQSFLKDDSIDNKVLTRSDKARGKSDNVPSEEVVKKMKNYWRQLLNAKLITQRKFDNLTKAERGGLSELDKAGFIKRQLVETRQITKHVAQILDSRMNTKYDENDKLIREVKVITLKSKLVSDFRKDFQFYKVREINNYHHAHDAYLNAVVGTALIKKYPKLESEFVYGDYKVYDVRKMIAKSEQEIGKATAKYFFYSNIMNFFKTEITLANGEIRKRPLIETNGETGEIVWDKGRDFATVRKVLSMPQVNIVKKTEVQTGGFSKESILPKRNSDKLIARKKDWDPKKYGGFDSPTVAYSVLVVAKVEKGKSKKLKSVKELLGITIMERSSFEKNPIDFLEAKGYKEVKKDLIIKLPKYSLFELENGRKRMLASAGELQKGNELALPSKYVNFLYLASHYEKLKGSPEDNEQKQLFVEQHKHYLDEIIEQISEFSKRVILADANLDKVLSAYNKHRDKPIREQAENIIHLFTLTNLGAPAAFKYFDTTIDRKRYTSTKEVLDATLIHQSITGLYETRIDLSQLGGDKRTADGSEFESPKKKAKVE

SEQ ID NO: 16131 - protein, 2338 aa, synthetic construct
MPAAKRVKLDGGTLNIEDEHRLHETSKEPDVSLGSTWLSDFPQAWAETGGMGLAVRQAPLIIPLKATSTPVSIKQYPMSQEARLGIKPHIQRLLDQGILVPCQSPWNTPLLPVKKPGTNDYRPVQDLREVNKRVEDIHPTVPNPYNLLSGLPPSHQWYTVLDLKDAFFCLRLHPTSQPLFAFEWRDPEMGISGQLTWTRLPQGFKNSPTLFNEALHRDLADFRIQHPDLILLQYVDDLLLAATSELDCQQGTRALLQTLGNLGYRASAKKAQICQKQVKYLGYLLKEGQRWLTEARKETVMGQPTPKTPRQLREFLGKAGFCRLFIPGFAEMAAPLYPLTKPGTLFNWGPDQQKAYQEIKQALLTAPALGLPDLTKPFELFVDEKQGYAKGVLTQKLGPWRRPVAYLSKKLDPVAAGWPPCLRMVAAIAVLTKDAGKLTMGQPLVILAPHAVEALVKQPPDRWLSNARMTHYQALLLDTDRVQFGPVVALNPATLLPLPEEGLQHNCLDILAEAHGTRPDLTDQPLPDADHTWYTDGSSLLQEGQRKAGAAVTTETEVIWAKALPAGTSAQRAELIALTQALKMAEGKKLNVYTDSRYAFATAHIHGEIYRRRGWLTSEGKEIKNKDEILALLKALFLPKRLSIIHCPGHQKGHSAEARGNRMADQAARKAAITETPDTSTLLGSSGSSGSSGSSGSSGSSMASNFTQFVLVDNGGTGDVTVAPSNFANGIAEWISSNSRSQAYKVTCSVRQSSAQNRKYTIKVEVPKGAWRSYLNMELTIPIFATNSDCELIVKAMQGLLKDGNPIPSAIAANSGIYGGSGGSMASNFTQFVLVDNGGTGDVTVAPSNFANGIAEWISSNSRSQAYKVTCSVRQSSAQNRKYTIKVEVPKGAWRSYLNMELTIPIFATNSDCELIVKAMQGLLKDGNPIPSAIAANSGIYGSSGGGEAAAKDKKYSIGLDIGTNSVGWAVITDEYKVPSKKFKVLGNTDRHSIKKNLIGALLFDSGETAEATRLKRTARRRYTRRKNRICYLQEIFSNEMAKVDDSFFHRLEESFLVEEDKKHERHPIFGNIVDEVAYHEKYPTIYHLRKKLVDSTDKADLRLIYLALAHMIKFRGHFLIEGDLNPDNSDVDKLFIQLVQTYNQLFEENPINASGVDAKAILSARLSKSRRLENLIAQLPGEKKNGLFGNLIALSLGLTPNFKSNFDLAEDAKLQLSKDTYDDDLDNLLAQIGDQYADLFLAAKNLSDAILLSDILRVNTEITKAPLSASMIKRYDEHHQDLTLLKALVRQQLPEKYKEIFFDQSKNGYAGYIDGGASQEEFYKFIKPILEKMDGTEELLVKLNREDLLRKQRTFDNGSIPHQIHLGELHAILRRQEDFYPFLKDNREKIEKILTFRIPYYVGPLARGNSRFAWMTRKSEETITPWNFEEVVDKGASAQSFIERMTNFDKNLPNEKVLPKHSLLYEYFTVYNELTKVKYVTEGMRKPAFLSGEQKKAIVDLLFKTNRKVTVKQLKEDYFKKIECFDSVEISGVEDRFNASLGTYHDLLKIIKDKDFLDNEENEDILEDIVLTLTLFEDREMIEERLKTYAHLFDDKVMKQLKRRRYTGWGRLSRKLINGIRDKQSGKTILDFLKSDGFANRNFMQLIHDDSLTFKEDIQKAQVSGQGDSLHEHIANLAGSPAIKKGILQTVKVVDELVKVMGRHKPENIVIEMARENQTTQKGQKNSRERMKRIEEGIKELGSQILKEHPVENTQLQNEKLYLYYLQNGRDMYVDQELDINRLSDYDVDHIVPQSFLKDDSIDNKVLTRSDKARGKSDNVPSEEVVKKMKNYWRQLLNAKLITQRKFDNLTKAERGGLSELDKAGFIKRQLVETRQITKHVAQILDSRMNTKYDENDKLIREVKVITLKSKLVSDFRKDFQFYKVREINNYHHAHDAYLNAVVGTALIKKYPKLESEFVYGDYKVYDVRKMIAKSEQEIGKATAKYFFYSNIMNFFKTEITLANGEIRKRPLIETNGETGEIVWDKGRDFATVRKVLSMPQVNIVKKTEVQTGGFSKESILPKRNSDKLIARKKDWDPKKYGGFDSPTVAYSVLVVAKVEKGKSKKLKSVKELLGITIMERSSFEKNPIDFLEAKGYKEVKKDLIIKLPKYSLFELENGRKRMLASAGELQKGNELALPSKYVNFLYLASHYEKLKGSPEDNEQKQLFVEQHKHYLDEIIEQISEFSKRVILADANLDKVLSAYNKHRDKPIREQAENIIHLFTLTNLGAPAAFKYFDTTIDRKRYTSTKEVLDATLIHQSITGLYETRIDLSQLGGDKRTADGSEFESPKKKAKVE

SEQ ID NO: 16132 - protein, 2629 aa, synthetic construct
MPAAKRVKLDGGTLNIEDEHRLHETSKEPDVSLGSTWLSDFPQAWAETGGMGLAVRQAPLIIPLKATSTPVSIKQYPMSQEARLGIKPHIQRLLDQGILVPCQSPWNTPLLPVKKPGTNDYRPVQDLREVNKRVEDIHPTVPNPYNLLSGLPPSHQWYTVLDLKDAFFCLRLHPTSQPLFAFEWRDPEMGISGQLTWTRLPQGFKNSPTLFNEALHRDLADFRIQHPDLILLQYVDDLLLAATSELDCQQGTRALLQTLGNLGYRASAKKAQICQKQVKYLGYLLKEGQRWLTEARKETVMGQPTPKTPRQLREFLGKAGFCRLFIPGFAEMAAPLYPLTKPGTLFNWGPDQQKAYQEIKQALLTAPALGLPDLTKPFELFVDEKQGYAKGVLTQKLGPWRRPVAYLSKKLDPVAAGWPPCLRMVAAIAVLTKDAGKLTMGQPLVILAPHAVEALVKQPPDRWLSNARMTHYQALLLDTDRVQFGPVVALNPATLLPLPEEGLQHNCLDILAEAHGTRPDLTDQPLPDADHTWYTDGSSLLQEGQRKAGAAVTTETEVIWAKALPAGTSAQRAELIALTQALKMAEGKKLNVYTDSRYAFATAHIHGEIYRRRGWLTSEGKEIKNKDEILALLKALFLPKRLSIIHCPGHQKGHSAEARGNRMADQAARKAAITETPDTSTLLGSSGSSGSSGSSGSSGSSMASNFTQFVLVDNGGTGDVTVAPSNFANGIAEWISSNSRSQAYKVTCSVRQSSAQNRKYTIKVEVPKGAWRSYLNMELTIPIFATNSDCELIVKAMQGLLKDGNPIPSAIAANSGIYGGSGGSMASNFTQFVLVDNGGTGDVTVAPSNFANGIAEWISSNSRSQAYKVTCSVRQSSAQNRKYTIKVEVPKGAWRSYLNMELTIPIFATNSDCELIVKAMQGLLKDGNPIPSAIAANSGIYGGGSGGGSGGGSGGGSMASNFTQFVLVDNGGTGDVTVAPSNFANGIAEWISSNSRSQAYKVTCSVRQSSAQNRKYTIKVEVPKGAWRSYLNMELTIPIFATNSDCELIVKAMQGLLKDGNPIPSAIAANSGIYGGSGGSMASNFTQFVLVDNGGTGDVTVAPSNFANGIAEWISSNSRSQAYKVTCSVRQSSAQNRKYTIKVEVPKGAWRSYLNMELTIPIFATNSDCELIVKAMQGLLKDGNPIPSAIAANSGIYAEAAAKEAAAKEAAAKEAAAKALEAEAAAKEAAAKEAAAKEAAAKADKKYSIGLDIGTNSVGWAVITDEYKVPSKKFKVLGNTDRHSIKKNLIGALLFDSGETAEATRLKRTARRRYTRRKNRICYLQEIFSNEMAKVDDSFFHRLEESFLVEEDKKHERHPIFGNIVDEVAYHEKYPTIYHLRKKLVDSTDKADLRLIYLALAHMIKFRGHFLIEGDLNPDNSDVDKLFIQLVQTYNQLFEENPINASGVDAKAILSARLSKSRRLENLIAQLPGEKKNGLFGNLIALSLGLTPNFKSNFDLAEDAKLQLSKDTYDDDLDNLLAQIGDQYADLFLAAKNLSDAILLSDILRVNTEITKAPLSASMIKRYDEHHQDLTLLKALVRQQLPEKYKEIFFDQSKNGYAGYIDGGASQEEFYKFIKPILEKMDGTEELLVKLNREDLLRKQRTFDNGSIPHQIHLGELHAILRRQEDFYPFLKDNREKIEKILTFRIPYYVGPLARGNSRFAWMTRKSEETITPWNFEEVVDKGASAQSFIERMTNFDKNLPNEKVLPKHSLLYEYFTVYNELTKVKYVTEGMRKPAFLSGEQKKAIVDLLFKTNRKVTVKQLKEDYFKKIECFDSVEISGVEDRFNASLGTYHDLLKIIKDKDFLDNEENEDILEDIVLTLTLFEDREMIEERLKTYAHLFDDKVMKQLKRRRYTGWGRLSRKLINGIRDKQSGKTILDFLKSDGFANRNFMQLIHDDSLTFKEDIQKAQVSGQGDSLHEHIANLAGSPAIKKGILQTVKVVDELVKVMGRHKPENIVIEMARENQTTQKGQKNSRERMKRIEEGIKELGSQILKEHPVENTQLQNEKLYLYYLQNGRDMYVDQELDINRLSDYDVDHIVPQSFLKDDSIDNKVLTRSDKARGKSDNVPSEEVVKKMKNYWRQLLNAKLITQRKFDNLTKAERGGLSELDKAGFIKRQLVETRQITKHVAQILDSRMNTKYDENDKLIREVKVITLKSKLVSDFRKDFQFYKVREINNYHHAHDAYLNAVVGTALIKKYPKLESEFVYGDYKVYDVRKMIAKSEQEIGKATAKYFFYSNIMNFFKTEITLANGEIRKRPLIETNGETGEIVWDKGRDFATVRKVLSMPQVNIVKKTEVQTGGFSKESILPKRNSDKLIARKKDWDPKKYGGFDSPTVAYSVLVVAKVEKGKSKKLKSVKELLGITIMERSSFEKNPIDFLEAKGYKEVKKDLIIKLPKYSLFELENGRKRMLASAGELQKGNELALPSKYVNFLYLASHYEKLKGSPEDNEQKQLFVEQHKHYLDEIIEQISEFSKRVILADANLDKVLSAYNKHRDKPIREQAENIIHLFTLTNLGAPAAFKYFDTTIDRKRYTSTKEVLDATLIHQSITGLYETRIDLSQLGGDKRTADGSEFESPKKKAKVE

SEQ ID NO: 16133 - protein, 2616 aa, synthetic construct
MPAAKRVKLDGGTLNIEDEHRLHETSKEPDVSLGSTWLSDFPQAWAETGGMGLAVRQAPLIIPLKATSTPVSIKQYPMSQEARLGIKPHIQRLLDQGILVPCQSPWNTPLLPVKKPGTNDYRPVQDLREVNKRVEDIHPTVPNPYNLLSGLPPSHQWYTVLDLKDAFFCLRLHPTSQPLFAFEWRDPEMGISGQLTWTRLPQGFKNSPTLFNEALHRDLADFRIQHPDLILLQYVDDLLLAATSELDCQQGTRALLQTLGNLGYRASAKKAQICQKQVKYLGYLLKEGQRWLTEARKETVMGQPTPKTPRQLREFLGKAGFCRLFIPGFAEMAAPLYPLTKPGTLFNWGPDQQKAYQEIKQALLTAPALGLPDLTKPFELFVDEKQGYAKGVLTQKLGPWRRPVAYLSKKLDPVAAGWPPCLRMVAAIAVLTKDAGKLTMGQPLVILAPHAVEALVKQPPDRWLSNARMTHYQALLLDTDRVQFGPVVALNPATLLPLPEEGLQHNCLDILAEAHGTRPDLTDQPLPDADHTWYTDGSSLLQEGQRKAGAAVTTETEVIWAKALPAGTSAQRAELIALTQALKMAEGKKLNVYTDSRYAFATAHIHGEIYRRRGWLTSEGKEIKNKDEILALLKALFLPKRLSIIHCPGHQKGHSAEARGNRMADQAARKAAITETPDTSTLLGSSGSSGSSGSSGSSGSSMASNFTQFVLVDNGGTGDVTVAPSNFANGIAEWISSNSRSQAYKVTCSVRQSSAQNRKYTIKVEVPKGAWRSYLNMELTIPIFATNSDCELIVKAMQGLLKDGNPIPSAIAANSGIYGGSGGSMASNFTQFVLVDNGGTGDVTVAPSNFANGIAEWISSNSRSQAYKVTCSVRQSSAQNRKYTIKVEVPKGAWRSYLNMELTIPIFATNSDCELIVKAMQGLLKDGNPIPSAIAANSGIYGGGSGGGSGGGSGGGSMASNFTQFVLVDNGGTGDVTVAPSNFANGIAEWISSNSRSQAYKVTCSVRQSSAQNRKYTIKVEVPKGAWRSYLNMELTIPIFATNSDCELIVKAMQGLLKDGNPIPSAIAANSGIYGGSGGSMASNFTQFVLVDNGGTGDVTVAPSNFANGIAEWISSNSRSQAYKVTCSVRQSSAQNRKYTIKVEVPKGAWRSYLNMELTIPIFATNSDCELIVKAMQGLLKDGNPIPSAIAANSGIYSGGSSGGSSGSETPGTSESATPESSGGSSGGSSDKKYSIGLDIGTNSVGWAVITDEYKVPSKKFKVLGNTDRHSIKKNLIGALLFDSGETAEATRLKRTARRRYTRRKNRICYLQEIFSNEMAKVDDSFFHRLEESFLVEEDKKHERHPIFGNIVDEVAYHEKYPTIYHLRKKLVDSTDKADLRLIYLALAHMIKFRGHFLIEGDLNPDNSDVDKLFIQLVQTYNQLFEENPINASGVDAKAILSARLSKSRRLENLIAQLPGEKKNGLFGNLIALSLGLTPNFKSNFDLAEDAKLQLSKDTYDDDLDNLLAQIGDQYADLFLAAKNLSDAILLSDILRVNTEITKAPLSASMIKRYDEHHQDLTLLKALVRQQLPEKYKEIFFDQSKNGYAGYIDGGASQEEFYKFIKPILEKMDGTEELLVKLNREDLLRKQRTFDNGSIPHQIHLGELHAILRRQEDFYPFLKDNREKIEKILTFRIPYYVGPLARGNSRFAWMTRKSEETITPWNFEEVVDKGASAQSFIERMTNFDKNLPNEKVLPKHSLLYEYFTVYNELTKVKYVTEGMRKPAFLSGEQKKAIVDLLFKTNRKVTVKQLKEDYFKKIECFDSVEISGVEDRFNASLGTYHDLLKIIKDKDFLDNEENEDILEDIVLTLTLFEDREMIEERLKTYAHLFDDKVMKQLKRRRYTGWGRLSRKLINGIRDKQSGKTILDFLKSDGFANRNFMQLIHDDSLTFKEDIQKAQVSGQGDSLHEHIANLAGSPAIKKGILQTVKVVDELVKVMGRHKPENIVIEMARENQTTQKGQKNSRERMKRIEEGIKELGSQILKEHPVENTQLQNEKLYLYYLQNGRDMYVDQELDINRLSDYDVDHIVPQSFLKDDSIDNKVLTRSDKARGKSDNVPSEEVVKKMKNYWRQLLNAKLITQRKFDNLTKAERGGLSELDKAGFIKRQLVETRQITKHVAQILDSRMNTKYDENDKLIREVKVITLKSKLVSDFRKDFQFYKVREINNYHHAHDAYLNAVVGTALIKKYPKLESEFVYGDYKVYDVRKMIAKSEQEIGKATAKYFFYSNIMNFFKTEITLANGEIRKRPLIETNGETGEIVWDKGRDFATVRKVLSMPQVNIVKKTEVQTGGFSKESILPKRNSDKLIARKKDWDPKKYGGFDSPTVAYSVLVVAKVEKGKSKKLKSVKELLGITIMERSSFEKNPIDFLEAKGYKEVKKDLIIKLPKYSLFELENGRKRMLASAGELQKGNELALPSKYVNFLYLASHYEKLKGSPEDNEQKQLFVEQHKHYLDEIIEQISEFSKRVILADANLDKVLSAYNKHRDKPIREQAENIIHLFTLTNLGAPAAFKYFDTTIDRKRYTSTKEVLDATLIHQSITGLYETRIDLSQLGGDKRTADGSEFESPKKKAKVE

SEQ ID NO: 16134 - protein, 2601 aa, synthetic construct
MPAAKRVKLDGGTLNIEDEHRLHETSKEPDVSLGSTWLSDFPQAWAETGGMGLAVRQAPLIIPLKATSTPVSIKQYPMSQEARLGIKPHIQRLLDQGILVPCQSPWNTPLLPVKKPGTNDYRPVQDLREVNKRVEDIHPTVPNPYNLLSGLPPSHQWYTVLDLKDAFFCLRLHPTSQPLFAFEWRDPEMGISGQLTWTRLPQGFKNSPTLFNEALHRDLADFRIQHPDLILLQYVDDLLLAATSELDCQQGTRALLQTLGNLGYRASAKKAQICQKQVKYLGYLLKEGQRWLTEARKETVMGQPTPKTPRQLREFLGKAGFCRLFIPGFAEMAAPLYPLTKPGTLFNWGPDQQKAYQEIKQALLTAPALGLPDLTKPFELFVDEKQGYAKGVLTQKLGPWRRPVAYLSKKLDPVAAGWPPCLRMVAAIAVLTKDAGKLTMGQPLVILAPHAVEALVKQPPDRWLSNARMTHYQALLLDTDRVQFGPVVALNPATLLPLPEEGLQHNCLDILAEAHGTRPDLTDQPLPDADHTWYTDGSSLLQEGQRKAGAAVTTETEVIWAKALPAGTSAQRAELIALTQALKMAEGKKLNVYTDSRYAFATAHIHGEIYRRRGWLTSEGKEIKNKDEILALLKALFLPKRLSIIHCPGHQKGHSAEARGNRMADQAARKAAITETPDTSTLLGSSGSSGSSGSSGSSGSSMASNFTQFVLVDNGGTGDVTVAPSNFANGIAEWISSNSRSQAYKVTCSVRQSSAQNRKYTIKVEVPKGAWRSYLNMELTIPIFATNSDCELIVKAMQGLLKDGNPIPSAIAANSGIYGGSGGSMASNFTQFVLVDNGGTGDVTVAPSNFANGIAEWISSNSRSQAYKVTCSVRQSSAQNRKYTIKVEVPKGAWRSYLNMELTIPIFATNSDCELIVKAMQGLLKDGNPIPSAIAANSGIYGGGSGGGSGGGSGGGSMASNFTQFVLVDNGGTGDVTVAPSNFANGIAEWISSNSRSQAYKVTCSVRQSSAQNRKYTIKVEVPKGAWRSYLNMELTIPIFATNSDCELIVKAMQGLLKDGNPIPSAIAANSGIYGGSGGSMASNFTQFVLVDNGGTGDVTVAPSNFANGIAEWISSNSRSQAYKVTCSVRQSSAQNRKYTIKVEVPKGAWRSYLNMELTIPIFATNSDCELIVKAMQGLLKDGNPIPSAIAANSGIYGSSGSSGSSGSSGSSGSSDKKYSIGLDIGTNSVGWAVITDEYKVPSKKFKVLGNTDRHSIKKNLIGALLFDSGETAEATRLKRTARRRYTRRKNRICYLQEIFSNEMAKVDDSFFHRLEESFLVEEDKKHERHPIFGNIVDEVAYHEKYPTIYHLRKKLVDSTDKADLRLIYLALAHMIKFRGHFLIEGDLNPDNSDVDKLFIQLVQTYNQLFEENPINASGVDAKAILSARLSKSRRLENLIAQLPGEKKNGLFGNLIALSLGLTPNFKSNFDLAEDAKLQLSKDTYDDDLDNLLAQIGDQYADLFLAAKNLSDAILLSDILRVNTEITKAPLSASMIKRYDEHHQDLTLLKALVRQQLPEKYKEIFFDQSKNGYAGYIDGGASQEEFYKFIKPILEKMDGTEELLVKLNREDLLRKQRTFDNGSIPHQIHLGELHAILRRQEDFYPFLKDNREKIEKILTFRIPYYVGPLARGNSRFAWMTRKSEETITPWNFEEVVDKGASAQSFIERMTNFDKNLPNEKVLPKHSLLYEYFTVYNELTKVKYVTEGMRKPAFLSGEQKKAIVDLLFKTNRKVTVKQLKEDYFKKIECFDSVEISGVEDRFNASLGTYHDLLKIIKDKDFLDNEENEDILEDIVLTLTLFEDREMIEERLKTYAHLFDDKVMKQLKRRRYTGWGRLSRKLINGIRDKQSGKTILDFLKSDGFANRNFMQLIHDDSLTFKEDIQKAQVSGQGDSLHEHIANLAGSPAIKKGILQTVKVVDELVKVMGRHKPENIVIEMARENQTTQKGQKNSRERMKRIEEGIKELGSQILKEHPVENTQLQNEKLYLYYLQNGRDMYVDQELDINRLSDYDVDHIVPQSFLKDDSIDNKVLTRSDKARGKSDNVPSEEVVKKMKNYWRQLLNAKLITQRKFDNLTKAERGGLSELDKAGFIKRQLVETRQITKHVAQILDSRMNTKYDENDKLIREVKVITLKSKLVSDFRKDFQFYKVREINNYHHAHDAYLNAVVGTALIKKYPKLESEFVYGDYKVYDVRKMIAKSEQEIGKATAKYFFYSNIMNFFKTEITLANGEIRKRPLIETNGETGEIVWDKGRDFATVRKVLSMPQVNIVKKTEVQTGGFSKESILPKRNSDKLIARKKDWDPKKYGGFDSPTVAYSVLVVAKVEKGKSKKLKSVKELLGITIMERSSFEKNPIDFLEAKGYKEVKKDLIIKLPKYSLFELENGRKRMLASAGELQKGNELALPSKYVNFLYLASHYEKLKGSPEDNEQKQLFVEQHKHYLDEIIEQISEFSKRVILADANLDKVLSAYNKHRDKPIREQAENIIHLFTLTNLGAPAAFKYFDTTIDRKRYTSTKEVLDATLIHQSITGLYETRIDLSQLGGDKRTADGSEFESPKKKAKVE

SEQ ID NO: 16135 - protein, 2594 aa, synthetic construct
MPAAKRVKLDGGTLNIEDEHRLHETSKEPDVSLGSTWLSDFPQAWAETGGMGLAVRQAPLIIPLKATSTPVSIKQYPMSQEARLGIKPHIQRLLDQGILVPCQSPWNTPLLPVKKPGTNDYRPVQDLREVNKRVEDIHPTVPNPYNLLSGLPPSHQWYTVLDLKDAFFCLRLHPTSQPLFAFEWRDPEMGISGQLTWTRLPQGFKNSPTLFNEALHRDLADFRIQHPDLILLQYVDDLLLAATSELDCQQGTRALLQTLGNLGYRASAKKAQICQKQVKYLGYLLKEGQRWLTEARKETVMGQPTPKTPRQLREFLGKAGFCRLFIPGFAEMAAPLYPLTKPGTLFNWGPDQQKAYQEIKQALLTAPALGLPDLTKPFELFVDEKQGYAKGVLTQKLGPWRRPVAYLSKKLDPVAAGWPPCLRMVAAIAVLTKDAGKLTMGQPLVILAPHAVEALVKQPPDRWLSNARMTHYQALLLDTDRVQFGPVVALNPATLLPLPEEGLQHNCLDILAEAHGTRPDLTDQPLPDADHTWYTDGSSLLQEGQRKAGAAVTTETEVIWAKALPAGTSAQRAELIALTQALKMAEGKKLNVYTDSRYAFATAHIHGEIYRRRGWLTSEGKEIKNKDEILALLKALFLPKRLSIIHCPGHQKGHSAEARGNRMADQAARKAAITETPDTSTLLGSSGSSGSSGSSGSSGSSMASNFTQFVLVDNGGTGDVTVAPSNFANGIAEWISSNSRSQAYKVTCSVRQSSAQNRKYTIKVEVPKGAWRSYLNMELTIPIFATNSDCELIVKAMQGLLKDGNPIPSAIAANSGIYGGSGGSMASNFTQFVLVDNGGTGDVTVAPSNFANGIAEWISSNSRSQAYKVTCSVRQSSAQNRKYTIKVEVPKGAWRSYLNMELTIPIFATNSDCELIVKAMQGLLKDGNPIPSAIAANSGIYGGGSGGGSGGGSGGGSMASNFTQFVLVDNGGTGDVTVAPSNFANGIAEWISSNSRSQAYKVTCSVRQSSAQNRKYTIKVEVPKGAWRSYLNMELTIPIFATNSDCELIVKAMQGLLKDGNPIPSAIAANSGIYGGSGGSMASNFTQFVLVDNGGTGDVTVAPSNFANGIAEWISSNSRSQAYKVTCSVRQSSAQNRKYTIKVEVPKGAWRSYLNMELTIPIFATNSDCELIVKAMQGLLKDGNPIPSAIAANSGIYGSSGGGEAAAKDKKYSIGLDIGTNSVGWAVITDEYKVPSKKFKVLGNTDRHSIKKNLIGALLFDSGETAEATRLKRTARRRYTRRKNRICYLQEIFSNEMAKVDDSFFHRLEESFLVEEDKKHERHPIFGNIVDEVAYHEKYPTIYHLRKKLVDSTDKADLRLIYLALAHMIKFRGHFLIEGDLNPDNSDVDKLFIQLVQTYNQLFEENPINASGVDAKAILSARLSKSRRLENLIAQLPGEKKNGLFGNLIALSLGLTPNFKSNFDLAEDAKLQLSKDTYDDDLDNLLAQIGDQYADLFLAAKNLSDAILLSDILRVNTEITKAPLSASMIKRYDEHHQDLTLLKALVRQQLPEKYKEIFFDQSKNGYAGYIDGGASQEEFYKFIKPILEKMDGTEELLVKLNREDLLRKQRTFDNGSIPHQIHLGELHAILRRQEDFYPFLKDNREKIEKILTFRIPYYVGPLARGNSRFAWMTRKSEETITPWNFEEVVDKGASAQSFIERMTNFDKNLPNEKVLPKHSLLYEYFTVYNELTKVKYVTEGMRKPAFLSGEQKKAIVDLLFKTNRKVTVKQLKEDYFKKIECFDSVEISGVEDRFNASLGTYHDLLKIIKDKDFLDNEENEDILEDIVLTLTLFEDREMIEERLKTYAHLFDDKVMKQLKRRRYTGWGRLSRKLINGIRDKQSGKTILDFLKSDGFANRNFMQLIHDDSLTFKEDIQKAQVSGQGDSLHEHIANLAGSPAIKKGILQTVKVVDELVKVMGRHKPENIVIEMARENQTTQKGQKNSRERMKRIEEGIKELGSQILKEHPVENTQLQNEKLYLYYLQNGRDMYVDQELDINRLSDYDVDHIVPQSFLKDDSIDNKVLTRSDKARGKSDNVPSEEVVKKMKNYWRQLLNAKLITQRKFDNLTKAERGGLSELDKAGFIKRQLVETRQITKHVAQILDSRMNTKYDENDKLIREVKVITLKSKLVSDFRKDFQFYKVREINNYHHAHDAYLNAVVGTALIKKYPKLESEFVYGDYKVYDVRKMIAKSEQEIGKATAKYFFYSNIMNFFKTEITLANGEIRKRPLIETNGETGEIVWDKGRDFATVRKVLSMPQVNIVKKTEVQTGGFSKESILPKRNSDKLIARKKDWDPKKYGGFDSPTVAYSVLVVAKVEKGKSKKLKSVKELLGITIMERSSFEKNPIDFLEAKGYKEVKKDLIIKLPKYSLFELENGRKRMLASAGELQKGNELALPSKYVNFLYLASHYEKLKGSPEDNEQKQLFVEQHKHYLDEIIEQISEFSKRVILADANLDKVLSAYNKHRDKPIREQAENIIHLFTLTNLGAPAAFKYFDTTIDRKRYTSTKEVLDATLIHQSITGLYETRIDLSQLGGDKRTADGSEFESPKKKAKVE

SEQ ID NO: 16136 - protein, 2243 aa, synthetic construct
MPAAKRVKLDGGTLNIEDEHRLHETSKEPDVSLGSTWLSDFPQAWAETGGMGLAVRQAPLIIPLKATSTPVSIKQYPMSQEARLGIKPHIQRLLDQGILVPCQSPWNTPLLPVKKPGTNDYRPVQDLREVNKRVEDIHPTVPNPYNLLSGLPPSHQWYTVLDLKDAFFCLRLHPTSQPLFAFEWRDPEMGISGQLTWTRLPQGFKNSPTLFNEALHRDLADFRIQHPDLILLQYVDDLLLAATSELDCQQGTRALLQTLGNLGYRASAKKAQICQKQVKYLGYLLKEGQRWLTEARKETVMGQPTPKTPRQLREFLGKAGFCRLFIPGFAEMAAPLYPLTKPGTLFNWGPDQQKAYQEIKQALLTAPALGLPDLTKPFELFVDEKQGYAKGVLTQKLGPWRRPVAYLSKKLDPVAAGWPPCLRMVAAIAVLTKDAGKLTMGQPLVILAPHAVEALVKQPPDRWLSNARMTHYQALLLDTDRVQFGPVVALNPATLLPLPEEGLQHNCLDILAEAHGTRPDLTDQPLPDADHTWYTDGSSLLQEGQRKAGAAVTTETEVIWAKALPAGTSAQRAELIALTQALKMAEGKKLNVYTDSRYAFATAHIHGEIYRRRGWLTSEGKEIKNKDEILALLKALFLPKRLSIIHCPGHQKGHSAEARGNRMADQAARKAAITETPDTSTLLGSSGGGEAAAKMASNFTQFVLVDNGGTGDVTVAPSNFANGIAEWISSNSRSQAYKVTCSVRQSSAQNRKYTIKVEVPKGAWRSYLNMELTIPIFATNSDCELIVKAMQGLLKDGNPIPSAIAANSGIYAEAAAKEAAAKEAAAKEAAAKALEAEAAAKEAAAKEAAAKEAAAKADKKYSIGLDIGTNSVGWAVITDEYKVPSKKFKVLGNTDRHSIKKNLIGALLFDSGETAEATRLKRTARRRYTRRKNRICYLQEIFSNEMAKVDDSFFHRLEESFLVEEDKKHERHPIFGNIVDEVAYHEKYPTIYHLRKKLVDSTDKADLRLIYLALAHMIKFRGHFLIEGDLNPDNSDVDKLFIQLVQTYNQLFEENPINASGVDAKAILSARLSKSRRLENLIAQLPGEKKNGLFGNLIALSLGLTPNFKSNFDLAEDAKLQLSKDTYDDDLDNLLAQIGDQYADLFLAAKNLSDAILLSDILRVNTEITKAPLSASMIKRYDEHHQDLTLLKALVRQQLPEKYKEIFFDQSKNGYAGYIDGGASQEEFYKFIKPILEKMDGTEELLVKLNREDLLRKQRTFDNGSIPHQIHLGELHAILRRQEDFYPFLKDNREKIEKILTFRIPYYVGPLARGNSRFAWMTRKSEETITPWNFEEVVDKGASAQSFIERMTNFDKNLPNEKVLPKHSLLYEYFTVYNELTKVKYVTEGMRKPAFLSGEQKKAIVDLLFKTNRKVTVKQLKEDYFKKIECFDSVEISGVEDRFNASLGTYHDLLKIIKDKDFLDNEENEDILEDIVLTLTLFEDREMIEERLKTYAHLFDDKVMKQLKRRRYTGWGRLSRKLINGIRDKQSGKTILDFLKSDGFANRNFMQLIHDDSLTFKEDIQKAQVSGQGDSLHEHIANLAGSPAIKKGILQTVKVVDELVKVMGRHKPENIVIEMARENQTTQKGQKNSRERMKRIEEGIKELGSQILKEHPVENTQLQNEKLYLYYLQNGRDMYVDQELDINRLSDYDVDHIVPQSFLKDDSIDNKVLTRSDKARGKSDNVPSEEVVKKMKNYWRQLLNAKLITQRKFDNLTKAERGGLSELDKAGFIKRQLVETRQITKHVAQILDSRMNTKYDENDKLIREVKVITLKSKLVSDFRKDFQFYKVREINNYHHAHDAYLNAVVGTALIKKYPKLESEFVYGDYKVYDVRKMIAKSEQEIGKATAKYFFYSNIMNFFKTEITLANGEIRKRPLIETNGETGEIVWDKGRDFATVRKVLSMPQVNIVKKTEVQTGGFSKESILPKRNSDKLIARKKDWDPKKYGGFDSPTVAYSVLVVAKVEKGKSKKLKSVKELLGITIMERSSFEKNPIDFLEAKGYKEVKKDLIIKLPKYSLFELENGRKRMLASAGELQKGNELALPSKYVNFLYLASHYEKLKGSPEDNEQKQLFVEQHKHYLDEIIEQISEFSKRVILADANLDKVLSAYNKHRDKPIREQAENIIHLFTLTNLGAPAAFKYFDTTIDRKRYTSTKEVLDATLIHQSITGLYETRIDLSQLGGDKRTADGSEFESPKKKAKVE

SEQ ID NO: 16137 - protein, 2230 aa, synthetic construct
MPAAKRVKLDGGTLNIEDEHRLHETSKEPDVSLGSTWLSDFPQAWAETGGMGLAVRQAPLIIPLKATSTPVSIKQYPMSQEARLGIKPHIQRLLDQGILVPCQSPWNTPLLPVKKPGTNDYRPVQDLREVNKRVEDIHPTVPNPYNLLSGLPPSHQWYTVLDLKDAFFCLRLHPTSQPLFAFEWRDPEMGISGQLTWTRLPQGFKNSPTLFNEALHRDLADFRIQHPDLILLQYVDDLLLAATSELDCQQGTRALLQTLGNLGYRASAKKAQICQKQVKYLGYLLKEGQRWLTEARKETVMGQPTPKTPRQLREFLGKAGFCRLFIPGFAEMAAPLYPLTKPGTLFNWGPDQQKAYQEIKQALLTAPALGLPDLTKPFELFVDEKQGYAKGVLTQKLGPWRRPVAYLSKKLDPVAAGWPPCLRMVAAIAVLTKDAGKLTMGQPLVILAPHAVEALVKQPPDRWLSNARMTHYQALLLDTDRVQFGPVVALNPATLLPLPEEGLQHNCLDILAEAHGTRPDLTDQPLPDADHTWYTDGSSLLQEGQRKAGAAVTTETEVIWAKALPAGTSAQRAELIALTQALKMAEGKKLNVYTDSRYAFATAHIHGEIYRRRGWLTSEGKEIKNKDEILALLKALFLPKRLSIIHCPGHQKGHSAEARGNRMADQAARKAAITETPDTSTLLGSSGGGEAAAKMASNFTQFVLVDNGGTGDVTVAPSNFANGIAEWISSNSRSQAYKVTCSVRQSSAQNRKYTIKVEVPKGAWRSYLNMELTIPIFATNSDCELIVKAMQGLLKDGNPIPSAIAANSGIYSGGSSGGSSGSETPGTSESATPESSGGSSGGSSDKKYSIGLDIGTNSVGWAVITDEYKVPSKKFKVLGNTDRHSIKKNLIGALLFDSGETAEATRLKRTARRRYTRRKNRICYLQEIFSNEMAKVDDSFFHRLEESFLVEEDKKHERHPIFGNIVDEVAYHEKYPTIYHLRKKLVDSTDKADLRLIYLALAHMIKFRGHFLIEGDLNPDNSDVDKLFIQLVQTYNQLFEENPINASGVDAKAILSARLSKSRRLENLIAQLPGEKKNGLFGNLIALSLGLTPNFKSNFDLAEDAKLQLSKDTYDDDLDNLLAQIGDQYADLFLAAKNLSDAILLSDILRVNTEITKAPLSASMIKRYDEHHQDLTLLKALVRQQLPEKYKEIFFDQSKNGYAGYIDGGASQEEFYKFIKPILEKMDGTEELLVKLNREDLLRKQRTFDNGSIPHQIHLGELHAILRRQEDFYPFLKDNREKIEKILTFRIPYYVGPLARGNSRFAWMTRKSEETITPWNFEEVVDKGASAQSFIERMTNFDKNLPNEKVLPKHSLLYEYFTVYNELTKVKYVTEGMRKPAFLSGEQKKAIVDLLFKTNRKVTVKQLKEDYFKKIECFDSVEISGVEDRFNASLGTYHDLLKIIKDKDFLDNEENEDILEDIVLTLTLFEDREMIEERLKTYAHLFDDKVMKQLKRRRYTGWGRLSRKLINGIRDKQSGKTILDFLKSDGFANRNFMQLIHDDSLTFKEDIQKAQVSGQGDSLHEHIANLAGSPAIKKGILQTVKVVDELVKVMGRHKPENIVIEMARENQTTQKGQKNSRERMKRIEEGIKELGSQILKEHPVENTQLQNEKLYLYYLQNGRDMYVDQELDINRLSDYDVDHIVPQSFLKDDSIDNKVLTRSDKARGKSDNVPSEEVVKKMKNYWRQLLNAKLITQRKFDNLTKAERGGLSELDKAGFIKRQLVETRQITKHVAQILDSRMNTKYDENDKLIREVKVITLKSKLVSDFRKDFQFYKVREINNYHHAHDAYLNAVVGTALIKKYPKLESEFVYGDYKVYDVRKMIAKSEQEIGKATAKYFFYSNIMNFFKTEITLANGEIRKRPLIETNGETGEIVWDKGRDFATVRKVLSMPQVNIVKKTEVQTGGFSKESILPKRNSDKLIARKKDWDPKKYGGFDSPTVAYSVLVVAKVEKGKSKKLKSVKELLGITIMERSSFEKNPIDFLEAKGYKEVKKDLIIKLPKYSLFELENGRKRMLASAGELQKGNELALPSKYVNFLYLASHYEKLKGSPEDNEQKQLFVEQHKHYLDEIIEQISEFSKRVILADANLDKVLSAYNKHRDKPIREQAENIIHLFTLTNLGAPAAFKYFDTTIDRKRYTSTKEVLDATLIHQSITGLYETRIDLSQLGGDKRTADGSEFESPKKKAKVE

SEQ ID NO: 16138 - protein, 2215 aa, synthetic construct
MPAAKRVKLDGGTLNIEDEHRLHETSKEPDVSLGSTWLSDFPQAWAETGGMGLAVRQAPLIIPLKATSTPVSIKQYPMSQEARLGIKPHIQRLLDQGILVPCQSPWNTPLLPVKKPGTNDYRPVQDLREVNKRVEDIHPTVPNPYNLLSGLPPSHQWYTVLDLKDAFFCLRLHPTSQPLFAFEWRDPEMGISGQLTWTRLPQGFKNSPTLFNEALHRDLADFRIQHPDLILLQYVDDLLLAATSELDCQQGTRALLQTLGNLGYRASAKKAQICQKQVKYLGYLLKEGQRWLTEARKETVMGQPTPKTPRQLREFLGKAGFCRLFIPGFAEMAAPLYPLTKPGTLFNWGPDQQKAYQEIKQALLTAPALGLPDLTKPFELFVDEKQGYAKGVLTQKLGPWRRPVAYLSKKLDPVAAGWPPCLRMVAAIAVLTKDAGKLTMGQPLVILAPHAVEALVKQPPDRWLSNARMTHYQALLLDTDRVQFGPVVALNPATLLPLPEEGLQHNCLDILAEAHGTRPDLTDQPLPDADHTWYTDGSSLLQEGQRKAGAAVTTETEVIWAKALPAGTSAQRAELIALTQALKMAEGKKLNVYTDSRYAFATAHIHGEIYRRRGWLTSEGKEIKNKDEILALLKALFLPKRLSIIHCPGHQKGHSAEARGNRMADQAARKAAITETPDTSTLLGSSGGGEAAAKMASNFTQFVLVDNGGTGDVTVAPSNFANGIAEWISSNSRSQAYKVTCSVRQSSAQNRKYTIKVEVPKGAWRSYLNMELTIPIFATNSDCELIVKAMQGLLKDGNPIPSAIAANSGIYGSSGSSGSSGSSGSSGSSDKKYSIGLDIGTNSVGWAVITDEYKVPSKKFKVLGNTDRHSIKKNLIGALLFDSGETAEATRLKRTARRRYTRRKNRICYLQEIFSNEMAKVDDSFFHRLEESFLVEEDKKHERHPIFGNIVDEVAYHEKYPTIYHLRKKLVDSTDKADLRLIYLALAHMIKFRGHFLIEGDLNPDNSDVDKLFIQLVQTYNQLFEENPINASGVDAKAILSARLSKSRRLENLIAQLPGEKKNGLFGNLIALSLGLTPNFKSNFDLAEDAKLQLSKDTYDDDLDNLLAQIGDQYADLFLAAKNLSDAILLSDILRVNTEITKAPLSASMIKRYDEHHQDLTLLKALVRQQLPEKYKEIFFDQSKNGYAGYIDGGASQEEFYKFIKPILEKMDGTEELLVKLNREDLLRKQRTFDNGSIPHQIHLGELHAILRRQEDFYPFLKDNREKIEKILTFRIPYYVGPLARGNSRFAWMTRKSEETITPWNFEEVVDKGASAQSFIERMTNFDKNLPNEKVLPKHSLLYEYFTVYNELTKVKYVTEGMRKPAFLSGEQKKAIVDLLFKTNRKVTVKQLKEDYFKKIECFDSVEISGVEDRFNASLGTYHDLLKIIKDKDFLDNEENEDILEDIVLTLTLFEDREMIEERLKTYAHLFDDKVMKQLKRRRYTGWGRLSRKLINGIRDKQSGKTILDFLKSDGFANRNFMQLIHDDSLTFKEDIQKAQVSGQGDSLHEHIANLAGSPAIKKGILQTVKVVDELVKVMGRHKPENIVIEMARENQTTQKGQKNSRERMKRIEEGIKELGSQILKEHPVENTQLQNEKLYLYYLQNGRDMYVDQELDINRLSDYDVDHIVPQSFLKDDSIDNKVLTRSDKARGKSDNVPSEEVVKKMKNYWRQLLNAKLITQRKFDNLTKAERGGLSELDKAGFIKRQLVETRQITKHVAQILDSRMNTKYDENDKLIREVKVITLKSKLVSDFRKDFQFYKVREINNYHHAHDAYLNAVVGTALIKKYPKLESEFVYGDYKVYDVRKMIAKSEQEIGKATAKYFFYSNIMNFFKTEITLANGEIRKRPLIETNGETGEIVWDKGRDFATVRKVLSMPQVNIVKKTEVQTGGFSKESILPKRNSDKLIARKKDWDPKKYGGFDSPTVAYSVLVVAKVEKGKSKKLKSVKELLGITIMERSSFEKNPIDFLEAKGYKEVKKDLIIKLPKYSLFELENGRKRMLASAGELQKGNELALPSKYVNFLYLASHYEKLKGSPEDNEQKQLFVEQHKHYLDEIIEQISEFSKRVILADANLDKVLSAYNKHRDKPIREQAENIIHLFTLTNLGAPAAFKYFDTTIDRKRYTSTKEVLDATLIHQSITGLYETRIDLSQLGGDKRTADGSEFESPKKKAKVE

SEQ ID NO: 16139 - protein, 2208 aa, synthetic construct
MPAAKRVKLDGGTLNIEDEHRLHETSKEPDVSLGSTWLSDFPQAWAETGGMGLAVRQAPLIIPLKATSTPVSIKQYPMSQEARLGIKPHIQRLLDQGILVPCQSPWNTPLLPVKKPGTNDYRPVQDLREVNKRVEDIHPTVPNPYNLLSGLPPSHQWYTVLDLKDAFFCLRLHPTSQPLFAFEWRDPEMGISGQLTWTRLPQGFKNSPTLFNEALHRDLADFRIQHPDLILLQYVDDLLLAATSELDCQQGTRALLQTLGNLGYRASAKKAQICQKQVKYLGYLLKEGQRWLTEARKETVMGQPTPKTPRQLREFLGKAGFCRLFIPGFAEMAAPLYPLTKPGTLFNWGPDQQKAYQEIKQALLTAPALGLPDLTKPFELFVDEKQGYAKGVLTQKLGPWRRPVAYLSKKLDPVAAGWPPCLRMVAAIAVLTKDAGKLTMGQPLVILAPHAVEALVKQPPDRWLSNARMTHYQALLLDTDRVQFGPVVALNPATLLPLPEEGLQHNCLDILAEAHGTRPDLTDQPLPDADHTWYTDGSSLLQEGQRKAGAAVTTETEVIWAKALPAGTSAQRAELIALTQALKMAEGKKLNVYTDSRYAFATAHIHGEIYRRRGWLTSEGKEIKNKDEILALLKALFLPKRLSIIHCPGHQKGHSAEARGNRMADQAARKAAITETPDTSTLLGSSGGGEAAAKMASNFTQFVLVDNGGTGDVTVAPSNFANGIAEWISSNSRSQAYKVTCSVRQSSAQNRKYTIKVEVPKGAWRSYLNMELTIPIFATNSDCELIVKAMQGLLKDGNPIPSAIAANSGIYGSSGGGEAAAKDKKYSIGLDIGTNSVGWAVITDEYKVPSKKFKVLGNTDRHSIKKNLIGALLFDSGETAEATRLKRTARRRYTRRKNRICYLQEIFSNEMAKVDDSFFHRLEESFLVEEDKKHERHPIFGNIVDEVAYHEKYPTIYHLRKKLVDSTDKADLRLIYLALAHMIKFRGHFLIEGDLNPDNSDVDKLFIQLVQTYNQLFEENPINASGVDAKAILSARLSKSRRLENLIAQLPGEKKNGLFGNLIALSLGLTPNFKSNFDLAEDAKLQLSKDTYDDDLDNLLAQIGDQYADLFLAAKNLSDAILLSDILRVNTEITKAPLSASMIKRYDEHHQDLTLLKALVRQQLPEKYKEIFFDQSKNGYAGYIDGGASQEEFYKFIKPILEKMDGTEELLVKLNREDLLRKQRTFDNGSIPHQIHLGELHAILRRQEDFYPFLKDNREKIEKILTFRIPYYVGPLARGNSRFAWMTRKSEETITPWNFEEVVDKGASAQSFIERMTNFDKNLPNEKVLPKHSLLYEYFTVYNELTKVKYVTEGMRKPAFLSGEQKKAIVDLLFKTNRKVTVKQLKEDYFKKIECFDSVEISGVEDRFNASLGTYHDLLKIIKDKDFLDNEENEDILEDIVLTLTLFEDREMIEERLKTYAHLFDDKVMKQLKRRRYTGWGRLSRKLINGIRDKQSGKTILDFLKSDGFANRNFMQLIHDDSLTFKEDIQKAQVSGQGDSLHEHIANLAGSPAIKKGILQTVKVVDELVKVMGRHKPENIVIEMARENQTTQKGQKNSRERMKRIEEGIKELGSQILKEHPVENTQLQNEKLYLYYLQNGRDMYVDQELDINRLSDYDVDHIVPQSFLKDDSIDNKVLTRSDKARGKSDNVPSEEVVKKMKNYWRQLLNAKLITQRKFDNLTKAERGGLSELDKAGFIKRQLVETRQITKHVAQILDSRMNTKYDENDKLIREVKVITLKSKLVSDFRKDFQFYKVREINNYHHAHDAYLNAVVGTALIKKYPKLESEFVYGDYKVYDVRKMIAKSEQEIGKATAKYFFYSNIMNFFKTEITLANGEIRKRPLIETNGETGEIVWDKGRDFATVRKVLSMPQVNIVKKTEVQTGGFSKESILPKRNSDKLIARKKDWDPKKYGGFDSPTVAYSVLVVAKVEKGKSKKLKSVKELLGITIMERSSFEKNPIDFLEAKGYKEVKKDLIIKLPKYSLFELENGRKRMLASAGELQKGNELALPSKYVNFLYLASHYEKLKGSPEDNEQKQLFVEQHKHYLDEIIEQISEFSKRVILADANLDKVLSAYNKHRDKPIREQAENIIHLFTLTNLGAPAAFKYFDTTIDRKRYTSTKEVLDATLIHQSITGLYETRIDLSQLGGDKRTADGSEFESPKKKAKVE

SEQ ID NO: 16140 - protein, 2366 aa, synthetic construct
MPAAKRVKLDGGTLNIEDEHRLHETSKEPDVSLGSTWLSDFPQAWAETGGMGLAVRQAPLIIPLKATSTPVSIKQYPMSQEARLGIKPHIQRLLDQGILVPCQSPWNTPLLPVKKPGTNDYRPVQDLREVNKRVEDIHPTVPNPYNLLSGLPPSHQWYTVLDLKDAFFCLRLHPTSQPLFAFEWRDPEMGISGQLTWTRLPQGFKNSPTLFNEALHRDLADFRIQHPDLILLQYVDDLLLAATSELDCQQGTRALLQTLGNLGYRASAKKAQICQKQVKYLGYLLKEGQRWLTEARKETVMGQPTPKTPRQLREFLGKAGFCRLFIPGFAEMAAPLYPLTKPGTLFNWGPDQQKAYQEIKQALLTAPALGLPDLTKPFELFVDEKQGYAKGVLTQKLGPWRRPVAYLSKKLDPVAAGWPPCLRMVAAIAVLTKDAGKLTMGQPLVILAPHAVEALVKQPPDRWLSNARMTHYQALLLDTDRVQFGPVVALNPATLLPLPEEGLQHNCLDILAEAHGTRPDLTDQPLPDADHTWYTDGSSLLQEGQRKAGAAVTTETEVIWAKALPAGTSAQRAELIALTQALKMAEGKKLNVYTDSRYAFATAHIHGEIYRRRGWLTSEGKEIKNKDEILALLKALFLPKRLSIIHCPGHQKGHSAEARGNRMADQAARKAAITETPDTSTLLGSSGGGEAAAKMASNFTQFVLVDNGGTGDVTVAPSNFANGIAEWISSNSRSQAYKVTCSVRQSSAQNRKYTIKVEVPKGAWRSYLNMELTIPIFATNSDCELIVKAMQGLLKDGNPIPSAIAANSGIYGGSGGSMASNFTQFVLVDNGGTGDVTVAPSNFANGIAEWISSNSRSQAYKVTCSVRQSSAQNRKYTIKVEVPKGAWRSYLNMELTIPIFATNSDCELIVKAMQGLLKDGNPIPSAIAANSGIYAEAAAKEAAAKEAAAKEAAAKALEAEAAAKEAAAKEAAAKEAAAKADKKYSIGLDIGTNSVGWAVITDEYKVPSKKFKVLGNTDRHSIKKNLIGALLFDSGETAEATRLKRTARRRYTRRKNRICYLQEIFSNEMAKVDDSFFHRLEESFLVEEDKKHERHPIFGNIVDEVAYHEKYPTIYHLRKKLVDSTDKADLRLIYLALAHMIKFRGHFLIEGDLNPDNSDVDKLFIQLVQTYNQLFEENPINASGVDAKAILSARLSKSRRLENLIAQLPGEKKNGLFGNLIALSLGLTPNFKSNFDLAEDAKLQLSKDTYDDDLDNLLAQIGDQYADLFLAAKNLSDAILLSDILRVNTEITKAPLSASMIKRYDEHHQDLTLLKALVRQQLPEKYKEIFFDQSKNGYAGYIDGGASQEEFYKFIKPILEKMDGTEELLVKLNREDLLRKQRTFDNGSIPHQIHLGELHAILRRQEDFYPFLKDNREKIEKILTFRIPYYVGPLARGNSRFAWMTRKSEETITPWNFEEVVDKGASAQSFIERMTNFDKNLPNEKVLPKHSLLYEYFTVYNELTKVKYVTEGMRKPAFLSGEQKKAIVDLLFKTNRKVTVKQLKEDYFKKIECFDSVEISGVEDRFNASLGTYHDLLKIIKDKDFLDNEENEDILEDIVLTLTLFEDREMIEERLKTYAHLFDDKVMKQLKRRRYTGWGRLSRKLINGIRDKQSGKTILDFLKSDGFANRNFMQLIHDDSLTFKEDIQKAQVSGQGDSLHEHIANLAGSPAIKKGILQTVKVVDELVKVMGRHKPENIVIEMARENQTTQKGQKNSRERMKRIEEGIKELGSQILKEHPVENTQLQNEKLYLYYLQNGRDMYVDQELDINRLSDYDVDHIVPQSFLKDDSIDNKVLTRSDKARGKSDNVPSEEVVKKMKNYWRQLLNAKLITQRKFDNLTKAERGGLSELDKAGFIKRQLVETRQITKHVAQILDSRMNTKYDENDKLIREVKVITLKSKLVSDFRKDFQFYKVREINNYHHAHDAYLNAVVGTALIKKYPKLESEFVYGDYKVYDVRKMIAKSEQEIGKATAKYFFYSNIMNFFKTEITLANGEIRKRPLIETNGETGEIVWDKGRDFATVRKVLSMPQVNIVKKTEVQTGGFSKESILPKRNSDKLIARKKDWDPKKYGGFDSPTVAYSVLVVAKVEKGKSKKLKSVKELLGITIMERSSFEKNPIDFLEAKGYKEVKKDLIIKLPKYSLFELENGRKRMLASAGELQKGNELALPSKYVNFLYLASHYEKLKGSPEDNEQKQLFVEQHKHYLDEIIEQISEFSKRVILADANLDKVLSAYNKHRDKPIREQAENIIHLFTLTNLGAPAAFKYFDTTIDRKRYTSTKEVLDATLIHQSITGLYETRIDLSQLGGDKRTADGSEFESPKKKAKVE

SEQ ID NO: 16141 - protein, 2353 aa, synthetic construct
MPAAKRVKLDGGTLNIEDEHRLHETSKEPDVSLGSTWLSDFPQAWAETGGMGLAVRQAPLIIPLKATSTPVSIKQYPMSQEARLGIKPHIQRLLDQGILVPCQSPWNTPLLPVKKPGTNDYRPVQDLREVNKRVEDIHPTVPNPYNLLSGLPPSHQWYTVLDLKDAFFCLRLHPTSQPLFAFEWRDPEMGISGQLTWTRLPQGFKNSPTLFNEALHRDLADFRIQHPDLILLQYVDDLLLAATSELDCQQGTRALLQTLGNLGYRASAKKAQICQKQVKYLGYLLKEGQRWLTEARKETVMGQPTPKTPRQLREFLGKAGFCRLFIPGFAEMAAPLYPLTKPGTLFNWGPDQQKAYQEIKQALLTAPALGLPDLTKPFELFVDEKQGYAKGVLTQKLGPWRRPVAYLSKKLDPVAAGWPPCLRMVAAIAVLTKDAGKLTMGQPLVILAPHAVEALVKQPPDRWLSNARMTHYQALLLDTDRVQFGPVVALNPATLLPLPEEGLQHNCLDILAEAHGTRPDLTDQPLPDADHTWYTDGSSLLQEGQRKAGAAVTTETEVIWAKALPAGTSAQRAELIALTQALKMAEGKKLNVYTDSRYAFATAHIHGEIYRRRGWLTSEGKEIKNKDEILALLKALFLPKRLSIIHCPGHQKGHSAEARGNRMADQAARKAAITETPDTSTLLGSSGGGEAAAKMASNFTQFVLVDNGGTGDVTVAPSNFANGIAEWISSNSRSQAYKVTCSVRQSSAQNRKYTIKVEVPKGAWRSYLNMELTIPIFATNSDCELIVKAMQGLLKDGNPIPSAIAANSGIYGGSGGSMASNFTQFVLVDNGGTGDVTVAPSNFANGIAEWISSNSRSQAYKVTCSVRQSSAQNRKYTIKVEVPKGAWRSYLNMELTIPIFATNSDCELIVKAMQGLLKDGNPIPSAIAANSGIYSGGSSGGSSGSETPGTSESATPESSGGSSGGSSDKKYSIGLDIGTNSVGWAVITDEYKVPSKKFKVLGNTDRHSIKKNLIGALLFDSGETAEATRLKRTARRRYTRRKNRICYLQEIFSNEMAKVDDSFFHRLEESFLVEEDKKHERHPIFGNIVDEVAYHEKYPTIYHLRKKLVDSTDKADLRLIYLALAHMIKFRGHFLIEGDLNPDNSDVDKLFIQLVQTYNQLFEENPINASGVDAKAILSARLSKSRRLENLIAQLPGEKKNGLFGNLIALSLGLTPNFKSNFDLAEDAKLQLSKDTYDDDLDNLLAQIGDQYADLFLAAKNLSDAILLSDILRVNTEITKAPLSASMIKRYDEHHQDLTLLKALVRQQLPEKYKEIFFDQSKNGYAGYIDGGASQEEFYKFIKPILEKMDGTEELLVKLNREDLLRKQRTFDNGSIPHQIHLGELHAILRRQEDFYPFLKDNREKIEKILTFRIPYYVGPLARGNSRFAWMTRKSEETITPWNFEEVVDKGASAQSFIERMTNFDKNLPNEKVLPKHSLLYEYFTVYNELTKVKYVTEGMRKPAFLSGEQKKAIVDLLFKTNRKVTVKQLKEDYFKKIECFDSVEISGVEDRFNASLGTYHDLLKIIKDKDFLDNEENEDILEDIVLTLTLFEDREMIEERLKTYAHLFDDKVMKQLKRRRYTGWGRLSRKLINGIRDKQSGKTILDFLKSDGFANRNFMQLIHDDSLTFKEDIQKAQVSGQGDSLHEHIANLAGSPAIKKGILQTVKVVDELVKVMGRHKPENIVIEMARENQTTQKGQKNSRERMKRIEEGIKELGSQILKEHPVENTQLQNEKLYLYYLQNGRDMYVDQELDINRLSDYDVDHIVPQSFLKDDSIDNKVLTRSDKARGKSDNVPSEEVVKKMKNYWRQLLNAKLITQRKFDNLTKAERGGLSELDKAGFIKRQLVETRQITKHVAQILDSRMNTKYDENDKLIREVKVITLKSKLVSDFRKDFQFYKVREINNYHHAHDAYLNAVVGTALIKKYPKLESEFVYGDYKVYDVRKMIAKSEQEIGKATAKYFFYSNIMNFFKTEITLANGEIRKRPLIETNGETGEIVWDKGRDFATVRKVLSMPQVNIVKKTEVQTGGFSKESILPKRNSDKLIARKKDWDPKKYGGFDSPTVAYSVLVVAKVEKGKSKKLKSVKELLGITIMERSSFEKNPIDFLEAKGYKEVKKDLIIKLPKYSLFELENGRKRMLASAGELQKGNELALPSKYVNFLYLASHYEKLKGSPEDNEQKQLFVEQHKHYLDEIIEQISEFSKRVILADANLDKVLSAYNKHRDKPIREQAENIIHLFTLTNLGAPAAFKYFDTTIDRKRYTSTKEVLDATLIHQSITGLYETRIDLSQLGGDKRTADGSEFESPKKKAKVE

SEQ ID NO: 16142 - protein, 2338 aa, synthetic construct
MPAAKRVKLDGGTLNIEDEHRLHETSKEPDVSLGSTWLSDFPQAWAETGGMGLAVRQAPLIIPLKATSTPVSIKQYPMSQEARLGIKPHIQRLLDQGILVPCQSPWNTPLLPVKKPGTNDYRPVQDLREVNKRVEDIHPTVPNPYNLLSGLPPSHQWYTVLDLKDAFFCLRLHPTSQPLFAFEWRDPEMGISGQLTWTRLPQGFKNSPTLFNEALHRDLADFRIQHPDLILLQYVDDLLLAATSELDCQQGTRALLQTLGNLGYRASAKKAQICQKQVKYLGYLLKEGQRWLTEARKETVMGQPTPKTPRQLREFLGKAGFCRLFIPGFAEMAAPLYPLTKPGTLFNWGPDQQKAYQEIKQALLTAPALGLPDLTKPFELFVDEKQGYAKGVLTQKLGPWRRPVAYLSKKLDPVAAGWPPCLRMVAAIAVLTKDAGKLTMGQPLVILAPHAVEALVKQPPDRWLSNARMTHYQALLLDTDRVQFGPVVALNPATLLPLPEEGLQHNCLDILAEAHGTRPDLTDQPLPDADHTWYTDGSSLLQEGQRKAGAAVTTETEVIWAKALPAGTSAQRAELIALTQALKMAEGKKLNVYTDSRYAFATAHIHGEIYRRRGWLTSEGKEIKNKDEILALLKALFLPKRLSIIHCPGHQKGHSAEARGNRMADQAARKAAITETPDTSTLLGSSGGGEAAAKMASNFTQFVLVDNGGTGDVTVAPSNFANGIAEWISSNSRSQAYKVTCSVRQSSAQNRKYTIKVEVPKGAWRSYLNMELTIPIFATNSDCELIVKAMQGLLKDGNPIPSAIAANSGIYGGSGGSMASNFTQFVLVDNGGTGDVTVAPSNFANGIAEWISSNSRSQAYKVTCSVRQSSAQNRKYTIKVEVPKGAWRSYLNMELTIPIFATNSDCELIVKAMQGLLKDGNPIPSAIAANSGIYGSSGSSGSSGSSGSSGSSDKKYSIGLDIGTNSVGWAVITDEYKVPSKKFKVLGNTDRHSIKKNLIGALLFDSGETAEATRLKRTARRRYTRRKNRICYLQEIFSNEMAKVDDSFFHRLEESFLVEEDKKHERHPIFGNIVDEVAYHEKYPTIYHLRKKLVDSTDKADLRLIYLALAHMIKFRGHFLIEGDLNPDNSDVDKLFIQLVQTYNQLFEENPINASGVDAKAILSARLSKSRRLENLIAQLPGEKKNGLFGNLIALSLGLTPNFKSNFDLAEDAKLQLSKDTYDDDLDNLLAQIGDQYADLFLAAKNLSDAILLSDILRVNTEITKAPLSASMIKRYDEHHQDLTLLKALVRQQLPEKYKEIFFDQSKNGYAGYIDGGASQEEFYKFIKPILEKMDGTEELLVKLNREDLLRKQRTFDNGSIPHQIHLGELHAILRRQEDFYPFLKDNREKIEKILTFRIPYYVGPLARGNSRFAWMTRKSEETITPWNFEEVVDKGASAQSFIERMTNFDKNLPNEKVLPKHSLLYEYFTVYNELTKVKYVTEGMRKPAFLSGEQKKAIVDLLFKTNRKVTVKQLKEDYFKKIECFDSVEISGVEDRFNASLGTYHDLLKIIKDKDFLDNEENEDILEDIVLTLTLFEDREMIEERLKTYAHLFDDKVMKQLKRRRYTGWGRLSRKLINGIRDKQSGKTILDFLKSDGFANRNFMQLIHDDSLTFKEDIQKAQVSGQGDSLHEHIANLAGSPAIKKGILQTVKVVDELVKVMGRHKPENIVIEMARENQTTQKGQKNSRERMKRIEEGIKELGSQILKEHPVENTQLQNEKLYLYYLQNGRDMYVDQELDINRLSDYDVDHIVPQSFLKDDSIDNKVLTRSDKARGKSDNVPSEEVVKKMKNYWRQLLNAKLITQRKFDNLTKAERGGLSELDKAGFIKRQLVETRQITKHVAQILDSRMNTKYDENDKLIREVKVITLKSKLVSDFRKDFQFYKVREINNYHHAHDAYLNAVVGTALIKKYPKLESEFVYGDYKVYDVRKMIAKSEQEIGKATAKYFFYSNIMNFFKTEITLANGEIRKRPLIETNGETGEIVWDKGRDFATVRKVLSMPQVNIVKKTEVQTGGFSKESILPKRNSDKLIARKKDWDPKKYGGFDSPTVAYSVLVVAKVEKGKSKKLKSVKELLGITIMERSSFEKNPIDFLEAKGYKEVKKDLIIKLPKYSLFELENGRKRMLASAGELQKGNELALPSKYVNFLYLASHYEKLKGSPEDNEQKQLFVEQHKHYLDEIIEQISEFSKRVILADANLDKVLSAYNKHRDKPIREQAENIIHLFTLTNLGAPAAFKYFDTTIDRKRYTSTKEVLDATLIHQSITGLYETRIDLSQLGGDKRTADGSEFESPKKKAKVE

SEQ ID NO: 16143 - protein, 2331 aa, synthetic construct
MPAAKRVKLDGGTLNIEDEHRLHETSKEPDVSLGSTWLSDFPQAWAETGGMGLAVRQAPLIIPLKATSTPVSIKQYPMSQEARLGIKPHIQRLLDQGILVPCQSPWNTPLLPVKKPGTNDYRPVQDLREVNKRVEDIHPTVPNPYNLLSGLPPSHQWYTVLDLKDAFFCLRLHPTSQPLFAFEWRDPEMGISGQLTWTRLPQGFKNSPTLFNEALHRDLADFRIQHPDLILLQYVDDLLLAATSELDCQQGTRALLQTLGNLGYRASAKKAQICQKQVKYLGYLLKEGQRWLTEARKETVMGQPTPKTPRQLREFLGKAGFCRLFIPGFAEMAAPLYPLTKPGTLFNWGPDQQKAYQEIKQALLTAPALGLPDLTKPFELFVDEKQGYAKGVLTQKLGPWRRPVAYLSKKLDPVAAGWPPCLRMVAAIAVLTKDAGKLTMGQPLVILAPHAVEALVKQPPDRWLSNARMTHYQALLLDTDRVQFGPVVALNPATLLPLPEEGLQHNCLDILAEAHGTRPDLTDQPLPDADHTWYTDGSSLLQEGQRKAGAAVTTETEVIWAKALPAGTSAQRAELIALTQALKMAEGKKLNVYTDSRYAFATAHIHGEIYRRRGWLTSEGKEIKNKDEILALLKALFLPKRLSIIHCPGHQKGHSAEARGNRMADQAARKAAITETPDTSTLLGSSGGGEAAAKMASNFTQFVLVDNGGTGDVTVAPSNFANGIAEWISSNSRSQAYKVTCSVRQSSAQNRKYTIKVEVPKGAWRSYLNMELTIPIFATNSDCELIVKAMQGLLKDGNPIPSAIAANSGIYGGSGGSMASNFTQFVLVDNGGTGDVTVAPSNFANGIAEWISSNSRSQAYKVTCSVRQSSAQNRKYTIKVEVPKGAWRSYLNMELTIPIFATNSDCELIVKAMQGLLKDGNPIPSAIAANSGIYGSSGGGEAAAKDKKYSIGLDIGTNSVGWAVITDEYKVPSKKFKVLGNTDRHSIKKNLIGALLFDSGETAEATRLKRTARRRYTRRKNRICYLQEIFSNEMAKVDDSFFHRLEESFLVEEDKKHERHPIFGNIVDEVAYHEKYPTIYHLRKKLVDSTDKADLRLIYLALAHMIKFRGHFLIEGDLNPDNSDVDKLFIQLVQTYNQLFEENPINASGVDAKAILSARLSKSRRLENLIAQLPGEKKNGLFGNLIALSLGLTPNFKSNFDLAEDAKLQLSKDTYDDDLDNLLAQIGDQYADLFLAAKNLSDAILLSDILRVNTEITKAPLSASMIKRYDEHHQDLTLLKALVRQQLPEKYKEIFFDQSKNGYAGYIDGGASQEEFYKFIKPILEKMDGTEELLVKLNREDLLRKQRTFDNGSIPHQIHLGELHAILRRQEDFYPFLKDNREKIEKILTFRIPYYVGPLARGNSRFAWMTRKSEETITPWNFEEVVDKGASAQSFIERMTNFDKNLPNEKVLPKHSLLYEYFTVYNELTKVKYVTEGMRKPAFLSGEQKKAIVDLLFKTNRKVTVKQLKEDYFKKIECFDSVEISGVEDRFNASLGTYHDLLKIIKDKDFLDNEENEDILEDIVLTLTLFEDREMIEERLKTYAHLFDDKVMKQLKRRRYTGWGRLSRKLINGIRDKQSGKTILDFLKSDGFANRNFMQLIHDDSLTFKEDIQKAQVSGQGDSLHEHIANLAGSPAIKKGILQTVKVVDELVKVMGRHKPENIVIEMARENQTTQKGQKNSRERMKRIEEGIKELGSQILKEHPVENTQLQNEKLYLYYLQNGRDMYVDQELDINRLSDYDVDHIVPQSFLKDDSIDNKVLTRSDKARGKSDNVPSEEVVKKMKNYWRQLLNAKLITQRKFDNLTKAERGGLSELDKAGFIKRQLVETRQITKHVAQILDSRMNTKYDENDKLIREVKVITLKSKLVSDFRKDFQFYKVREINNYHHAHDAYLNAVVGTALIKKYPKLESEFVYGDYKVYDVRKMIAKSEQEIGKATAKYFFYSNIMNFFKTEITLANGEIRKRPLIETNGETGEIVWDKGRDFATVRKVLSMPQVNIVKKTEVQTGGFSKESILPKRNSDKLIARKKDWDPKKYGGFDSPTVAYSVLVVAKVEKGKSKKLKSVKELLGITIMERSSFEKNPIDFLEAKGYKEVKKDLIIKLPKYSLFELENGRKRMLASAGELQKGNELALPSKYVNFLYLASHYEKLKGSPEDNEQKQLFVEQHKHYLDEIIEQISEFSKRVILADANLDKVLSAYNKHRDKPIREQAENIIHLFTLTNLGAPAAFKYFDTTIDRKRYTSTKEVLDATLIHQSITGLYETRIDLSQLGGDKRTADGSEFESPKKKAKVE

SEQ ID NO: 16144 - protein, 2622 aa, synthetic construct
MPAAKRVKLDGGTLNIEDEHRLHETSKEPDVSLGSTWLSDFPQAWAETGGMGLAVRQAPLIIPLKATSTPVSIKQYPMSQEARLGIKPHIQRLLDQGILVPCQSPWNTPLLPVKKPGTNDYRPVQDLREVNKRVEDIHPTVPNPYNLLSGLPPSHQWYTVLDLKDAFFCLRLHPTSQPLFAFEWRDPEMGISGQLTWTRLPQGFKNSPTLFNEALHRDLADFRIQHPDLILLQYVDDLLLAATSELDCQQGTRALLQTLGNLGYRASAKKAQICQKQVKYLGYLLKEGQRWLTEARKETVMGQPTPKTPRQLREFLGKAGFCRLFIPGFAEMAAPLYPLTKPGTLFNWGPDQQKAYQEIKQALLTAPALGLPDLTKPFELFVDEKQGYAKGVLTQKLGPWRRPVAYLSKKLDPVAAGWPPCLRMVAAIAVLTKDAGKLTMGQPLVILAPHAVEALVKQPPDRWLSNARMTHYQALLLDTDRVQFGPVVALNPATLLPLPEEGLQHNCLDILAEAHGTRPDLTDQPLPDADHTWYTDGSSLLQEGQRKAGAAVTTETEVIWAKALPAGTSAQRAELIALTQALKMAEGKKLNVYTDSRYAFATAHIHGEIYRRRGWLTSEGKEIKNKDEILALLKALFLPKRLSIIHCPGHQKGHSAEARGNRMADQAARKAAITETPDTSTLLGSSGGGEAAAKMASNFTQFVLVDNGGTGDVTVAPSNFANGIAEWISSNSRSQAYKVTCSVRQSSAQNRKYTIKVEVPKGAWRSYLNMELTIPIFATNSDCELIVKAMQGLLKDGNPIPSAIAANSGIYGGSGGSMASNFTQFVLVDNGGTGDVTVAPSNFANGIAEWISSNSRSQAYKVTCSVRQSSAQNRKYTIKVEVPKGAWRSYLNMELTIPIFATNSDCELIVKAMQGLLKDGNPIPSAIAANSGIYGGGSGGGSGGGSGGGSMASNFTQFVLVDNGGTGDVTVAPSNFANGIAEWISSNSRSQAYKVTCSVRQSSAQNRKYTIKVEVPKGAWRSYLNMELTIPIFATNSDCELIVKAMQGLLKDGNPIPSAIAANSGIYGGSGGSMASNFTQFVLVDNGGTGDVTVAPSNFANGIAEWISSNSRSQAYKVTCSVRQSSAQNRKYTIKVEVPKGAWRSYLNMELTIPIFATNSDCELIVKAMQGLLKDGNPIPSAIAANSGIYAEAAAKEAAAKEAAAKEAAAKALEAEAAAKEAAAKEAAAKEAAAKADKKYSIGLDIGTNSVGWAVITDEYKVPSKKFKVLGNTDRHSIKKNLIGALLFDSGETAEATRLKRTARRRYTRRKNRICYLQEIFSNEMAKVDDSFFHRLEESFLVEEDKKHERHPIFGNIVDEVAYHEKYPTIYHLRKKLVDSTDKADLRLIYLALAHMIKFRGHFLIEGDLNPDNSDVDKLFIQLVQTYNQLFEENPINASGVDAKAILSARLSKSRRLENLIAQLPGEKKNGLFGNLIALSLGLTPNFKSNFDLAEDAKLQLSKDTYDDDLDNLLAQIGDQYADLFLAAKNLSDAILLSDILRVNTEITKAPLSASMIKRYDEHHQDLTLLKALVRQQLPEKYKEIFFDQSKNGYAGYIDGGASQEEFYKFIKPILEKMDGTEELLVKLNREDLLRKQRTFDNGSIPHQIHLGELHAILRRQEDFYPFLKDNREKIEKILTFRIPYYVGPLARGNSRFAWMTRKSEETITPWNFEEVVDKGASAQSFIERMTNFDKNLPNEKVLPKHSLLYEYFTVYNELTKVKYVTEGMRKPAFLSGEQKKAIVDLLFKTNRKVTVKQLKEDYFKKIECFDSVEISGVEDRFNASLGTYHDLLKIIKDKDFLDNEENEDILEDIVLTLTLFEDREMIEERLKTYAHLFDDKVMKQLKRRRYTGWGRLSRKLINGIRDKQSGKTILDFLKSDGFANRNFMQLIHDDSLTFKEDIQKAQVSGQGDSLHEHIANLAGSPAIKKGILQTVKVVDELVKVMGRHKPENIVIEMARENQTTQKGQKNSRERMKRIEEGIKELGSQILKEHPVENTQLQNEKLYLYYLQNGRDMYVDQELDINRLSDYDVDHIVPQSFLKDDSIDNKVLTRSDKARGKSDNVPSEEVVKKMKNYWRQLLNAKLITQRKFDNLTKAERGGLSELDKAGFIKRQLVETRQITKHVAQILDSRMNTKYDENDKLIREVKVITLKSKLVSDFRKDFQFYKVREINNYHHAHDAYLNAVVGTALIKKYPKLESEFVYGDYKVYDVRKMIAKSEQEIGKATAKYFFYSNIMNFFKTEITLANGEIRKRPLIETNGETGEIVWDKGRDFATVRKVLSMPQVNIVKKTEVQTGGFSKESILPKRNSDKLIARKKDWDPKKYGGFDSPTVAYSVLVVAKVEKGKSKKLKSVKELLGITIMERSSFEKNPIDFLEAKGYKEVKKDLIIKLPKYSLFELENGRKRMLASAGELQKGNELALPSKYVNFLYLASHYEKLKGSPEDNEQKQLFVEQHKHYLDEIIEQISEFSKRVILADANLDKVLSAYNKHRDKPIREQAENIIHLFTLTNLGAPAAFKYFDTTIDRKRYTSTKEVLDATLIHQSITGLYETRIDLSQLGGDKRTADGSEFESPKKKAKVE

SEQ ID NO: 16145 - protein, 2609 aa, synthetic construct
MPAAKRVKLDGGTLNIEDEHRLHETSKEPDVSLGSTWLSDFPQAWAETGGMGLAVRQAPLIIPLKATSTPVSIKQYPMSQEARLGIKPHIQRLLDQGILVPCQSPWNTPLLPVKKPGTNDYRPVQDLREVNKRVEDIHPTVPNPYNLLSGLPPSHQWYTVLDLKDAFFCLRLHPTSQPLFAFEWRDPEMGISGQLTWTRLPQGFKNSPTLFNEALHRDLADFRIQHPDLILLQYVDDLLLAATSELDCQQGTRALLQTLGNLGYRASAKKAQICQKQVKYLGYLLKEGQRWLTEARKETVMGQPTPKTPRQLREFLGKAGFCRLFIPGFAEMAAPLYPLTKPGTLFNWGPDQQKAYQEIKQALLTAPALGLPDLTKPFELFVDEKQGYAKGVLTQKLGPWRRPVAYLSKKLDPVAAGWPPCLRMVAAIAVLTKDAGKLTMGQPLVILAPHAVEALVKQPPDRWLSNARMTHYQALLLDTDRVQFGPVVALNPATLLPLPEEGLQHNCLDILAEAHGTRPDLTDQPLPDADHTWYTDGSSLLQEGQRKAGAAVTTETEVIWAKALPAGTSAQRAELIALTQALKMAEGKKLNVYTDSRYAFATAHIHGEIYRRRGWLTSEGKEIKNKDEILALLKALFLPKRLSIIHCPGHQKGHSAEARGNRMADQAARKAAITETPDTSTLLGSSGGGEAAAKMASNFTQFVLVDNGGTGDVTVAPSNFANGIAEWISSNSRSQAYKVTCSVRQSSAQNRKYTIKVEVPKGAWRSYLNMELTIPIFATNSDCELIVKAMQGLLKDGNPIPSAIAANSGIYGGSGGSMASNFTQFVLVDNGGTGDVTVAPSNFANGIAEWISSNSRSQAYKVTCSVRQSSAQNRKYTIKVEVPKGAWRSYLNMELTIPIFATNSDCELIVKAMQGLLKDGNPIPSAIAANSGIYGGGSGGGSGGGSGGGSMASNFTQFVLVDNGGTGDVTVAPSNFANGIAEWISSNSRSQAYKVTCSVRQSSAQNRKYTIKVEVPKGAWRSYLNMELTIPIFATNSDCELIVKAMQGLLKDGNPIPSAIAANSGIYGGSGGSMASNFTQFVLVDNGGTGDVTVAPSNFANGIAEWISSNSRSQAYKVTCSVRQSSAQNRKYTIKVEVPKGAWRSYLNMELTIPIFATNSDCELIVKAMQGLLKDGNPIPSAIAANSGIYSGGSSGGSSGSETPGTSESATPESSGGSSGGSSDKKYSIGLDIGTNSVGWAVITDEYKVPSKKFKVLGNTDRHSIKKNLIGALLFDSGETAEATRLKRTARRRYTRRKNRICYLQEIFSNEMAKVDDSFFHRLEESFLVEEDKKHERHPIFGNIVDEVAYHEKYPTIYHLRKKLVDSTDKADLRLIYLALAHMIKFRGHFLIEGDLNPDNSDVDKLFIQLVQTYNQLFEENPINASGVDAKAILSARLSKSRRLENLIAQLPGEKKNGLFGNLIALSLGLTPNFKSNFDLAEDAKLQLSKDTYDDDLDNLLAQIGDQYADLFLAAKNLSDAILLSDILRVNTEITKAPLSASMIKRYDEHHQDLTLLKALVRQQLPEKYKEIFFDQSKNGYAGYIDGGASQEEFYKFIKPILEKMDGTEELLVKLNREDLLRKQRTFDNGSIPHQIHLGELHAILRRQEDFYPFLKDNREKIEKILTFRIPYYVGPLARGNSRFAWMTRKSEETITPWNFEEVVDKGASAQSFIERMTNFDKNLPNEKVLPKHSLLYEYFTVYNELTKVKYVTEGMRKPAFLSGEQKKAIVDLLFKTNRKVTVKQLKEDYFKKIECFDSVEISGVEDRFNASLGTYHDLLKIIKDKDFLDNEENEDILEDIVLTLTLFEDREMIEERLKTYAHLFDDKVMKQLKRRRYTGWGRLSRKLINGIRDKQSGKTILDFLKSDGFANRNFMQLIHDDSLTFKEDIQKAQVSGQGDSLHEHIANLAGSPAIKKGILQTVKVVDELVKVMGRHKPENIVIEMARENQTTQKGQKNSRERMKRIEEGIKELGSQILKEHPVENTQLQNEKLYLYYLQNGRDMYVDQELDINRLSDYDVDHIVPQSFLKDDSIDNKVLTRSDKARGKSDNVPSEEVVKKMKNYWRQLLNAKLITQRKFDNLTKAERGGLSELDKAGFIKRQLVETRQITKHVAQILDSRMNTKYDENDKLIREVKVITLKSKLVSDFRKDFQFYKVREINNYHHAHDAYLNAVVGTALIKKYPKLESEFVYGDYKVYDVRKMIAKSEQEIGKATAKYFFYSNIMNFFKTEITLANGEIRKRPLIETNGETGEIVWDKGRDFATVRKVLSMPQVNIVKKTEVQTGGFSKESILPKRNSDKLIARKKDWDPKKYGGFDSPTVAYSVLVVAKVEKGKSKKLKSVKELLGITIMERSSFEKNPIDFLEAKGYKEVKKDLIIKLPKYSLFELENGRKRMLASAGELQKGNELALPSKYVNFLYLASHYEKLKGSPEDNEQKQLFVEQHKHYLDEIIEQISEFSKRVILADANLDKVLSAYNKHRDKPIREQAENIIHLFTLTNLGAPAAFKYFDTTIDRKRYTSTKEVLDATLIHQSITGLYETRIDLSQLGGDKRTADGSEFESPKKKAKVE

SEQ ID NO: 16146 - protein, 2594 aa, synthetic construct
MPAAKRVKLDGGTLNIEDEHRLHETSKEPDVSLGSTWLSDFPQAWAETGGMGLAVRQAPLIIPLKATSTPVSIKQYPMSQEARLGIKPHIQRLLDQGILVPCQSPWNTPLLPVKKPGTNDYRPVQDLREVNKRVEDIHPTVPNPYNLLSGLPPSHQWYTVLDLKDAFFCLRLHPTSQPLFAFEWRDPEMGISGQLTWTRLPQGFKNSPTLFNEALHRDLADFRIQHPDLILLQYVDDLLLAATSELDCQQGTRALLQTLGNLGYRASAKKAQICQKQVKYLGYLLKEGQRWLTEARKETVMGQPTPKTPRQLREFLGKAGFCRLFIPGFAEMAAPLYPLTKPGTLFNWGPDQQKAYQEIKQALLTAPALGLPDLTKPFELFVDEKQGYAKGVLTQKLGPWRRPVAYLSKKLDPVAAGWPPCLRMVAAIAVLTKDAGKLTMGQPLVILAPHAVEALVKQPPDRWLSNARMTHYQALLLDTDRVQFGPVVALNPATLLPLPEEGLQHNCLDILAEAHGTRPDLTDQPLPDADHTWYTDGSSLLQEGQRKAGAAVTTETEVIWAKALPAGTSAQRAELIALTQALKMAEGKKLNVYTDSRYAFATAHIHGEIYRRRGWLTSEGKEIKNKDEILALLKALFLPKRLSIIHCPGHQKGHSAEARGNRMADQAARKAAITETPDTSTLLGSSGGGEAAAKMASNFTQFVLVDNGGTGDVTVAPSNFANGIAEWISSNSRSQAYKVTCSVRQSSAQNRKYTIKVEVPKGAWRSYLNMELTIPIFATNSDCELIVKAMQGLLKDGNPIPSAIAANSGIYGGSGGSMASNFTQFVLVDNGGTGDVTVAPSNFANGIAEWISSNSRSQAYKVTCSVRQSSAQNRKYTIKVEVPKGAWRSYLNMELTIPIFATNSDCELIVKAMQGLLKDGNPIPSAIAANSGIYGGGSGGGSGGGSGGGSMASNFTQFVLVDNGGTGDVTVAPSNFANGIAEWISSNSRSQAYKVTCSVRQSSAQNRKYTIKVEVPKGAWRSYLNMELTIPIFATNSDCELIVKAMQGLLKDGNPIPSAIAANSGIYGGSGGSMASNFTQFVLVDNGGTGDVTVAPSNFANGIAEWISSNSRSQAYKVTCSVRQSSAQNRKYTIKVEVPKGAWRSYLNMELTIPIFATNSDCELIVKAMQGLLKDGNPIPSAIAANSGIYGSSGSSGSSGSSGSSGSSDKKYSIGLDIGTNSVGWAVITDEYKVPSKKFKVLGNTDRHSIKKNLIGALLFDSGETAEATRLKRTARRRYTRRKNRICYLQEIFSNEMAKVDDSFFHRLEESFLVEEDKKHERHPIFGNIVDEVAYHEKYPTIYHLRKKLVDSTDKADLRLIYLALAHMIKFRGHFLIEGDLNPDNSDVDKLFIQLVQTYNQLFEENPINASGVDAKAILSARLSKSRRLENLIAQLPGEKKNGLFGNLIALSLGLTPNFKSNFDLAEDAKLQLSKDTYDDDLDNLLAQIGDQYADLFLAAKNLSDAILLSDILRVNTEITKAPLSASMIKRYDEHHQDLTLLKALVRQQLPEKYKEIFFDQSKNGYAGYIDGGASQEEFYKFIKPILEKMDGTEELLVKLNREDLLRKQRTFDNGSIPHQIHLGELHAILRRQEDFYPFLKDNREKIEKILTFRIPYYVGPLARGNSRFAWMTRKSEETITPWNFEEVVDKGASAQSFIERMTNFDKNLPNEKVLPKHSLLYEYFTVYNELTKVKYVTEGMRKPAFLSGEQKKAIVDLLFKTNRKVTVKQLKEDYFKKIECFDSVEISGVEDRFNASLGTYHDLLKIIKDKDFLDNEENEDILEDIVLTLTLFEDREMIEERLKTYAHLFDDKVMKQLKRRRYTGWGRLSRKLINGIRDKQSGKTILDFLKSDGFANRNFMQLIHDDSLTFKEDIQKAQVSGQGDSLHEHIANLAGSPAIKKGILQTVKVVDELVKVMGRHKPENIVIEMARENQTTQKGQKNSRERMKRIEEGIKELGSQILKEHPVENTQLQNEKLYLYYLQNGRDMYVDQELDINRLSDYDVDHIVPQSFLKDDSIDNKVLTRSDKARGKSDNVPSEEVVKKMKNYWRQLLNAKLITQRKFDNLTKAERGGLSELDKAGFIKRQLVETRQITKHVAQILDSRMNTKYDENDKLIREVKVITLKSKLVSDFRKDFQFYKVREINNYHHAHDAYLNAVVGTALIKKYPKLESEFVYGDYKVYDVRKMIAKSEQEIGKATAKYFFYSNIMNFFKTEITLANGEIRKRPLIETNGETGEIVWDKGRDFATVRKVLSMPQVNIVKKTEVQTGGFSKESILPKRNSDKLIARKKDWDPKKYGGFDSPTVAYSVLVVAKVEKGKSKKLKSVKELLGITIMERSSFEKNPIDFLEAKGYKEVKKDLIIKLPKYSLFELENGRKRMLASAGELQKGNELALPSKYVNFLYLASHYEKLKGSPEDNEQKQLFVEQHKHYLDEIIEQISEFSKRVILADANLDKVLSAYNKHRDKPIREQAENIIHLFTLTNLGAPAAFKYFDTTIDRKRYTSTKEVLDATLIHQSITGLYETRIDLSQLGGDKRTADGSEFESPKKKAKVE

SEQ ID NO: 16147 - protein, 2587 aa, synthetic construct
MPAAKRVKLDGGTLNIEDEHRLHETSKEPDVSLGSTWLSDFPQAWAETGGMGLAVRQAPLIIPLKATSTPVSIKQYPMSQEARLGIKPHIQRLLDQGILVPCQSPWNTPLLPVKKPGTNDYRPVQDLREVNKRVEDIHPTVPNPYNLLSGLPPSHQWYTVLDLKDAFFCLRLHPTSQPLFAFEWRDPEMGISGQLTWTRLPQGFKNSPTLFNEALHRDLADFRIQHPDLILLQYVDDLLLAATSELDCQQGTRALLQTLGNLGYRASAKKAQICQKQVKYLGYLLKEGQRWLTEARKETVMGQPTPKTPRQLREFLGKAGFCRLFIPGFAEMAAPLYPLTKPGTLFNWGPDQQKAYQEIKQALLTAPALGLPDLTKPFELFVDEKQGYAKGVLTQKLGPWRRPVAYLSKKLDPVAAGWPPCLRMVAAIAVLTKDAGKLTMGQPLVILAPHAVEALVKQPPDRWLSNARMTHYQALLLDTDRVQFGPVVALNPATLLPLPEEGLQHNCLDILAEAHGTRPDLTDQPLPDADHTWYTDGSSLLQEGQRKAGAAVTTETEVIWAKALPAGTSAQRAELIALTQALKMAEGKKLNVYTDSRYAFATAHIHGEIYRRRGWLTSEGKEIKNKDEILALLKALFLPKRLSIIHCPGHQKGHSAEARGNRMADQAARKAAITETPDTSTLLGSSGGGEAAAKMASNFTQFVLVDNGGTGDVTVAPSNFANGIAEWISSNSRSQAYKVTCSVRQSSAQNRKYTIKVEVPKGAWRSYLNMELTIPIFATNSDCELIVKAMQGLLKDGNPIPSAIAANSGIYGGSGGSMASNFTQFVLVDNGGTGDVTVAPSNFANGIAEWISSNSRSQAYKVTCSVRQSSAQNRKYTIKVEVPKGAWRSYLNMELTIPIFATNSDCELIVKAMQGLLKDGNPIPSAIAANSGIYGGGSGGGSGGGSGGGSMASNFTQFVLVDNGGTGDVTVAPSNFANGIAEWISSNSRSQAYKVTCSVRQSSAQNRKYTIKVEVPKGAWRSYLNMELTIPIFATNSDCELIVKAMQGLLKDGNPIPSAIAANSGIYGGSGGSMASNFTQFVLVDNGGTGDVTVAPSNFANGIAEWISSNSRSQAYKVTCSVRQSSAQNRKYTIKVEVPKGAWRSYLNMELTIPIFATNSDCELIVKAMQGLLKDGNPIPSAIAANSGIYGSSGGGEAAAKDKKYSIGLDIGTNSVGWAVITDEYKVPSKKFKVLGNTDRHSIKKNLIGALLFDSGETAEATRLKRTARRRYTRRKNRICYLQEIFSNEMAKVDDSFFHRLEESFLVEEDKKHERHPIFGNIVDEVAYHEKYPTIYHLRKKLVDSTDKADLRLIYLALAHMIKFRGHFLIEGDLNPDNSDVDKLFIQLVQTYNQLFEENPINASGVDAKAILSARLSKSRRLENLIAQLPGEKKNGLFGNLIALSLGLTPNFKSNFDLAEDAKLQLSKDTYDDDLDNLLAQIGDQYADLFLAAKNLSDAILLSDILRVNTEITKAPLSASMIKRYDEHHQDLTLLKALVRQQLPEKYKEIFFDQSKNGYAGYIDGGASQEEFYKFIKPILEKMDGTEELLVKLNREDLLRKQRTFDNGSIPHQIHLGELHAILRRQEDFYPFLKDNREKIEKILTFRIPYYVGPLARGNSRFAWMTRKSEETITPWNFEEVVDKGASAQSFIERMTNFDKNLPNEKVLPKHSLLYEYFTVYNELTKVKYVTEGMRKPAFLSGEQKKAIVDLLFKTNRKVTVKQLKEDYFKKIECFDSVEISGVEDRFNASLGTYHDLLKIIKDKDFLDNEENEDILEDIVLTLTLFEDREMIEERLKTYAHLFDDKVMKQLKRRRYTGWGRLSRKLINGIRDKQSGKTILDFLKSDGFANRNFMQLIHDDSLTFKEDIQKAQVSGQGDSLHEHIANLAGSPAIKKGILQTVKVVDELVKVMGRHKPENIVIEMARENQTTQKGQKNSRERMKRIEEGIKELGSQILKEHPVENTQLQNEKLYLYYLQNGRDMYVDQELDINRLSDYDVDHIVPQSFLKDDSIDNKVLTRSDKARGKSDNVPSEEVVKKMKNYWRQLLNAKLITQRKFDNLTKAERGGLSELDKAGFIKRQLVETRQITKHVAQILDSRMNTKYDENDKLIREVKVITLKSKLVSDFRKDFQFYKVREINNYHHAHDAYLNAVVGTALIKKYPKLESEFVYGDYKVYDVRKMIAKSEQEIGKATAKYFFYSNIMNFFKTEITLANGEIRKRPLIETNGETGEIVWDKGRDFATVRKVLSMPQVNIVKKTEVQTGGFSKESILPKRNSDKLIARKKDWDPKKYGGFDSPTVAYSVLVVAKVEKGKSKKLKSVKELLGITIMERSSFEKNPIDFLEAKGYKEVKKDLIIKLPKYSLFELENGRKRMLASAGELQKGNELALPSKYVNFLYLASHYEKLKGSPEDNEQKQLFVEQHKHYLDEIIEQISEFSKRVILADANLDKVLSAYNKHRDKPIREQAENIIHLFTLTNLGAPAAFKYFDTTIDRKRYTSTKEVLDATLIHQSITGLYETRIDLSQLGGDKRTADGSEFESPKKKAKVE

SEQ ID NO: 16148 - protein, 2280 aa, synthetic construct
MPAAKRVKLDGGTAPLEEEYRLFLEAPIQNVTLLEQWKREIPKVWAEINPPGLASTQAPIHVQLLSTALPVRVRQYPITLEAKRSLRETIRKFRAAGILRPVHSPWNTPLLPVRKSGTSEYRMVQDLREVNKRVETIHPTVPNPYTLLSLLPPDRIWYSVLDLKDAFFCIPLAPESQLIFAFEWADAEEGESGQLTWTRLPQGFKNSPTLFNEALNRDLQGFRLDHPSVSLLQYVDDLLIAADTQAACLSATRDLLMTLAELGYRVSGKKAQLCQEEVTYLGFKIHKGSRSLSNSRTQAILQIPVPKTKRQVREFLGKIGYCRLFIPGFAELAQPLYAATRPGNDPLVWGEKEEEAFQSLKLALTQPPALALPSLDKPFQLFVEETSGAAKGVLTQALGPWKRPVAYLSKRLDPVAAGWPRCLRAIAAAALLTREASKLTFGQDIEITSSHNLESLLRSPPDKWLTNARITQYQVLLLDPPRVRFKQTAALNPATLLPETDDTLPIHHCLDTLDSLTSTRPDLTDQPLAQAEATLFTDGSSYIRDGKRYAGAAVVTLDSVIWAEPLPIGTSAQKAELIALTKALEWSKDKSVNIYTDSRYAFATLHVHGMIYRERGWLTAGGKAIKNAPEILALLTAVWLPKRVAVMHCKGHQKDDAPTSTGNRRADEVAREVAIRPLSTQATISAEAAAKEAAAKEAAAKEAAAKALEAEAAAKEAAAKEAAAKEAAAKAMASNFTQFVLVDNGGTGDVTVAPSNFANGIAEWISSNSRSQAYKVTCSVRQSSAQNRKYTIKVEVPKGAWRSYLNMELTIPIFATNSDCELIVKAMQGLLKDGNPIPSAIAANSGIYAEAAAKEAAAKEAAAKEAAAKALEAEAAAKEAAAKEAAAKEAAAKADKKYSIGLDIGTNSVGWAVITDEYKVPSKKFKVLGNTDRHSIKKNLIGALLFDSGETAEATRLKRTARRRYTRRKNRICYLQEIFSNEMAKVDDSFFHRLEESFLVEEDKKHERHPIFGNIVDEVAYHEKYPTIYHLRKKLVDSTDKADLRLIYLALAHMIKFRGHFLIEGDLNPDNSDVDKLFIQLVQTYNQLFEENPINASGVDAKAILSARLSKSRRLENLIAQLPGEKKNGLFGNLIALSLGLTPNFKSNFDLAEDAKLQLSKDTYDDDLDNLLAQIGDQYADLFLAAKNLSDAILLSDILRVNTEITKAPLSASMIKRYDEHHQDLTLLKALVRQQLPEKYKEIFFDQSKNGYAGYIDGGASQEEFYKFIKPILEKMDGTEELLVKLNREDLLRKQRTFDNGSIPHQIHLGELHAILRRQEDFYPFLKDNREKIEKILTFRIPYYVGPLARGNSRFAWMTRKSEETITPWNFEEVVDKGASAQSFIERMTNFDKNLPNEKVLPKHSLLYEYFTVYNELTKVKYVTEGMRKPAFLSGEQKKAIVDLLFKTNRKVTVKQLKEDYFKKIECFDSVEISGVEDRFNASLGTYHDLLKIIKDKDFLDNEENEDILEDIVLTLTLFEDREMIEERLKTYAHLFDDKVMKQLKRRRYTGWGRLSRKLINGIRDKQSGKTILDFLKSDGFANRNFMQLIHDDSLTFKEDIQKAQVSGQGDSLHEHIANLAGSPAIKKGILQTVKVVDELVKVMGRHKPENIVIEMARENQTTQKGQKNSRERMKRIEEGIKELGSQILKEHPVENTQLQNEKLYLYYLQNGRDMYVDQELDINRLSDYDVDHIVPQSFLKDDSIDNKVLTRSDKARGKSDNVPSEEVVKKMKNYWRQLLNAKLITQRKFDNLTKAERGGLSELDKAGFIKRQLVETRQITKHVAQILDSRMNTKYDENDKLIREVKVITLKSKLVSDFRKDFQFYKVREINNYHHAHDAYLNAVVGTALIKKYPKLESEFVYGDYKVYDVRKMIAKSEQEIGKATAKYFFYSNIMNFFKTEITLANGEIRKRPLIETNGETGEIVWDKGRDFATVRKVLSMPQVNIVKKTEVQTGGFSKESILPKRNSDKLIARKKDWDPKKYGGFDSPTVAYSVLVVAKVEKGKSKKLKSVKELLGITIMERSSFEKNPIDFLEAKGYKEVKKDLIIKLPKYSLFELENGRKRMLASAGELQKGNELALPSKYVNFLYLASHYEKLKGSPEDNEQKQLFVEQHKHYLDEIIEQISEFSKRVILADANLDKVLSAYNKHRDKPIREQAENIIHLFTLTNLGAPAAFKYFDTTIDRKRYTSTKEVLDATLIHQSITGLYETRIDLSQLGGDKRTADGSEFESPKKKAKVE

SEQ ID NO: 16149 - protein, 2267 aa, synthetic construct
MPAAKRVKLDGGTAPLEEEYRLFLEAPIQNVTLLEQWKREIPKVWAEINPPGLASTQAPIHVQLLSTALPVRVRQYPITLEAKRSLRETIRKFRAAGILRPVHSPWNTPLLPVRKSGTSEYRMVQDLREVNKRVETIHPTVPNPYTLLSLLPPDRIWYSVLDLKDAFFCIPLAPESQLIFAFEWADAEEGESGQLTWTRLPQGFKNSPTLFNEALNRDLQGFRLDHPSVSLLQYVDDLLIAADTQAACLSATRDLLMTLAELGYRVSGKKAQLCQEEVTYLGFKIHKGSRSLSNSRTQAILQIPVPKTKRQVREFLGKIGYCRLFIPGFAELAQPLYAATRPGNDPLVWGEKEEEAFQSLKLALTQPPALALPSLDKPFQLFVEETSGAAKGVLTQALGPWKRPVAYLSKRLDPVAAGWPRCLRAIAAAALLTREASKLTFGQDIEITSSHNLESLLRSPPDKWLTNARITQYQVLLLDPPRVRFKQTAALNPATLLPETDDTLPIHHCLDTLDSLTSTRPDLTDQPLAQAEATLFTDGSSYIRDGKRYAGAAVVTLDSVIWAEPLPIGTSAQKAELIALTKALEWSKDKSVNIYTDSRYAFATLHVHGMIYRERGWLTAGGKAIKNAPEILALLTAVWLPKRVAVMHCKGHQKDDAPTSTGNRRADEVAREVAIRPLSTQATISAEAAAKEAAAKEAAAKEAAAKALEAEAAAKEAAAKEAAAKEAAAKAMASNFTQFVLVDNGGTGDVTVAPSNFANGIAEWISSNSRSQAYKVTCSVRQSSAQNRKYTIKVEVPKGAWRSYLNMELTIPIFATNSDCELIVKAMQGLLKDGNPIPSAIAANSGIYSGGSSGGSSGSETPGTSESATPESSGGSSGGSSDKKYSIGLDIGTNSVGWAVITDEYKVPSKKFKVLGNTDRHSIKKNLIGALLFDSGETAEATRLKRTARRRYTRRKNRICYLQEIFSNEMAKVDDSFFHRLEESFLVEEDKKHERHPIFGNIVDEVAYHEKYPTIYHLRKKLVDSTDKADLRLIYLALAHMIKFRGHFLIEGDLNPDNSDVDKLFIQLVQTYNQLFEENPINASGVDAKAILSARLSKSRRLENLIAQLPGEKKNGLFGNLIALSLGLTPNFKSNFDLAEDAKLQLSKDTYDDDLDNLLAQIGDQYADLFLAAKNLSDAILLSDILRVNTEITKAPLSASMIKRYDEHHQDLTLLKALVRQQLPEKYKEIFFDQSKNGYAGYIDGGASQEEFYKFIKPILEKMDGTEELLVKLNREDLLRKQRTFDNGSIPHQIHLGELHAILRRQEDFYPFLKDNREKIEKILTFRIPYYVGPLARGNSRFAWMTRKSEETITPWNFEEVVDKGASAQSFIERMTNFDKNLPNEKVLPKHSLLYEYFTVYNELTKVKYVTEGMRKPAFLSGEQKKAIVDLLFKTNRKVTVKQLKEDYFKKIECFDSVEISGVEDRFNASLGTYHDLLKIIKDKDFLDNEENEDILEDIVLTLTLFEDREMIEERLKTYAHLFDDKVMKQLKRRRYTGWGRLSRKLINGIRDKQSGKTILDFLKSDGFANRNFMQLIHDDSLTFKEDIQKAQVSGQGDSLHEHIANLAGSPAIKKGILQTVKVVDELVKVMGRHKPENIVIEMARENQTTQKGQKNSRERMKRIEEGIKELGSQILKEHPVENTQLQNEKLYLYYLQNGRDMYVDQELDINRLSDYDVDHIVPQSFLKDDSIDNKVLTRSDKARGKSDNVPSEEVVKKMKNYWRQLLNAKLITQRKFDNLTKAERGGLSELDKAGFIKRQLVETRQITKHVAQILDSRMNTKYDENDKLIREVKVITLKSKLVSDFRKDFQFYKVREINNYHHAHDAYLNAVVGTALIKKYPKLESEFVYGDYKVYDVRKMIAKSEQEIGKATAKYFFYSNIMNFFKTEITLANGEIRKRPLIETNGETGEIVWDKGRDFATVRKVLSMPQVNIVKKTEVQTGGFSKESILPKRNSDKLIARKKDWDPKKYGGFDSPTVAYSVLVVAKVEKGKSKKLKSVKELLGITIMERSSFEKNPIDFLEAKGYKEVKKDLIIKLPKYSLFELENGRKRMLASAGELQKGNELALPSKYVNFLYLASHYEKLKGSPEDNEQKQLFVEQHKHYLDEIIEQISEFSKRVILADANLDKVLSAYNKHRDKPIREQAENIIHLFTLTNLGAPAAFKYFDTTIDRKRYTSTKEVLDATLIHQSITGLYETRIDLSQLGGDKRTADGSEFESPKKKAKVE

SEQ ID NO: 16150 - protein, 2252 aa, synthetic construct
MPAAKRVKLDGGTAPLEEEYRLFLEAPIQNVTLLEQWKREIPKVWAEINPPGLASTQAPIHVQLLSTALPVRVRQYPITLEAKRSLRETIRKFRAAGILRPVHSPWNTPLLPVRKSGTSEYRMVQDLREVNKRVETIHPTVPNPYTLLSLLPPDRIWYSVLDLKDAFFCIPLAPESQLIFAFEWADAEEGESGQLTWTRLPQGFKNSPTLFNEALNRDLQGFRLDHPSVSLLQYVDDLLIAADTQAACLSATRDLLMTLAELGYRVSGKKAQLCQEEVTYLGFKIHKGSRSLSNSRTQAILQIPVPKTKRQVREFLGKIGYCRLFIPGFAELAQPLYAATRPGNDPLVWGEKEEEAFQSLKLALTQPPALALPSLDKPFQLFVEETSGAAKGVLTQALGPWKRPVAYLSKRLDPVAAGWPRCLRAIAAAALLTREASKLTFGQDIEITSSHNLESLLRSPPDKWLTNARITQYQVLLLDPPRVRFKQTAALNPATLLPETDDTLPIHHCLDTLDSLTSTRPDLTDQPLAQAEATLFTDGSSYIRDGKRYAGAAVVTLDSVIWAEPLPIGTSAQKAELIALTKALEWSKDKSVNIYTDSRYAFATLHVHGMIYRERGWLTAGGKAIKNAPEILALLTAVWLPKRVAVMHCKGHQKDDAPTSTGNRRADEVAREVAIRPLSTQATISAEAAAKEAAAKEAAAKEAAAKALEAEAAAKEAAAKEAAAKEAAAKAMASNFTQFVLVDNGGTGDVTVAPSNFANGIAEWISSNSRSQAYKVTCSVRQSSAQNRKYTIKVEVPKGAWRSYLNMELTIPIFATNSDCELIVKAMQGLLKDGNPIPSAIAANSGIYGSSGSSGSSGSSGSSGSSDKKYSIGLDIGTNSVGWAVITDEYKVPSKKFKVLGNTDRHSIKKNLIGALLFDSGETAEATRLKRTARRRYTRRKNRICYLQEIFSNEMAKVDDSFFHRLEESFLVEEDKKHERHPIFGNIVDEVAYHEKYPTIYHLRKKLVDSTDKADLRLIYLALAHMIKFRGHFLIEGDLNPDNSDVDKLFIQLVQTYNQLFEENPINASGVDAKAILSARLSKSRRLENLIAQLPGEKKNGLFGNLIALSLGLTPNFKSNFDLAEDAKLQLSKDTYDDDLDNLLAQIGDQYADLFLAAKNLSDAILLSDILRVNTEITKAPLSASMIKRYDEHHQDLTLLKALVRQQLPEKYKEIFFDQSKNGYAGYIDGGASQEEFYKFIKPILEKMDGTEELLVKLNREDLLRKQRTFDNGSIPHQIHLGELHAILRRQEDFYPFLKDNREKIEKILTFRIPYYVGPLARGNSRFAWMTRKSEETITPWNFEEVVDKGASAQSFIERMTNFDKNLPNEKVLPKHSLLYEYFTVYNELTKVKYVTEGMRKPAFLSGEQKKAIVDLLFKTNRKVTVKQLKEDYFKKIECFDSVEISGVEDRFNASLGTYHDLLKIIKDKDFLDNEENEDILEDIVLTLTLFEDREMIEERLKTYAHLFDDKVMKQLKRRRYTGWGRLSRKLINGIRDKQSGKTILDFLKSDGFANRNFMQLIHDDSLTFKEDIQKAQVSGQGDSLHEHIANLAGSPAIKKGILQTVKVVDELVKVMGRHKPENIVIEMARENQTTQKGQKNSRERMKRIEEGIKELGSQILKEHPVENTQLQNEKLYLYYLQNGRDMYVDQELDINRLSDYDVDHIVPQSFLKDDSIDNKVLTRSDKARGKSDNVPSEEVVKKMKNYWRQLLNAKLITQRKFDNLTKAERGGLSELDKAGFIKRQLVETRQITKHVAQILDSRMNTKYDENDKLIREVKVITLKSKLVSDFRKDFQFYKVREINNYHHAHDAYLNAVVGTALIKKYPKLESEFVYGDYKVYDVRKMIAKSEQEIGKATAKYFFYSNIMNFFKTEITLANGEIRKRPLIETNGETGEIVWDKGRDFATVRKVLSMPQVNIVKKTEVQTGGFSKESILPKRNSDKLIARKKDWDPKKYGGFDSPTVAYSVLVVAKVEKGKSKKLKSVKELLGITIMERSSFEKNPIDFLEAKGYKEVKKDLIIKLPKYSLFELENGRKRMLASAGELQKGNELALPSKYVNFLYLASHYEKLKGSPEDNEQKQLFVEQHKHYLDEIIEQISEFSKRVILADANLDKVLSAYNKHRDKPIREQAENIIHLFTLTNLGAPAAFKYFDTTIDRKRYTSTKEVLDATLIHQSITGLYETRIDLSQLGGDKRTADGSEFESPKKKAKVE

SEQ ID NO: 16151 - protein, 2245 aa, synthetic construct
MPAAKRVKLDGGTAPLEEEYRLFLEAPIQNVTLLEQWKREIPKVWAEINPPGLASTQAPIHVQLLSTALPVRVRQYPITLEAKRSLRETIRKFRAAGILRPVHSPWNTPLLPVRKSGTSEYRMVQDLREVNKRVETIHPTVPNPYTLLSLLPPDRIWYSVLDLKDAFFCIPLAPESQLIFAFEWADAEEGESGQLTWTRLPQGFKNSPTLFNEALNRDLQGFRLDHPSVSLLQYVDDLLIAADTQAACLSATRDLLMTLAELGYRVSGKKAQLCQEEVTYLGFKIHKGSRSLSNSRTQAILQIPVPKTKRQVREFLGKIGYCRLFIPGFAELAQPLYAATRPGNDPLVWGEKEEEAFQSLKLALTQPPALALPSLDKPFQLFVEETSGAAKGVLTQALGPWKRPVAYLSKRLDPVAAGWPRCLRAIAAAALLTREASKLTFGQDIEITSSHNLESLLRSPPDKWLTNARITQYQVLLLDPPRVRFKQTAALNPATLLPETDDTLPIHHCLDTLDSLTSTRPDLTDQPLAQAEATLFTDGSSYIRDGKRYAGAAVVTLDSVIWAEPLPIGTSAQKAELIALTKALEWSKDKSVNIYTDSRYAFATLHVHGMIYRERGWLTAGGKAIKNAPEILALLTAVWLPKRVAVMHCKGHQKDDAPTSTGNRRADEVAREVAIRPLSTQATISAEAAAKEAAAKEAAAKEAAAKALEAEAAAKEAAAKEAAAKEAAAKAMASNFTQFVLVDNGGTGDVTVAPSNFANGIAEWISSNSRSQAYKVTCSVRQSSAQNRKYTIKVEVPKGAWRSYLNMELTIPIFATNSDCELIVKAMQGLLKDGNPIPSAIAANSGIYGSSGGGEAAAKDKKYSIGLDIGTNSVGWAVITDEYKVPSKKFKVLGNTDRHSIKKNLIGALLFDSGETAEATRLKRTARRRYTRRKNRICYLQEIFSNEMAKVDDSFFHRLEESFLVEEDKKHERHPIFGNIVDEVAYHEKYPTIYHLRKKLVDSTDKADLRLIYLALAHMIKFRGHFLIEGDLNPDNSDVDKLFIQLVQTYNQLFEENPINASGVDAKAILSARLSKSRRLENLIAQLPGEKKNGLFGNLIALSLGLTPNFKSNFDLAEDAKLQLSKDTYDDDLDNLLAQIGDQYADLFLAAKNLSDAILLSDILRVNTEITKAPLSASMIKRYDEHHQDLTLLKALVRQQLPEKYKEIFFDQSKNGYAGYIDGGASQEEFYKFIKPILEKMDGTEELLVKLNREDLLRKQRTFDNGSIPHQIHLGELHAILRRQEDFYPFLKDNREKIEKILTFRIPYYVGPLARGNSRFAWMTRKSEETITPWNFEEVVDKGASAQSFIERMTNFDKNLPNEKVLPKHSLLYEYFTVYNELTKVKYVTEGMRKPAFLSGEQKKAIVDLLFKTNRKVTVKQLKEDYFKKIECFDSVEISGVEDRFNASLGTYHDLLKIIKDKDFLDNEENEDILEDIVLTLTLFEDREMIEERLKTYAHLFDDKVMKQLKRRRYTGWGRLSRKLINGIRDKQSGKTILDFLKSDGFANRNFMQLIHDDSLTFKEDIQKAQVSGQGDSLHEHIANLAGSPAIKKGILQTVKVVDELVKVMGRHKPENIVIEMARENQTTQKGQKNSRERMKRIEEGIKELGSQILKEHPVENTQLQNEKLYLYYLQNGRDMYVDQELDINRLSDYDVDHIVPQSFLKDDSIDNKVLTRSDKARGKSDNVPSEEVVKKMKNYWRQLLNAKLITQRKFDNLTKAERGGLSELDKAGFIKRQLVETRQITKHVAQILDSRMNTKYDENDKLIREVKVITLKSKLVSDFRKDFQFYKVREINNYHHAHDAYLNAVVGTALIKKYPKLESEFVYGDYKVYDVRKMIAKSEQEIGKATAKYFFYSNIMNFFKTEITLANGEIRKRPLIETNGETGEIVWDKGRDFATVRKVLSMPQVNIVKKTEVQTGGFSKESILPKRNSDKLIARKKDWDPKKYGGFDSPTVAYSVLVVAKVEKGKSKKLKSVKELLGITIMERSSFEKNPIDFLEAKGYKEVKKDLIIKLPKYSLFELENGRKRMLASAGELQKGNELALPSKYVNFLYLASHYEKLKGSPEDNEQKQLFVEQHKHYLDEIIEQISEFSKRVILADANLDKVLSAYNKHRDKPIREQAENIIHLFTLTNLGAPAAFKYFDTTIDRKRYTSTKEVLDATLIHQSITGLYETRIDLSQLGGDKRTADGSEFESPKKKAKVE

SEQ ID NO: 16152 - protein, 2403 aa, synthetic construct
MPAAKRVKLDGGTAPLEEEYRLFLEAPIQNVTLLEQWKREIPKVWAEINPPGLASTQAPIHVQLLSTALPVRVRQYPITLEAKRSLRETIRKFRAAGILRPVHSPWNTPLLPVRKSGTSEYRMVQDLREVNKRVETIHPTVPNPYTLLSLLPPDRIWYSVLDLKDAFFCIPLAPESQLIFAFEWADAEEGESGQLTWTRLPQGFKNSPTLFNEALNRDLQGFRLDHPSVSLLQYVDDLLIAADTQAACLSATRDLLMTLAELGYRVSGKKAQLCQEEVTYLGFKIHKGSRSLSNSRTQAILQIPVPKTKRQVREFLGKIGYCRLFIPGFAELAQPLYAATRPGNDPLVWGEKEEEAFQSLKLALTQPPALALPSLDKPFQLFVEETSGAAKGVLTQALGPWKRPVAYLSKRLDPVAAGWPRCLRAIAAAALLTREASKLTFGQDIEITSSHNLESLLRSPPDKWLTNARITQYQVLLLDPPRVRFKQTAALNPATLLPETDDTLPIHHCLDTLDSLTSTRPDLTDQPLAQAEATLFTDGSSYIRDGKRYAGAAVVTLDSVIWAEPLPIGTSAQKAELIALTKALEWSKDKSVNIYTDSRYAFATLHVHGMIYRERGWLTAGGKAIKNAPEILALLTAVWLPKRVAVMHCKGHQKDDAPTSTGNRRADEVAREVAIRPLSTQATISAEAAAKEAAAKEAAAKEAAAKALEAEAAAKEAAAKEAAAKEAAAKAMASNFTQFVLVDNGGTGDVTVAPSNFANGIAEWISSNSRSQAYKVTCSVRQSSAQNRKYTIKVEVPKGAWRSYLNMELTIPIFATNSDCELIVKAMQGLLKDGNPIPSAIAANSGIYGGSGGSMASNFTQFVLVDNGGTGDVTVAPSNFANGIAEWISSNSRSQAYKVTCSVRQSSAQNRKYTIKVEVPKGAWRSYLNMELTIPIFATNSDCELIVKAMQGLLKDGNPIPSAIAANSGIYAEAAAKEAAAKEAAAKEAAAKALEAEAAAKEAAAKEAAAKEAAAKADKKYSIGLDIGTNSVGWAVITDEYKVPSKKFKVLGNTDRHSIKKNLIGALLFDSGETAEATRLKRTARRRYTRRKNRICYLQEIFSNEMAKVDDSFFHRLEESFLVEEDKKHERHPIFGNIVDEVAYHEKYPTIYHLRKKLVDSTDKADLRLIYLALAHMIKFRGHFLIEGDLNPDNSDVDKLFIQLVQTYNQLFEENPINASGVDAKAILSARLSKSRRLENLIAQLPGEKKNGLFGNLIALSLGLTPNFKSNFDLAEDAKLQLSKDTYDDDLDNLLAQIGDQYADLFLAAKNLSDAILLSDILRVNTEITKAPLSASMIKRYDEHHQDLTLLKALVRQQLPEKYKEIFFDQSKNGYAGYIDGGASQEEFYKFIKPILEKMDGTEELLVKLNREDLLRKQRTFDNGSIPHQIHLGELHAILRRQEDFYPFLKDNREKIEKILTFRIPYYVGPLARGNSRFAWMTRKSEETITPWNFEEVVDKGASAQSFIERMTNFDKNLPNEKVLPKHSLLYEYFTVYNELTKVKYVTEGMRKPAFLSGEQKKAIVDLLFKTNRKVTVKQLKEDYFKKIECFDSVEISGVEDRFNASLGTYHDLLKIIKDKDFLDNEENEDILEDIVLTLTLFEDREMIEERLKTYAHLFDDKVMKQLKRRRYTGWGRLSRKLINGIRDKQSGKTILDFLKSDGFANRNFMQLIHDDSLTFKEDIQKAQVSGQGDSLHEHIANLAGSPAIKKGILQTVKVVDELVKVMGRHKPENIVIEMARENQTTQKGQKNSRERMKRIEEGIKELGSQILKEHPVENTQLQNEKLYLYYLQNGRDMYVDQELDINRLSDYDVDHIVPQSFLKDDSIDNKVLTRSDKARGKSDNVPSEEVVKKMKNYWRQLLNAKLITQRKFDNLTKAERGGLSELDKAGFIKRQLVETRQITKHVAQILDSRMNTKYDENDKLIREVKVITLKSKLVSDFRKDFQFYKVREINNYHHAHDAYLNAVVGTALIKKYPKLESEFVYGDYKVYDVRKMIAKSEQEIGKATAKYFFYSNIMNFFKTEITLANGEIRKRPLIETNGETGEIVWDKGRDFATVRKVLSMPQVNIVKKTEVQTGGFSKESILPKRNSDKLIARKKDWDPKKYGGFDSPTVAYSVLVVAKVEKGKSKKLKSVKELLGITIMERSSFEKNPIDFLEAKGYKEVKKDLIIKLPKYSLFELENGRKRMLASAGELQKGNELALPSKYVNFLYLASHYEKLKGSPEDNEQKQLFVEQHKHYLDEIIEQISEFSKRVILADANLDKVLSAYNKHRDKPIREQAENIIHLFTLTNLGAPAAFKYFDTTIDRKRYTSTKEVLDATLIHQSITGLYETRIDLSQLGGDKRTADGSEFESPKKKAKVE

SEQ ID NO: 16153 - protein, 2390 aa, synthetic construct
MPAAKRVKLDGGTAPLEEEYRLFLEAPIQNVTLLEQWKREIPKVWAEINPPGLASTQAPIHVQLLSTALPVRVRQYPITLEAKRSLRETIRKFRAAGILRPVHSPWNTPLLPVRKSGTSEYRMVQDLREVNKRVETIHPTVPNPYTLLSLLPPDRIWYSVLDLKDAFFCIPLAPESQLIFAFEWADAEEGESGQLTWTRLPQGFKNSPTLFNEALNRDLQGFRLDHPSVSLLQYVDDLLIAADTQAACLSATRDLLMTLAELGYRVSGKKAQLCQEEVTYLGFKIHKGSRSLSNSRTQAILQIPVPKTKRQVREFLGKIGYCRLFIPGFAELAQPLYAATRPGNDPLVWGEKEEEAFQSLKLALTQPPALALPSLDKPFQLFVEETSGAAKGVLTQALGPWKRPVAYLSKRLDPVAAGWPRCLRAIAAAALLTREASKLTFGQDIEITSSHNLESLLRSPPDKWLTNARITQYQVLLLDPPRVRFKQTAALNPATLLPETDDTLPIHHCLDTLDSLTSTRPDLTDQPLAQAEATLFTDGSSYIRDGKRYAGAAVVTLDSVIWAEPLPIGTSAQKAELIALTKALEWSKDKSVNIYTDSRYAFATLHVHGMIYRERGWLTAGGKAIKNAPEILALLTAVWLPKRVAVMHCKGHQKDDAPTSTGNRRADEVAREVAIRPLSTQATISAEAAAKEAAAKEAAAKEAAAKALEAEAAAKEAAAKEAAAKEAAAKAMASNFTQFVLVDNGGTGDVTVAPSNFANGIAEWISSNSRSQAYKVTCSVRQSSAQNRKYTIKVEVPKGAWRSYLNMELTIPIFATNSDCELIVKAMQGLLKDGNPIPSAIAANSGIYGGSGGSMASNFTQFVLVDNGGTGDVTVAPSNFANGIAEWISSNSRSQAYKVTCSVRQSSAQNRKYTIKVEVPKGAWRSYLNMELTIPIFATNSDCELIVKAMQGLLKDGNPIPSAIAANSGIYSGGSSGGSSGSETPGTSESATPESSGGSSGGSSDKKYSIGLDIGTNSVGWAVITDEYKVPSKKFKVLGNTDRHSIKKNLIGALLFDSGETAEATRLKRTARRRYTRRKNRICYLQEIFSNEMAKVDDSFFHRLEESFLVEEDKKHERHPIFGNIVDEVAYHEKYPTIYHLRKKLVDSTDKADLRLIYLALAHMIKFRGHFLIEGDLNPDNSDVDKLFIQLVQTYNQLFEENPINASGVDAKAILSARLSKSRRLENLIAQLPGEKKNGLFGNLIALSLGLTPNFKSNFDLAEDAKLQLSKDTYDDDLDNLLAQIGDQYADLFLAAKNLSDAILLSDILRVNTEITKAPLSASMIKRYDEHHQDLTLLKALVRQQLPEKYKEIFFDQSKNGYAGYIDGGASQEEFYKFIKPILEKMDGTEELLVKLNREDLLRKQRTFDNGSIPHQIHLGELHAILRRQEDFYPFLKDNREKIEKILTFRIPYYVGPLARGNSRFAWMTRKSEETITPWNFEEVVDKGASAQSFIERMTNFDKNLPNEKVLPKHSLLYEYFTVYNELTKVKYVTEGMRKPAFLSGEQKKAIVDLLFKTNRKVTVKQLKEDYFKKIECFDSVEISGVEDRFNASLGTYHDLLKIIKDKDFLDNEENEDILEDIVLTLTLFEDREMIEERLKTYAHLFDDKVMKQLKRRRYTGWGRLSRKLINGIRDKQSGKTILDFLKSDGFANRNFMQLIHDDSLTFKEDIQKAQVSGQGDSLHEHIANLAGSPAIKKGILQTVKVVDELVKVMGRHKPENIVIEMARENQTTQKGQKNSRERMKRIEEGIKELGSQILKEHPVENTQLQNEKLYLYYLQNGRDMYVDQELDINRLSDYDVDHIVPQSFLKDDSIDNKVLTRSDKARGKSDNVPSEEVVKKMKNYWRQLLNAKLITQRKFDNLTKAERGGLSELDKAGFIKRQLVETRQITKHVAQILDSRMNTKYDENDKLIREVKVITLKSKLVSDFRKDFQFYKVREINNYHHAHDAYLNAVVGTALIKKYPKLESEFVYGDYKVYDVRKMIAKSEQEIGKATAKYFFYSNIMNFFKTEITLANGEIRKRPLIETNGETGEIVWDKGRDFATVRKVLSMPQVNIVKKTEVQTGGFSKESILPKRNSDKLIARKKDWDPKKYGGFDSPTVAYSVLVVAKVEKGKSKKLKSVKELLGITIMERSSFEKNPIDFLEAKGYKEVKKDLIIKLPKYSLFELENGRKRMLASAGELQKGNELALPSKYVNFLYLASHYEKLKGSPEDNEQKQLFVEQHKHYLDEIIEQISEFSKRVILADANLDKVLSAYNKHRDKPIREQAENIIHLFTLTNLGAPAAFKYFDTTIDRKRYTSTKEVLDATLIHQSITGLYETRIDLSQLGGDKRTADGSEFESPKKKAKVE

SEQ ID NO: 16154 - protein, 2375 aa, synthetic construct
MPAAKRVKLDGGTAPLEEEYRLFLEAPIQNVTLLEQWKREIPKVWAEINPPGLASTQAPIHVQLLSTALPVRVRQYPITLEAKRSLRETIRKFRAAGILRPVHSPWNTPLLPVRKSGTSEYRMVQDLREVNKRVETIHPTVPNPYTLLSLLPPDRIWYSVLDLKDAFFCIPLAPESQLIFAFEWADAEEGESGQLTWTRLPQGFKNSPTLFNEALNRDLQGFRLDHPSVSLLQYVDDLLIAADTQAACLSATRDLLMTLAELGYRVSGKKAQLCQEEVTYLGFKIHKGSRSLSNSRTQAILQIPVPKTKRQVREFLGKIGYCRLFIPGFAELAQPLYAATRPGNDPLVWGEKEEEAFQSLKLALTQPPALALPSLDKPFQLFVEETSGAAKGVLTQALGPWKRPVAYLSKRLDPVAAGWPRCLRAIAAAALLTREASKLTFGQDIEITSSHNLESLLRSPPDKWLTNARITQYQVLLLDPPRVRFKQTAALNPATLLPETDDTLPIHHCLDTLDSLTSTRPDLTDQPLAQAEATLFTDGSSYIRDGKRYAGAAVVTLDSVIWAEPLPIGTSAQKAELIALTKALEWSKDKSVNIYTDSRYAFATLHVHGMIYRERGWLTAGGKAIKNAPEILALLTAVWLPKRVAVMHCKGHQKDDAPTSTGNRRADEVAREVAIRPLSTQATISAEAAAKEAAAKEAAAKEAAAKALEAEAAAKEAAAKEAAAKEAAAKAMASNFTQFVLVDNGGTGDVTVAPSNFANGIAEWISSNSRSQAYKVTCSVRQSSAQNRKYTIKVEVPKGAWRSYLNMELTIPIFATNSDCELIVKAMQGLLKDGNPIPSAIAANSGIYGGSGGSMASNFTQFVLVDNGGTGDVTVAPSNFANGIAEWISSNSRSQAYKVTCSVRQSSAQNRKYTIKVEVPKGAWRSYLNMELTIPIFATNSDCELIVKAMQGLLKDGNPIPSAIAANSGIYGSSGSSGSSGSSGSSGSSDKKYSIGLDIGTNSVGWAVITDEYKVPSKKFKVLGNTDRHSIKKNLIGALLFDSGETAEATRLKRTARRRYTRRKNRICYLQEIFSNEMAKVDDSFFHRLEESFLVEEDKKHERHPIFGNIVDEVAYHEKYPTIYHLRKKLVDSTDKADLRLIYLALAHMIKFRGHFLIEGDLNPDNSDVDKLFIQLVQTYNQLFEENPINASGVDAKAILSARLSKSRRLENLIAQLPGEKKNGLFGNLIALSLGLTPNFKSNFDLAEDAKLQLSKDTYDDDLDNLLAQIGDQYADLFLAAKNLSDAILLSDILRVNTEITKAPLSASMIKRYDEHHQDLTLLKALVRQQLPEKYKEIFFDQSKNGYAGYIDGGASQEEFYKFIKPILEKMDGTEELLVKLNREDLLRKQRTFDNGSIPHQIHLGELHAILRRQEDFYPFLKDNREKIEKILTFRIPYYVGPLARGNSRFAWMTRKSEETITPWNFEEVVDKGASAQSFIERMTNFDKNLPNEKVLPKHSLLYEYFTVYNELTKVKYVTEGMRKPAFLSGEQKKAIVDLLFKTNRKVTVKQLKEDYFKKIECFDSVEISGVEDRFNASLGTYHDLLKIIKDKDFLDNEENEDILEDIVLTLTLFEDREMIEERLKTYAHLFDDKVMKQLKRRRYTGWGRLSRKLINGIRDKQSGKTILDFLKSDGFANRNFMQLIHDDSLTFKEDIQKAQVSGQGDSLHEHIANLAGSPAIKKGILQTVKVVDELVKVMGRHKPENIVIEMARENQTTQKGQKNSRERMKRIEEGIKELGSQILKEHPVENTQLQNEKLYLYYLQNGRDMYVDQELDINRLSDYDVDHIVPQSFLKDDSIDNKVLTRSDKARGKSDNVPSEEVVKKMKNYWRQLLNAKLITQRKFDNLTKAERGGLSELDKAGFIKRQLVETRQITKHVAQILDSRMNTKYDENDKLIREVKVITLKSKLVSDFRKDFQFYKVREINNYHHAHDAYLNAVVGTALIKKYPKLESEFVYGDYKVYDVRKMIAKSEQEIGKATAKYFFYSNIMNFFKTEITLANGEIRKRPLIETNGETGEIVWDKGRDFATVRKVLSMPQVNIVKKTEVQTGGFSKESILPKRNSDKLIARKKDWDPKKYGGFDSPTVAYSVLVVAKVEKGKSKKLKSVKELLGITIMERSSFEKNPIDFLEAKGYKEVKKDLIIKLPKYSLFELENGRKRMLASAGELQKGNELALPSKYVNFLYLASHYEKLKGSPEDNEQKQLFVEQHKHYLDEIIEQISEFSKRVILADANLDKVLSAYNKHRDKPIREQAENIIHLFTLTNLGAPAAFKYFDTTIDRKRYTSTKEVLDATLIHQSITGLYETRIDLSQLGGDKRTADGSEFESPKKKAKVE

SEQ ID NO: 16155 - protein, 2368 aa, synthetic construct
MPAAKRVKLDGGTAPLEEEYRLFLEAPIQNVTLLEQWKREIPKVWAEINPPGLASTQAPIHVQLLSTALPVRVRQYPITLEAKRSLRETIRKFRAAGILRPVHSPWNTPLLPVRKSGTSEYRMVQDLREVNKRVETIHPTVPNPYTLLSLLPPDRIWYSVLDLKDAFFCIPLAPESQLIFAFEWADAEEGESGQLTWTRLPQGFKNSPTLFNEALNRDLQGFRLDHPSVSLLQYVDDLLIAADTQAACLSATRDLLMTLAELGYRVSGKKAQLCQEEVTYLGFKIHKGSRSLSNSRTQAILQIPVPKTKRQVREFLGKIGYCRLFIPGFAELAQPLYAATRPGNDPLVWGEKEEEAFQSLKLALTQPPALALPSLDKPFQLFVEETSGAAKGVLTQALGPWKRPVAYLSKRLDPVAAGWPRCLRAIAAAALLTREASKLTFGQDIEITSSHNLESLLRSPPDKWLTNARITQYQVLLLDPPRVRFKQTAALNPATLLPETDDTLPIHHCLDTLDSLTSTRPDLTDQPLAQAEATLFTDGSSYIRDGKRYAGAAVVTLDSVIWAEPLPIGTSAQKAELIALTKALEWSKDKSVNIYTDSRYAFATLHVHGMIYRERGWLTAGGKAIKNAPEILALLTAVWLPKRVAVMHCKGHQKDDAPTSTGNRRADEVAREVAIRPLSTQATISAEAAAKEAAAKEAAAKEAAAKALEAEAAAKEAAAKEAAAKEAAAKAMASNFTQFVLVDNGGTGDVTVAPSNFANGIAEWISSNSRSQAYKVTCSVRQSSAQNRKYTIKVEVPKGAWRSYLNMELTIPIFATNSDCELIVKAMQGLLKDGNPIPSAIAANSGIYGGSGGSMASNFTQFVLVDNGGTGDVTVAPSNFANGIAEWISSNSRSQAYKVTCSVRQSSAQNRKYTIKVEVPKGAWRSYLNMELTIPIFATNSDCELIVKAMQGLLKDGNPIPSAIAANSGIYGSSGGGEAAAKDKKYSIGLDIGTNSVGWAVITDEYKVPSKKFKVLGNTDRHSIKKNLIGALLFDSGETAEATRLKRTARRRYTRRKNRICYLQEIFSNEMAKVDDSFFHRLEESFLVEEDKKHERHPIFGNIVDEVAYHEKYPTIYHLRKKLVDSTDKADLRLIYLALAHMIKFRGHFLIEGDLNPDNSDVDKLFIQLVQTYNQLFEENPINASGVDAKAILSARLSKSRRLENLIAQLPGEKKNGLFGNLIALSLGLTPNFKSNFDLAEDAKLQLSKDTYDDDLDNLLAQIGDQYADLFLAAKNLSDAILLSDILRVNTEITKAPLSASMIKRYDEHHQDLTLLKALVRQQLPEKYKEIFFDQSKNGYAGYIDGGASQEEFYKFIKPILEKMDGTEELLVKLNREDLLRKQRTFDNGSIPHQIHLGELHAILRRQEDFYPFLKDNREKIEKILTFRIPYYVGPLARGNSRFAWMTRKSEETITPWNFEEVVDKGASAQSFIERMTNFDKNLPNEKVLPKHSLLYEYFTVYNELTKVKYVTEGMRKPAFLSGEQKKAIVDLLFKTNRKVTVKQLKEDYFKKIECFDSVEISGVEDRFNASLGTYHDLLKIIKDKDFLDNEENEDILEDIVLTLTLFEDREMIEERLKTYAHLFDDKVMKQLKRRRYTGWGRLSRKLINGIRDKQSGKTILDFLKSDGFANRNFMQLIHDDSLTFKEDIQKAQVSGQGDSLHEHIANLAGSPAIKKGILQTVKVVDELVKVMGRHKPENIVIEMARENQTTQKGQKNSRERMKRIEEGIKELGSQILKEHPVENTQLQNEKLYLYYLQNGRDMYVDQELDINRLSDYDVDHIVPQSFLKDDSIDNKVLTRSDKARGKSDNVPSEEVVKKMKNYWRQLLNAKLITQRKFDNLTKAERGGLSELDKAGFIKRQLVETRQITKHVAQILDSRMNTKYDENDKLIREVKVITLKSKLVSDFRKDFQFYKVREINNYHHAHDAYLNAVVGTALIKKYPKLESEFVYGDYKVYDVRKMIAKSEQEIGKATAKYFFYSNIMNFFKTEITLANGEIRKRPLIETNGETGEIVWDKGRDFATVRKVLSMPQVNIVKKTEVQTGGFSKESILPKRNSDKLIARKKDWDPKKYGGFDSPTVAYSVLVVAKVEKGKSKKLKSVKELLGITIMERSSFEKNPIDFLEAKGYKEVKKDLIIKLPKYSLFELENGRKRMLASAGELQKGNELALPSKYVNFLYLASHYEKLKGSPEDNEQKQLFVEQHKHYLDEIIEQISEFSKRVILADANLDKVLSAYNKHRDKPIREQAENIIHLFTLTNLGAPAAFKYFDTTIDRKRYTSTKEVLDATLIHQSITGLYETRIDLSQLGGDKRTADGSEFESPKKKAKVE

SEQ ID NO: 16156 - protein, 2659 aa, synthetic construct
MPAAKRVKLDGGTAPLEEEYRLFLEAPIQNVTLLEQWKREIPKVWAEINPPGLASTQAPIHVQLLSTALPVRVRQYPITLEAKRSLRETIRKFRAAGILRPVHSPWNTPLLPVRKSGTSEYRMVQDLREVNKRVETIHPTVPNPYTLLSLLPPDRIWYSVLDLKDAFFCIPLAPESQLIFAFEWADAEEGESGQLTWTRLPQGFKNSPTLFNEALNRDLQGFRLDHPSVSLLQYVDDLLIAADTQAACLSATRDLLMTLAELGYRVSGKKAQLCQEEVTYLGFKIHKGSRSLSNSRTQAILQIPVPKTKRQVREFLGKIGYCRLFIPGFAELAQPLYAATRPGNDPLVWGEKEEEAFQSLKLALTQPPALALPSLDKPFQLFVEETSGAAKGVLTQALGPWKRPVAYLSKRLDPVAAGWPRCLRAIAAAALLTREASKLTFGQDIEITSSHNLESLLRSPPDKWLTNARITQYQVLLLDPPRVRFKQTAALNPATLLPETDDTLPIHHCLDTLDSLTSTRPDLTDQPLAQAEATLFTDGSSYIRDGKRYAGAAVVTLDSVIWAEPLPIGTSAQKAELIALTKALEWSKDKSVNIYTDSRYAFATLHVHGMIYRERGWLTAGGKAIKNAPEILALLTAVWLPKRVAVMHCKGHQKDDAPTSTGNRRADEVAREVAIRPLSTQATISAEAAAKEAAAKEAAAKEAAAKALEAEAAAKEAAAKEAAAKEAAAKAMASNFTQFVLVDNGGTGDVTVAPSNFANGIAEWISSNSRSQAYKVTCSVRQSSAQNRKYTIKVEVPKGAWRSYLNMELTIPIFATNSDCELIVKAMQGLLKDGNPIPSAIAANSGIYGGSGGSMASNFTQFVLVDNGGTGDVTVAPSNFANGIAEWISSNSRSQAYKVTCSVRQSSAQNRKYTIKVEVPKGAWRSYLNMELTIPIFATNSDCELIVKAMQGLLKDGNPIPSAIAANSGIYGGGSGGGSGGGSGGGSMASNFTQFVLVDNGGTGDVTVAPSNFANGIAEWISSNSRSQAYKVTCSVRQSSAQNRKYTIKVEVPKGAWRSYLNMELTIPIFATNSDCELIVKAMQGLLKDGNPIPSAIAANSGIYGGSGGSMASNFTQFVLVDNGGTGDVTVAPSNFANGIAEWISSNSRSQAYKVTCSVRQSSAQNRKYTIKVEVPKGAWRSYLNMELTIPIFATNSDCELIVKAMQGLLKDGNPIPSAIAANSGIYAEAAAKEAAAKEAAAKEAAAKALEAEAAAKEAAAKEAAAKEAAAKADKKYSIGLDIGTNSVGWAVITDEYKVPSKKFKVLGNTDRHSIKKNLIGALLFDSGETAEATRLKRTARRRYTRRKNRICYLQEIFSNEMAKVDDSFFHRLEESFLVEEDKKHERHPIFGNIVDEVAYHEKYPTIYHLRKKLVDSTDKADLRLIYLALAHMIKFRGHFLIEGDLNPDNSDVDKLFIQLVQTYNQLFEENPINASGVDAKAILSARLSKSRRLENLIAQLPGEKKNGLFGNLIALSLGLTPNFKSNFDLAEDAKLQLSKDTYDDDLDNLLAQIGDQYADLFLAAKNLSDAILLSDILRVNTEITKAPLSASMIKRYDEHHQDLTLLKALVRQQLPEKYKEIFFDQSKNGYAGYIDGGASQEEFYKFIKPILEKMDGTEELLVKLNREDLLRKQRTFDNGSIPHQIHLGELHAILRRQEDFYPFLKDNREKIEKILTFRIPYYVGPLARGNSRFAWMTRKSEETITPWNFEEVVDKGASAQSFIERMTNFDKNLPNEKVLPKHSLLYEYFTVYNELTKVKYVTEGMRKPAFLSGEQKKAIVDLLFKTNRKVTVKQLKEDYFKKIECFDSVEISGVEDRFNASLGTYHDLLKIIKDKDFLDNEENEDILEDIVLTLTLFEDREMIEERLKTYAHLFDDKVMKQLKRRRYTGWGRLSRKLINGIRDKQSGKTILDFLKSDGFANRNFMQLIHDDSLTFKEDIQKAQVSGQGDSLHEHIANLAGSPAIKKGILQTVKVVDELVKVMGRHKPENIVIEMARENQTTQKGQKNSRERMKRIEEGIKELGSQILKEHPVENTQLQNEKLYLYYLQNGRDMYVDQELDINRLSDYDVDHIVPQSFLKDDSIDNKVLTRSDKARGKSDNVPSEEVVKKMKNYWRQLLNAKLITQRKFDNLTKAERGGLSELDKAGFIKRQLVETRQITKHVAQILDSRMNTKYDENDKLIREVKVITLKSKLVSDFRKDFQFYKVREINNYHHAHDAYLNAVVGTALIKKYPKLESEFVYGDYKVYDVRKMIAKSEQEIGKATAKYFFYSNIMNFFKTEITLANGEIRKRPLIETNGETGEIVWDKGRDFATVRKVLSMPQVNIVKKTEVQTGGFSKESILPKRNSDKLIARKKDWDPKKYGGFDSPTVAYSVLVVAKVEKGKSKKLKSVKELLGITIMERSSFEKNPIDFLEAKGYKEVKKDLIIKLPKYSLFELENGRKRMLASAGELQKGNELALPSKYVNFLYLASHYEKLKGSPEDNEQKQLFVEQHKHYLDEIIEQISEFSKRVILADANLDKVLSAYNKHRDKPIREQAENIIHLFTLTNLGAPAAFKYFDTTIDRKRYTSTKEVLDATLIHQSITGLYETRIDLSQLGGDKRTADGSEFESPKKKAKVE

SEQ ID NO: 16157 - protein, 2646 aa, synthetic construct
MPAAKRVKLDGGTAPLEEEYRLFLEAPIQNVTLLEQWKREIPKVWAEINPPGLASTQAPIHVQLLSTALPVRVRQYPITLEAKRSLRETIRKFRAAGILRPVHSPWNTPLLPVRKSGTSEYRMVQDLREVNKRVETIHPTVPNPYTLLSLLPPDRIWYSVLDLKDAFFCIPLAPESQLIFAFEWADAEEGESGQLTWTRLPQGFKNSPTLFNEALNRDLQGFRLDHPSVSLLQYVDDLLIAADTQAACLSATRDLLMTLAELGYRVSGKKAQLCQEEVTYLGFKIHKGSRSLSNSRTQAILQIPVPKTKRQVREFLGKIGYCRLFIPGFAELAQPLYAATRPGNDPLVWGEKEEEAFQSLKLALTQPPALALPSLDKPFQLFVEETSGAAKGVLTQALGPWKRPVAYLSKRLDPVAAGWPRCLRAIAAAALLTREASKLTFGQDIEITSSHNLESLLRSPPDKWLTNARITQYQVLLLDPPRVRFKQTAALNPATLLPETDDTLPIHHCLDTLDSLTSTRPDLTDQPLAQAEATLFTDGSSYIRDGKRYAGAAVVTLDSVIWAEPLPIGTSAQKAELIALTKALEWSKDKSVNIYTDSRYAFATLHVHGMIYRERGWLTAGGKAIKNAPEILALLTAVWLPKRVAVMHCKGHQKDDAPTSTGNRRADEVAREVAIRPLSTQATISAEAAAKEAAAKEAAAKEAAAKALEAEAAAKEAAAKEAAAKEAAAKAMASNFTQFVLVDNGGTGDVTVAPSNFANGIAEWISSNSRSQAYKVTCSVRQSSAQNRKYTIKVEVPKGAWRSYLNMELTIPIFATNSDCELIVKAMQGLLKDGNPIPSAIAANSGIYGGSGGSMASNFTQFVLVDNGGTGDVTVAPSNFANGIAEWISSNSRSQAYKVTCSVRQSSAQNRKYTIKVEVPKGAWRSYLNMELTIPIFATNSDCELIVKAMQGLLKDGNPIPSAIAANSGIYGGGSGGGSGGGSGGGSMASNFTQFVLVDNGGTGDVTVAPSNFANGIAEWISSNSRSQAYKVTCSVRQSSAQNRKYTIKVEVPKGAWRSYLNMELTIPIFATNSDCELIVKAMQGLLKDGNPIPSAIAANSGIYGGSGGSMASNFTQFVLVDNGGTGDVTVAPSNFANGIAEWISSNSRSQAYKVTCSVRQSSAQNRKYTIKVEVPKGAWRSYLNMELTIPIFATNSDCELIVKAMQGLLKDGNPIPSAIAANSGIYSGGSSGGSSGSETPGTSESATPESSGGSSGGSSDKKYSIGLDIGTNSVGWAVITDEYKVPSKKFKVLGNTDRHSIKKNLIGALLFDSGETAEATRLKRTARRRYTRRKNRICYLQEIFSNEMAKVDDSFFHRLEESFLVEEDKKHERHPIFGNIVDEVAYHEKYPTIYHLRKKLVDSTDKADLRLIYLALAHMIKFRGHFLIEGDLNPDNSDVDKLFIQLVQTYNQLFEENPINASGVDAKAILSARLSKSRRLENLIAQLPGEKKNGLFGNLIALSLGLTPNFKSNFDLAEDAKLQLSKDTYDDDLDNLLAQIGDQYADLFLAAKNLSDAILLSDILRVNTEITKAPLSASMIKRYDEHHQDLTLLKALVRQQLPEKYKEIFFDQSKNGYAGYIDGGASQEEFYKFIKPILEKMDGTEELLVKLNREDLLRKQRTFDNGSIPHQIHLGELHAILRRQEDFYPFLKDNREKIEKILTFRIPYYVGPLARGNSRFAWMTRKSEETITPWNFEEVVDKGASAQSFIERMTNFDKNLPNEKVLPKHSLLYEYFTVYNELTKVKYVTEGMRKPAFLSGEQKKAIVDLLFKTNRKVTVKQLKEDYFKKIECFDSVEISGVEDRFNASLGTYHDLLKIIKDKDFLDNEENEDILEDIVLTLTLFEDREMIEERLKTYAHLFDDKVMKQLKRRRYTGWGRLSRKLINGIRDKQSGKTILDFLKSDGFANRNFMQLIHDDSLTFKEDIQKAQVSGQGDSLHEHIANLAGSPAIKKGILQTVKVVDELVKVMGRHKPENIVIEMARENQTTQKGQKNSRERMKRIEEGIKELGSQILKEHPVENTQLQNEKLYLYYLQNGRDMYVDQELDINRLSDYDVDHIVPQSFLKDDSIDNKVLTRSDKARGKSDNVPSEEVVKKMKNYWRQLLNAKLITQRKFDNLTKAERGGLSELDKAGFIKRQLVETRQITKHVAQILDSRMNTKYDENDKLIREVKVITLKSKLVSDFRKDFQFYKVREINNYHHAHDAYLNAVVGTALIKKYPKLESEFVYGDYKVYDVRKMIAKSEQEIGKATAKYFFYSNIMNFFKTEITLANGEIRKRPLIETNGETGEIVWDKGRDFATVRKVLSMPQVNIVKKTEVQTGGFSKESILPKRNSDKLIARKKDWDPKKYGGFDSPTVAYSVLVVAKVEKGKSKKLKSVKELLGITIMERSSFEKNPIDFLEAKGYKEVKKDLIIKLPKYSLFELENGRKRMLASAGELQKGNELALPSKYVNFLYLASHYEKLKGSPEDNEQKQLFVEQHKHYLDEIIEQISEFSKRVILADANLDKVLSAYNKHRDKPIREQAENIIHLFTLTNLGAPAAFKYFDTTIDRKRYTSTKEVLDATLIHQSITGLYETRIDLSQLGGDKRTADGSEFESPKKKAKVE

SEQ ID NO: 16158 - protein, 2631 aa, synthetic construct
MPAAKRVKLDGGTAPLEEEYRLFLEAPIQNVTLLEQWKREIPKVWAEINPPGLASTQAPIHVQLLSTALPVRVRQYPITLEAKRSLRETIRKFRAAGILRPVHSPWNTPLLPVRKSGTSEYRMVQDLREVNKRVETIHPTVPNPYTLLSLLPPDRIWYSVLDLKDAFFCIPLAPESQLIFAFEWADAEEGESGQLTWTRLPQGFKNSPTLFNEALNRDLQGFRLDHPSVSLLQYVDDLLIAADTQAACLSATRDLLMTLAELGYRVSGKKAQLCQEEVTYLGFKIHKGSRSLSNSRTQAILQIPVPKTKRQVREFLGKIGYCRLFIPGFAELAQPLYAATRPGNDPLVWGEKEEEAFQSLKLALTQPPALALPSLDKPFQLFVEETSGAAKGVLTQALGPWKRPVAYLSKRLDPVAAGWPRCLRAIAAAALLTREASKLTFGQDIEITSSHNLESLLRSPPDKWLTNARITQYQVLLLDPPRVRFKQTAALNPATLLPETDDTLPIHHCLDTLDSLTSTRPDLTDQPLAQAEATLFTDGSSYIRDGKRYAGAAVVTLDSVIWAEPLPIGTSAQKAELIALTKALEWSKDKSVNIYTDSRYAFATLHVHGMIYRERGWLTAGGKAIKNAPEILALLTAVWLPKRVAVMHCKGHQKDDAPTSTGNRRADEVAREVAIRPLSTQATISAEAAAKEAAAKEAAAKEAAAKALEAEAAAKEAAAKEAAAKEAAAKAMASNFTQFVLVDNGGTGDVTVAPSNFANGIAEWISSNSRSQAYKVTCSVRQSSAQNRKYTIKVEVPKGAWRSYLNMELTIPIFATNSDCELIVKAMQGLLKDGNPIPSAIAANSGIYGGSGGSMASNFTQFVLVDNGGTGDVTVAPSNFANGIAEWISSNSRSQAYKVTCSVRQSSAQNRKYTIKVEVPKGAWRSYLNMELTIPIFATNSDCELIVKAMQGLLKDGNPIPSAIAANSGIYGGGSGGGSGGGSGGGSMASNFTQFVLVDNGGTGDVTVAPSNFANGIAEWISSNSRSQAYKVTCSVRQSSAQNRKYTIKVEVPKGAWRSYLNMELTIPIFATNSDCELIVKAMQGLLKDGNPIPSAIAANSGIYGGSGGSMASNFTQFVLVDNGGTGDVTVAPSNFANGIAEWISSNSRSQAYKVTCSVRQSSAQNRKYTIKVEVPKGAWRSYLNMELTIPIFATNSDCELIVKAMQGLLKDGNPIPSAIAANSGIYGSSGSSGSSGSSGSSGSSDKKYSIGLDIGTNSVGWAVITDEYKVPSKKFKVLGNTDRHSIKKNLIGALLFDSGETAEATRLKRTARRRYTRRKNRICYLQEIFSNEMAKVDDSFFHRLEESFLVEEDKKHERHPIFGNIVDEVAYHEKYPTIYHLRKKLVDSTDKADLRLIYLALAHMIKFRGHFLIEGDLNPDNSDVDKLFIQLVQTYNQLFEENPINASGVDAKAILSARLSKSRRLENLIAQLPGEKKNGLFGNLIALSLGLTPNFKSNFDLAEDAKLQLSKDTYDDDLDNLLAQIGDQYADLFLAAKNLSDAILLSDILRVNTEITKAPLSASMIKRYDEHHQDLTLLKALVRQQLPEKYKEIFFDQSKNGYAGYIDGGASQEEFYKFIKPILEKMDGTEELLVKLNREDLLRKQRTFDNGSIPHQIHLGELHAILRRQEDFYPFLKDNREKIEKILTFRIPYYVGPLARGNSRFAWMTRKSEETITPWNFEEVVDKGASAQSFIERMTNFDKNLPNEKVLPKHSLLYEYFTVYNELTKVKYVTEGMRKPAFLSGEQKKAIVDLLFKTNRKVTVKQLKEDYFKKIECFDSVEISGVEDRFNASLGTYHDLLKIIKDKDFLDNEENEDILEDIVLTLTLFEDREMIEERLKTYAHLFDDKVMKQLKRRRYTGWGRLSRKLINGIRDKQSGKTILDFLKSDGFANRNFMQLIHDDSLTFKEDIQKAQVSGQGDSLHEHIANLAGSPAIKKGILQTVKVVDELVKVMGRHKPENIVIEMARENQTTQKGQKNSRERMKRIEEGIKELGSQILKEHPVENTQLQNEKLYLYYLQNGRDMYVDQELDINRLSDYDVDHIVPQSFLKDDSIDNKVLTRSDKARGKSDNVPSEEVVKKMKNYWRQLLNAKLITQRKFDNLTKAERGGLSELDKAGFIKRQLVETRQITKHVAQILDSRMNTKYDENDKLIREVKVITLKSKLVSDFRKDFQFYKVREINNYHHAHDAYLNAVVGTALIKKYPKLESEFVYGDYKVYDVRKMIAKSEQEIGKATAKYFFYSNIMNFFKTEITLANGEIRKRPLIETNGETGEIVWDKGRDFATVRKVLSMPQVNIVKKTEVQTGGFSKESILPKRNSDKLIARKKDWDPKKYGGFDSPTVAYSVLVVAKVEKGKSKKLKSVKELLGITIMERSSFEKNPIDFLEAKGYKEVKKDLIIKLPKYSLFELENGRKRMLASAGELQKGNELALPSKYVNFLYLASHYEKLKGSPEDNEQKQLFVEQHKHYLDEIIEQISEFSKRVILADANLDKVLSAYNKHRDKPIREQAENIIHLFTLTNLGAPAAFKYFDTTIDRKRYTSTKEVLDATLIHQSITGLYETRIDLSQLGGDKRTADGSEFESPKKKAKVE

SEQ ID NO: 16159 - protein, 2624 aa, synthetic construct
MPAAKRVKLDGGTAPLEEEYRLFLEAPIQNVTLLEQWKREIPKVWAEINPPGLASTQAPIHVQLLSTALPVRVRQYPITLEAKRSLRETIRKFRAAGILRPVHSPWNTPLLPVRKSGTSEYRMVQDLREVNKRVETIHPTVPNPYTLLSLLPPDRIWYSVLDLKDAFFCIPLAPESQLIFAFEWADAEEGESGQLTWTRLPQGFKNSPTLFNEALNRDLQGFRLDHPSVSLLQYVDDLLIAADTQAACLSATRDLLMTLAELGYRVSGKKAQLCQEEVTYLGFKIHKGSRSLSNSRTQAILQIPVPKTKRQVREFLGKIGYCRLFIPGFAELAQPLYAATRPGNDPLVWGEKEEEAFQSLKLALTQPPALALPSLDKPFQLFVEETSGAAKGVLTQALGPWKRPVAYLSKRLDPVAAGWPRCLRAIAAAALLTREASKLTFGQDIEITSSHNLESLLRSPPDKWLTNARITQYQVLLLDPPRVRFKQTAALNPATLLPETDDTLPIHHCLDTLDSLTSTRPDLTDQPLAQAEATLFTDGSSYIRDGKRYAGAAVVTLDSVIWAEPLPIGTSAQKAELIALTKALEWSKDKSVNIYTDSRYAFATLHVHGMIYRERGWLTAGGKAIKNAPEILALLTAVWLPKRVAVMHCKGHQKDDAPTSTGNRRADEVAREVAIRPLSTQATISAEAAAKEAAAKEAAAKEAAAKALEAEAAAKEAAAKEAAAKEAAAKAMASNFTQFVLVDNGGTGDVTVAPSNFANGIAEWISSNSRSQAYKVTCSVRQSSAQNRKYTIKVEVPKGAWRSYLNMELTIPIFATNSDCELIVKAMQGLLKDGNPIPSAIAANSGIYGGSGGSMASNFTQFVLVDNGGTGDVTVAPSNFANGIAEWISSNSRSQAYKVTCSVRQSSAQNRKYTIKVEVPKGAWRSYLNMELTIPIFATNSDCELIVKAMQGLLKDGNPIPSAIAANSGIYGGGSGGGSGGGSGGGSMASNFTQFVLVDNGGTGDVTVAPSNFANGIAEWISSNSRSQAYKVTCSVRQSSAQNRKYTIKVEVPKGAWRSYLNMELTIPIFATNSDCELIVKAMQGLLKDGNPIPSAIAANSGIYGGSGGSMASNFTQFVLVDNGGTGDVTVAPSNFANGIAEWISSNSRSQAYKVTCSVRQSSAQNRKYTIKVEVPKGAWRSYLNMELTIPIFATNSDCELIVKAMQGLLKDGNPIPSAIAANSGIYGSSGGGEAAAKDKKYSIGLDIGTNSVGWAVITDEYKVPSKKFKVLGNTDRHSIKKNLIGALLFDSGETAEATRLKRTARRRYTRRKNRICYLQEIFSNEMAKVDDSFFHRLEESFLVEEDKKHERHPIFGNIVDEVAYHEKYPTIYHLRKKLVDSTDKADLRLIYLALAHMIKFRGHFLIEGDLNPDNSDVDKLFIQLVQTYNQLFEENPINASGVDAKAILSARLSKSRRLENLIAQLPGEKKNGLFGNLIALSLGLTPNFKSNFDLAEDAKLQLSKDTYDDDLDNLLAQIGDQYADLFLAAKNLSDAILLSDILRVNTEITKAPLSASMIKRYDEHHQDLTLLKALVRQQLPEKYKEIFFDQSKNGYAGYIDGGASQEEFYKFIKPILEKMDGTEELLVKLNREDLLRKQRTFDNGSIPHQIHLGELHAILRRQEDFYPFLKDNREKIEKILTFRIPYYVGPLARGNSRFAWMTRKSEETITPWNFEEVVDKGASAQSFIERMTNFDKNLPNEKVLPKHSLLYEYFTVYNELTKVKYVTEGMRKPAFLSGEQKKAIVDLLFKTNRKVTVKQLKEDYFKKIECFDSVEISGVEDRFNASLGTYHDLLKIIKDKDFLDNEENEDILEDIVLTLTLFEDREMIEERLKTYAHLFDDKVMKQLKRRRYTGWGRLSRKLINGIRDKQSGKTILDFLKSDGFANRNFMQLIHDDSLTFKEDIQKAQVSGQGDSLHEHIANLAGSPAIKKGILQTVKVVDELVKVMGRHKPENIVIEMARENQTTQKGQKNSRERMKRIEEGIKELGSQILKEHPVENTQLQNEKLYLYYLQNGRDMYVDQELDINRLSDYDVDHIVPQSFLKDDSIDNKVLTRSDKARGKSDNVPSEEVVKKMKNYWRQLLNAKLITQRKFDNLTKAERGGLSELDKAGFIKRQLVETRQITKHVAQILDSRMNTKYDENDKLIREVKVITLKSKLVSDFRKDFQFYKVREINNYHHAHDAYLNAVVGTALIKKYPKLESEFVYGDYKVYDVRKMIAKSEQEIGKATAKYFFYSNIMNFFKTEITLANGEIRKRPLIETNGETGEIVWDKGRDFATVRKVLSMPQVNIVKKTEVQTGGFSKESILPKRNSDKLIARKKDWDPKKYGGFDSPTVAYSVLVVAKVEKGKSKKLKSVKELLGITIMERSSFEKNPIDFLEAKGYKEVKKDLIIKLPKYSLFELENGRKRMLASAGELQKGNELALPSKYVNFLYLASHYEKLKGSPEDNEQKQLFVEQHKHYLDEIIEQISEFSKRVILADANLDKVLSAYNKHRDKPIREQAENIIHLFTLTNLGAPAAFKYFDTTIDRKRYTSTKEVLDATLIHQSITGLYETRIDLSQLGGDKRTADGSEFESPKKKAKVE

SEQ ID NO: 16160 - protein, 2267 aa, synthetic construct
MPAAKRVKLDGGTAPLEEEYRLFLEAPIQNVTLLEQWKREIPKVWAEINPPGLASTQAPIHVQLLSTALPVRVRQYPITLEAKRSLRETIRKFRAAGILRPVHSPWNTPLLPVRKSGTSEYRMVQDLREVNKRVETIHPTVPNPYTLLSLLPPDRIWYSVLDLKDAFFCIPLAPESQLIFAFEWADAEEGESGQLTWTRLPQGFKNSPTLFNEALNRDLQGFRLDHPSVSLLQYVDDLLIAADTQAACLSATRDLLMTLAELGYRVSGKKAQLCQEEVTYLGFKIHKGSRSLSNSRTQAILQIPVPKTKRQVREFLGKIGYCRLFIPGFAELAQPLYAATRPGNDPLVWGEKEEEAFQSLKLALTQPPALALPSLDKPFQLFVEETSGAAKGVLTQALGPWKRPVAYLSKRLDPVAAGWPRCLRAIAAAALLTREASKLTFGQDIEITSSHNLESLLRSPPDKWLTNARITQYQVLLLDPPRVRFKQTAALNPATLLPETDDTLPIHHCLDTLDSLTSTRPDLTDQPLAQAEATLFTDGSSYIRDGKRYAGAAVVTLDSVIWAEPLPIGTSAQKAELIALTKALEWSKDKSVNIYTDSRYAFATLHVHGMIYRERGWLTAGGKAIKNAPEILALLTAVWLPKRVAVMHCKGHQKDDAPTSTGNRRADEVAREVAIRPLSTQATISSGGSSGGSSGSETPGTSESATPESSGGSSGGSSMASNFTQFVLVDNGGTGDVTVAPSNFANGIAEWISSNSRSQAYKVTCSVRQSSAQNRKYTIKVEVPKGAWRSYLNMELTIPIFATNSDCELIVKAMQGLLKDGNPIPSAIAANSGIYAEAAAKEAAAKEAAAKEAAAKALEAEAAAKEAAAKEAAAKEAAAKADKKYSIGLDIGTNSVGWAVITDEYKVPSKKFKVLGNTDRHSIKKNLIGALLFDSGETAEATRLKRTARRRYTRRKNRICYLQEIFSNEMAKVDDSFFHRLEESFLVEEDKKHERHPIFGNIVDEVAYHEKYPTIYHLRKKLVDSTDKADLRLIYLALAHMIKFRGHFLIEGDLNPDNSDVDKLFIQLVQTYNQLFEENPINASGVDAKAILSARLSKSRRLENLIAQLPGEKKNGLFGNLIALSLGLTPNFKSNFDLAEDAKLQLSKDTYDDDLDNLLAQIGDQYADLFLAAKNLSDAILLSDILRVNTEITKAPLSASMIKRYDEHHQDLTLLKALVRQQLPEKYKEIFFDQSKNGYAGYIDGGASQEEFYKFIKPILEKMDGTEELLVKLNREDLLRKQRTFDNGSIPHQIHLGELHAILRRQEDFYPFLKDNREKIEKILTFRIPYYVGPLARGNSRFAWMTRKSEETITPWNFEEVVDKGASAQSFIERMTNFDKNLPNEKVLPKHSLLYEYFTVYNELTKVKYVTEGMRKPAFLSGEQKKAIVDLLFKTNRKVTVKQLKEDYFKKIECFDSVEISGVEDRFNASLGTYHDLLKIIKDKDFLDNEENEDILEDIVLTLTLFEDREMIEERLKTYAHLFDDKVMKQLKRRRYTGWGRLSRKLINGIRDKQSGKTILDFLKSDGFANRNFMQLIHDDSLTFKEDIQKAQVSGQGDSLHEHIANLAGSPAIKKGILQTVKVVDELVKVMGRHKPENIVIEMARENQTTQKGQKNSRERMKRIEEGIKELGSQILKEHPVENTQLQNEKLYLYYLQNGRDMYVDQELDINRLSDYDVDHIVPQSFLKDDSIDNKVLTRSDKARGKSDNVPSEEVVKKMKNYWRQLLNAKLITQRKFDNLTKAERGGLSELDKAGFIKRQLVETRQITKHVAQILDSRMNTKYDENDKLIREVKVITLKSKLVSDFRKDFQFYKVREINNYHHAHDAYLNAVVGTALIKKYPKLESEFVYGDYKVYDVRKMIAKSEQEIGKATAKYFFYSNIMNFFKTEITLANGEIRKRPLIETNGETGEIVWDKGRDFATVRKVLSMPQVNIVKKTEVQTGGFSKESILPKRNSDKLIARKKDWDPKKYGGFDSPTVAYSVLVVAKVEKGKSKKLKSVKELLGITIMERSSFEKNPIDFLEAKGYKEVKKDLIIKLPKYSLFELENGRKRMLASAGELQKGNELALPSKYVNFLYLASHYEKLKGSPEDNEQKQLFVEQHKHYLDEIIEQISEFSKRVILADANLDKVLSAYNKHRDKPIREQAENIIHLFTLTNLGAPAAFKYFDTTIDRKRYTSTKEVLDATLIHQSITGLYETRIDLSQLGGDKRTADGSEFESPKKKAKVE

SEQ ID NO: 16161 - protein, 2254 aa, synthetic construct
MPAAKRVKLDGGTAPLEEEYRLFLEAPIQNVTLLEQWKREIPKVWAEINPPGLASTQAPIHVQLLSTALPVRVRQYPITLEAKRSLRETIRKFRAAGILRPVHSPWNTPLLPVRKSGTSEYRMVQDLREVNKRVETIHPTVPNPYTLLSLLPPDRIWYSVLDLKDAFFCIPLAPESQLIFAFEWADAEEGESGQLTWTRLPQGFKNSPTLFNEALNRDLQGFRLDHPSVSLLQYVDDLLIAADTQAACLSATRDLLMTLAELGYRVSGKKAQLCQEEVTYLGFKIHKGSRSLSNSRTQAILQIPVPKTKRQVREFLGKIGYCRLFIPGFAELAQPLYAATRPGNDPLVWGEKEEEAFQSLKLALTQPPALALPSLDKPFQLFVEETSGAAKGVLTQALGPWKRPVAYLSKRLDPVAAGWPRCLRAIAAAALLTREASKLTFGQDIEITSSHNLESLLRSPPDKWLTNARITQYQVLLLDPPRVRFKQTAALNPATLLPETDDTLPIHHCLDTLDSLTSTRPDLTDQPLAQAEATLFTDGSSYIRDGKRYAGAAVVTLDSVIWAEPLPIGTSAQKAELIALTKALEWSKDKSVNIYTDSRYAFATLHVHGMIYRERGWLTAGGKAIKNAPEILALLTAVWLPKRVAVMHCKGHQKDDAPTSTGNRRADEVAREVAIRPLSTQATISSGGSSGGSSGSETPGTSESATPESSGGSSGGSSMASNFTQFVLVDNGGTGDVTVAPSNFANGIAEWISSNSRSQAYKVTCSVRQSSAQNRKYTIKVEVPKGAWRSYLNMELTIPIFATNSDCELIVKAMQGLLKDGNPIPSAIAANSGIYSGGSSGGSSGSETPGTSESATPESSGGSSGGSSDKKYSIGLDIGTNSVGWAVITDEYKVPSKKFKVLGNTDRHSIKKNLIGALLFDSGETAEATRLKRTARRRYTRRKNRICYLQEIFSNEMAKVDDSFFHRLEESFLVEEDKKHERHPIFGNIVDEVAYHEKYPTIYHLRKKLVDSTDKADLRLIYLALAHMIKFRGHFLIEGDLNPDNSDVDKLFIQLVQTYNQLFEENPINASGVDAKAILSARLSKSRRLENLIAQLPGEKKNGLFGNLIALSLGLTPNFKSNFDLAEDAKLQLSKDTYDDDLDNLLAQIGDQYADLFLAAKNLSDAILLSDILRVNTEITKAPLSASMIKRYDEHHQDLTLLKALVRQQLPEKYKEIFFDQSKNGYAGYIDGGASQEEFYKFIKPILEKMDGTEELLVKLNREDLLRKQRTFDNGSIPHQIHLGELHAILRRQEDFYPFLKDNREKIEKILTFRIPYYVGPLARGNSRFAWMTRKSEETITPWNFEEVVDKGASAQSFIERMTNFDKNLPNEKVLPKHSLLYEYFTVYNELTKVKYVTEGMRKPAFLSGEQKKAIVDLLFKTNRKVTVKQLKEDYFKKIECFDSVEISGVEDRFNASLGTYHDLLKIIKDKDFLDNEENEDILEDIVLTLTLFEDREMIEERLKTYAHLFDDKVMKQLKRRRYTGWGRLSRKLINGIRDKQSGKTILDFLKSDGFANRNFMQLIHDDSLTFKEDIQKAQVSGQGDSLHEHIANLAGSPAIKKGILQTVKVVDELVKVMGRHKPENIVIEMARENQTTQKGQKNSRERMKRIEEGIKELGSQILKEHPVENTQLQNEKLYLYYLQNGRDMYVDQELDINRLSDYDVDHIVPQSFLKDDSIDNKVLTRSDKARGKSDNVPSEEVVKKMKNYWRQLLNAKLITQRKFDNLTKAERGGLSELDKAGFIKRQLVETRQITKHVAQILDSRMNTKYDENDKLIREVKVITLKSKLVSDFRKDFQFYKVREINNYHHAHDAYLNAVVGTALIKKYPKLESEFVYGDYKVYDVRKMIAKSEQEIGKATAKYFFYSNIMNFFKTEITLANGEIRKRPLIETNGETGEIVWDKGRDFATVRKVLSMPQVNIVKKTEVQTGGFSKESILPKRNSDKLIARKKDWDPKKYGGFDSPTVAYSVLVVAKVEKGKSKKLKSVKELLGITIMERSSFEKNPIDFLEAKGYKEVKKDLIIKLPKYSLFELENGRKRMLASAGELQKGNELALPSKYVNFLYLASHYEKLKGSPEDNEQKQLFVEQHKHYLDEIIEQISEFSKRVILADANLDKVLSAYNKHRDKPIREQAENIIHLFTLTNLGAPAAFKYFDTTIDRKRYTSTKEVLDATLIHQSITGLYETRIDLSQLGGDKRTADGSEFESPKKKAKVE

SEQ ID NO: 16162 - protein, 2239 aa, synthetic construct
MPAAKRVKLDGGTAPLEEEYRLFLEAPIQNVTLLEQWKREIPKVWAEINPPGLASTQAPIHVQLLSTALPVRVRQYPITLEAKRSLRETIRKFRAAGILRPVHSPWNTPLLPVRKSGTSEYRMVQDLREVNKRVETIHPTVPNPYTLLSLLPPDRIWYSVLDLKDAFFCIPLAPESQLIFAFEWADAEEGESGQLTWTRLPQGFKNSPTLFNEALNRDLQGFRLDHPSVSLLQYVDDLLIAADTQAACLSATRDLLMTLAELGYRVSGKKAQLCQEEVTYLGFKIHKGSRSLSNSRTQAILQIPVPKTKRQVREFLGKIGYCRLFIPGFAELAQPLYAATRPGNDPLVWGEKEEEAFQSLKLALTQPPALALPSLDKPFQLFVEETSGAAKGVLTQALGPWKRPVAYLSKRLDPVAAGWPRCLRAIAAAALLTREASKLTFGQDIEITSSHNLESLLRSPPDKWLTNARITQYQVLLLDPPRVRFKQTAALNPATLLPETDDTLPIHHCLDTLDSLTSTRPDLTDQPLAQAEATLFTDGSSYIRDGKRYAGAAVVTLDSVIWAEPLPIGTSAQKAELIALTKALEWSKDKSVNIYTDSRYAFATLHVHGMIYRERGWLTAGGKAIKNAPEILALLTAVWLPKRVAVMHCKGHQKDDAPTSTGNRRADEVAREVAIRPLSTQATISSGGSSGGSSGSETPGTSESATPESSGGSSGGSSMASNFTQFVLVDNGGTGDVTVAPSNFANGIAEWISSNSRSQAYKVTCSVRQSSAQNRKYTIKVEVPKGAWRSYLNMELTIPIFATNSDCELIVKAMQGLLKDGNPIPSAIAANSGIYGSSGSSGSSGSSGSSGSSDKKYSIGLDIGTNSVGWAVITDEYKVPSKKFKVLGNTDRHSIKKNLIGALLFDSGETAEATRLKRTARRRYTRRKNRICYLQEIFSNEMAKVDDSFFHRLEESFLVEEDKKHERHPIFGNIVDEVAYHEKYPTIYHLRKKLVDSTDKADLRLIYLALAHMIKFRGHFLIEGDLNPDNSDVDKLFIQLVQTYNQLFEENPINASGVDAKAILSARLSKSRRLENLIAQLPGEKKNGLFGNLIALSLGLTPNFKSNFDLAEDAKLQLSKDTYDDDLDNLLAQIGDQYADLFLAAKNLSDAILLSDILRVNTEITKAPLSASMIKRYDEHHQDLTLLKALVRQQLPEKYKEIFFDQSKNGYAGYIDGGASQEEFYKFIKPILEKMDGTEELLVKLNREDLLRKQRTFDNGSIPHQIHLGELHAILRRQEDFYPFLKDNREKIEKILTFRIPYYVGPLARGNSRFAWMTRKSEETITPWNFEEVVDKGASAQSFIERMTNFDKNLPNEKVLPKHSLLYEYFTVYNELTKVKYVTEGMRKPAFLSGEQKKAIVDLLFKTNRKVTVKQLKEDYFKKIECFDSVEISGVEDRFNASLGTYHDLLKIIKDKDFLDNEENEDILEDIVLTLTLFEDREMIEERLKTYAHLFDDKVMKQLKRRRYTGWGRLSRKLINGIRDKQSGKTILDFLKSDGFANRNFMQLIHDDSLTFKEDIQKAQVSGQGDSLHEHIANLAGSPAIKKGILQTVKVVDELVKVMGRHKPENIVIEMARENQTTQKGQKNSRERMKRIEEGIKELGSQILKEHPVENTQLQNEKLYLYYLQNGRDMYVDQELDINRLSDYDVDHIVPQSFLKDDSIDNKVLTRSDKARGKSDNVPSEEVVKKMKNYWRQLLNAKLITQRKFDNLTKAERGGLSELDKAGFIKRQLVETRQITKHVAQILDSRMNTKYDENDKLIREVKVITLKSKLVSDFRKDFQFYKVREINNYHHAHDAYLNAVVGTALIKKYPKLESEFVYGDYKVYDVRKMIAKSEQEIGKATAKYFFYSNIMNFFKTEITLANGEIRKRPLIETNGETGEIVWDKGRDFATVRKVLSMPQVNIVKKTEVQTGGFSKESILPKRNSDKLIARKKDWDPKKYGGFDSPTVAYSVLVVAKVEKGKSKKLKSVKELLGITIMERSSFEKNPIDFLEAKGYKEVKKDLIIKLPKYSLFELENGRKRMLASAGELQKGNELALPSKYVNFLYLASHYEKLKGSPEDNEQKQLFVEQHKHYLDEIIEQISEFSKRVILADANLDKVLSAYNKHRDKPIREQAENIIHLFTLTNLGAPAAFKYFDTTIDRKRYTSTKEVLDATLIHQSITGLYETRIDLSQLGGDKRTADGSEFESPKKKAKVE

SEQ ID NO: 16163 - protein, 2232 aa, synthetic construct
MPAAKRVKLDGGTAPLEEEYRLFLEAPIQNVTLLEQWKREIPKVWAEINPPGLASTQAPIHVQLLSTALPVRVRQYPITLEAKRSLRETIRKFRAAGILRPVHSPWNTPLLPVRKSGTSEYRMVQDLREVNKRVETIHPTVPNPYTLLSLLPPDRIWYSVLDLKDAFFCIPLAPESQLIFAFEWADAEEGESGQLTWTRLPQGFKNSPTLFNEALNRDLQGFRLDHPSVSLLQYVDDLLIAADTQAACLSATRDLLMTLAELGYRVSGKKAQLCQEEVTYLGFKIHKGSRSLSNSRTQAILQIPVPKTKRQVREFLGKIGYCRLFIPGFAELAQPLYAATRPGNDPLVWGEKEEEAFQSLKLALTQPPALALPSLDKPFQLFVEETSGAAKGVLTQALGPWKRPVAYLSKRLDPVAAGWPRCLRAIAAAALLTREASKLTFGQDIEITSSHNLESLLRSPPDKWLTNARITQYQVLLLDPPRVRFKQTAALNPATLLPETDDTLPIHHCLDTLDSLTSTRPDLTDQPLAQAEATLFTDGSSYIRDGKRYAGAAVVTLDSVIWAEPLPIGTSAQKAELIALTKALEWSKDKSVNIYTDSRYAFATLHVHGMIYRERGWLTAGGKAIKNAPEILALLTAVWLPKRVAVMHCKGHQKDDAPTSTGNRRADEVAREVAIRPLSTQATISSGGSSGGSSGSETPGTSESATPESSGGSSGGSSMASNFTQFVLVDNGGTGDVTVAPSNFANGIAEWISSNSRSQAYKVTCSVRQSSAQNRKYTIKVEVPKGAWRSYLNMELTIPIFATNSDCELIVKAMQGLLKDGNPIPSAIAANSGIYGSSGGGEAAAKDKKYSIGLDIGTNSVGWAVITDEYKVPSKKFKVLGNTDRHSIKKNLIGALLFDSGETAEATRLKRTARRRYTRRKNRICYLQEIFSNEMAKVDDSFFHRLEESFLVEEDKKHERHPIFGNIVDEVAYHEKYPTIYHLRKKLVDSTDKADLRLIYLALAHMIKFRGHFLIEGDLNPDNSDVDKLFIQLVQTYNQLFEENPINASGVDAKAILSARLSKSRRLENLIAQLPGEKKNGLFGNLIALSLGLTPNFKSNFDLAEDAKLQLSKDTYDDDLDNLLAQIGDQYADLFLAAKNLSDAILLSDILRVNTEITKAPLSASMIKRYDEHHQDLTLLKALVRQQLPEKYKEIFFDQSKNGYAGYIDGGASQEEFYKFIKPILEKMDGTEELLVKLNREDLLRKQRTFDNGSIPHQIHLGELHAILRRQEDFYPFLKDNREKIEKILTFRIPYYVGPLARGNSRFAWMTRKSEETITPWNFEEVVDKGASAQSFIERMTNFDKNLPNEKVLPKHSLLYEYFTVYNELTKVKYVTEGMRKPAFLSGEQKKAIVDLLFKTNRKVTVKQLKEDYFKKIECFDSVEISGVEDRFNASLGTYHDLLKIIKDKDFLDNEENEDILEDIVLTLTLFEDREMIEERLKTYAHLFDDKVMKQLKRRRYTGWGRLSRKLINGIRDKQSGKTILDFLKSDGFANRNFMQLIHDDSLTFKEDIQKAQVSGQGDSLHEHIANLAGSPAIKKGILQTVKVVDELVKVMGRHKPENIVIEMARENQTTQKGQKNSRERMKRIEEGIKELGSQILKEHPVENTQLQNEKLYLYYLQNGRDMYVDQELDINRLSDYDVDHIVPQSFLKDDSIDNKVLTRSDKARGKSDNVPSEEVVKKMKNYWRQLLNAKLITQRKFDNLTKAERGGLSELDKAGFIKRQLVETRQITKHVAQILDSRMNTKYDENDKLIREVKVITLKSKLVSDFRKDFQFYKVREINNYHHAHDAYLNAVVGTALIKKYPKLESEFVYGDYKVYDVRKMIAKSEQEIGKATAKYFFYSNIMNFFKTEITLANGEIRKRPLIETNGETGEIVWDKGRDFATVRKVLSMPQVNIVKKTEVQTGGFSKESILPKRNSDKLIARKKDWDPKKYGGFDSPTVAYSVLVVAKVEKGKSKKLKSVKELLGITIMERSSFEKNPIDFLEAKGYKEVKKDLIIKLPKYSLFELENGRKRMLASAGELQKGNELALPSKYVNFLYLASHYEKLKGSPEDNEQKQLFVEQHKHYLDEIIEQISEFSKRVILADANLDKVLSAYNKHRDKPIREQAENIIHLFTLTNLGAPAAFKYFDTTIDRKRYTSTKEVLDATLIHQSITGLYETRIDLSQLGGDKRTADGSEFESPKKKAKVE

SEQ ID NO: 16164 - protein, 2390 aa, synthetic construct
MPAAKRVKLDGGTAPLEEEYRLFLEAPIQNVTLLEQWKREIPKVWAEINPPGLASTQAPIHVQLLSTALPVRVRQYPITLEAKRSLRETIRKFRAAGILRPVHSPWNTPLLPVRKSGTSEYRMVQDLREVNKRVETIHPTVPNPYTLLSLLPPDRIWYSVLDLKDAFFCIPLAPESQLIFAFEWADAEEGESGQLTWTRLPQGFKNSPTLFNEALNRDLQGFRLDHPSVSLLQYVDDLLIAADTQAACLSATRDLLMTLAELGYRVSGKKAQLCQEEVTYLGFKIHKGSRSLSNSRTQAILQIPVPKTKRQVREFLGKIGYCRLFIPGFAELAQPLYAATRPGNDPLVWGEKEEEAFQSLKLALTQPPALALPSLDKPFQLFVEETSGAAKGVLTQALGPWKRPVAYLSKRLDPVAAGWPRCLRAIAAAALLTREASKLTFGQDIEITSSHNLESLLRSPPDKWLTNARITQYQVLLLDPPRVRFKQTAALNPATLLPETDDTLPIHHCLDTLDSLTSTRPDLTDQPLAQAEATLFTDGSSYIRDGKRYAGAAVVTLDSVIWAEPLPIGTSAQKAELIALTKALEWSKDKSVNIYTDSRYAFATLHVHGMIYRERGWLTAGGKAIKNAPEILALLTAVWLPKRVAVMHCKGHQKDDAPTSTGNRRADEVAREVAIRPLSTQATISSGGSSGGSSGSETPGTSESATPESSGGSSGGSSMASNFTQFVLVDNGGTGDVTVAPSNFANGIAEWISSNSRSQAYKVTCSVRQSSAQNRKYTIKVEVPKGAWRSYLNMELTIPIFATNSDCELIVKAMQGLLKDGNPIPSAIAANSGIYGGSGGSMASNFTQFVLVDNGGTGDVTVAPSNFANGIAEWISSNSRSQAYKVTCSVRQSSAQNRKYTIKVEVPKGAWRSYLNMELTIPIFATNSDCELIVKAMQGLLKDGNPIPSAIAANSGIYAEAAAKEAAAKEAAAKEAAAKALEAEAAAKEAAAKEAAAKEAAAKADKKYSIGLDIGTNSVGWAVITDEYKVPSKKFKVLGNTDRHSIKKNLIGALLFDSGETAEATRLKRTARRRYTRRKNRICYLQEIFSNEMAKVDDSFFHRLEESFLVEEDKKHERHPIFGNIVDEVAYHEKYPTIYHLRKKLVDSTDKADLRLIYLALAHMIKFRGHFLIEGDLNPDNSDVDKLFIQLVQTYNQLFEENPINASGVDAKAILSARLSKSRRLENLIAQLPGEKKNGLFGNLIALSLGLTPNFKSNFDLAEDAKLQLSKDTYDDDLDNLLAQIGDQYADLFLAAKNLSDAILLSDILRVNTEITKAPLSASMIKRYDEHHQDLTLLKALVRQQLPEKYKEIFFDQSKNGYAGYIDGGASQEEFYKFIKPILEKMDGTEELLVKLNREDLLRKQRTFDNGSIPHQIHLGELHAILRRQEDFYPFLKDNREKIEKILTFRIPYYVGPLARGNSRFAWMTRKSEETITPWNFEEVVDKGASAQSFIERMTNFDKNLPNEKVLPKHSLLYEYFTVYNELTKVKYVTEGMRKPAFLSGEQKKAIVDLLFKTNRKVTVKQLKEDYFKKIECFDSVEISGVEDRFNASLGTYHDLLKIIKDKDFLDNEENEDILEDIVLTLTLFEDREMIEERLKTYAHLFDDKVMKQLKRRRYTGWGRLSRKLINGIRDKQSGKTILDFLKSDGFANRNFMQLIHDDSLTFKEDIQKAQVSGQGDSLHEHIANLAGSPAIKKGILQTVKVVDELVKVMGRHKPENIVIEMARENQTTQKGQKNSRERMKRIEEGIKELGSQILKEHPVENTQLQNEKLYLYYLQNGRDMYVDQELDINRLSDYDVDHIVPQSFLKDDSIDNKVLTRSDKARGKSDNVPSEEVVKKMKNYWRQLLNAKLITQRKFDNLTKAERGGLSELDKAGFIKRQLVETRQITKHVAQILDSRMNTKYDENDKLIREVKVITLKSKLVSDFRKDFQFYKVREINNYHHAHDAYLNAVVGTALIKKYPKLESEFVYGDYKVYDVRKMIAKSEQEIGKATAKYFFYSNIMNFFKTEITLANGEIRKRPLIETNGETGEIVWDKGRDFATVRKVLSMPQVNIVKKTEVQTGGFSKESILPKRNSDKLIARKKDWDPKKYGGFDSPTVAYSVLVVAKVEKGKSKKLKSVKELLGITIMERSSFEKNPIDFLEAKGYKEVKKDLIIKLPKYSLFELENGRKRMLASAGELQKGNELALPSKYVNFLYLASHYEKLKGSPEDNEQKQLFVEQHKHYLDEIIEQISEFSKRVILADANLDKVLSAYNKHRDKPIREQAENIIHLFTLTNLGAPAAFKYFDTTIDRKRYTSTKEVLDATLIHQSITGLYETRIDLSQLGGDKRTADGSEFESPKKKAKVE

SEQ ID NO: 16165 - protein, 2377 aa, synthetic construct
MPAAKRVKLDGGTAPLEEEYRLFLEAPIQNVTLLEQWKREIPKVWAEINPPGLASTQAPIHVQLLSTALPVRVRQYPITLEAKRSLRETIRKFRAAGILRPVHSPWNTPLLPVRKSGTSEYRMVQDLREVNKRVETIHPTVPNPYTLLSLLPPDRIWYSVLDLKDAFFCIPLAPESQLIFAFEWADAEEGESGQLTWTRLPQGFKNSPTLFNEALNRDLQGFRLDHPSVSLLQYVDDLLIAADTQAACLSATRDLLMTLAELGYRVSGKKAQLCQEEVTYLGFKIHKGSRSLSNSRTQAILQIPVPKTKRQVREFLGKIGYCRLFIPGFAELAQPLYAATRPGNDPLVWGEKEEEAFQSLKLALTQPPALALPSLDKPFQLFVEETSGAAKGVLTQALGPWKRPVAYLSKRLDPVAAGWPRCLRAIAAAALLTREASKLTFGQDIEITSSHNLESLLRSPPDKWLTNARITQYQVLLLDPPRVRFKQTAALNPATLLPETDDTLPIHHCLDTLDSLTSTRPDLTDQPLAQAEATLFTDGSSYIRDGKRYAGAAVVTLDSVIWAEPLPIGTSAQKAELIALTKALEWSKDKSVNIYTDSRYAFATLHVHGMIYRERGWLTAGGKAIKNAPEILALLTAVWLPKRVAVMHCKGHQKDDAPTSTGNRRADEVAREVAIRPLSTQATISSGGSSGGSSGSETPGTSESATPESSGGSSGGSSMASNFTQFVLVDNGGTGDVTVAPSNFANGIAEWISSNSRSQAYKVTCSVRQSSAQNRKYTIKVEVPKGAWRSYLNMELTIPIFATNSDCELIVKAMQGLLKDGNPIPSAIAANSGIYGGSGGSMASNFTQFVLVDNGGTGDVTVAPSNFANGIAEWISSNSRSQAYKVTCSVRQSSAQNRKYTIKVEVPKGAWRSYLNMELTIPIFATNSDCELIVKAMQGLLKDGNPIPSAIAANSGIYSGGSSGGSSGSETPGTSESATPESSGGSSGGSSDKKYSIGLDIGTNSVGWAVITDEYKVPSKKFKVLGNTDRHSIKKNLIGALLFDSGETAEATRLKRTARRRYTRRKNRICYLQEIFSNEMAKVDDSFFHRLEESFLVEEDKKHERHPIFGNIVDEVAYHEKYPTIYHLRKKLVDSTDKADLRLIYLALAHMIKFRGHFLIEGDLNPDNSDVDKLFIQLVQTYNQLFEENPINASGVDAKAILSARLSKSRRLENLIAQLPGEKKNGLFGNLIALSLGLTPNFKSNFDLAEDAKLQLSKDTYDDDLDNLLAQIGDQYADLFLAAKNLSDAILLSDILRVNTEITKAPLSASMIKRYDEHHQDLTLLKALVRQQLPEKYKEIFFDQSKNGYAGYIDGGASQEEFYKFIKPILEKMDGTEELLVKLNREDLLRKQRTFDNGSIPHQIHLGELHAILRRQEDFYPFLKDNREKIEKILTFRIPYYVGPLARGNSRFAWMTRKSEETITPWNFEEVVDKGASAQSFIERMTNFDKNLPNEKVLPKHSLLYEYFTVYNELTKVKYVTEGMRKPAFLSGEQKKAIVDLLFKTNRKVTVKQLKEDYFKKIECFDSVEISGVEDRFNASLGTYHDLLKIIKDKDFLDNEENEDILEDIVLTLTLFEDREMIEERLKTYAHLFDDKVMKQLKRRRYTGWGRLSRKLINGIRDKQSGKTILDFLKSDGFANRNFMQLIHDDSLTFKEDIQKAQVSGQGDSLHEHIANLAGSPAIKKGILQTVKVVDELVKVMGRHKPENIVIEMARENQTTQKGQKNSRERMKRIEEGIKELGSQILKEHPVENTQLQNEKLYLYYLQNGRDMYVDQELDINRLSDYDVDHIVPQSFLKDDSIDNKVLTRSDKARGKSDNVPSEEVVKKMKNYWRQLLNAKLITQRKFDNLTKAERGGLSELDKAGFIKRQLVETRQITKHVAQILDSRMNTKYDENDKLIREVKVITLKSKLVSDFRKDFQFYKVREINNYHHAHDAYLNAVVGTALIKKYPKLESEFVYGDYKVYDVRKMIAKSEQEIGKATAKYFFYSNIMNFFKTEITLANGEIRKRPLIETNGETGEIVWDKGRDFATVRKVLSMPQVNIVKKTEVQTGGFSKESILPKRNSDKLIARKKDWDPKKYGGFDSPTVAYSVLVVAKVEKGKSKKLKSVKELLGITIMERSSFEKNPIDFLEAKGYKEVKKDLIIKLPKYSLFELENGRKRMLASAGELQKGNELALPSKYVNFLYLASHYEKLKGSPEDNEQKQLFVEQHKHYLDEIIEQISEFSKRVILADANLDKVLSAYNKHRDKPIREQAENIIHLFTLTNLGAPAAFKYFDTTIDRKRYTSTKEVLDATLIHQSITGLYETRIDLSQLGGDKRTADGSEFESPKKKAKVE

SEQ ID NO: 16166 - protein, 2362 aa, synthetic construct
MPAAKRVKLDGGTAPLEEEYRLFLEAPIQNVTLLEQWKREIPKVWAEINPPGLASTQAPIHVQLLSTALPVRVRQYPITLEAKRSLRETIRKFRAAGILRPVHSPWNTPLLPVRKSGTSEYRMVQDLREVNKRVETIHPTVPNPYTLLSLLPPDRIWYSVLDLKDAFFCIPLAPESQLIFAFEWADAEEGESGQLTWTRLPQGFKNSPTLFNEALNRDLQGFRLDHPSVSLLQYVDDLLIAADTQAACLSATRDLLMTLAELGYRVSGKKAQLCQEEVTYLGFKIHKGSRSLSNSRTQAILQIPVPKTKRQVREFLGKIGYCRLFIPGFAELAQPLYAATRPGNDPLVWGEKEEEAFQSLKLALTQPPALALPSLDKPFQLFVEETSGAAKGVLTQALGPWKRPVAYLSKRLDPVAAGWPRCLRAIAAAALLTREASKLTFGQDIEITSSHNLESLLRSPPDKWLTNARITQYQVLLLDPPRVRFKQTAALNPATLLPETDDTLPIHHCLDTLDSLTSTRPDLTDQPLAQAEATLFTDGSSYIRDGKRYAGAAVVTLDSVIWAEPLPIGTSAQKAELIALTKALEWSKDKSVNIYTDSRYAFATLHVHGMIYRERGWLTAGGKAIKNAPEILALLTAVWLPKRVAVMHCKGHQKDDAPTSTGNRRADEVAREVAIRPLSTQATISSGGSSGGSSGSETPGTSESATPESSGGSSGGSSMASNFTQFVLVDNGGTGDVTVAPSNFANGIAEWISSNSRSQAYKVTCSVRQSSAQNRKYTIKVEVPKGAWRSYLNMELTIPIFATNSDCELIVKAMQGLLKDGNPIPSAIAANSGIYGGSGGSMASNFTQFVLVDNGGTGDVTVAPSNFANGIAEWISSNSRSQAYKVTCSVRQSSAQNRKYTIKVEVPKGAWRSYLNMELTIPIFATNSDCELIVKAMQGLLKDGNPIPSAIAANSGIYGSSGSSGSSGSSGSSGSSDKKYSIGLDIGTNSVGWAVITDEYKVPSKKFKVLGNTDRHSIKKNLIGALLFDSGETAEATRLKRTARRRYTRRKNRICYLQEIFSNEMAKVDDSFFHRLEESFLVEEDKKHERHPIFGNIVDEVAYHEKYPTIYHLRKKLVDSTDKADLRLIYLALAHMIKFRGHFLIEGDLNPDNSDVDKLFIQLVQTYNQLFEENPINASGVDAKAILSARLSKSRRLENLIAQLPGEKKNGLFGNLIALSLGLTPNFKSNFDLAEDAKLQLSKDTYDDDLDNLLAQIGDQYADLFLAAKNLSDAILLSDILRVNTEITKAPLSASMIKRYDEHHQDLTLLKALVRQQLPEKYKEIFFDQSKNGYAGYIDGGASQEEFYKFIKPILEKMDGTEELLVKLNREDLLRKQRTFDNGSIPHQIHLGELHAILRRQEDFYPFLKDNREKIEKILTFRIPYYVGPLARGNSRFAWMTRKSEETITPWNFEEVVDKGASAQSFIERMTNFDKNLPNEKVLPKHSLLYEYFTVYNELTKVKYVTEGMRKPAFLSGEQKKAIVDLLFKTNRKVTVKQLKEDYFKKIECFDSVEISGVEDRFNASLGTYHDLLKIIKDKDFLDNEENEDILEDIVLTLTLFEDREMIEERLKTYAHLFDDKVMKQLKRRRYTGWGRLSRKLINGIRDKQSGKTILDFLKSDGFANRNFMQLIHDDSLTFKEDIQKAQVSGQGDSLHEHIANLAGSPAIKKGILQTVKVVDELVKVMGRHKPENIVIEMARENQTTQKGQKNSRERMKRIEEGIKELGSQILKEHPVENTQLQNEKLYLYYLQNGRDMYVDQELDINRLSDYDVDHIVPQSFLKDDSIDNKVLTRSDKARGKSDNVPSEEVVKKMKNYWRQLLNAKLITQRKFDNLTKAERGGLSELDKAGFIKRQLVETRQITKHVAQILDSRMNTKYDENDKLIREVKVITLKSKLVSDFRKDFQFYKVREINNYHHAHDAYLNAVVGTALIKKYPKLESEFVYGDYKVYDVRKMIAKSEQEIGKATAKYFFYSNIMNFFKTEITLANGEIRKRPLIETNGETGEIVWDKGRDFATVRKVLSMPQVNIVKKTEVQTGGFSKESILPKRNSDKLIARKKDWDPKKYGGFDSPTVAYSVLVVAKVEKGKSKKLKSVKELLGITIMERSSFEKNPIDFLEAKGYKEVKKDLIIKLPKYSLFELENGRKRMLASAGELQKGNELALPSKYVNFLYLASHYEKLKGSPEDNEQKQLFVEQHKHYLDEIIEQISEFSKRVILADANLDKVLSAYNKHRDKPIREQAENIIHLFTLTNLGAPAAFKYFDTTIDRKRYTSTKEVLDATLIHQSITGLYETRIDLSQLGGDKRTADGSEFESPKKKAKVE

SEQ ID NO: 16167 - protein, 2355 aa, synthetic construct
MPAAKRVKLDGGTAPLEEEYRLFLEAPIQNVTLLEQWKREIPKVWAEINPPGLASTQAPIHVQLLSTALPVRVRQYPITLEAKRSLRETIRKFRAAGILRPVHSPWNTPLLPVRKSGTSEYRMVQDLREVNKRVETIHPTVPNPYTLLSLLPPDRIWYSVLDLKDAFFCIPLAPESQLIFAFEWADAEEGESGQLTWTRLPQGFKNSPTLFNEALNRDLQGFRLDHPSVSLLQYVDDLLIAADTQAACLSATRDLLMTLAELGYRVSGKKAQLCQEEVTYLGFKIHKGSRSLSNSRTQAILQIPVPKTKRQVREFLGKIGYCRLFIPGFAELAQPLYAATRPGNDPLVWGEKEEEAFQSLKLALTQPPALALPSLDKPFQLFVEETSGAAKGVLTQALGPWKRPVAYLSKRLDPVAAGWPRCLRAIAAAALLTREASKLTFGQDIEITSSHNLESLLRSPPDKWLTNARITQYQVLLLDPPRVRFKQTAALNPATLLPETDDTLPIHHCLDTLDSLTSTRPDLTDQPLAQAEATLFTDGSSYIRDGKRYAGAAVVTLDSVIWAEPLPIGTSAQKAELIALTKALEWSKDKSVNIYTDSRYAFATLHVHGMIYRERGWLTAGGKAIKNAPEILALLTAVWLPKRVAVMHCKGHQKDDAPTSTGNRRADEVAREVAIRPLSTQATISSGGSSGGSSGSETPGTSESATPESSGGSSGGSSMASNFTQFVLVDNGGTGDVTVAPSNFANGIAEWISSNSRSQAYKVTCSVRQSSAQNRKYTIKVEVPKGAWRSYLNMELTIPIFATNSDCELIVKAMQGLLKDGNPIPSAIAANSGIYGGSGGSMASNFTQFVLVDNGGTGDVTVAPSNFANGIAEWISSNSRSQAYKVTCSVRQSSAQNRKYTIKVEVPKGAWRSYLNMELTIPIFATNSDCELIVKAMQGLLKDGNPIPSAIAANSGIYGSSGGGEAAAKDKKYSIGLDIGTNSVGWAVITDEYKVPSKKFKVLGNTDRHSIKKNLIGALLFDSGETAEATRLKRTARRRYTRRKNRICYLQEIFSNEMAKVDDSFFHRLEESFLVEEDKKHERHPIFGNIVDEVAYHEKYPTIYHLRKKLVDSTDKADLRLIYLALAHMIKFRGHFLIEGDLNPDNSDVDKLFIQLVQTYNQLFEENPINASGVDAKAILSARLSKSRRLENLIAQLPGEKKNGLFGNLIALSLGLTPNFKSNFDLAEDAKLQLSKDTYDDDLDNLLAQIGDQYADLFLAAKNLSDAILLSDILRVNTEITKAPLSASMIKRYDEHHQDLTLLKALVRQQLPEKYKEIFFDQSKNGYAGYIDGGASQEEFYKFIKPILEKMDGTEELLVKLNREDLLRKQRTFDNGSIPHQIHLGELHAILRRQEDFYPFLKDNREKIEKILTFRIPYYVGPLARGNSRFAWMTRKSEETITPWNFEEVVDKGASAQSFIERMTNFDKNLPNEKVLPKHSLLYEYFTVYNELTKVKYVTEGMRKPAFLSGEQKKAIVDLLFKTNRKVTVKQLKEDYFKKIECFDSVEISGVEDRFNASLGTYHDLLKIIKDKDFLDNEENEDILEDIVLTLTLFEDREMIEERLKTYAHLFDDKVMKQLKRRRYTGWGRLSRKLINGIRDKQSGKTILDFLKSDGFANRNFMQLIHDDSLTFKEDIQKAQVSGQGDSLHEHIANLAGSPAIKKGILQTVKVVDELVKVMGRHKPENIVIEMARENQTTQKGQKNSRERMKRIEEGIKELGSQILKEHPVENTQLQNEKLYLYYLQNGRDMYVDQELDINRLSDYDVDHIVPQSFLKDDSIDNKVLTRSDKARGKSDNVPSEEVVKKMKNYWRQLLNAKLITQRKFDNLTKAERGGLSELDKAGFIKRQLVETRQITKHVAQILDSRMNTKYDENDKLIREVKVITLKSKLVSDFRKDFQFYKVREINNYHHAHDAYLNAVVGTALIKKYPKLESEFVYGDYKVYDVRKMIAKSEQEIGKATAKYFFYSNIMNFFKTEITLANGEIRKRPLIETNGETGEIVWDKGRDFATVRKVLSMPQVNIVKKTEVQTGGFSKESILPKRNSDKLIARKKDWDPKKYGGFDSPTVAYSVLVVAKVEKGKSKKLKSVKELLGITIMERSSFEKNPIDFLEAKGYKEVKKDLIIKLPKYSLFELENGRKRMLASAGELQKGNELALPSKYVNFLYLASHYEKLKGSPEDNEQKQLFVEQHKHYLDEIIEQISEFSKRVILADANLDKVLSAYNKHRDKPIREQAENIIHLFTLTNLGAPAAFKYFDTTIDRKRYTSTKEVLDATLIHQSITGLYETRIDLSQLGGDKRTADGSEFESPKKKAKVE

SEQ ID NO: 16168 - protein, 2646 aa, synthetic construct
MPAAKRVKLDGGTAPLEEEYRLFLEAPIQNVTLLEQWKREIPKVWAEINPPGLASTQAPIHVQLLSTALPVRVRQYPITLEAKRSLRETIRKFRAAGILRPVHSPWNTPLLPVRKSGTSEYRMVQDLREVNKRVETIHPTVPNPYTLLSLLPPDRIWYSVLDLKDAFFCIPLAPESQLIFAFEWADAEEGESGQLTWTRLPQGFKNSPTLFNEALNRDLQGFRLDHPSVSLLQYVDDLLIAADTQAACLSATRDLLMTLAELGYRVSGKKAQLCQEEVTYLGFKIHKGSRSLSNSRTQAILQIPVPKTKRQVREFLGKIGYCRLFIPGFAELAQPLYAATRPGNDPLVWGEKEEEAFQSLKLALTQPPALALPSLDKPFQLFVEETSGAAKGVLTQALGPWKRPVAYLSKRLDPVAAGWPRCLRAIAAAALLTREASKLTFGQDIEITSSHNLESLLRSPPDKWLTNARITQYQVLLLDPPRVRFKQTAALNPATLLPETDDTLPIHHCLDTLDSLTSTRPDLTDQPLAQAEATLFTDGSSYIRDGKRYAGAAVVTLDSVIWAEPLPIGTSAQKAELIALTKALEWSKDKSVNIYTDSRYAFATLHVHGMIYRERGWLTAGGKAIKNAPEILALLTAVWLPKRVAVMHCKGHQKDDAPTSTGNRRADEVAREVAIRPLSTQATISSGGSSGGSSGSETPGTSESATPESSGGSSGGSSMASNFTQFVLVDNGGTGDVTVAPSNFANGIAEWISSNSRSQAYKVTCSVRQSSAQNRKYTIKVEVPKGAWRSYLNMELTIPIFATNSDCELIVKAMQGLLKDGNPIPSAIAANSGIYGGSGGSMASNFTQFVLVDNGGTGDVTVAPSNFANGIAEWISSNSRSQAYKVTCSVRQSSAQNRKYTIKVEVPKGAWRSYLNMELTIPIFATNSDCELIVKAMQGLLKDGNPIPSAIAANSGIYGGGSGGGSGGGSGGGSMASNFTQFVLVDNGGTGDVTVAPSNFANGIAEWISSNSRSQAYKVTCSVRQSSAQNRKYTIKVEVPKGAWRSYLNMELTIPIFATNSDCELIVKAMQGLLKDGNPIPSAIAANSGIYGGSGGSMASNFTQFVLVDNGGTGDVTVAPSNFANGIAEWISSNSRSQAYKVTCSVRQSSAQNRKYTIKVEVPKGAWRSYLNMELTIPIFATNSDCELIVKAMQGLLKDGNPIPSAIAANSGIYAEAAAKEAAAKEAAAKEAAAKALEAEAAAKEAAAKEAAAKEAAAKADKKYSIGLDIGTNSVGWAVITDEYKVPSKKFKVLGNTDRHSIKKNLIGALLFDSGETAEATRLKRTARRRYTRRKNRICYLQEIFSNEMAKVDDSFFHRLEESFLVEEDKKHERHPIFGNIVDEVAYHEKYPTIYHLRKKLVDSTDKADLRLIYLALAHMIKFRGHFLIEGDLNPDNSDVDKLFIQLVQTYNQLFEENPINASGVDAKAILSARLSKSRRLENLIAQLPGEKKNGLFGNLIALSLGLTPNFKSNFDLAEDAKLQLSKDTYDDDLDNLLAQIGDQYADLFLAAKNLSDAILLSDILRVNTEITKAPLSASMIKRYDEHHQDLTLLKALVRQQLPEKYKEIFFDQSKNGYAGYIDGGASQEEFYKFIKPILEKMDGTEELLVKLNREDLLRKQRTFDNGSIPHQIHLGELHAILRRQEDFYPFLKDNREKIEKILTFRIPYYVGPLARGNSRFAWMTRKSEETITPWNFEEVVDKGASAQSFIERMTNFDKNLPNEKVLPKHSLLYEYFTVYNELTKVKYVTEGMRKPAFLSGEQKKAIVDLLFKTNRKVTVKQLKEDYFKKIECFDSVEISGVEDRFNASLGTYHDLLKIIKDKDFLDNEENEDILEDIVLTLTLFEDREMIEERLKTYAHLFDDKVMKQLKRRRYTGWGRLSRKLINGIRDKQSGKTILDFLKSDGFANRNFMQLIHDDSLTFKEDIQKAQVSGQGDSLHEHIANLAGSPAIKKGILQTVKVVDELVKVMGRHKPENIVIEMARENQTTQKGQKNSRERMKRIEEGIKELGSQILKEHPVENTQLQNEKLYLYYLQNGRDMYVDQELDINRLSDYDVDHIVPQSFLKDDSIDNKVLTRSDKARGKSDNVPSEEVVKKMKNYWRQLLNAKLITQRKFDNLTKAERGGLSELDKAGFIKRQLVETRQITKHVAQILDSRMNTKYDENDKLIREVKVITLKSKLVSDFRKDFQFYKVREINNYHHAHDAYLNAVVGTALIKKYPKLESEFVYGDYKVYDVRKMIAKSEQEIGKATAKYFFYSNIMNFFKTEITLANGEIRKRPLIETNGETGEIVWDKGRDFATVRKVLSMPQVNIVKKTEVQTGGFSKESILPKRNSDKLIARKKDWDPKKYGGFDSPTVAYSVLVVAKVEKGKSKKLKSVKELLGITIMERSSFEKNPIDFLEAKGYKEVKKDLIIKLPKYSLFELENGRKRMLASAGELQKGNELALPSKYVNFLYLASHYEKLKGSPEDNEQKQLFVEQHKHYLDEIIEQISEFSKRVILADANLDKVLSAYNKHRDKPIREQAENIIHLFTLTNLGAPAAFKYFDTTIDRKRYTSTKEVLDATLIHQSITGLYETRIDLSQLGGDKRTADGSEFESPKKKAKVE

SEQ ID NO: 16169 - protein, 2633 aa, synthetic construct
MPAAKRVKLDGGTAPLEEEYRLFLEAPIQNVTLLEQWKREIPKVWAEINPPGLASTQAPIHVQLLSTALPVRVRQYPITLEAKRSLRETIRKFRAAGILRPVHSPWNTPLLPVRKSGTSEYRMVQDLREVNKRVETIHPTVPNPYTLLSLLPPDRIWYSVLDLKDAFFCIPLAPESQLIFAFEWADAEEGESGQLTWTRLPQGFKNSPTLFNEALNRDLQGFRLDHPSVSLLQYVDDLLIAADTQAACLSATRDLLMTLAELGYRVSGKKAQLCQEEVTYLGFKIHKGSRSLSNSRTQAILQIPVPKTKRQVREFLGKIGYCRLFIPGFAELAQPLYAATRPGNDPLVWGEKEEEAFQSLKLALTQPPALALPSLDKPFQLFVEETSGAAKGVLTQALGPWKRPVAYLSKRLDPVAAGWPRCLRAIAAAALLTREASKLTFGQDIEITSSHNLESLLRSPPDKWLTNARITQYQVLLLDPPRVRFKQTAALNPATLLPETDDTLPIHHCLDTLDSLTSTRPDLTDQPLAQAEATLFTDGSSYIRDGKRYAGAAVVTLDSVIWAEPLPIGTSAQKAELIALTKALEWSKDKSVNIYTDSRYAFATLHVHGMIYRERGWLTAGGKAIKNAPEILALLTAVWLPKRVAVMHCKGHQKDDAPTSTGNRRADEVAREVAIRPLSTQATISSGGSSGGSSGSETPGTSESATPESSGGSSGGSSMASNFTQFVLVDNGGTGDVTVAPSNFANGIAEWISSNSRSQAYKVTCSVRQSSAQNRKYTIKVEVPKGAWRSYLNMELTIPIFATNSDCELIVKAMQGLLKDGNPIPSAIAANSGIYGGSGGSMASNFTQFVLVDNGGTGDVTVAPSNFANGIAEWISSNSRSQAYKVTCSVRQSSAQNRKYTIKVEVPKGAWRSYLNMELTIPIFATNSDCELIVKAMQGLLKDGNPIPSAIAANSGIYGGGSGGGSGGGSGGGSMASNFTQFVLVDNGGTGDVTVAPSNFANGIAEWISSNSRSQAYKVTCSVRQSSAQNRKYTIKVEVPKGAWRSYLNMELTIPIFATNSDCELIVKAMQGLLKDGNPIPSAIAANSGIYGGSGGSMASNFTQFVLVDNGGTGDVTVAPSNFANGIAEWISSNSRSQAYKVTCSVRQSSAQNRKYTIKVEVPKGAWRSYLNMELTIPIFATNSDCELIVKAMQGLLKDGNPIPSAIAANSGIYSGGSSGGSSGSETPGTSESATPESSGGSSGGSSDKKYSIGLDIGTNSVGWAVITDEYKVPSKKFKVLGNTDRHSIKKNLIGALLFDSGETAEATRLKRTARRRYTRRKNRICYLQEIFSNEMAKVDDSFFHRLEESFLVEEDKKHERHPIFGNIVDEVAYHEKYPTIYHLRKKLVDSTDKADLRLIYLALAHMIKFRGHFLIEGDLNPDNSDVDKLFIQLVQTYNQLFEENPINASGVDAKAILSARLSKSRRLENLIAQLPGEKKNGLFGNLIALSLGLTPNFKSNFDLAEDAKLQLSKDTYDDDLDNLLAQIGDQYADLFLAAKNLSDAILLSDILRVNTEITKAPLSASMIKRYDEHHQDLTLLKALVRQQLPEKYKEIFFDQSKNGYAGYIDGGASQEEFYKFIKPILEKMDGTEELLVKLNREDLLRKQRTFDNGSIPHQIHLGELHAILRRQEDFYPFLKDNREKIEKILTFRIPYYVGPLARGNSRFAWMTRKSEETITPWNFEEVVDKGASAQSFIERMTNFDKNLPNEKVLPKHSLLYEYFTVYNELTKVKYVTEGMRKPAFLSGEQKKAIVDLLFKTNRKVTVKQLKEDYFKKIECFDSVEISGVEDRFNASLGTYHDLLKIIKDKDFLDNEENEDILEDIVLTLTLFEDREMIEERLKTYAHLFDDKVMKQLKRRRYTGWGRLSRKLINGIRDKQSGKTILDFLKSDGFANRNFMQLIHDDSLTFKEDIQKAQVSGQGDSLHEHIANLAGSPAIKKGILQTVKVVDELVKVMGRHKPENIVIEMARENQTTQKGQKNSRERMKRIEEGIKELGSQILKEHPVENTQLQNEKLYLYYLQNGRDMYVDQELDINRLSDYDVDHIVPQSFLKDDSIDNKVLTRSDKARGKSDNVPSEEVVKKMKNYWRQLLNAKLITQRKFDNLTKAERGGLSELDKAGFIKRQLVETRQITKHVAQILDSRMNTKYDENDKLIREVKVITLKSKLVSDFRKDFQFYKVREINNYHHAHDAYLNAVVGTALIKKYPKLESEFVYGDYKVYDVRKMIAKSEQEIGKATAKYFFYSNIMNFFKTEITLANGEIRKRPLIETNGETGEIVWDKGRDFATVRKVLSMPQVNIVKKTEVQTGGFSKESILPKRNSDKLIARKKDWDPKKYGGFDSPTVAYSVLVVAKVEKGKSKKLKSVKELLGITIMERSSFEKNPIDFLEAKGYKEVKKDLIIKLPKYSLFELENGRKRMLASAGELQKGNELALPSKYVNFLYLASHYEKLKGSPEDNEQKQLFVEQHKHYLDEIIEQISEFSKRVILADANLDKVLSAYNKHRDKPIREQAENIIHLFTLTNLGAPAAFKYFDTTIDRKRYTSTKEVLDATLIHQSITGLYETRIDLSQLGGDKRTADGSEFESPKKKAKVE

SEQ ID NO: 16170 - protein, 2618 aa, synthetic construct
MPAAKRVKLDGGTAPLEEEYRLFLEAPIQNVTLLEQWKREIPKVWAEINPPGLASTQAPIHVQLLSTALPVRVRQYPITLEAKRSLRETIRKFRAAGILRPVHSPWNTPLLPVRKSGTSEYRMVQDLREVNKRVETIHPTVPNPYTLLSLLPPDRIWYSVLDLKDAFFCIPLAPESQLIFAFEWADAEEGESGQLTWTRLPQGFKNSPTLFNEALNRDLQGFRLDHPSVSLLQYVDDLLIAADTQAACLSATRDLLMTLAELGYRVSGKKAQLCQEEVTYLGFKIHKGSRSLSNSRTQAILQIPVPKTKRQVREFLGKIGYCRLFIPGFAELAQPLYAATRPGNDPLVWGEKEEEAFQSLKLALTQPPALALPSLDKPFQLFVEETSGAAKGVLTQALGPWKRPVAYLSKRLDPVAAGWPRCLRAIAAAALLTREASKLTFGQDIEITSSHNLESLLRSPPDKWLTNARITQYQVLLLDPPRVRFKQTAALNPATLLPETDDTLPIHHCLDTLDSLTSTRPDLTDQPLAQAEATLFTDGSSYIRDGKRYAGAAVVTLDSVIWAEPLPIGTSAQKAELIALTKALEWSKDKSVNIYTDSRYAFATLHVHGMIYRERGWLTAGGKAIKNAPEILALLTAVWLPKRVAVMHCKGHQKDDAPTSTGNRRADEVAREVAIRPLSTQATISSGGSSGGSSGSETPGTSESATPESSGGSSGGSSMASNFTQFVLVDNGGTGDVTVAPSNFANGIAEWISSNSRSQAYKVTCSVRQSSAQNRKYTIKVEVPKGAWRSYLNMELTIPIFATNSDCELIVKAMQGLLKDGNPIPSAIAANSGIYGGSGGSMASNFTQFVLVDNGGTGDVTVAPSNFANGIAEWISSNSRSQAYKVTCSVRQSSAQNRKYTIKVEVPKGAWRSYLNMELTIPIFATNSDCELIVKAMQGLLKDGNPIPSAIAANSGIYGGGSGGGSGGGSGGGSMASNFTQFVLVDNGGTGDVTVAPSNFANGIAEWISSNSRSQAYKVTCSVRQSSAQNRKYTIKVEVPKGAWRSYLNMELTIPIFATNSDCELIVKAMQGLLKDGNPIPSAIAANSGIYGGSGGSMASNFTQFVLVDNGGTGDVTVAPSNFANGIAEWISSNSRSQAYKVTCSVRQSSAQNRKYTIKVEVPKGAWRSYLNMELTIPIFATNSDCELIVKAMQGLLKDGNPIPSAIAANSGIYGSSGSSGSSGSSGSSGSSDKKYSIGLDIGTNSVGWAVITDEYKVPSKKFKVLGNTDRHSIKKNLIGALLFDSGETAEATRLKRTARRRYTRRKNRICYLQEIFSNEMAKVDDSFFHRLEESFLVEEDKKHERHPIFGNIVDEVAYHEKYPTIYHLRKKLVDSTDKADLRLIYLALAHMIKFRGHFLIEGDLNPDNSDVDKLFIQLVQTYNQLFEENPINASGVDAKAILSARLSKSRRLENLIAQLPGEKKNGLFGNLIALSLGLTPNFKSNFDLAEDAKLQLSKDTYDDDLDNLLAQIGDQYADLFLAAKNLSDAILLSDILRVNTEITKAPLSASMIKRYDEHHQDLTLLKALVRQQLPEKYKEIFFDQSKNGYAGYIDGGASQEEFYKFIKPILEKMDGTEELLVKLNREDLLRKQRTFDNGSIPHQIHLGELHAILRRQEDFYPFLKDNREKIEKILTFRIPYYVGPLARGNSRFAWMTRKSEETITPWNFEEVVDKGASAQSFIERMTNFDKNLPNEKVLPKHSLLYEYFTVYNELTKVKYVTEGMRKPAFLSGEQKKAIVDLLFKTNRKVTVKQLKEDYFKKIECFDSVEISGVEDRFNASLGTYHDLLKIIKDKDFLDNEENEDILEDIVLTLTLFEDREMIEERLKTYAHLFDDKVMKQLKRRRYTGWGRLSRKLINGIRDKQSGKTILDFLKSDGFANRNFMQLIHDDSLTFKEDIQKAQVSGQGDSLHEHIANLAGSPAIKKGILQTVKVVDELVKVMGRHKPENIVIEMARENQTTQKGQKNSRERMKRIEEGIKELGSQILKEHPVENTQLQNEKLYLYYLQNGRDMYVDQELDINRLSDYDVDHIVPQSFLKDDSIDNKVLTRSDKARGKSDNVPSEEVVKKMKNYWRQLLNAKLITQRKFDNLTKAERGGLSELDKAGFIKRQLVETRQITKHVAQILDSRMNTKYDENDKLIREVKVITLKSKLVSDFRKDFQFYKVREINNYHHAHDAYLNAVVGTALIKKYPKLESEFVYGDYKVYDVRKMIAKSEQEIGKATAKYFFYSNIMNFFKTEITLANGEIRKRPLIETNGETGEIVWDKGRDFATVRKVLSMPQVNIVKKTEVQTGGFSKESILPKRNSDKLIARKKDWDPKKYGGFDSPTVAYSVLVVAKVEKGKSKKLKSVKELLGITIMERSSFEKNPIDFLEAKGYKEVKKDLIIKLPKYSLFELENGRKRMLASAGELQKGNELALPSKYVNFLYLASHYEKLKGSPEDNEQKQLFVEQHKHYLDEIIEQISEFSKRVILADANLDKVLSAYNKHRDKPIREQAENIIHLFTLTNLGAPAAFKYFDTTIDRKRYTSTKEVLDATLIHQSITGLYETRIDLSQLGGDKRTADGSEFESPKKKAKVE

SEQ ID NO: 16171 - protein, 2611 aa, synthetic construct
MPAAKRVKLDGGTAPLEEEYRLFLEAPIQNVTLLEQWKREIPKVWAEINPPGLASTQAPIHVQLLSTALPVRVRQYPITLEAKRSLRETIRKFRAAGILRPVHSPWNTPLLPVRKSGTSEYRMVQDLREVNKRVETIHPTVPNPYTLLSLLPPDRIWYSVLDLKDAFFCIPLAPESQLIFAFEWADAEEGESGQLTWTRLPQGFKNSPTLFNEALNRDLQGFRLDHPSVSLLQYVDDLLIAADTQAACLSATRDLLMTLAELGYRVSGKKAQLCQEEVTYLGFKIHKGSRSLSNSRTQAILQIPVPKTKRQVREFLGKIGYCRLFIPGFAELAQPLYAATRPGNDPLVWGEKEEEAFQSLKLALTQPPALALPSLDKPFQLFVEETSGAAKGVLTQALGPWKRPVAYLSKRLDPVAAGWPRCLRAIAAAALLTREASKLTFGQDIEITSSHNLESLLRSPPDKWLTNARITQYQVLLLDPPRVRFKQTAALNPATLLPETDDTLPIHHCLDTLDSLTSTRPDLTDQPLAQAEATLFTDGSSYIRDGKRYAGAAVVTLDSVIWAEPLPIGTSAQKAELIALTKALEWSKDKSVNIYTDSRYAFATLHVHGMIYRERGWLTAGGKAIKNAPEILALLTAVWLPKRVAVMHCKGHQKDDAPTSTGNRRADEVAREVAIRPLSTQATISSGGSSGGSSGSETPGTSESATPESSGGSSGGSSMASNFTQFVLVDNGGTGDVTVAPSNFANGIAEWISSNSRSQAYKVTCSVRQSSAQNRKYTIKVEVPKGAWRSYLNMELTIPIFATNSDCELIVKAMQGLLKDGNPIPSAIAANSGIYGGSGGSMASNFTQFVLVDNGGTGDVTVAPSNFANGIAEWISSNSRSQAYKVTCSVRQSSAQNRKYTIKVEVPKGAWRSYLNMELTIPIFATNSDCELIVKAMQGLLKDGNPIPSAIAANSGIYGGGSGGGSGGGSGGGSMASNFTQFVLVDNGGTGDVTVAPSNFANGIAEWISSNSRSQAYKVTCSVRQSSAQNRKYTIKVEVPKGAWRSYLNMELTIPIFATNSDCELIVKAMQGLLKDGNPIPSAIAANSGIYGGSGGSMASNFTQFVLVDNGGTGDVTVAPSNFANGIAEWISSNSRSQAYKVTCSVRQSSAQNRKYTIKVEVPKGAWRSYLNMELTIPIFATNSDCELIVKAMQGLLKDGNPIPSAIAANSGIYGSSGGGEAAAKDKKYSIGLDIGTNSVGWAVITDEYKVPSKKFKVLGNTDRHSIKKNLIGALLFDSGETAEATRLKRTARRRYTRRKNRICYLQEIFSNEMAKVDDSFFHRLEESFLVEEDKKHERHPIFGNIVDEVAYHEKYPTIYHLRKKLVDSTDKADLRLIYLALAHMIKFRGHFLIEGDLNPDNSDVDKLFIQLVQTYNQLFEENPINASGVDAKAILSARLSKSRRLENLIAQLPGEKKNGLFGNLIALSLGLTPNFKSNFDLAEDAKLQLSKDTYDDDLDNLLAQIGDQYADLFLAAKNLSDAILLSDILRVNTEITKAPLSASMIKRYDEHHQDLTLLKALVRQQLPEKYKEIFFDQSKNGYAGYIDGGASQEEFYKFIKPILEKMDGTEELLVKLNREDLLRKQRTFDNGSIPHQIHLGELHAILRRQEDFYPFLKDNREKIEKILTFRIPYYVGPLARGNSRFAWMTRKSEETITPWNFEEVVDKGASAQSFIERMTNFDKNLPNEKVLPKHSLLYEYFTVYNELTKVKYVTEGMRKPAFLSGEQKKAIVDLLFKTNRKVTVKQLKEDYFKKIECFDSVEISGVEDRFNASLGTYHDLLKIIKDKDFLDNEENEDILEDIVLTLTLFEDREMIEERLKTYAHLFDDKVMKQLKRRRYTGWGRLSRKLINGIRDKQSGKTILDFLKSDGFANRNFMQLIHDDSLTFKEDIQKAQVSGQGDSLHEHIANLAGSPAIKKGILQTVKVVDELVKVMGRHKPENIVIEMARENQTTQKGQKNSRERMKRIEEGIKELGSQILKEHPVENTQLQNEKLYLYYLQNGRDMYVDQELDINRLSDYDVDHIVPQSFLKDDSIDNKVLTRSDKARGKSDNVPSEEVVKKMKNYWRQLLNAKLITQRKFDNLTKAERGGLSELDKAGFIKRQLVETRQITKHVAQILDSRMNTKYDENDKLIREVKVITLKSKLVSDFRKDFQFYKVREINNYHHAHDAYLNAVVGTALIKKYPKLESEFVYGDYKVYDVRKMIAKSEQEIGKATAKYFFYSNIMNFFKTEITLANGEIRKRPLIETNGETGEIVWDKGRDFATVRKVLSMPQVNIVKKTEVQTGGFSKESILPKRNSDKLIARKKDWDPKKYGGFDSPTVAYSVLVVAKVEKGKSKKLKSVKELLGITIMERSSFEKNPIDFLEAKGYKEVKKDLIIKLPKYSLFELENGRKRMLASAGELQKGNELALPSKYVNFLYLASHYEKLKGSPEDNEQKQLFVEQHKHYLDEIIEQISEFSKRVILADANLDKVLSAYNKHRDKPIREQAENIIHLFTLTNLGAPAAFKYFDTTIDRKRYTSTKEVLDATLIHQSITGLYETRIDLSQLGGDKRTADGSEFESPKKKAKVE

SEQ ID NO: 16172 - protein, 2252 aa, synthetic construct
MPAAKRVKLDGGTAPLEEEYRLFLEAPIQNVTLLEQWKREIPKVWAEINPPGLASTQAPIHVQLLSTALPVRVRQYPITLEAKRSLRETIRKFRAAGILRPVHSPWNTPLLPVRKSGTSEYRMVQDLREVNKRVETIHPTVPNPYTLLSLLPPDRIWYSVLDLKDAFFCIPLAPESQLIFAFEWADAEEGESGQLTWTRLPQGFKNSPTLFNEALNRDLQGFRLDHPSVSLLQYVDDLLIAADTQAACLSATRDLLMTLAELGYRVSGKKAQLCQEEVTYLGFKIHKGSRSLSNSRTQAILQIPVPKTKRQVREFLGKIGYCRLFIPGFAELAQPLYAATRPGNDPLVWGEKEEEAFQSLKLALTQPPALALPSLDKPFQLFVEETSGAAKGVLTQALGPWKRPVAYLSKRLDPVAAGWPRCLRAIAAAALLTREASKLTFGQDIEITSSHNLESLLRSPPDKWLTNARITQYQVLLLDPPRVRFKQTAALNPATLLPETDDTLPIHHCLDTLDSLTSTRPDLTDQPLAQAEATLFTDGSSYIRDGKRYAGAAVVTLDSVIWAEPLPIGTSAQKAELIALTKALEWSKDKSVNIYTDSRYAFATLHVHGMIYRERGWLTAGGKAIKNAPEILALLTAVWLPKRVAVMHCKGHQKDDAPTSTGNRRADEVAREVAIRPLSTQATISGSSGSSGSSGSSGSSGSSMASNFTQFVLVDNGGTGDVTVAPSNFANGIAEWISSNSRSQAYKVTCSVRQSSAQNRKYTIKVEVPKGAWRSYLNMELTIPIFATNSDCELIVKAMQGLLKDGNPIPSAIAANSGIYAEAAAKEAAAKEAAAKEAAAKALEAEAAAKEAAAKEAAAKEAAAKADKKYSIGLDIGTNSVGWAVITDEYKVPSKKFKVLGNTDRHSIKKNLIGALLFDSGETAEATRLKRTARRRYTRRKNRICYLQEIFSNEMAKVDDSFFHRLEESFLVEEDKKHERHPIFGNIVDEVAYHEKYPTIYHLRKKLVDSTDKADLRLIYLALAHMIKFRGHFLIEGDLNPDNSDVDKLFIQLVQTYNQLFEENPINASGVDAKAILSARLSKSRRLENLIAQLPGEKKNGLFGNLIALSLGLTPNFKSNFDLAEDAKLQLSKDTYDDDLDNLLAQIGDQYADLFLAAKNLSDAILLSDILRVNTEITKAPLSASMIKRYDEHHQDLTLLKALVRQQLPEKYKEIFFDQSKNGYAGYIDGGASQEEFYKFIKPILEKMDGTEELLVKLNREDLLRKQRTFDNGSIPHQIHLGELHAILRRQEDFYPFLKDNREKIEKILTFRIPYYVGPLARGNSRFAWMTRKSEETITPWNFEEVVDKGASAQSFIERMTNFDKNLPNEKVLPKHSLLYEYFTVYNELTKVKYVTEGMRKPAFLSGEQKKAIVDLLFKTNRKVTVKQLKEDYFKKIECFDSVEISGVEDRFNASLGTYHDLLKIIKDKDFLDNEENEDILEDIVLTLTLFEDREMIEERLKTYAHLFDDKVMKQLKRRRYTGWGRLSRKLINGIRDKQSGKTILDFLKSDGFANRNFMQLIHDDSLTFKEDIQKAQVSGQGDSLHEHIANLAGSPAIKKGILQTVKVVDELVKVMGRHKPENIVIEMARENQTTQKGQKNSRERMKRIEEGIKELGSQILKEHPVENTQLQNEKLYLYYLQNGRDMYVDQELDINRLSDYDVDHIVPQSFLKDDSIDNKVLTRSDKARGKSDNVPSEEVVKKMKNYWRQLLNAKLITQRKFDNLTKAERGGLSELDKAGFIKRQLVETRQITKHVAQILDSRMNTKYDENDKLIREVKVITLKSKLVSDFRKDFQFYKVREINNYHHAHDAYLNAVVGTALIKKYPKLESEFVYGDYKVYDVRKMIAKSEQEIGKATAKYFFYSNIMNFFKTEITLANGEIRKRPLIETNGETGEIVWDKGRDFATVRKVLSMPQVNIVKKTEVQTGGFSKESILPKRNSDKLIARKKDWDPKKYGGFDSPTVAYSVLVVAKVEKGKSKKLKSVKELLGITIMERSSFEKNPIDFLEAKGYKEVKKDLIIKLPKYSLFELENGRKRMLASAGELQKGNELALPSKYVNFLYLASHYEKLKGSPEDNEQKQLFVEQHKHYLDEIIEQISEFSKRVILADANLDKVLSAYNKHRDKPIREQAENIIHLFTLTNLGAPAAFKYFDTTIDRKRYTSTKEVLDATLIHQSITGLYETRIDLSQLGGDKRTADGSEFESPKKKAKVE

SEQ ID NO: 16173 - protein, 2239 aa, synthetic construct
MPAAKRVKLDGGTAPLEEEYRLFLEAPIQNVTLLEQWKREIPKVWAEINPPGLASTQAPIHVQLLSTALPVRVRQYPITLEAKRSLRETIRKFRAAGILRPVHSPWNTPLLPVRKSGTSEYRMVQDLREVNKRVETIHPTVPNPYTLLSLLPPDRIWYSVLDLKDAFFCIPLAPESQLIFAFEWADAEEGESGQLTWTRLPQGFKNSPTLFNEALNRDLQGFRLDHPSVSLLQYVDDLLIAADTQAACLSATRDLLMTLAELGYRVSGKKAQLCQEEVTYLGFKIHKGSRSLSNSRTQAILQIPVPKTKRQVREFLGKIGYCRLFIPGFAELAQPLYAATRPGNDPLVWGEKEEEAFQSLKLALTQPPALALPSLDKPFQLFVEETSGAAKGVLTQALGPWKRPVAYLSKRLDPVAAGWPRCLRAIAAAALLTREASKLTFGQDIEITSSHNLESLLRSPPDKWLTNARITQYQVLLLDPPRVRFKQTAALNPATLLPETDDTLPIHHCLDTLDSLTSTRPDLTDQPLAQAEATLFTDGSSYIRDGKRYAGAAVVTLDSVIWAEPLPIGTSAQKAELIALTKALEWSKDKSVNIYTDSRYAFATLHVHGMIYRERGWLTAGGKAIKNAPEILALLTAVWLPKRVAVMHCKGHQKDDAPTSTGNRRADEVAREVAIRPLSTQATISGSSGSSGSSGSSGSSGSSMASNFTQFVLVDNGGTGDVTVAPSNFANGIAEWISSNSRSQAYKVTCSVRQSSAQNRKYTIKVEVPKGAWRSYLNMELTIPIFATNSDCELIVKAMQGLLKDGNPIPSAIAANSGIYSGGSSGGSSGSETPGTSESATPESSGGSSGGSSDKKYSIGLDIGTNSVGWAVITDEYKVPSKKFKVLGNTDRHSIKKNLIGALLFDSGETAEATRLKRTARRRYTRRKNRICYLQEIFSNEMAKVDDSFFHRLEESFLVEEDKKHERHPIFGNIVDEVAYHEKYPTIYHLRKKLVDSTDKADLRLIYLALAHMIKFRGHFLIEGDLNPDNSDVDKLFIQLVQTYNQLFEENPINASGVDAKAILSARLSKSRRLENLIAQLPGEKKNGLFGNLIALSLGLTPNFKSNFDLAEDAKLQLSKDTYDDDLDNLLAQIGDQYADLFLAAKNLSDAILLSDILRVNTEITKAPLSASMIKRYDEHHQDLTLLKALVRQQLPEKYKEIFFDQSKNGYAGYIDGGASQEEFYKFIKPILEKMDGTEELLVKLNREDLLRKQRTFDNGSIPHQIHLGELHAILRRQEDFYPFLKDNREKIEKILTFRIPYYVGPLARGNSRFAWMTRKSEETITPWNFEEVVDKGASAQSFIERMTNFDKNLPNEKVLPKHSLLYEYFTVYNELTKVKYVTEGMRKPAFLSGEQKKAIVDLLFKTNRKVTVKQLKEDYFKKIECFDSVEISGVEDRFNASLGTYHDLLKIIKDKDFLDNEENEDILEDIVLTLTLFEDREMIEERLKTYAHLFDDKVMKQLKRRRYTGWGRLSRKLINGIRDKQSGKTILDFLKSDGFANRNFMQLIHDDSLTFKEDIQKAQVSGQGDSLHEHIANLAGSPAIKKGILQTVKVVDELVKVMGRHKPENIVIEMARENQTTQKGQKNSRERMKRIEEGIKELGSQILKEHPVENTQLQNEKLYLYYLQNGRDMYVDQELDINRLSDYDVDHIVPQSFLKDDSIDNKVLTRSDKARGKSDNVPSEEVVKKMKNYWRQLLNAKLITQRKFDNLTKAERGGLSELDKAGFIKRQLVETRQITKHVAQILDSRMNTKYDENDKLIREVKVITLKSKLVSDFRKDFQFYKVREINNYHHAHDAYLNAVVGTALIKKYPKLESEFVYGDYKVYDVRKMIAKSEQEIGKATAKYFFYSNIMNFFKTEITLANGEIRKRPLIETNGETGEIVWDKGRDFATVRKVLSMPQVNIVKKTEVQTGGFSKESILPKRNSDKLIARKKDWDPKKYGGFDSPTVAYSVLVVAKVEKGKSKKLKSVKELLGITIMERSSFEKNPIDFLEAKGYKEVKKDLIIKLPKYSLFELENGRKRMLASAGELQKGNELALPSKYVNFLYLASHYEKLKGSPEDNEQKQLFVEQHKHYLDEIIEQISEFSKRVILADANLDKVLSAYNKHRDKPIREQAENIIHLFTLTNLGAPAAFKYFDTTIDRKRYTSTKEVLDATLIHQSITGLYETRIDLSQLGGDKRTADGSEFESPKKKAKVE

SEQ ID NO: 16174 - protein, 2224 aa, synthetic construct
MPAAKRVKLDGGTAPLEEEYRLFLEAPIQNVTLLEQWKREIPKVWAEINPPGLASTQAPIHVQLLSTALPVRVRQYPITLEAKRSLRETIRKFRAAGILRPVHSPWNTPLLPVRKSGTSEYRMVQDLREVNKRVETIHPTVPNPYTLLSLLPPDRIWYSVLDLKDAFFCIPLAPESQLIFAFEWADAEEGESGQLTWTRLPQGFKNSPTLFNEALNRDLQGFRLDHPSVSLLQYVDDLLIAADTQAACLSATRDLLMTLAELGYRVSGKKAQLCQEEVTYLGFKIHKGSRSLSNSRTQAILQIPVPKTKRQVREFLGKIGYCRLFIPGFAELAQPLYAATRPGNDPLVWGEKEEEAFQSLKLALTQPPALALPSLDKPFQLFVEETSGAAKGVLTQALGPWKRPVAYLSKRLDPVAAGWPRCLRAIAAAALLTREASKLTFGQDIEITSSHNLESLLRSPPDKWLTNARITQYQVLLLDPPRVRFKQTAALNPATLLPETDDTLPIHHCLDTLDSLTSTRPDLTDQPLAQAEATLFTDGSSYIRDGKRYAGAAVVTLDSVIWAEPLPIGTSAQKAELIALTKALEWSKDKSVNIYTDSRYAFATLHVHGMIYRERGWLTAGGKAIKNAPEILALLTAVWLPKRVAVMHCKGHQKDDAPTSTGNRRADEVAREVAIRPLSTQATISGSSGSSGSSGSSGSSGSSMASNFTQFVLVDNGGTGDVTVAPSNFANGIAEWISSNSRSQAYKVTCSVRQSSAQNRKYTIKVEVPKGAWRSYLNMELTIPIFATNSDCELIVKAMQGLLKDGNPIPSAIAANSGIYGSSGSSGSSGSSGSSGSSDKKYSIGLDIGTNSVGWAVITDEYKVPSKKFKVLGNTDRHSIKKNLIGALLFDSGETAEATRLKRTARRRYTRRKNRICYLQEIFSNEMAKVDDSFFHRLEESFLVEEDKKHERHPIFGNIVDEVAYHEKYPTIYHLRKKLVDSTDKADLRLIYLALAHMIKFRGHFLIEGDLNPDNSDVDKLFIQLVQTYNQLFEENPINASGVDAKAILSARLSKSRRLENLIAQLPGEKKNGLFGNLIALSLGLTPNFKSNFDLAEDAKLQLSKDTYDDDLDNLLAQIGDQYADLFLAAKNLSDAILLSDILRVNTEITKAPLSASMIKRYDEHHQDLTLLKALVRQQLPEKYKEIFFDQSKNGYAGYIDGGASQEEFYKFIKPILEKMDGTEELLVKLNREDLLRKQRTFDNGSIPHQIHLGELHAILRRQEDFYPFLKDNREKIEKILTFRIPYYVGPLARGNSRFAWMTRKSEETITPWNFEEVVDKGASAQSFIERMTNFDKNLPNEKVLPKHSLLYEYFTVYNELTKVKYVTEGMRKPAFLSGEQKKAIVDLLFKTNRKVTVKQLKEDYFKKIECFDSVEISGVEDRFNASLGTYHDLLKIIKDKDFLDNEENEDILEDIVLTLTLFEDREMIEERLKTYAHLFDDKVMKQLKRRRYTGWGRLSRKLINGIRDKQSGKTILDFLKSDGFANRNFMQLIHDDSLTFKEDIQKAQVSGQGDSLHEHIANLAGSPAIKKGILQTVKVVDELVKVMGRHKPENIVIEMARENQTTQKGQKNSRERMKRIEEGIKELGSQILKEHPVENTQLQNEKLYLYYLQNGRDMYVDQELDINRLSDYDVDHIVPQSFLKDDSIDNKVLTRSDKARGKSDNVPSEEVVKKMKNYWRQLLNAKLITQRKFDNLTKAERGGLSELDKAGFIKRQLVETRQITKHVAQILDSRMNTKYDENDKLIREVKVITLKSKLVSDFRKDFQFYKVREINNYHHAHDAYLNAVVGTALIKKYPKLESEFVYGDYKVYDVRKMIAKSEQEIGKATAKYFFYSNIMNFFKTEITLANGEIRKRPLIETNGETGEIVWDKGRDFATVRKVLSMPQVNIVKKTEVQTGGFSKESILPKRNSDKLIARKKDWDPKKYGGFDSPTVAYSVLVVAKVEKGKSKKLKSVKELLGITIMERSSFEKNPIDFLEAKGYKEVKKDLIIKLPKYSLFELENGRKRMLASAGELQKGNELALPSKYVNFLYLASHYEKLKGSPEDNEQKQLFVEQHKHYLDEIIEQISEFSKRVILADANLDKVLSAYNKHRDKPIREQAENIIHLFTLTNLGAPAAFKYFDTTIDRKRYTSTKEVLDATLIHQSITGLYETRIDLSQLGGDKRTADGSEFESPKKKAKVE

SEQ ID NO: 16175 - protein, 2217 aa, synthetic construct
MPAAKRVKLDGGTAPLEEEYRLFLEAPIQNVTLLEQWKREIPKVWAEINPPGLASTQAPIHVQLLSTALPVRVRQYPITLEAKRSLRETIRKFRAAGILRPVHSPWNTPLLPVRKSGTSEYRMVQDLREVNKRVETIHPTVPNPYTLLSLLPPDRIWYSVLDLKDAFFCIPLAPESQLIFAFEWADAEEGESGQLTWTRLPQGFKNSPTLFNEALNRDLQGFRLDHPSVSLLQYVDDLLIAADTQAACLSATRDLLMTLAELGYRVSGKKAQLCQEEVTYLGFKIHKGSRSLSNSRTQAILQIPVPKTKRQVREFLGKIGYCRLFIPGFAELAQPLYAATRPGNDPLVWGEKEEEAFQSLKLALTQPPALALPSLDKPFQLFVEETSGAAKGVLTQALGPWKRPVAYLSKRLDPVAAGWPRCLRAIAAAALLTREASKLTFGQDIEITSSHNLESLLRSPPDKWLTNARITQYQVLLLDPPRVRFKQTAALNPATLLPETDDTLPIHHCLDTLDSLTSTRPDLTDQPLAQAEATLFTDGSSYIRDGKRYAGAAVVTLDSVIWAEPLPIGTSAQKAELIALTKALEWSKDKSVNIYTDSRYAFATLHVHGMIYRERGWLTAGGKAIKNAPEILALLTAVWLPKRVAVMHCKGHQKDDAPTSTGNRRADEVAREVAIRPLSTQATISGSSGSSGSSGSSGSSGSSMASNFTQFVLVDNGGTGDVTVAPSNFANGIAEWISSNSRSQAYKVTCSVRQSSAQNRKYTIKVEVPKGAWRSYLNMELTIPIFATNSDCELIVKAMQGLLKDGNPIPSAIAANSGIYGSSGGGEAAAKDKKYSIGLDIGTNSVGWAVITDEYKVPSKKFKVLGNTDRHSIKKNLIGALLFDSGETAEATRLKRTARRRYTRRKNRICYLQEIFSNEMAKVDDSFFHRLEESFLVEEDKKHERHPIFGNIVDEVAYHEKYPTIYHLRKKLVDSTDKADLRLIYLALAHMIKFRGHFLIEGDLNPDNSDVDKLFIQLVQTYNQLFEENPINASGVDAKAILSARLSKSRRLENLIAQLPGEKKNGLFGNLIALSLGLTPNFKSNFDLAEDAKLQLSKDTYDDDLDNLLAQIGDQYADLFLAAKNLSDAILLSDILRVNTEITKAPLSASMIKRYDEHHQDLTLLKALVRQQLPEKYKEIFFDQSKNGYAGYIDGGASQEEFYKFIKPILEKMDGTEELLVKLNREDLLRKQRTFDNGSIPHQIHLGELHAILRRQEDFYPFLKDNREKIEKILTFRIPYYVGPLARGNSRFAWMTRKSEETITPWNFEEVVDKGASAQSFIERMTNFDKNLPNEKVLPKHSLLYEYFTVYNELTKVKYVTEGMRKPAFLSGEQKKAIVDLLFKTNRKVTVKQLKEDYFKKIECFDSVEISGVEDRFNASLGTYHDLLKIIKDKDFLDNEENEDILEDIVLTLTLFEDREMIEERLKTYAHLFDDKVMKQLKRRRYTGWGRLSRKLINGIRDKQSGKTILDFLKSDGFANRNFMQLIHDDSLTFKEDIQKAQVSGQGDSLHEHIANLAGSPAIKKGILQTVKVVDELVKVMGRHKPENIVIEMARENQTTQKGQKNSRERMKRIEEGIKELGSQILKEHPVENTQLQNEKLYLYYLQNGRDMYVDQELDINRLSDYDVDHIVPQSFLKDDSIDNKVLTRSDKARGKSDNVPSEEVVKKMKNYWRQLLNAKLITQRKFDNLTKAERGGLSELDKAGFIKRQLVETRQITKHVAQILDSRMNTKYDENDKLIREVKVITLKSKLVSDFRKDFQFYKVREINNYHHAHDAYLNAVVGTALIKKYPKLESEFVYGDYKVYDVRKMIAKSEQEIGKATAKYFFYSNIMNFFKTEITLANGEIRKRPLIETNGETGEIVWDKGRDFATVRKVLSMPQVNIVKKTEVQTGGFSKESILPKRNSDKLIARKKDWDPKKYGGFDSPTVAYSVLVVAKVEKGKSKKLKSVKELLGITIMERSSFEKNPIDFLEAKGYKEVKKDLIIKLPKYSLFELENGRKRMLASAGELQKGNELALPSKYVNFLYLASHYEKLKGSPEDNEQKQLFVEQHKHYLDEIIEQISEFSKRVILADANLDKVLSAYNKHRDKPIREQAENIIHLFTLTNLGAPAAFKYFDTTIDRKRYTSTKEVLDATLIHQSITGLYETRIDLSQLGGDKRTADGSEFESPKKKAKVE

SEQ ID NO: 16176 - protein, 2375 aa, synthetic construct
MPAAKRVKLDGGTAPLEEEYRLFLEAPIQNVTLLEQWKREIPKVWAEINPPGLASTQAPIHVQLLSTALPVRVRQYPITLEAKRSLRETIRKFRAAGILRPVHSPWNTPLLPVRKSGTSEYRMVQDLREVNKRVETIHPTVPNPYTLLSLLPPDRIWYSVLDLKDAFFCIPLAPESQLIFAFEWADAEEGESGQLTWTRLPQGFKNSPTLFNEALNRDLQGFRLDHPSVSLLQYVDDLLIAADTQAACLSATRDLLMTLAELGYRVSGKKAQLCQEEVTYLGFKIHKGSRSLSNSRTQAILQIPVPKTKRQVREFLGKIGYCRLFIPGFAELAQPLYAATRPGNDPLVWGEKEEEAFQSLKLALTQPPALALPSLDKPFQLFVEETSGAAKGVLTQALGPWKRPVAYLSKRLDPVAAGWPRCLRAIAAAALLTREASKLTFGQDIEITSSHNLESLLRSPPDKWLTNARITQYQVLLLDPPRVRFKQTAALNPATLLPETDDTLPIHHCLDTLDSLTSTRPDLTDQPLAQAEATLFTDGSSYIRDGKRYAGAAVVTLDSVIWAEPLPIGTSAQKAELIALTKALEWSKDKSVNIYTDSRYAFATLHVHGMIYRERGWLTAGGKAIKNAPEILALLTAVWLPKRVAVMHCKGHQKDDAPTSTGNRRADEVAREVAIRPLSTQATISGSSGSSGSSGSSGSSGSSMASNFTQFVLVDNGGTGDVTVAPSNFANGIAEWISSNSRSQAYKVTCSVRQSSAQNRKYTIKVEVPKGAWRSYLNMELTIPIFATNSDCELIVKAMQGLLKDGNPIPSAIAANSGIYGGSGGSMASNFTQFVLVDNGGTGDVTVAPSNFANGIAEWISSNSRSQAYKVTCSVRQSSAQNRKYTIKVEVPKGAWRSYLNMELTIPIFATNSDCELIVKAMQGLLKDGNPIPSAIAANSGIYAEAAAKEAAAKEAAAKEAAAKALEAEAAAKEAAAKEAAAKEAAAKADKKYSIGLDIGTNSVGWAVITDEYKVPSKKFKVLGNTDRHSIKKNLIGALLFDSGETAEATRLKRTARRRYTRRKNRICYLQEIFSNEMAKVDDSFFHRLEESFLVEEDKKHERHPIFGNIVDEVAYHEKYPTIYHLRKKLVDSTDKADLRLIYLALAHMIKFRGHFLIEGDLNPDNSDVDKLFIQLVQTYNQLFEENPINASGVDAKAILSARLSKSRRLENLIAQLPGEKKNGLFGNLIALSLGLTPNFKSNFDLAEDAKLQLSKDTYDDDLDNLLAQIGDQYADLFLAAKNLSDAILLSDILRVNTEITKAPLSASMIKRYDEHHQDLTLLKALVRQQLPEKYKEIFFDQSKNGYAGYIDGGASQEEFYKFIKPILEKMDGTEELLVKLNREDLLRKQRTFDNGSIPHQIHLGELHAILRRQEDFYPFLKDNREKIEKILTFRIPYYVGPLARGNSRFAWMTRKSEETITPWNFEEVVDKGASAQSFIERMTNFDKNLPNEKVLPKHSLLYEYFTVYNELTKVKYVTEGMRKPAFLSGEQKKAIVDLLFKTNRKVTVKQLKEDYFKKIECFDSVEISGVEDRFNASLGTYHDLLKIIKDKDFLDNEENEDILEDIVLTLTLFEDREMIEERLKTYAHLFDDKVMKQLKRRRYTGWGRLSRKLINGIRDKQSGKTILDFLKSDGFANRNFMQLIHDDSLTFKEDIQKAQVSGQGDSLHEHIANLAGSPAIKKGILQTVKVVDELVKVMGRHKPENIVIEMARENQTTQKGQKNSRERMKRIEEGIKELGSQILKEHPVENTQLQNEKLYLYYLQNGRDMYVDQELDINRLSDYDVDHIVPQSFLKDDSIDNKVLTRSDKARGKSDNVPSEEVVKKMKNYWRQLLNAKLITQRKFDNLTKAERGGLSELDKAGFIKRQLVETRQITKHVAQILDSRMNTKYDENDKLIREVKVITLKSKLVSDFRKDFQFYKVREINNYHHAHDAYLNAVVGTALIKKYPKLESEFVYGDYKVYDVRKMIAKSEQEIGKATAKYFFYSNIMNFFKTEITLANGEIRKRPLIETNGETGEIVWDKGRDFATVRKVLSMPQVNIVKKTEVQTGGFSKESILPKRNSDKLIARKKDWDPKKYGGFDSPTVAYSVLVVAKVEKGKSKKLKSVKELLGITIMERSSFEKNPIDFLEAKGYKEVKKDLIIKLPKYSLFELENGRKRMLASAGELQKGNELALPSKYVNFLYLASHYEKLKGSPEDNEQKQLFVEQHKHYLDEIIEQISEFSKRVILADANLDKVLSAYNKHRDKPIREQAENIIHLFTLTNLGAPAAFKYFDTTIDRKRYTSTKEVLDATLIHQSITGLYETRIDLSQLGGDKRTADGSEFESPKKKAKVE

SEQ ID NO: 16177 - protein, 2362 aa, synthetic construct
MPAAKRVKLDGGTAPLEEEYRLFLEAPIQNVTLLEQWKREIPKVWAEINPPGLASTQAPIHVQLLSTALPVRVRQYPITLEAKRSLRETIRKFRAAGILRPVHSPWNTPLLPVRKSGTSEYRMVQDLREVNKRVETIHPTVPNPYTLLSLLPPDRIWYSVLDLKDAFFCIPLAPESQLIFAFEWADAEEGESGQLTWTRLPQGFKNSPTLFNEALNRDLQGFRLDHPSVSLLQYVDDLLIAADTQAACLSATRDLLMTLAELGYRVSGKKAQLCQEEVTYLGFKIHKGSRSLSNSRTQAILQIPVPKTKRQVREFLGKIGYCRLFIPGFAELAQPLYAATRPGNDPLVWGEKEEEAFQSLKLALTQPPALALPSLDKPFQLFVEETSGAAKGVLTQALGPWKRPVAYLSKRLDPVAAGWPRCLRAIAAAALLTREASKLTFGQDIEITSSHNLESLLRSPPDKWLTNARITQYQVLLLDPPRVRFKQTAALNPATLLPETDDTLPIHHCLDTLDSLTSTRPDLTDQPLAQAEATLFTDGSSYIRDGKRYAGAAVVTLDSVIWAEPLPIGTSAQKAELIALTKALEWSKDKSVNIYTDSRYAFATLHVHGMIYRERGWLTAGGKAIKNAPEILALLTAVWLPKRVAVMHCKGHQKDDAPTSTGNRRADEVAREVAIRPLSTQATISGSSGSSGSSGSSGSSGSSMASNFTQFVLVDNGGTGDVTVAPSNFANGIAEWISSNSRSQAYKVTCSVRQSSAQNRKYTIKVEVPKGAWRSYLNMELTIPIFATNSDCELIVKAMQGLLKDGNPIPSAIAANSGIYGGSGGSMASNFTQFVLVDNGGTGDVTVAPSNFANGIAEWISSNSRSQAYKVTCSVRQSSAQNRKYTIKVEVPKGAWRSYLNMELTIPIFATNSDCELIVKAMQGLLKDGNPIPSAIAANSGIYSGGSSGGSSGSETPGTSESATPESSGGSSGGSSDKKYSIGLDIGTNSVGWAVITDEYKVPSKKFKVLGNTDRHSIKKNLIGALLFDSGETAEATRLKRTARRRYTRRKNRICYLQEIFSNEMAKVDDSFFHRLEESFLVEEDKKHERHPIFGNIVDEVAYHEKYPTIYHLRKKLVDSTDKADLRLIYLALAHMIKFRGHFLIEGDLNPDNSDVDKLFIQLVQTYNQLFEENPINASGVDAKAILSARLSKSRRLENLIAQLPGEKKNGLFGNLIALSLGLTPNFKSNFDLAEDAKLQLSKDTYDDDLDNLLAQIGDQYADLFLAAKNLSDAILLSDILRVNTEITKAPLSASMIKRYDEHHQDLTLLKALVRQQLPEKYKEIFFDQSKNGYAGYIDGGASQEEFYKFIKPILEKMDGTEELLVKLNREDLLRKQRTFDNGSIPHQIHLGELHAILRRQEDFYPFLKDNREKIEKILTFRIPYYVGPLARGNSRFAWMTRKSEETITPWNFEEVVDKGASAQSFIERMTNFDKNLPNEKVLPKHSLLYEYFTVYNELTKVKYVTEGMRKPAFLSGEQKKAIVDLLFKTNRKVTVKQLKEDYFKKIECFDSVEISGVEDRFNASLGTYHDLLKIIKDKDFLDNEENEDILEDIVLTLTLFEDREMIEERLKTYAHLFDDKVMKQLKRRRYTGWGRLSRKLINGIRDKQSGKTILDFLKSDGFANRNFMQLIHDDSLTFKEDIQKAQVSGQGDSLHEHIANLAGSPAIKKGILQTVKVVDELVKVMGRHKPENIVIEMARENQTTQKGQKNSRERMKRIEEGIKELGSQILKEHPVENTQLQNEKLYLYYLQNGRDMYVDQELDINRLSDYDVDHIVPQSFLKDDSIDNKVLTRSDKARGKSDNVPSEEVVKKMKNYWRQLLNAKLITQRKFDNLTKAERGGLSELDKAGFIKRQLVETRQITKHVAQILDSRMNTKYDENDKLIREVKVITLKSKLVSDFRKDFQFYKVREINNYHHAHDAYLNAVVGTALIKKYPKLESEFVYGDYKVYDVRKMIAKSEQEIGKATAKYFFYSNIMNFFKTEITLANGEIRKRPLIETNGETGEIVWDKGRDFATVRKVLSMPQVNIVKKTEVQTGGFSKESILPKRNSDKLIARKKDWDPKKYGGFDSPTVAYSVLVVAKVEKGKSKKLKSVKELLGITIMERSSFEKNPIDFLEAKGYKEVKKDLIIKLPKYSLFELENGRKRMLASAGELQKGNELALPSKYVNFLYLASHYEKLKGSPEDNEQKQLFVEQHKHYLDEIIEQISEFSKRVILADANLDKVLSAYNKHRDKPIREQAENIIHLFTLTNLGAPAAFKYFDTTIDRKRYTSTKEVLDATLIHQSITGLYETRIDLSQLGGDKRTADGSEFESPKKKAKVE

SEQ ID NO: 16178 - protein, 2347 aa, synthetic construct
MPAAKRVKLDGGTAPLEEEYRLFLEAPIQNVTLLEQWKREIPKVWAEINPPGLASTQAPIHVQLLSTALPVRVRQYPITLEAKRSLRETIRKFRAAGILRPVHSPWNTPLLPVRKSGTSEYRMVQDLREVNKRVETIHPTVPNPYTLLSLLPPDRIWYSVLDLKDAFFCIPLAPESQLIFAFEWADAEEGESGQLTWTRLPQGFKNSPTLFNEALNRDLQGFRLDHPSVSLLQYVDDLLIAADTQAACLSATRDLLMTLAELGYRVSGKKAQLCQEEVTYLGFKIHKGSRSLSNSRTQAILQIPVPKTKRQVREFLGKIGYCRLFIPGFAELAQPLYAATRPGNDPLVWGEKEEEAFQSLKLALTQPPALALPSLDKPFQLFVEETSGAAKGVLTQALGPWKRPVAYLSKRLDPVAAGWPRCLRAIAAAALLTREASKLTFGQDIEITSSHNLESLLRSPPDKWLTNARITQYQVLLLDPPRVRFKQTAALNPATLLPETDDTLPIHHCLDTLDSLTSTRPDLTDQPLAQAEATLFTDGSSYIRDGKRYAGAAVVTLDSVIWAEPLPIGTSAQKAELIALTKALEWSKDKSVNIYTDSRYAFATLHVHGMIYRERGWLTAGGKAIKNAPEILALLTAVWLPKRVAVMHCKGHQKDDAPTSTGNRRADEVAREVAIRPLSTQATISGSSGSSGSSGSSGSSGSSMASNFTQFVLVDNGGTGDVTVAPSNFANGIAEWISSNSRSQAYKVTCSVRQSSAQNRKYTIKVEVPKGAWRSYLNMELTIPIFATNSDCELIVKAMQGLLKDGNPIPSAIAANSGIYGGSGGSMASNFTQFVLVDNGGTGDVTVAPSNFANGIAEWISSNSRSQAYKVTCSVRQSSAQNRKYTIKVEVPKGAWRSYLNMELTIPIFATNSDCELIVKAMQGLLKDGNPIPSAIAANSGIYGSSGSSGSSGSSGSSGSSDKKYSIGLDIGTNSVGWAVITDEYKVPSKKFKVLGNTDRHSIKKNLIGALLFDSGETAEATRLKRTARRRYTRRKNRICYLQEIFSNEMAKVDDSFFHRLEESFLVEEDKKHERHPIFGNIVDEVAYHEKYPTIYHLRKKLVDSTDKADLRLIYLALAHMIKFRGHFLIEGDLNPDNSDVDKLFIQLVQTYNQLFEENPINASGVDAKAILSARLSKSRRLENLIAQLPGEKKNGLFGNLIALSLGLTPNFKSNFDLAEDAKLQLSKDTYDDDLDNLLAQIGDQYADLFLAAKNLSDAILLSDILRVNTEITKAPLSASMIKRYDEHHQDLTLLKALVRQQLPEKYKEIFFDQSKNGYAGYIDGGASQEEFYKFIKPILEKMDGTEELLVKLNREDLLRKQRTFDNGSIPHQIHLGELHAILRRQEDFYPFLKDNREKIEKILTFRIPYYVGPLARGNSRFAWMTRKSEETITPWNFEEVVDKGASAQSFIERMTNFDKNLPNEKVLPKHSLLYEYFTVYNELTKVKYVTEGMRKPAFLSGEQKKAIVDLLFKTNRKVTVKQLKEDYFKKIECFDSVEISGVEDRFNASLGTYHDLLKIIKDKDFLDNEENEDILEDIVLTLTLFEDREMIEERLKTYAHLFDDKVMKQLKRRRYTGWGRLSRKLINGIRDKQSGKTILDFLKSDGFANRNFMQLIHDDSLTFKEDIQKAQVSGQGDSLHEHIANLAGSPAIKKGILQTVKVVDELVKVMGRHKPENIVIEMARENQTTQKGQKNSRERMKRIEEGIKELGSQILKEHPVENTQLQNEKLYLYYLQNGRDMYVDQELDINRLSDYDVDHIVPQSFLKDDSIDNKVLTRSDKARGKSDNVPSEEVVKKMKNYWRQLLNAKLITQRKFDNLTKAERGGLSELDKAGFIKRQLVETRQITKHVAQILDSRMNTKYDENDKLIREVKVITLKSKLVSDFRKDFQFYKVREINNYHHAHDAYLNAVVGTALIKKYPKLESEFVYGDYKVYDVRKMIAKSEQEIGKATAKYFFYSNIMNFFKTEITLANGEIRKRPLIETNGETGEIVWDKGRDFATVRKVLSMPQVNIVKKTEVQTGGFSKESILPKRNSDKLIARKKDWDPKKYGGFDSPTVAYSVLVVAKVEKGKSKKLKSVKELLGITIMERSSFEKNPIDFLEAKGYKEVKKDLIIKLPKYSLFELENGRKRMLASAGELQKGNELALPSKYVNFLYLASHYEKLKGSPEDNEQKQLFVEQHKHYLDEIIEQISEFSKRVILADANLDKVLSAYNKHRDKPIREQAENIIHLFTLTNLGAPAAFKYFDTTIDRKRYTSTKEVLDATLIHQSITGLYETRIDLSQLGGDKRTADGSEFESPKKKAKVE

SEQ ID NO: 16179 - protein, 2340 aa, synthetic construct
MPAAKRVKLDGGTAPLEEEYRLFLEAPIQNVTLLEQWKREIPKVWAEINPPGLASTQAPIHVQLLSTALPVRVRQYPITLEAKRSLRETIRKFRAAGILRPVHSPWNTPLLPVRKSGTSEYRMVQDLREVNKRVETIHPTVPNPYTLLSLLPPDRIWYSVLDLKDAFFCIPLAPESQLIFAFEWADAEEGESGQLTWTRLPQGFKNSPTLFNEALNRDLQGFRLDHPSVSLLQYVDDLLIAADTQAACLSATRDLLMTLAELGYRVSGKKAQLCQEEVTYLGFKIHKGSRSLSNSRTQAILQIPVPKTKRQVREFLGKIGYCRLFIPGFAELAQPLYAATRPGNDPLVWGEKEEEAFQSLKLALTQPPALALPSLDKPFQLFVEETSGAAKGVLTQALGPWKRPVAYLSKRLDPVAAGWPRCLRAIAAAALLTREASKLTFGQDIEITSSHNLESLLRSPPDKWLTNARITQYQVLLLDPPRVRFKQTAALNPATLLPETDDTLPIHHCLDTLDSLTSTRPDLTDQPLAQAEATLFTDGSSYIRDGKRYAGAAVVTLDSVIWAEPLPIGTSAQKAELIALTKALEWSKDKSVNIYTDSRYAFATLHVHGMIYRERGWLTAGGKAIKNAPEILALLTAVWLPKRVAVMHCKGHQKDDAPTSTGNRRADEVAREVAIRPLSTQATISGSSGSSGSSGSSGSSGSSMASNFTQFVLVDNGGTGDVTVAPSNFANGIAEWISSNSRSQAYKVTCSVRQSSAQNRKYTIKVEVPKGAWRSYLNMELTIPIFATNSDCELIVKAMQGLLKDGNPIPSAIAANSGIYGGSGGSMASNFTQFVLVDNGGTGDVTVAPSNFANGIAEWISSNSRSQAYKVTCSVRQSSAQNRKYTIKVEVPKGAWRSYLNMELTIPIFATNSDCELIVKAMQGLLKDGNPIPSAIAANSGIYGSSGGGEAAAKDKKYSIGLDIGTNSVGWAVITDEYKVPSKKFKVLGNTDRHSIKKNLIGALLFDSGETAEATRLKRTARRRYTRRKNRICYLQEIFSNEMAKVDDSFFHRLEESFLVEEDKKHERHPIFGNIVDEVAYHEKYPTIYHLRKKLVDSTDKADLRLIYLALAHMIKFRGHFLIEGDLNPDNSDVDKLFIQLVQTYNQLFEENPINASGVDAKAILSARLSKSRRLENLIAQLPGEKKNGLFGNLIALSLGLTPNFKSNFDLAEDAKLQLSKDTYDDDLDNLLAQIGDQYADLFLAAKNLSDAILLSDILRVNTEITKAPLSASMIKRYDEHHQDLTLLKALVRQQLPEKYKEIFFDQSKNGYAGYIDGGASQEEFYKFIKPILEKMDGTEELLVKLNREDLLRKQRTFDNGSIPHQIHLGELHAILRRQEDFYPFLKDNREKIEKILTFRIPYYVGPLARGNSRFAWMTRKSEETITPWNFEEVVDKGASAQSFIERMTNFDKNLPNEKVLPKHSLLYEYFTVYNELTKVKYVTEGMRKPAFLSGEQKKAIVDLLFKTNRKVTVKQLKEDYFKKIECFDSVEISGVEDRFNASLGTYHDLLKIIKDKDFLDNEENEDILEDIVLTLTLFEDREMIEERLKTYAHLFDDKVMKQLKRRRYTGWGRLSRKLINGIRDKQSGKTILDFLKSDGFANRNFMQLIHDDSLTFKEDIQKAQVSGQGDSLHEHIANLAGSPAIKKGILQTVKVVDELVKVMGRHKPENIVIEMARENQTTQKGQKNSRERMKRIEEGIKELGSQILKEHPVENTQLQNEKLYLYYLQNGRDMYVDQELDINRLSDYDVDHIVPQSFLKDDSIDNKVLTRSDKARGKSDNVPSEEVVKKMKNYWRQLLNAKLITQRKFDNLTKAERGGLSELDKAGFIKRQLVETRQITKHVAQILDSRMNTKYDENDKLIREVKVITLKSKLVSDFRKDFQFYKVREINNYHHAHDAYLNAVVGTALIKKYPKLESEFVYGDYKVYDVRKMIAKSEQEIGKATAKYFFYSNIMNFFKTEITLANGEIRKRPLIETNGETGEIVWDKGRDFATVRKVLSMPQVNIVKKTEVQTGGFSKESILPKRNSDKLIARKKDWDPKKYGGFDSPTVAYSVLVVAKVEKGKSKKLKSVKELLGITIMERSSFEKNPIDFLEAKGYKEVKKDLIIKLPKYSLFELENGRKRMLASAGELQKGNELALPSKYVNFLYLASHYEKLKGSPEDNEQKQLFVEQHKHYLDEIIEQISEFSKRVILADANLDKVLSAYNKHRDKPIREQAENIIHLFTLTNLGAPAAFKYFDTTIDRKRYTSTKEVLDATLIHQSITGLYETRIDLSQLGGDKRTADGSEFESPKKKAKVE

SEQ ID NO: 16180 - protein, 2631 aa, synthetic construct
MPAAKRVKLDGGTAPLEEEYRLFLEAPIQNVTLLEQWKREIPKVWAEINPPGLASTQAPIHVQLLSTALPVRVRQYPITLEAKRSLRETIRKFRAAGILRPVHSPWNTPLLPVRKSGTSEYRMVQDLREVNKRVETIHPTVPNPYTLLSLLPPDRIWYSVLDLKDAFFCIPLAPESQLIFAFEWADAEEGESGQLTWTRLPQGFKNSPTLFNEALNRDLQGFRLDHPSVSLLQYVDDLLIAADTQAACLSATRDLLMTLAELGYRVSGKKAQLCQEEVTYLGFKIHKGSRSLSNSRTQAILQIPVPKTKRQVREFLGKIGYCRLFIPGFAELAQPLYAATRPGNDPLVWGEKEEEAFQSLKLALTQPPALALPSLDKPFQLFVEETSGAAKGVLTQALGPWKRPVAYLSKRLDPVAAGWPRCLRAIAAAALLTREASKLTFGQDIEITSSHNLESLLRSPPDKWLTNARITQYQVLLLDPPRVRFKQTAALNPATLLPETDDTLPIHHCLDTLDSLTSTRPDLTDQPLAQAEATLFTDGSSYIRDGKRYAGAAVVTLDSVIWAEPLPIGTSAQKAELIALTKALEWSKDKSVNIYTDSRYAFATLHVHGMIYRERGWLTAGGKAIKNAPEILALLTAVWLPKRVAVMHCKGHQKDDAPTSTGNRRADEVAREVAIRPLSTQATISGSSGSSGSSGSSGSSGSSMASNFTQFVLVDNGGTGDVTVAPSNFANGIAEWISSNSRSQAYKVTCSVRQSSAQNRKYTIKVEVPKGAWRSYLNMELTIPIFATNSDCELIVKAMQGLLKDGNPIPSAIAANSGIYGGSGGSMASNFTQFVLVDNGGTGDVTVAPSNFANGIAEWISSNSRSQAYKVTCSVRQSSAQNRKYTIKVEVPKGAWRSYLNMELTIPIFATNSDCELIVKAMQGLLKDGNPIPSAIAANSGIYGGGSGGGSGGGSGGGSMASNFTQFVLVDNGGTGDVTVAPSNFANGIAEWISSNSRSQAYKVTCSVRQSSAQNRKYTIKVEVPKGAWRSYLNMELTIPIFATNSDCELIVKAMQGLLKDGNPIPSAIAANSGIYGGSGGSMASNFTQFVLVDNGGTGDVTVAPSNFANGIAEWISSNSRSQAYKVTCSVRQSSAQNRKYTIKVEVPKGAWRSYLNMELTIPIFATNSDCELIVKAMQGLLKDGNPIPSAIAANSGIYAEAAAKEAAAKEAAAKEAAAKALEAEAAAKEAAAKEAAAKEAAAKADKKYSIGLDIGTNSVGWAVITDEYKVPSKKFKVLGNTDRHSIKKNLIGALLFDSGETAEATRLKRTARRRYTRRKNRICYLQEIFSNEMAKVDDSFFHRLEESFLVEEDKKHERHPIFGNIVDEVAYHEKYPTIYHLRKKLVDSTDKADLRLIYLALAHMIKFRGHFLIEGDLNPDNSDVDKLFIQLVQTYNQLFEENPINASGVDAKAILSARLSKSRRLENLIAQLPGEKKNGLFGNLIALSLGLTPNFKSNFDLAEDAKLQLSKDTYDDDLDNLLAQIGDQYADLFLAAKNLSDAILLSDILRVNTEITKAPLSASMIKRYDEHHQDLTLLKALVRQQLPEKYKEIFFDQSKNGYAGYIDGGASQEEFYKFIKPILEKMDGTEELLVKLNREDLLRKQRTFDNGSIPHQIHLGELHAILRRQEDFYPFLKDNREKIEKILTFRIPYYVGPLARGNSRFAWMTRKSEETITPWNFEEVVDKGASAQSFIERMTNFDKNLPNEKVLPKHSLLYEYFTVYNELTKVKYVTEGMRKPAFLSGEQKKAIVDLLFKTNRKVTVKQLKEDYFKKIECFDSVEISGVEDRFNASLGTYHDLLKIIKDKDFLDNEENEDILEDIVLTLTLFEDREMIEERLKTYAHLFDDKVMKQLKRRRYTGWGRLSRKLINGIRDKQSGKTILDFLKSDGFANRNFMQLIHDDSLTFKEDIQKAQVSGQGDSLHEHIANLAGSPAIKKGILQTVKVVDELVKVMGRHKPENIVIEMARENQTTQKGQKNSRERMKRIEEGIKELGSQILKEHPVENTQLQNEKLYLYYLQNGRDMYVDQELDINRLSDYDVDHIVPQSFLKDDSIDNKVLTRSDKARGKSDNVPSEEVVKKMKNYWRQLLNAKLITQRKFDNLTKAERGGLSELDKAGFIKRQLVETRQITKHVAQILDSRMNTKYDENDKLIREVKVITLKSKLVSDFRKDFQFYKVREINNYHHAHDAYLNAVVGTALIKKYPKLESEFVYGDYKVYDVRKMIAKSEQEIGKATAKYFFYSNIMNFFKTEITLANGEIRKRPLIETNGETGEIVWDKGRDFATVRKVLSMPQVNIVKKTEVQTGGFSKESILPKRNSDKLIARKKDWDPKKYGGFDSPTVAYSVLVVAKVEKGKSKKLKSVKELLGITIMERSSFEKNPIDFLEAKGYKEVKKDLIIKLPKYSLFELENGRKRMLASAGELQKGNELALPSKYVNFLYLASHYEKLKGSPEDNEQKQLFVEQHKHYLDEIIEQISEFSKRVILADANLDKVLSAYNKHRDKPIREQAENIIHLFTLTNLGAPAAFKYFDTTIDRKRYTSTKEVLDATLIHQSITGLYETRIDLSQLGGDKRTADGSEFESPKKKAKVE

SEQ ID NO: 16181 - protein, 2618 aa, synthetic construct
MPAAKRVKLDGGTAPLEEEYRLFLEAPIQNVTLLEQWKREIPKVWAEINPPGLASTQAPIHVQLLSTALPVRVRQYPITLEAKRSLRETIRKFRAAGILRPVHSPWNTPLLPVRKSGTSEYRMVQDLREVNKRVETIHPTVPNPYTLLSLLPPDRIWYSVLDLKDAFFCIPLAPESQLIFAFEWADAEEGESGQLTWTRLPQGFKNSPTLFNEALNRDLQGFRLDHPSVSLLQYVDDLLIAADTQAACLSATRDLLMTLAELGYRVSGKKAQLCQEEVTYLGFKIHKGSRSLSNSRTQAILQIPVPKTKRQVREFLGKIGYCRLFIPGFAELAQPLYAATRPGNDPLVWGEKEEEAFQSLKLALTQPPALALPSLDKPFQLFVEETSGAAKGVLTQALGPWKRPVAYLSKRLDPVAAGWPRCLRAIAAAALLTREASKLTFGQDIEITSSHNLESLLRSPPDKWLTNARITQYQVLLLDPPRVRFKQTAALNPATLLPETDDTLPIHHCLDTLDSLTSTRPDLTDQPLAQAEATLFTDGSSYIRDGKRYAGAAVVTLDSVIWAEPLPIGTSAQKAELIALTKALEWSKDKSVNIYTDSRYAFATLHVHGMIYRERGWLTAGGKAIKNAPEILALLTAVWLPKRVAVMHCKGHQKDDAPTSTGNRRADEVAREVAIRPLSTQATISGSSGSSGSSGSSGSSGSSMASNFTQFVLVDNGGTGDVTVAPSNFANGIAEWISSNSRSQAYKVTCSVRQSSAQNRKYTIKVEVPKGAWRSYLNMELTIPIFATNSDCELIVKAMQGLLKDGNPIPSAIAANSGIYGGSGGSMASNFTQFVLVDNGGTGDVTVAPSNFANGIAEWISSNSRSQAYKVTCSVRQSSAQNRKYTIKVEVPKGAWRSYLNMELTIPIFATNSDCELIVKAMQGLLKDGNPIPSAIAANSGIYGGGSGGGSGGGSGGGSMASNFTQFVLVDNGGTGDVTVAPSNFANGIAEWISSNSRSQAYKVTCSVRQSSAQNRKYTIKVEVPKGAWRSYLNMELTIPIFATNSDCELIVKAMQGLLKDGNPIPSAIAANSGIYGGSGGSMASNFTQFVLVDNGGTGDVTVAPSNFANGIAEWISSNSRSQAYKVTCSVRQSSAQNRKYTIKVEVPKGAWRSYLNMELTIPIFATNSDCELIVKAMQGLLKDGNPIPSAIAANSGIYSGGSSGGSSGSETPGTSESATPESSGGSSGGSSDKKYSIGLDIGTNSVGWAVITDEYKVPSKKFKVLGNTDRHSIKKNLIGALLFDSGETAEATRLKRTARRRYTRRKNRICYLQEIFSNEMAKVDDSFFHRLEESFLVEEDKKHERHPIFGNIVDEVAYHEKYPTIYHLRKKLVDSTDKADLRLIYLALAHMIKFRGHFLIEGDLNPDNSDVDKLFIQLVQTYNQLFEENPINASGVDAKAILSARLSKSRRLENLIAQLPGEKKNGLFGNLIALSLGLTPNFKSNFDLAEDAKLQLSKDTYDDDLDNLLAQIGDQYADLFLAAKNLSDAILLSDILRVNTEITKAPLSASMIKRYDEHHQDLTLLKALVRQQLPEKYKEIFFDQSKNGYAGYIDGGASQEEFYKFIKPILEKMDGTEELLVKLNREDLLRKQRTFDNGSIPHQIHLGELHAILRRQEDFYPFLKDNREKIEKILTFRIPYYVGPLARGNSRFAWMTRKSEETITPWNFEEVVDKGASAQSFIERMTNFDKNLPNEKVLPKHSLLYEYFTVYNELTKVKYVTEGMRKPAFLSGEQKKAIVDLLFKTNRKVTVKQLKEDYFKKIECFDSVEISGVEDRFNASLGTYHDLLKIIKDKDFLDNEENEDILEDIVLTLTLFEDREMIEERLKTYAHLFDDKVMKQLKRRRYTGWGRLSRKLINGIRDKQSGKTILDFLKSDGFANRNFMQLIHDDSLTFKEDIQKAQVSGQGDSLHEHIANLAGSPAIKKGILQTVKVVDELVKVMGRHKPENIVIEMARENQTTQKGQKNSRERMKRIEEGIKELGSQILKEHPVENTQLQNEKLYLYYLQNGRDMYVDQELDINRLSDYDVDHIVPQSFLKDDSIDNKVLTRSDKARGKSDNVPSEEVVKKMKNYWRQLLNAKLITQRKFDNLTKAERGGLSELDKAGFIKRQLVETRQITKHVAQILDSRMNTKYDENDKLIREVKVITLKSKLVSDFRKDFQFYKVREINNYHHAHDAYLNAVVGTALIKKYPKLESEFVYGDYKVYDVRKMIAKSEQEIGKATAKYFFYSNIMNFFKTEITLANGEIRKRPLIETNGETGEIVWDKGRDFATVRKVLSMPQVNIVKKTEVQTGGFSKESILPKRNSDKLIARKKDWDPKKYGGFDSPTVAYSVLVVAKVEKGKSKKLKSVKELLGITIMERSSFEKNPIDFLEAKGYKEVKKDLIIKLPKYSLFELENGRKRMLASAGELQKGNELALPSKYVNFLYLASHYEKLKGSPEDNEQKQLFVEQHKHYLDEIIEQISEFSKRVILADANLDKVLSAYNKHRDKPIREQAENIIHLFTLTNLGAPAAFKYFDTTIDRKRYTSTKEVLDATLIHQSITGLYETRIDLSQLGGDKRTADGSEFESPKKKAKVE

SEQ ID NO: 16182 - protein, 2603 aa, synthetic construct
MPAAKRVKLDGGTAPLEEEYRLFLEAPIQNVTLLEQWKREIPKVWAEINPPGLASTQAPIHVQLLSTALPVRVRQYPITLEAKRSLRETIRKFRAAGILRPVHSPWNTPLLPVRKSGTSEYRMVQDLREVNKRVETIHPTVPNPYTLLSLLPPDRIWYSVLDLKDAFFCIPLAPESQLIFAFEWADAEEGESGQLTWTRLPQGFKNSPTLFNEALNRDLQGFRLDHPSVSLLQYVDDLLIAADTQAACLSATRDLLMTLAELGYRVSGKKAQLCQEEVTYLGFKIHKGSRSLSNSRTQAILQIPVPKTKRQVREFLGKIGYCRLFIPGFAELAQPLYAATRPGNDPLVWGEKEEEAFQSLKLALTQPPALALPSLDKPFQLFVEETSGAAKGVLTQALGPWKRPVAYLSKRLDPVAAGWPRCLRAIAAAALLTREASKLTFGQDIEITSSHNLESLLRSPPDKWLTNARITQYQVLLLDPPRVRFKQTAALNPATLLPETDDTLPIHHCLDTLDSLTSTRPDLTDQPLAQAEATLFTDGSSYIRDGKRYAGAAVVTLDSVIWAEPLPIGTSAQKAELIALTKALEWSKDKSVNIYTDSRYAFATLHVHGMIYRERGWLTAGGKAIKNAPEILALLTAVWLPKRVAVMHCKGHQKDDAPTSTGNRRADEVAREVAIRPLSTQATISGSSGSSGSSGSSGSSGSSMASNFTQFVLVDNGGTGDVTVAPSNFANGIAEWISSNSRSQAYKVTCSVRQSSAQNRKYTIKVEVPKGAWRSYLNMELTIPIFATNSDCELIVKAMQGLLKDGNPIPSAIAANSGIYGGSGGSMASNFTQFVLVDNGGTGDVTVAPSNFANGIAEWISSNSRSQAYKVTCSVRQSSAQNRKYTIKVEVPKGAWRSYLNMELTIPIFATNSDCELIVKAMQGLLKDGNPIPSAIAANSGIYGGGSGGGSGGGSGGGSMASNFTQFVLVDNGGTGDVTVAPSNFANGIAEWISSNSRSQAYKVTCSVRQSSAQNRKYTIKVEVPKGAWRSYLNMELTIPIFATNSDCELIVKAMQGLLKDGNPIPSAIAANSGIYGGSGGSMASNFTQFVLVDNGGTGDVTVAPSNFANGIAEWISSNSRSQAYKVTCSVRQSSAQNRKYTIKVEVPKGAWRSYLNMELTIPIFATNSDCELIVKAMQGLLKDGNPIPSAIAANSGIYGSSGSSGSSGSSGSSGSSDKKYSIGLDIGTNSVGWAVITDEYKVPSKKFKVLGNTDRHSIKKNLIGALLFDSGETAEATRLKRTARRRYTRRKNRICYLQEIFSNEMAKVDDSFFHRLEESFLVEEDKKHERHPIFGNIVDEVAYHEKYPTIYHLRKKLVDSTDKADLRLIYLALAHMIKFRGHFLIEGDLNPDNSDVDKLFIQLVQTYNQLFEENPINASGVDAKAILSARLSKSRRLENLIAQLPGEKKNGLFGNLIALSLGLTPNFKSNFDLAEDAKLQLSKDTYDDDLDNLLAQIGDQYADLFLAAKNLSDAILLSDILRVNTEITKAPLSASMIKRYDEHHQDLTLLKALVRQQLPEKYKEIFFDQSKNGYAGYIDGGASQEEFYKFIKPILEKMDGTEELLVKLNREDLLRKQRTFDNGSIPHQIHLGELHAILRRQEDFYPFLKDNREKIEKILTFRIPYYVGPLARGNSRFAWMTRKSEETITPWNFEEVVDKGASAQSFIERMTNFDKNLPNEKVLPKHSLLYEYFTVYNELTKVKYVTEGMRKPAFLSGEQKKAIVDLLFKTNRKVTVKQLKEDYFKKIECFDSVEISGVEDRFNASLGTYHDLLKIIKDKDFLDNEENEDILEDIVLTLTLFEDREMIEERLKTYAHLFDDKVMKQLKRRRYTGWGRLSRKLINGIRDKQSGKTILDFLKSDGFANRNFMQLIHDDSLTFKEDIQKAQVSGQGDSLHEHIANLAGSPAIKKGILQTVKVVDELVKVMGRHKPENIVIEMARENQTTQKGQKNSRERMKRIEEGIKELGSQILKEHPVENTQLQNEKLYLYYLQNGRDMYVDQELDINRLSDYDVDHIVPQSFLKDDSIDNKVLTRSDKARGKSDNVPSEEVVKKMKNYWRQLLNAKLITQRKFDNLTKAERGGLSELDKAGFIKRQLVETRQITKHVAQILDSRMNTKYDENDKLIREVKVITLKSKLVSDFRKDFQFYKVREINNYHHAHDAYLNAVVGTALIKKYPKLESEFVYGDYKVYDVRKMIAKSEQEIGKATAKYFFYSNIMNFFKTEITLANGEIRKRPLIETNGETGEIVWDKGRDFATVRKVLSMPQVNIVKKTEVQTGGFSKESILPKRNSDKLIARKKDWDPKKYGGFDSPTVAYSVLVVAKVEKGKSKKLKSVKELLGITIMERSSFEKNPIDFLEAKGYKEVKKDLIIKLPKYSLFELENGRKRMLASAGELQKGNELALPSKYVNFLYLASHYEKLKGSPEDNEQKQLFVEQHKHYLDEIIEQISEFSKRVILADANLDKVLSAYNKHRDKPIREQAENIIHLFTLTNLGAPAAFKYFDTTIDRKRYTSTKEVLDATLIHQSITGLYETRIDLSQLGGDKRTADGSEFESPKKKAKVE

SEQ ID NO: 16183 - protein, 2596 aa, synthetic construct
MPAAKRVKLDGGTAPLEEEYRLFLEAPIQNVTLLEQWKREIPKVWAEINPPGLASTQAPIHVQLLSTALPVRVRQYPITLEAKRSLRETIRKFRAAGILRPVHSPWNTPLLPVRKSGTSEYRMVQDLREVNKRVETIHPTVPNPYTLLSLLPPDRIWYSVLDLKDAFFCIPLAPESQLIFAFEWADAEEGESGQLTWTRLPQGFKNSPTLFNEALNRDLQGFRLDHPSVSLLQYVDDLLIAADTQAACLSATRDLLMTLAELGYRVSGKKAQLCQEEVTYLGFKIHKGSRSLSNSRTQAILQIPVPKTKRQVREFLGKIGYCRLFIPGFAELAQPLYAATRPGNDPLVWGEKEEEAFQSLKLALTQPPALALPSLDKPFQLFVEETSGAAKGVLTQALGPWKRPVAYLSKRLDPVAAGWPRCLRAIAAAALLTREASKLTFGQDIEITSSHNLESLLRSPPDKWLTNARITQYQVLLLDPPRVRFKQTAALNPATLLPETDDTLPIHHCLDTLDSLTSTRPDLTDQPLAQAEATLFTDGSSYIRDGKRYAGAAVVTLDSVIWAEPLPIGTSAQKAELIALTKALEWSKDKSVNIYTDSRYAFATLHVHGMIYRERGWLTAGGKAIKNAPEILALLTAVWLPKRVAVMHCKGHQKDDAPTSTGNRRADEVAREVAIRPLSTQATISGSSGSSGSSGSSGSSGSSMASNFTQFVLVDNGGTGDVTVAPSNFANGIAEWISSNSRSQAYKVTCSVRQSSAQNRKYTIKVEVPKGAWRSYLNMELTIPIFATNSDCELIVKAMQGLLKDGNPIPSAIAANSGIYGGSGGSMASNFTQFVLVDNGGTGDVTVAPSNFANGIAEWISSNSRSQAYKVTCSVRQSSAQNRKYTIKVEVPKGAWRSYLNMELTIPIFATNSDCELIVKAMQGLLKDGNPIPSAIAANSGIYGGGSGGGSGGGSGGGSMASNFTQFVLVDNGGTGDVTVAPSNFANGIAEWISSNSRSQAYKVTCSVRQSSAQNRKYTIKVEVPKGAWRSYLNMELTIPIFATNSDCELIVKAMQGLLKDGNPIPSAIAANSGIYGGSGGSMASNFTQFVLVDNGGTGDVTVAPSNFANGIAEWISSNSRSQAYKVTCSVRQSSAQNRKYTIKVEVPKGAWRSYLNMELTIPIFATNSDCELIVKAMQGLLKDGNPIPSAIAANSGIYGSSGGGEAAAKDKKYSIGLDIGTNSVGWAVITDEYKVPSKKFKVLGNTDRHSIKKNLIGALLFDSGETAEATRLKRTARRRYTRRKNRICYLQEIFSNEMAKVDDSFFHRLEESFLVEEDKKHERHPIFGNIVDEVAYHEKYPTIYHLRKKLVDSTDKADLRLIYLALAHMIKFRGHFLIEGDLNPDNSDVDKLFIQLVQTYNQLFEENPINASGVDAKAILSARLSKSRRLENLIAQLPGEKKNGLFGNLIALSLGLTPNFKSNFDLAEDAKLQLSKDTYDDDLDNLLAQIGDQYADLFLAAKNLSDAILLSDILRVNTEITKAPLSASMIKRYDEHHQDLTLLKALVRQQLPEKYKEIFFDQSKNGYAGYIDGGASQEEFYKFIKPILEKMDGTEELLVKLNREDLLRKQRTFDNGSIPHQIHLGELHAILRRQEDFYPFLKDNREKIEKILTFRIPYYVGPLARGNSRFAWMTRKSEETITPWNFEEVVDKGASAQSFIERMTNFDKNLPNEKVLPKHSLLYEYFTVYNELTKVKYVTEGMRKPAFLSGEQKKAIVDLLFKTNRKVTVKQLKEDYFKKIECFDSVEISGVEDRFNASLGTYHDLLKIIKDKDFLDNEENEDILEDIVLTLTLFEDREMIEERLKTYAHLFDDKVMKQLKRRRYTGWGRLSRKLINGIRDKQSGKTILDFLKSDGFANRNFMQLIHDDSLTFKEDIQKAQVSGQGDSLHEHIANLAGSPAIKKGILQTVKVVDELVKVMGRHKPENIVIEMARENQTTQKGQKNSRERMKRIEEGIKELGSQILKEHPVENTQLQNEKLYLYYLQNGRDMYVDQELDINRLSDYDVDHIVPQSFLKDDSIDNKVLTRSDKARGKSDNVPSEEVVKKMKNYWRQLLNAKLITQRKFDNLTKAERGGLSELDKAGFIKRQLVETRQITKHVAQILDSRMNTKYDENDKLIREVKVITLKSKLVSDFRKDFQFYKVREINNYHHAHDAYLNAVVGTALIKKYPKLESEFVYGDYKVYDVRKMIAKSEQEIGKATAKYFFYSNIMNFFKTEITLANGEIRKRPLIETNGETGEIVWDKGRDFATVRKVLSMPQVNIVKKTEVQTGGFSKESILPKRNSDKLIARKKDWDPKKYGGFDSPTVAYSVLVVAKVEKGKSKKLKSVKELLGITIMERSSFEKNPIDFLEAKGYKEVKKDLIIKLPKYSLFELENGRKRMLASAGELQKGNELALPSKYVNFLYLASHYEKLKGSPEDNEQKQLFVEQHKHYLDEIIEQISEFSKRVILADANLDKVLSAYNKHRDKPIREQAENIIHLFTLTNLGAPAAFKYFDTTIDRKRYTSTKEVLDATLIHQSITGLYETRIDLSQLGGDKRTADGSEFESPKKKAKVE

SEQ ID NO: 16184 - protein, 2245 aa, synthetic construct
MPAAKRVKLDGGTAPLEEEYRLFLEAPIQNVTLLEQWKREIPKVWAEINPPGLASTQAPIHVQLLSTALPVRVRQYPITLEAKRSLRETIRKFRAAGILRPVHSPWNTPLLPVRKSGTSEYRMVQDLREVNKRVETIHPTVPNPYTLLSLLPPDRIWYSVLDLKDAFFCIPLAPESQLIFAFEWADAEEGESGQLTWTRLPQGFKNSPTLFNEALNRDLQGFRLDHPSVSLLQYVDDLLIAADTQAACLSATRDLLMTLAELGYRVSGKKAQLCQEEVTYLGFKIHKGSRSLSNSRTQAILQIPVPKTKRQVREFLGKIGYCRLFIPGFAELAQPLYAATRPGNDPLVWGEKEEEAFQSLKLALTQPPALALPSLDKPFQLFVEETSGAAKGVLTQALGPWKRPVAYLSKRLDPVAAGWPRCLRAIAAAALLTREASKLTFGQDIEITSSHNLESLLRSPPDKWLTNARITQYQVLLLDPPRVRFKQTAALNPATLLPETDDTLPIHHCLDTLDSLTSTRPDLTDQPLAQAEATLFTDGSSYIRDGKRYAGAAVVTLDSVIWAEPLPIGTSAQKAELIALTKALEWSKDKSVNIYTDSRYAFATLHVHGMIYRERGWLTAGGKAIKNAPEILALLTAVWLPKRVAVMHCKGHQKDDAPTSTGNRRADEVAREVAIRPLSTQATISGSSGGGEAAAKMASNFTQFVLVDNGGTGDVTVAPSNFANGIAEWISSNSRSQAYKVTCSVRQSSAQNRKYTIKVEVPKGAWRSYLNMELTIPIFATNSDCELIVKAMQGLLKDGNPIPSAIAANSGIYAEAAAKEAAAKEAAAKEAAAKALEAEAAAKEAAAKEAAAKEAAAKADKKYSIGLDIGTNSVGWAVITDEYKVPSKKFKVLGNTDRHSIKKNLIGALLFDSGETAEATRLKRTARRRYTRRKNRICYLQEIFSNEMAKVDDSFFHRLEESFLVEEDKKHERHPIFGNIVDEVAYHEKYPTIYHLRKKLVDSTDKADLRLIYLALAHMIKFRGHFLIEGDLNPDNSDVDKLFIQLVQTYNQLFEENPINASGVDAKAILSARLSKSRRLENLIAQLPGEKKNGLFGNLIALSLGLTPNFKSNFDLAEDAKLQLSKDTYDDDLDNLLAQIGDQYADLFLAAKNLSDAILLSDILRVNTEITKAPLSASMIKRYDEHHQDLTLLKALVRQQLPEKYKEIFFDQSKNGYAGYIDGGASQEEFYKFIKPILEKMDGTEELLVKLNREDLLRKQRTFDNGSIPHQIHLGELHAILRRQEDFYPFLKDNREKIEKILTFRIPYYVGPLARGNSRFAWMTRKSEETITPWNFEEVVDKGASAQSFIERMTNFDKNLPNEKVLPKHSLLYEYFTVYNELTKVKYVTEGMRKPAFLSGEQKKAIVDLLFKTNRKVTVKQLKEDYFKKIECFDSVEISGVEDRFNASLGTYHDLLKIIKDKDFLDNEENEDILEDIVLTLTLFEDREMIEERLKTYAHLFDDKVMKQLKRRRYTGWGRLSRKLINGIRDKQSGKTILDFLKSDGFANRNFMQLIHDDSLTFKEDIQKAQVSGQGDSLHEHIANLAGSPAIKKGILQTVKVVDELVKVMGRHKPENIVIEMARENQTTQKGQKNSRERMKRIEEGIKELGSQILKEHPVENTQLQNEKLYLYYLQNGRDMYVDQELDINRLSDYDVDHIVPQSFLKDDSIDNKVLTRSDKARGKSDNVPSEEVVKKMKNYWRQLLNAKLITQRKFDNLTKAERGGLSELDKAGFIKRQLVETRQITKHVAQILDSRMNTKYDENDKLIREVKVITLKSKLVSDFRKDFQFYKVREINNYHHAHDAYLNAVVGTALIKKYPKLESEFVYGDYKVYDVRKMIAKSEQEIGKATAKYFFYSNIMNFFKTEITLANGEIRKRPLIETNGETGEIVWDKGRDFATVRKVLSMPQVNIVKKTEVQTGGFSKESILPKRNSDKLIARKKDWDPKKYGGFDSPTVAYSVLVVAKVEKGKSKKLKSVKELLGITIMERSSFEKNPIDFLEAKGYKEVKKDLIIKLPKYSLFELENGRKRMLASAGELQKGNELALPSKYVNFLYLASHYEKLKGSPEDNEQKQLFVEQHKHYLDEIIEQISEFSKRVILADANLDKVLSAYNKHRDKPIREQAENIIHLFTLTNLGAPAAFKYFDTTIDRKRYTSTKEVLDATLIHQSITGLYETRIDLSQLGGDKRTADGSEFESPKKKAKVE

SEQ ID NO: 16185 - protein, 2232 aa, synthetic construct
MPAAKRVKLDGGTAPLEEEYRLFLEAPIQNVTLLEQWKREIPKVWAEINPPGLASTQAPIHVQLLSTALPVRVRQYPITLEAKRSLRETIRKFRAAGILRPVHSPWNTPLLPVRKSGTSEYRMVQDLREVNKRVETIHPTVPNPYTLLSLLPPDRIWYSVLDLKDAFFCIPLAPESQLIFAFEWADAEEGESGQLTWTRLPQGFKNSPTLFNEALNRDLQGFRLDHPSVSLLQYVDDLLIAADTQAACLSATRDLLMTLAELGYRVSGKKAQLCQEEVTYLGFKIHKGSRSLSNSRTQAILQIPVPKTKRQVREFLGKIGYCRLFIPGFAELAQPLYAATRPGNDPLVWGEKEEEAFQSLKLALTQPPALALPSLDKPFQLFVEETSGAAKGVLTQALGPWKRPVAYLSKRLDPVAAGWPRCLRAIAAAALLTREASKLTFGQDIEITSSHNLESLLRSPPDKWLTNARITQYQVLLLDPPRVRFKQTAALNPATLLPETDDTLPIHHCLDTLDSLTSTRPDLTDQPLAQAEATLFTDGSSYIRDGKRYAGAAVVTLDSVIWAEPLPIGTSAQKAELIALTKALEWSKDKSVNIYTDSRYAFATLHVHGMIYRERGWLTAGGKAIKNAPEILALLTAVWLPKRVAVMHCKGHQKDDAPTSTGNRRADEVAREVAIRPLSTQATISGSSGGGEAAAKMASNFTQFVLVDNGGTGDVTVAPSNFANGIAEWISSNSRSQAYKVTCSVRQSSAQNRKYTIKVEVPKGAWRSYLNMELTIPIFATNSDCELIVKAMQGLLKDGNPIPSAIAANSGIYSGGSSGGSSGSETPGTSESATPESSGGSSGGSSDKKYSIGLDIGTNSVGWAVITDEYKVPSKKFKVLGNTDRHSIKKNLIGALLFDSGETAEATRLKRTARRRYTRRKNRICYLQEIFSNEMAKVDDSFFHRLEESFLVEEDKKHERHPIFGNIVDEVAYHEKYPTIYHLRKKLVDSTDKADLRLIYLALAHMIKFRGHFLIEGDLNPDNSDVDKLFIQLVQTYNQLFEENPINASGVDAKAILSARLSKSRRLENLIAQLPGEKKNGLFGNLIALSLGLTPNFKSNFDLAEDAKLQLSKDTYDDDLDNLLAQIGDQYADLFLAAKNLSDAILLSDILRVNTEITKAPLSASMIKRYDEHHQDLTLLKALVRQQLPEKYKEIFFDQSKNGYAGYIDGGASQEEFYKFIKPILEKMDGTEELLVKLNREDLLRKQRTFDNGSIPHQIHLGELHAILRRQEDFYPFLKDNREKIEKILTFRIPYYVGPLARGNSRFAWMTRKSEETITPWNFEEVVDKGASAQSFIERMTNFDKNLPNEKVLPKHSLLYEYFTVYNELTKVKYVTEGMRKPAFLSGEQKKAIVDLLFKTNRKVTVKQLKEDYFKKIECFDSVEISGVEDRFNASLGTYHDLLKIIKDKDFLDNEENEDILEDIVLTLTLFEDREMIEERLKTYAHLFDDKVMKQLKRRRYTGWGRLSRKLINGIRDKQSGKTILDFLKSDGFANRNFMQLIHDDSLTFKEDIQKAQVSGQGDSLHEHIANLAGSPAIKKGILQTVKVVDELVKVMGRHKPENIVIEMARENQTTQKGQKNSRERMKRIEEGIKELGSQILKEHPVENTQLQNEKLYLYYLQNGRDMYVDQELDINRLSDYDVDHIVPQSFLKDDSIDNKVLTRSDKARGKSDNVPSEEVVKKMKNYWRQLLNAKLITQRKFDNLTKAERGGLSELDKAGFIKRQLVETRQITKHVAQILDSRMNTKYDENDKLIREVKVITLKSKLVSDFRKDFQFYKVREINNYHHAHDAYLNAVVGTALIKKYPKLESEFVYGDYKVYDVRKMIAKSEQEIGKATAKYFFYSNIMNFFKTEITLANGEIRKRPLIETNGETGEIVWDKGRDFATVRKVLSMPQVNIVKKTEVQTGGFSKESILPKRNSDKLIARKKDWDPKKYGGFDSPTVAYSVLVVAKVEKGKSKKLKSVKELLGITIMERSSFEKNPIDFLEAKGYKEVKKDLIIKLPKYSLFELENGRKRMLASAGELQKGNELALPSKYVNFLYLASHYEKLKGSPEDNEQKQLFVEQHKHYLDEIIEQISEFSKRVILADANLDKVLSAYNKHRDKPIREQAENIIHLFTLTNLGAPAAFKYFDTTIDRKRYTSTKEVLDATLIHQSITGLYETRIDLSQLGGDKRTADGSEFESPKKKAKVE

SEQ ID NO: 16186 - protein, 2217 aa, synthetic construct
MPAAKRVKLDGGTAPLEEEYRLFLEAPIQNVTLLEQWKREIPKVWAEINPPGLASTQAPIHVQLLSTALPVRVRQYPITLEAKRSLRETIRKFRAAGILRPVHSPWNTPLLPVRKSGTSEYRMVQDLREVNKRVETIHPTVPNPYTLLSLLPPDRIWYSVLDLKDAFFCIPLAPESQLIFAFEWADAEEGESGQLTWTRLPQGFKNSPTLFNEALNRDLQGFRLDHPSVSLLQYVDDLLIAADTQAACLSATRDLLMTLAELGYRVSGKKAQLCQEEVTYLGFKIHKGSRSLSNSRTQAILQIPVPKTKRQVREFLGKIGYCRLFIPGFAELAQPLYAATRPGNDPLVWGEKEEEAFQSLKLALTQPPALALPSLDKPFQLFVEETSGAAKGVLTQALGPWKRPVAYLSKRLDPVAAGWPRCLRAIAAAALLTREASKLTFGQDIEITSSHNLESLLRSPPDKWLTNARITQYQVLLLDPPRVRFKQTAALNPATLLPETDDTLPIHHCLDTLDSLTSTRPDLTDQPLAQAEATLFTDGSSYIRDGKRYAGAAVVTLDSVIWAEPLPIGTSAQKAELIALTKALEWSKDKSVNIYTDSRYAFATLHVHGMIYRERGWLTAGGKAIKNAPEILALLTAVWLPKRVAVMHCKGHQKDDAPTSTGNRRADEVAREVAIRPLSTQATISGSSGGGEAAAKMASNFTQFVLVDNGGTGDVTVAPSNFANGIAEWISSNSRSQAYKVTCSVRQSSAQNRKYTIKVEVPKGAWRSYLNMELTIPIFATNSDCELIVKAMQGLLKDGNPIPSAIAANSGIYGSSGSSGSSGSSGSSGSSDKKYSIGLDIGTNSVGWAVITDEYKVPSKKFKVLGNTDRHSIKKNLIGALLFDSGETAEATRLKRTARRRYTRRKNRICYLQEIFSNEMAKVDDSFFHRLEESFLVEEDKKHERHPIFGNIVDEVAYHEKYPTIYHLRKKLVDSTDKADLRLIYLALAHMIKFRGHFLIEGDLNPDNSDVDKLFIQLVQTYNQLFEENPINASGVDAKAILSARLSKSRRLENLIAQLPGEKKNGLFGNLIALSLGLTPNFKSNFDLAEDAKLQLSKDTYDDDLDNLLAQIGDQYADLFLAAKNLSDAILLSDILRVNTEITKAPLSASMIKRYDEHHQDLTLLKALVRQQLPEKYKEIFFDQSKNGYAGYIDGGASQEEFYKFIKPILEKMDGTEELLVKLNREDLLRKQRTFDNGSIPHQIHLGELHAILRRQEDFYPFLKDNREKIEKILTFRIPYYVGPLARGNSRFAWMTRKSEETITPWNFEEVVDKGASAQSFIERMTNFDKNLPNEKVLPKHSLLYEYFTVYNELTKVKYVTEGMRKPAFLSGEQKKAIVDLLFKTNRKVTVKQLKEDYFKKIECFDSVEISGVEDRFNASLGTYHDLLKIIKDKDFLDNEENEDILEDIVLTLTLFEDREMIEERLKTYAHLFDDKVMKQLKRRRYTGWGRLSRKLINGIRDKQSGKTILDFLKSDGFANRNFMQLIHDDSLTFKEDIQKAQVSGQGDSLHEHIANLAGSPAIKKGILQTVKVVDELVKVMGRHKPENIVIEMARENQTTQKGQKNSRERMKRIEEGIKELGSQILKEHPVENTQLQNEKLYLYYLQNGRDMYVDQELDINRLSDYDVDHIVPQSFLKDDSIDNKVLTRSDKARGKSDNVPSEEVVKKMKNYWRQLLNAKLITQRKFDNLTKAERGGLSELDKAGFIKRQLVETRQITKHVAQILDSRMNTKYDENDKLIREVKVITLKSKLVSDFRKDFQFYKVREINNYHHAHDAYLNAVVGTALIKKYPKLESEFVYGDYKVYDVRKMIAKSEQEIGKATAKYFFYSNIMNFFKTEITLANGEIRKRPLIETNGETGEIVWDKGRDFATVRKVLSMPQVNIVKKTEVQTGGFSKESILPKRNSDKLIARKKDWDPKKYGGFDSPTVAYSVLVVAKVEKGKSKKLKSVKELLGITIMERSSFEKNPIDFLEAKGYKEVKKDLIIKLPKYSLFELENGRKRMLASAGELQKGNELALPSKYVNFLYLASHYEKLKGSPEDNEQKQLFVEQHKHYLDEIIEQISEFSKRVILADANLDKVLSAYNKHRDKPIREQAENIIHLFTLTNLGAPAAFKYFDTTIDRKRYTSTKEVLDATLIHQSITGLYETRIDLSQLGGDKRTADGSEFESPKKKAKVE

SEQ ID NO: 16187 - protein, 2210 aa, synthetic construct
MPAAKRVKLDGGTAPLEEEYRLFLEAPIQNVTLLEQWKREIPKVWAEINPPGLASTQAPIHVQLLSTALPVRVRQYPITLEAKRSLRETIRKFRAAGILRPVHSPWNTPLLPVRKSGTSEYRMVQDLREVNKRVETIHPTVPNPYTLLSLLPPDRIWYSVLDLKDAFFCIPLAPESQLIFAFEWADAEEGESGQLTWTRLPQGFKNSPTLFNEALNRDLQGFRLDHPSVSLLQYVDDLLIAADTQAACLSATRDLLMTLAELGYRVSGKKAQLCQEEVTYLGFKIHKGSRSLSNSRTQAILQIPVPKTKRQVREFLGKIGYCRLFIPGFAELAQPLYAATRPGNDPLVWGEKEEEAFQSLKLALTQPPALALPSLDKPFQLFVEETSGAAKGVLTQALGPWKRPVAYLSKRLDPVAAGWPRCLRAIAAAALLTREASKLTFGQDIEITSSHNLESLLRSPPDKWLTNARITQYQVLLLDPPRVRFKQTAALNPATLLPETDDTLPIHHCLDTLDSLTSTRPDLTDQPLAQAEATLFTDGSSYIRDGKRYAGAAVVTLDSVIWAEPLPIGTSAQKAELIALTKALEWSKDKSVNIYTDSRYAFATLHVHGMIYRERGWLTAGGKAIKNAPEILALLTAVWLPKRVAVMHCKGHQKDDAPTSTGNRRADEVAREVAIRPLSTQATISGSSGGGEAAAKMASNFTQFVLVDNGGTGDVTVAPSNFANGIAEWISSNSRSQAYKVTCSVRQSSAQNRKYTIKVEVPKGAWRSYLNMELTIPIFATNSDCELIVKAMQGLLKDGNPIPSAIAANSGIYGSSGGGEAAAKDKKYSIGLDIGTNSVGWAVITDEYKVPSKKFKVLGNTDRHSIKKNLIGALLFDSGETAEATRLKRTARRRYTRRKNRICYLQEIFSNEMAKVDDSFFHRLEESFLVEEDKKHERHPIFGNIVDEVAYHEKYPTIYHLRKKLVDSTDKADLRLIYLALAHMIKFRGHFLIEGDLNPDNSDVDKLFIQLVQTYNQLFEENPINASGVDAKAILSARLSKSRRLENLIAQLPGEKKNGLFGNLIALSLGLTPNFKSNFDLAEDAKLQLSKDTYDDDLDNLLAQIGDQYADLFLAAKNLSDAILLSDILRVNTEITKAPLSASMIKRYDEHHQDLTLLKALVRQQLPEKYKEIFFDQSKNGYAGYIDGGASQEEFYKFIKPILEKMDGTEELLVKLNREDLLRKQRTFDNGSIPHQIHLGELHAILRRQEDFYPFLKDNREKIEKILTFRIPYYVGPLARGNSRFAWMTRKSEETITPWNFEEVVDKGASAQSFIERMTNFDKNLPNEKVLPKHSLLYEYFTVYNELTKVKYVTEGMRKPAFLSGEQKKAIVDLLFKTNRKVTVKQLKEDYFKKIECFDSVEISGVEDRFNASLGTYHDLLKIIKDKDFLDNEENEDILEDIVLTLTLFEDREMIEERLKTYAHLFDDKVMKQLKRRRYTGWGRLSRKLINGIRDKQSGKTILDFLKSDGFANRNFMQLIHDDSLTFKEDIQKAQVSGQGDSLHEHIANLAGSPAIKKGILQTVKVVDELVKVMGRHKPENIVIEMARENQTTQKGQKNSRERMKRIEEGIKELGSQILKEHPVENTQLQNEKLYLYYLQNGRDMYVDQELDINRLSDYDVDHIVPQSFLKDDSIDNKVLTRSDKARGKSDNVPSEEVVKKMKNYWRQLLNAKLITQRKFDNLTKAERGGLSELDKAGFIKRQLVETRQITKHVAQILDSRMNTKYDENDKLIREVKVITLKSKLVSDFRKDFQFYKVREINNYHHAHDAYLNAVVGTALIKKYPKLESEFVYGDYKVYDVRKMIAKSEQEIGKATAKYFFYSNIMNFFKTEITLANGEIRKRPLIETNGETGEIVWDKGRDFATVRKVLSMPQVNIVKKTEVQTGGFSKESILPKRNSDKLIARKKDWDPKKYGGFDSPTVAYSVLVVAKVEKGKSKKLKSVKELLGITIMERSSFEKNPIDFLEAKGYKEVKKDLIIKLPKYSLFELENGRKRMLASAGELQKGNELALPSKYVNFLYLASHYEKLKGSPEDNEQKQLFVEQHKHYLDEIIEQISEFSKRVILADANLDKVLSAYNKHRDKPIREQAENIIHLFTLTNLGAPAAFKYFDTTIDRKRYTSTKEVLDATLIHQSITGLYETRIDLSQLGGDKRTADGSEFESPKKKAKVE

SEQ ID NO: 16188 - protein, 2368 aa, synthetic construct
MPAAKRVKLDGGTAPLEEEYRLFLEAPIQNVTLLEQWKREIPKVWAEINPPGLASTQAPIHVQLLSTALPVRVRQYPITLEAKRSLRETIRKFRAAGILRPVHSPWNTPLLPVRKSGTSEYRMVQDLREVNKRVETIHPTVPNPYTLLSLLPPDRIWYSVLDLKDAFFCIPLAPESQLIFAFEWADAEEGESGQLTWTRLPQGFKNSPTLFNEALNRDLQGFRLDHPSVSLLQYVDDLLIAADTQAACLSATRDLLMTLAELGYRVSGKKAQLCQEEVTYLGFKIHKGSRSLSNSRTQAILQIPVPKTKRQVREFLGKIGYCRLFIPGFAELAQPLYAATRPGNDPLVWGEKEEEAFQSLKLALTQPPALALPSLDKPFQLFVEETSGAAKGVLTQALGPWKRPVAYLSKRLDPVAAGWPRCLRAIAAAALLTREASKLTFGQDIEITSSHNLESLLRSPPDKWLTNARITQYQVLLLDPPRVRFKQTAALNPATLLPETDDTLPIHHCLDTLDSLTSTRPDLTDQPLAQAEATLFTDGSSYIRDGKRYAGAAVVTLDSVIWAEPLPIGTSAQKAELIALTKALEWSKDKSVNIYTDSRYAFATLHVHGMIYRERGWLTAGGKAIKNAPEILALLTAVWLPKRVAVMHCKGHQKDDAPTSTGNRRADEVAREVAIRPLSTQATISGSSGGGEAAAKMASNFTQFVLVDNGGTGDVTVAPSNFANGIAEWISSNSRSQAYKVTCSVRQSSAQNRKYTIKVEVPKGAWRSYLNMELTIPIFATNSDCELIVKAMQGLLKDGNPIPSAIAANSGIYGGSGGSMASNFTQFVLVDNGGTGDVTVAPSNFANGIAEWISSNSRSQAYKVTCSVRQSSAQNRKYTIKVEVPKGAWRSYLNMELTIPIFATNSDCELIVKAMQGLLKDGNPIPSAIAANSGIYAEAAAKEAAAKEAAAKEAAAKALEAEAAAKEAAAKEAAAKEAAAKADKKYSIGLDIGTNSVGWAVITDEYKVPSKKFKVLGNTDRHSIKKNLIGALLFDSGETAEATRLKRTARRRYTRRKNRICYLQEIFSNEMAKVDDSFFHRLEESFLVEEDKKHERHPIFGNIVDEVAYHEKYPTIYHLRKKLVDSTDKADLRLIYLALAHMIKFRGHFLIEGDLNPDNSDVDKLFIQLVQTYNQLFEENPINASGVDAKAILSARLSKSRRLENLIAQLPGEKKNGLFGNLIALSLGLTPNFKSNFDLAEDAKLQLSKDTYDDDLDNLLAQIGDQYADLFLAAKNLSDAILLSDILRVNTEITKAPLSASMIKRYDEHHQDLTLLKALVRQQLPEKYKEIFFDQSKNGYAGYIDGGASQEEFYKFIKPILEKMDGTEELLVKLNREDLLRKQRTFDNGSIPHQIHLGELHAILRRQEDFYPFLKDNREKIEKILTFRIPYYVGPLARGNSRFAWMTRKSEETITPWNFEEVVDKGASAQSFIERMTNFDKNLPNEKVLPKHSLLYEYFTVYNELTKVKYVTEGMRKPAFLSGEQKKAIVDLLFKTNRKVTVKQLKEDYFKKIECFDSVEISGVEDRFNASLGTYHDLLKIIKDKDFLDNEENEDILEDIVLTLTLFEDREMIEERLKTYAHLFDDKVMKQLKRRRYTGWGRLSRKLINGIRDKQSGKTILDFLKSDGFANRNFMQLIHDDSLTFKEDIQKAQVSGQGDSLHEHIANLAGSPAIKKGILQTVKVVDELVKVMGRHKPENIVIEMARENQTTQKGQKNSRERMKRIEEGIKELGSQILKEHPVENTQLQNEKLYLYYLQNGRDMYVDQELDINRLSDYDVDHIVPQSFLKDDSIDNKVLTRSDKARGKSDNVPSEEVVKKMKNYWRQLLNAKLITQRKFDNLTKAERGGLSELDKAGFIKRQLVETRQITKHVAQILDSRMNTKYDENDKLIREVKVITLKSKLVSDFRKDFQFYKVREINNYHHAHDAYLNAVVGTALIKKYPKLESEFVYGDYKVYDVRKMIAKSEQEIGKATAKYFFYSNIMNFFKTEITLANGEIRKRPLIETNGETGEIVWDKGRDFATVRKVLSMPQVNIVKKTEVQTGGFSKESILPKRNSDKLIARKKDWDPKKYGGFDSPTVAYSVLVVAKVEKGKSKKLKSVKELLGITIMERSSFEKNPIDFLEAKGYKEVKKDLIIKLPKYSLFELENGRKRMLASAGELQKGNELALPSKYVNFLYLASHYEKLKGSPEDNEQKQLFVEQHKHYLDEIIEQISEFSKRVILADANLDKVLSAYNKHRDKPIREQAENIIHLFTLTNLGAPAAFKYFDTTIDRKRYTSTKEVLDATLIHQSITGLYETRIDLSQLGGDKRTADGSEFESPKKKAKVE

SEQ ID NO: 16189 - protein, 2355 aa, synthetic construct
MPAAKRVKLDGGTAPLEEEYRLFLEAPIQNVTLLEQWKREIPKVWAEINPPGLASTQAPIHVQLLSTALPVRVRQYPITLEAKRSLRETIRKFRAAGILRPVHSPWNTPLLPVRKSGTSEYRMVQDLREVNKRVETIHPTVPNPYTLLSLLPPDRIWYSVLDLKDAFFCIPLAPESQLIFAFEWADAEEGESGQLTWTRLPQGFKNSPTLFNEALNRDLQGFRLDHPSVSLLQYVDDLLIAADTQAACLSATRDLLMTLAELGYRVSGKKAQLCQEEVTYLGFKIHKGSRSLSNSRTQAILQIPVPKTKRQVREFLGKIGYCRLFIPGFAELAQPLYAATRPGNDPLVWGEKEEEAFQSLKLALTQPPALALPSLDKPFQLFVEETSGAAKGVLTQALGPWKRPVAYLSKRLDPVAAGWPRCLRAIAAAALLTREASKLTFGQDIEITSSHNLESLLRSPPDKWLTNARITQYQVLLLDPPRVRFKQTAALNPATLLPETDDTLPIHHCLDTLDSLTSTRPDLTDQPLAQAEATLFTDGSSYIRDGKRYAGAAVVTLDSVIWAEPLPIGTSAQKAELIALTKALEWSKDKSVNIYTDSRYAFATLHVHGMIYRERGWLTAGGKAIKNAPEILALLTAVWLPKRVAVMHCKGHQKDDAPTSTGNRRADEVAREVAIRPLSTQATISGSSGGGEAAAKMASNFTQFVLVDNGGTGDVTVAPSNFANGIAEWISSNSRSQAYKVTCSVRQSSAQNRKYTIKVEVPKGAWRSYLNMELTIPIFATNSDCELIVKAMQGLLKDGNPIPSAIAANSGIYGGSGGSMASNFTQFVLVDNGGTGDVTVAPSNFANGIAEWISSNSRSQAYKVTCSVRQSSAQNRKYTIKVEVPKGAWRSYLNMELTIPIFATNSDCELIVKAMQGLLKDGNPIPSAIAANSGIYSGGSSGGSSGSETPGTSESATPESSGGSSGGSSDKKYSIGLDIGTNSVGWAVITDEYKVPSKKFKVLGNTDRHSIKKNLIGALLFDSGETAEATRLKRTARRRYTRRKNRICYLQEIFSNEMAKVDDSFFHRLEESFLVEEDKKHERHPIFGNIVDEVAYHEKYPTIYHLRKKLVDSTDKADLRLIYLALAHMIKFRGHFLIEGDLNPDNSDVDKLFIQLVQTYNQLFEENPINASGVDAKAILSARLSKSRRLENLIAQLPGEKKNGLFGNLIALSLGLTPNFKSNFDLAEDAKLQLSKDTYDDDLDNLLAQIGDQYADLFLAAKNLSDAILLSDILRVNTEITKAPLSASMIKRYDEHHQDLTLLKALVRQQLPEKYKEIFFDQSKNGYAGYIDGGASQEEFYKFIKPILEKMDGTEELLVKLNREDLLRKQRTFDNGSIPHQIHLGELHAILRRQEDFYPFLKDNREKIEKILTFRIPYYVGPLARGNSRFAWMTRKSEETITPWNFEEVVDKGASAQSFIERMTNFDKNLPNEKVLPKHSLLYEYFTVYNELTKVKYVTEGMRKPAFLSGEQKKAIVDLLFKTNRKVTVKQLKEDYFKKIECFDSVEISGVEDRFNASLGTYHDLLKIIKDKDFLDNEENEDILEDIVLTLTLFEDREMIEERLKTYAHLFDDKVMKQLKRRRYTGWGRLSRKLINGIRDKQSGKTILDFLKSDGFANRNFMQLIHDDSLTFKEDIQKAQVSGQGDSLHEHIANLAGSPAIKKGILQTVKVVDELVKVMGRHKPENIVIEMARENQTTQKGQKNSRERMKRIEEGIKELGSQILKEHPVENTQLQNEKLYLYYLQNGRDMYVDQELDINRLSDYDVDHIVPQSFLKDDSIDNKVLTRSDKARGKSDNVPSEEVVKKMKNYWRQLLNAKLITQRKFDNLTKAERGGLSELDKAGFIKRQLVETRQITKHVAQILDSRMNTKYDENDKLIREVKVITLKSKLVSDFRKDFQFYKVREINNYHHAHDAYLNAVVGTALIKKYPKLESEFVYGDYKVYDVRKMIAKSEQEIGKATAKYFFYSNIMNFFKTEITLANGEIRKRPLIETNGETGEIVWDKGRDFATVRKVLSMPQVNIVKKTEVQTGGFSKESILPKRNSDKLIARKKDWDPKKYGGFDSPTVAYSVLVVAKVEKGKSKKLKSVKELLGITIMERSSFEKNPIDFLEAKGYKEVKKDLIIKLPKYSLFELENGRKRMLASAGELQKGNELALPSKYVNFLYLASHYEKLKGSPEDNEQKQLFVEQHKHYLDEIIEQISEFSKRVILADANLDKVLSAYNKHRDKPIREQAENIIHLFTLTNLGAPAAFKYFDTTIDRKRYTSTKEVLDATLIHQSITGLYETRIDLSQLGGDKRTADGSEFESPKKKAKVE

SEQ ID NO: 16190 - protein, 2340 aa, synthetic construct
MPAAKRVKLDGGTAPLEEEYRLFLEAPIQNVTLLEQWKREIPKVWAEINPPGLASTQAPIHVQLLSTALPVRVRQYPITLEAKRSLRETIRKFRAAGILRPVHSPWNTPLLPVRKSGTSEYRMVQDLREVNKRVETIHPTVPNPYTLLSLLPPDRIWYSVLDLKDAFFCIPLAPESQLIFAFEWADAEEGESGQLTWTRLPQGFKNSPTLFNEALNRDLQGFRLDHPSVSLLQYVDDLLIAADTQAACLSATRDLLMTLAELGYRVSGKKAQLCQEEVTYLGFKIHKGSRSLSNSRTQAILQIPVPKTKRQVREFLGKIGYCRLFIPGFAELAQPLYAATRPGNDPLVWGEKEEEAFQSLKLALTQPPALALPSLDKPFQLFVEETSGAAKGVLTQALGPWKRPVAYLSKRLDPVAAGWPRCLRAIAAAALLTREASKLTFGQDIEITSSHNLESLLRSPPDKWLTNARITQYQVLLLDPPRVRFKQTAALNPATLLPETDDTLPIHHCLDTLDSLTSTRPDLTDQPLAQAEATLFTDGSSYIRDGKRYAGAAVVTLDSVIWAEPLPIGTSAQKAELIALTKALEWSKDKSVNIYTDSRYAFATLHVHGMIYRERGWLTAGGKAIKNAPEILALLTAVWLPKRVAVMHCKGHQKDDAPTSTGNRRADEVAREVAIRPLSTQATISGSSGGGEAAAKMASNFTQFVLVDNGGTGDVTVAPSNFANGIAEWISSNSRSQAYKVTCSVRQSSAQNRKYTIKVEVPKGAWRSYLNMELTIPIFATNSDCELIVKAMQGLLKDGNPIPSAIAANSGIYGGSGGSMASNFTQFVLVDNGGTGDVTVAPSNFANGIAEWISSNSRSQAYKVTCSVRQSSAQNRKYTIKVEVPKGAWRSYLNMELTIPIFATNSDCELIVKAMQGLLKDGNPIPSAIAANSGIYGSSGSSGSSGSSGSSGSSDKKYSIGLDIGTNSVGWAVITDEYKVPSKKFKVLGNTDRHSIKKNLIGALLFDSGETAEATRLKRTARRRYTRRKNRICYLQEIFSNEMAKVDDSFFHRLEESFLVEEDKKHERHPIFGNIVDEVAYHEKYPTIYHLRKKLVDSTDKADLRLIYLALAHMIKFRGHFLIEGDLNPDNSDVDKLFIQLVQTYNQLFEENPINASGVDAKAILSARLSKSRRLENLIAQLPGEKKNGLFGNLIALSLGLTPNFKSNFDLAEDAKLQLSKDTYDDDLDNLLAQIGDQYADLFLAAKNLSDAILLSDILRVNTEITKAPLSASMIKRYDEHHQDLTLLKALVRQQLPEKYKEIFFDQSKNGYAGYIDGGASQEEFYKFIKPILEKMDGTEELLVKLNREDLLRKQRTFDNGSIPHQIHLGELHAILRRQEDFYPFLKDNREKIEKILTFRIPYYVGPLARGNSRFAWMTRKSEETITPWNFEEVVDKGASAQSFIERMTNFDKNLPNEKVLPKHSLLYEYFTVYNELTKVKYVTEGMRKPAFLSGEQKKAIVDLLFKTNRKVTVKQLKEDYFKKIECFDSVEISGVEDRFNASLGTYHDLLKIIKDKDFLDNEENEDILEDIVLTLTLFEDREMIEERLKTYAHLFDDKVMKQLKRRRYTGWGRLSRKLINGIRDKQSGKTILDFLKSDGFANRNFMQLIHDDSLTFKEDIQKAQVSGQGDSLHEHIANLAGSPAIKKGILQTVKVVDELVKVMGRHKPENIVIEMARENQTTQKGQKNSRERMKRIEEGIKELGSQILKEHPVENTQLQNEKLYLYYLQNGRDMYVDQELDINRLSDYDVDHIVPQSFLKDDSIDNKVLTRSDKARGKSDNVPSEEVVKKMKNYWRQLLNAKLITQRKFDNLTKAERGGLSELDKAGFIKRQLVETRQITKHVAQILDSRMNTKYDENDKLIREVKVITLKSKLVSDFRKDFQFYKVREINNYHHAHDAYLNAVVGTALIKKYPKLESEFVYGDYKVYDVRKMIAKSEQEIGKATAKYFFYSNIMNFFKTEITLANGEIRKRPLIETNGETGEIVWDKGRDFATVRKVLSMPQVNIVKKTEVQTGGFSKESILPKRNSDKLIARKKDWDPKKYGGFDSPTVAYSVLVVAKVEKGKSKKLKSVKELLGITIMERSSFEKNPIDFLEAKGYKEVKKDLIIKLPKYSLFELENGRKRMLASAGELQKGNELALPSKYVNFLYLASHYEKLKGSPEDNEQKQLFVEQHKHYLDEIIEQISEFSKRVILADANLDKVLSAYNKHRDKPIREQAENIIHLFTLTNLGAPAAFKYFDTTIDRKRYTSTKEVLDATLIHQSITGLYETRIDLSQLGGDKRTADGSEFESPKKKAKVE

SEQ ID NO: 16191 - protein, 2333 aa, synthetic construct
MPAAKRVKLDGGTAPLEEEYRLFLEAPIQNVTLLEQWKREIPKVWAEINPPGLASTQAPIHVQLLSTALPVRVRQYPITLEAKRSLRETIRKFRAAGILRPVHSPWNTPLLPVRKSGTSEYRMVQDLREVNKRVETIHPTVPNPYTLLSLLPPDRIWYSVLDLKDAFFCIPLAPESQLIFAFEWADAEEGESGQLTWTRLPQGFKNSPTLFNEALNRDLQGFRLDHPSVSLLQYVDDLLIAADTQAACLSATRDLLMTLAELGYRVSGKKAQLCQEEVTYLGFKIHKGSRSLSNSRTQAILQIPVPKTKRQVREFLGKIGYCRLFIPGFAELAQPLYAATRPGNDPLVWGEKEEEAFQSLKLALTQPPALALPSLDKPFQLFVEETSGAAKGVLTQALGPWKRPVAYLSKRLDPVAAGWPRCLRAIAAAALLTREASKLTFGQDIEITSSHNLESLLRSPPDKWLTNARITQYQVLLLDPPRVRFKQTAALNPATLLPETDDTLPIHHCLDTLDSLTSTRPDLTDQPLAQAEATLFTDGSSYIRDGKRYAGAAVVTLDSVIWAEPLPIGTSAQKAELIALTKALEWSKDKSVNIYTDSRYAFATLHVHGMIYRERGWLTAGGKAIKNAPEILALLTAVWLPKRVAVMHCKGHQKDDAPTSTGNRRADEVAREVAIRPLSTQATISGSSGGGEAAAKMASNFTQFVLVDNGGTGDVTVAPSNFANGIAEWISSNSRSQAYKVTCSVRQSSAQNRKYTIKVEVPKGAWRSYLNMELTIPIFATNSDCELIVKAMQGLLKDGNPIPSAIAANSGIYGGSGGSMASNFTQFVLVDNGGTGDVTVAPSNFANGIAEWISSNSRSQAYKVTCSVRQSSAQNRKYTIKVEVPKGAWRSYLNMELTIPIFATNSDCELIVKAMQGLLKDGNPIPSAIAANSGIYGSSGGGEAAAKDKKYSIGLDIGTNSVGWAVITDEYKVPSKKFKVLGNTDRHSIKKNLIGALLFDSGETAEATRLKRTARRRYTRRKNRICYLQEIFSNEMAKVDDSFFHRLEESFLVEEDKKHERHPIFGNIVDEVAYHEKYPTIYHLRKKLVDSTDKADLRLIYLALAHMIKFRGHFLIEGDLNPDNSDVDKLFIQLVQTYNQLFEENPINASGVDAKAILSARLSKSRRLENLIAQLPGEKKNGLFGNLIALSLGLTPNFKSNFDLAEDAKLQLSKDTYDDDLDNLLAQIGDQYADLFLAAKNLSDAILLSDILRVNTEITKAPLSASMIKRYDEHHQDLTLLKALVRQQLPEKYKEIFFDQSKNGYAGYIDGGASQEEFYKFIKPILEKMDGTEELLVKLNREDLLRKQRTFDNGSIPHQIHLGELHAILRRQEDFYPFLKDNREKIEKILTFRIPYYVGPLARGNSRFAWMTRKSEETITPWNFEEVVDKGASAQSFIERMTNFDKNLPNEKVLPKHSLLYEYFTVYNELTKVKYVTEGMRKPAFLSGEQKKAIVDLLFKTNRKVTVKQLKEDYFKKIECFDSVEISGVEDRFNASLGTYHDLLKIIKDKDFLDNEENEDILEDIVLTLTLFEDREMIEERLKTYAHLFDDKVMKQLKRRRYTGWGRLSRKLINGIRDKQSGKTILDFLKSDGFANRNFMQLIHDDSLTFKEDIQKAQVSGQGDSLHEHIANLAGSPAIKKGILQTVKVVDELVKVMGRHKPENIVIEMARENQTTQKGQKNSRERMKRIEEGIKELGSQILKEHPVENTQLQNEKLYLYYLQNGRDMYVDQELDINRLSDYDVDHIVPQSFLKDDSIDNKVLTRSDKARGKSDNVPSEEVVKKMKNYWRQLLNAKLITQRKFDNLTKAERGGLSELDKAGFIKRQLVETRQITKHVAQILDSRMNTKYDENDKLIREVKVITLKSKLVSDFRKDFQFYKVREINNYHHAHDAYLNAVVGTALIKKYPKLESEFVYGDYKVYDVRKMIAKSEQEIGKATAKYFFYSNIMNFFKTEITLANGEIRKRPLIETNGETGEIVWDKGRDFATVRKVLSMPQVNIVKKTEVQTGGFSKESILPKRNSDKLIARKKDWDPKKYGGFDSPTVAYSVLVVAKVEKGKSKKLKSVKELLGITIMERSSFEKNPIDFLEAKGYKEVKKDLIIKLPKYSLFELENGRKRMLASAGELQKGNELALPSKYVNFLYLASHYEKLKGSPEDNEQKQLFVEQHKHYLDEIIEQISEFSKRVILADANLDKVLSAYNKHRDKPIREQAENIIHLFTLTNLGAPAAFKYFDTTIDRKRYTSTKEVLDATLIHQSITGLYETRIDLSQLGGDKRTADGSEFESPKKKAKVE

SEQ ID NO: 16192 - protein, 2624 aa, synthetic construct
MPAAKRVKLDGGTAPLEEEYRLFLEAPIQNVTLLEQWKREIPKVWAEINPPGLASTQAPIHVQLLSTALPVRVRQYPITLEAKRSLRETIRKFRAAGILRPVHSPWNTPLLPVRKSGTSEYRMVQDLREVNKRVETIHPTVPNPYTLLSLLPPDRIWYSVLDLKDAFFCIPLAPESQLIFAFEWADAEEGESGQLTWTRLPQGFKNSPTLFNEALNRDLQGFRLDHPSVSLLQYVDDLLIAADTQAACLSATRDLLMTLAELGYRVSGKKAQLCQEEVTYLGFKIHKGSRSLSNSRTQAILQIPVPKTKRQVREFLGKIGYCRLFIPGFAELAQPLYAATRPGNDPLVWGEKEEEAFQSLKLALTQPPALALPSLDKPFQLFVEETSGAAKGVLTQALGPWKRPVAYLSKRLDPVAAGWPRCLRAIAAAALLTREASKLTFGQDIEITSSHNLESLLRSPPDKWLTNARITQYQVLLLDPPRVRFKQTAALNPATLLPETDDTLPIHHCLDTLDSLTSTRPDLTDQPLAQAEATLFTDGSSYIRDGKRYAGAAVVTLDSVIWAEPLPIGTSAQKAELIALTKALEWSKDKSVNIYTDSRYAFATLHVHGMIYRERGWLTAGGKAIKNAPEILALLTAVWLPKRVAVMHCKGHQKDDAPTSTGNRRADEVAREVAIRPLSTQATISGSSGGGEAAAKMASNFTQFVLVDNGGTGDVTVAPSNFANGIAEWISSNSRSQAYKVTCSVRQSSAQNRKYTIKVEVPKGAWRSYLNMELTIPIFATNSDCELIVKAMQGLLKDGNPIPSAIAANSGIYGGSGGSMASNFTQFVLVDNGGTGDVTVAPSNFANGIAEWISSNSRSQAYKVTCSVRQSSAQNRKYTIKVEVPKGAWRSYLNMELTIPIFATNSDCELIVKAMQGLLKDGNPIPSAIAANSGIYGGGSGGGSGGGSGGGSMASNFTQFVLVDNGGTGDVTVAPSNFANGIAEWISSNSRSQAYKVTCSVRQSSAQNRKYTIKVEVPKGAWRSYLNMELTIPIFATNSDCELIVKAMQGLLKDGNPIPSAIAANSGIYGGSGGSMASNFTQFVLVDNGGTGDVTVAPSNFANGIAEWISSNSRSQAYKVTCSVRQSSAQNRKYTIKVEVPKGAWRSYLNMELTIPIFATNSDCELIVKAMQGLLKDGNPIPSAIAANSGIYAEAAAKEAAAKEAAAKEAAAKALEAEAAAKEAAAKEAAAKEAAAKADKKYSIGLDIGTNSVGWAVITDEYKVPSKKFKVLGNTDRHSIKKNLIGALLFDSGETAEATRLKRTARRRYTRRKNRICYLQEIFSNEMAKVDDSFFHRLEESFLVEEDKKHERHPIFGNIVDEVAYHEKYPTIYHLRKKLVDSTDKADLRLIYLALAHMIKFRGHFLIEGDLNPDNSDVDKLFIQLVQTYNQLFEENPINASGVDAKAILSARLSKSRRLENLIAQLPGEKKNGLFGNLIALSLGLTPNFKSNFDLAEDAKLQLSKDTYDDDLDNLLAQIGDQYADLFLAAKNLSDAILLSDILRVNTEITKAPLSASMIKRYDEHHQDLTLLKALVRQQLPEKYKEIFFDQSKNGYAGYIDGGASQEEFYKFIKPILEKMDGTEELLVKLNREDLLRKQRTFDNGSIPHQIHLGELHAILRRQEDFYPFLKDNREKIEKILTFRIPYYVGPLARGNSRFAWMTRKSEETITPWNFEEVVDKGASAQSFIERMTNFDKNLPNEKVLPKHSLLYEYFTVYNELTKVKYVTEGMRKPAFLSGEQKKAIVDLLFKTNRKVTVKQLKEDYFKKIECFDSVEISGVEDRFNASLGTYHDLLKIIKDKDFLDNEENEDILEDIVLTLTLFEDREMIEERLKTYAHLFDDKVMKQLKRRRYTGWGRLSRKLINGIRDKQSGKTILDFLKSDGFANRNFMQLIHDDSLTFKEDIQKAQVSGQGDSLHEHIANLAGSPAIKKGILQTVKVVDELVKVMGRHKPENIVIEMARENQTTQKGQKNSRERMKRIEEGIKELGSQILKEHPVENTQLQNEKLYLYYLQNGRDMYVDQELDINRLSDYDVDHIVPQSFLKDDSIDNKVLTRSDKARGKSDNVPSEEVVKKMKNYWRQLLNAKLITQRKFDNLTKAERGGLSELDKAGFIKRQLVETRQITKHVAQILDSRMNTKYDENDKLIREVKVITLKSKLVSDFRKDFQFYKVREINNYHHAHDAYLNAVVGTALIKKYPKLESEFVYGDYKVYDVRKMIAKSEQEIGKATAKYFFYSNIMNFFKTEITLANGEIRKRPLIETNGETGEIVWDKGRDFATVRKVLSMPQVNIVKKTEVQTGGFSKESILPKRNSDKLIARKKDWDPKKYGGFDSPTVAYSVLVVAKVEKGKSKKLKSVKELLGITIMERSSFEKNPIDFLEAKGYKEVKKDLIIKLPKYSLFELENGRKRMLASAGELQKGNELALPSKYVNFLYLASHYEKLKGSPEDNEQKQLFVEQHKHYLDEIIEQISEFSKRVILADANLDKVLSAYNKHRDKPIREQAENIIHLFTLTNLGAPAAFKYFDTTIDRKRYTSTKEVLDATLIHQSITGLYETRIDLSQLGGDKRTADGSEFESPKKKAKVE

SEQ ID NO: 16193 - protein, 2611 aa, synthetic construct
MPAAKRVKLDGGTAPLEEEYRLFLEAPIQNVTLLEQWKREIPKVWAEINPPGLASTQAPIHVQLLSTALPVRVRQYPITLEAKRSLRETIRKFRAAGILRPVHSPWNTPLLPVRKSGTSEYRMVQDLREVNKRVETIHPTVPNPYTLLSLLPPDRIWYSVLDLKDAFFCIPLAPESQLIFAFEWADAEEGESGQLTWTRLPQGFKNSPTLFNEALNRDLQGFRLDHPSVSLLQYVDDLLIAADTQAACLSATRDLLMTLAELGYRVSGKKAQLCQEEVTYLGFKIHKGSRSLSNSRTQAILQIPVPKTKRQVREFLGKIGYCRLFIPGFAELAQPLYAATRPGNDPLVWGEKEEEAFQSLKLALTQPPALALPSLDKPFQLFVEETSGAAKGVLTQALGPWKRPVAYLSKRLDPVAAGWPRCLRAIAAAALLTREASKLTFGQDIEITSSHNLESLLRSPPDKWLTNARITQYQVLLLDPPRVRFKQTAALNPATLLPETDDTLPIHHCLDTLDSLTSTRPDLTDQPLAQAEATLFTDGSSYIRDGKRYAGAAVVTLDSVIWAEPLPIGTSAQKAELIALTKALEWSKDKSVNIYTDSRYAFATLHVHGMIYRERGWLTAGGKAIKNAPEILALLTAVWLPKRVAVMHCKGHQKDDAPTSTGNRRADEVAREVAIRPLSTQATISGSSGGGEAAAKMASNFTQFVLVDNGGTGDVTVAPSNFANGIAEWISSNSRSQAYKVTCSVRQSSAQNRKYTIKVEVPKGAWRSYLNMELTIPIFATNSDCELIVKAMQGLLKDGNPIPSAIAANSGIYGGSGGSMASNFTQFVLVDNGGTGDVTVAPSNFANGIAEWISSNSRSQAYKVTCSVRQSSAQNRKYTIKVEVPKGAWRSYLNMELTIPIFATNSDCELIVKAMQGLLKDGNPIPSAIAANSGIYGGGSGGGSGGGSGGGSMASNFTQFVLVDNGGTGDVTVAPSNFANGIAEWISSNSRSQAYKVTCSVRQSSAQNRKYTIKVEVPKGAWRSYLNMELTIPIFATNSDCELIVKAMQGLLKDGNPIPSAIAANSGIYGGSGGSMASNFTQFVLVDNGGTGDVTVAPSNFANGIAEWISSNSRSQAYKVTCSVRQSSAQNRKYTIKVEVPKGAWRSYLNMELTIPIFATNSDCELIVKAMQGLLKDGNPIPSAIAANSGIYSGGSSGGSSGSETPGTSESATPESSGGSSGGSSDKKYSIGLDIGTNSVGWAVITDEYKVPSKKFKVLGNTDRHSIKKNLIGALLFDSGETAEATRLKRTARRRYTRRKNRICYLQEIFSNEMAKVDDSFFHRLEESFLVEEDKKHERHPIFGNIVDEVAYHEKYPTIYHLRKKLVDSTDKADLRLIYLALAHMIKFRGHFLIEGDLNPDNSDVDKLFIQLVQTYNQLFEENPINASGVDAKAILSARLSKSRRLENLIAQLPGEKKNGLFGNLIALSLGLTPNFKSNFDLAEDAKLQLSKDTYDDDLDNLLAQIGDQYADLFLAAKNLSDAILLSDILRVNTEITKAPLSASMIKRYDEHHQDLTLLKALVRQQLPEKYKEIFFDQSKNGYAGYIDGGASQEEFYKFIKPILEKMDGTEELLVKLNREDLLRKQRTFDNGSIPHQIHLGELHAILRRQEDFYPFLKDNREKIEKILTFRIPYYVGPLARGNSRFAWMTRKSEETITPWNFEEVVDKGASAQSFIERMTNFDKNLPNEKVLPKHSLLYEYFTVYNELTKVKYVTEGMRKPAFLSGEQKKAIVDLLFKTNRKVTVKQLKEDYFKKIECFDSVEISGVEDRFNASLGTYHDLLKIIKDKDFLDNEENEDILEDIVLTLTLFEDREMIEERLKTYAHLFDDKVMKQLKRRRYTGWGRLSRKLINGIRDKQSGKTILDFLKSDGFANRNFMQLIHDDSLTFKEDIQKAQVSGQGDSLHEHIANLAGSPAIKKGILQTVKVVDELVKVMGRHKPENIVIEMARENQTTQKGQKNSRERMKRIEEGIKELGSQILKEHPVENTQLQNEKLYLYYLQNGRDMYVDQELDINRLSDYDVDHIVPQSFLKDDSIDNKVLTRSDKARGKSDNVPSEEVVKKMKNYWRQLLNAKLITQRKFDNLTKAERGGLSELDKAGFIKRQLVETRQITKHVAQILDSRMNTKYDENDKLIREVKVITLKSKLVSDFRKDFQFYKVREINNYHHAHDAYLNAVVGTALIKKYPKLESEFVYGDYKVYDVRKMIAKSEQEIGKATAKYFFYSNIMNFFKTEITLANGEIRKRPLIETNGETGEIVWDKGRDFATVRKVLSMPQVNIVKKTEVQTGGFSKESILPKRNSDKLIARKKDWDPKKYGGFDSPTVAYSVLVVAKVEKGKSKKLKSVKELLGITIMERSSFEKNPIDFLEAKGYKEVKKDLIIKLPKYSLFELENGRKRMLASAGELQKGNELALPSKYVNFLYLASHYEKLKGSPEDNEQKQLFVEQHKHYLDEIIEQISEFSKRVILADANLDKVLSAYNKHRDKPIREQAENIIHLFTLTNLGAPAAFKYFDTTIDRKRYTSTKEVLDATLIHQSITGLYETRIDLSQLGGDKRTADGSEFESPKKKAKVE

SEQ ID NO: 16194 - protein, 2596 aa, synthetic construct
MPAAKRVKLDGGTAPLEEEYRLFLEAPIQNVTLLEQWKREIPKVWAEINPPGLASTQAPIHVQLLSTALPVRVRQYPITLEAKRSLRETIRKFRAAGILRPVHSPWNTPLLPVRKSGTSEYRMVQDLREVNKRVETIHPTVPNPYTLLSLLPPDRIWYSVLDLKDAFFCIPLAPESQLIFAFEWADAEEGESGQLTWTRLPQGFKNSPTLFNEALNRDLQGFRLDHPSVSLLQYVDDLLIAADTQAACLSATRDLLMTLAELGYRVSGKKAQLCQEEVTYLGFKIHKGSRSLSNSRTQAILQIPVPKTKRQVREFLGKIGYCRLFIPGFAELAQPLYAATRPGNDPLVWGEKEEEAFQSLKLALTQPPALALPSLDKPFQLFVEETSGAAKGVLTQALGPWKRPVAYLSKRLDPVAAGWPRCLRAIAAAALLTREASKLTFGQDIEITSSHNLESLLRSPPDKWLTNARITQYQVLLLDPPRVRFKQTAALNPATLLPETDDTLPIHHCLDTLDSLTSTRPDLTDQPLAQAEATLFTDGSSYIRDGKRYAGAAVVTLDSVIWAEPLPIGTSAQKAELIALTKALEWSKDKSVNIYTDSRYAFATLHVHGMIYRERGWLTAGGKAIKNAPEILALLTAVWLPKRVAVMHCKGHQKDDAPTSTGNRRADEVAREVAIRPLSTQATISGSSGGGEAAAKMASNFTQFVLVDNGGTGDVTVAPSNFANGIAEWISSNSRSQAYKVTCSVRQSSAQNRKYTIKVEVPKGAWRSYLNMELTIPIFATNSDCELIVKAMQGLLKDGNPIPSAIAANSGIYGGSGGSMASNFTQFVLVDNGGTGDVTVAPSNFANGIAEWISSNSRSQAYKVTCSVRQSSAQNRKYTIKVEVPKGAWRSYLNMELTIPIFATNSDCELIVKAMQGLLKDGNPIPSAIAANSGIYGGGSGGGSGGGSGGGSMASNFTQFVLVDNGGTGDVTVAPSNFANGIAEWISSNSRSQAYKVTCSVRQSSAQNRKYTIKVEVPKGAWRSYLNMELTIPIFATNSDCELIVKAMQGLLKDGNPIPSAIAANSGIYGGSGGSMASNFTQFVLVDNGGTGDVTVAPSNFANGIAEWISSNSRSQAYKVTCSVRQSSAQNRKYTIKVEVPKGAWRSYLNMELTIPIFATNSDCELIVKAMQGLLKDGNPIPSAIAANSGIYGSSGSSGSSGSSGSSGSSDKKYSIGLDIGTNSVGWAVITDEYKVPSKKFKVLGNTDRHSIKKNLIGALLFDSGETAEATRLKRTARRRYTRRKNRICYLQEIFSNEMAKVDDSFFHRLEESFLVEEDKKHERHPIFGNIVDEVAYHEKYPTIYHLRKKLVDSTDKADLRLIYLALAHMIKFRGHFLIEGDLNPDNSDVDKLFIQLVQTYNQLFEENPINASGVDAKAILSARLSKSRRLENLIAQLPGEKKNGLFGNLIALSLGLTPNFKSNFDLAEDAKLQLSKDTYDDDLDNLLAQIGDQYADLFLAAKNLSDAILLSDILRVNTEITKAPLSASMIKRYDEHHQDLTLLKALVRQQLPEKYKEIFFDQSKNGYAGYIDGGASQEEFYKFIKPILEKMDGTEELLVKLNREDLLRKQRTFDNGSIPHQIHLGELHAILRRQEDFYPFLKDNREKIEKILTFRIPYYVGPLARGNSRFAWMTRKSEETITPWNFEEVVDKGASAQSFIERMTNFDKNLPNEKVLPKHSLLYEYFTVYNELTKVKYVTEGMRKPAFLSGEQKKAIVDLLFKTNRKVTVKQLKEDYFKKIECFDSVEISGVEDRFNASLGTYHDLLKIIKDKDFLDNEENEDILEDIVLTLTLFEDREMIEERLKTYAHLFDDKVMKQLKRRRYTGWGRLSRKLINGIRDKQSGKTILDFLKSDGFANRNFMQLIHDDSLTFKEDIQKAQVSGQGDSLHEHIANLAGSPAIKKGILQTVKVVDELVKVMGRHKPENIVIEMARENQTTQKGQKNSRERMKRIEEGIKELGSQILKEHPVENTQLQNEKLYLYYLQNGRDMYVDQELDINRLSDYDVDHIVPQSFLKDDSIDNKVLTRSDKARGKSDNVPSEEVVKKMKNYWRQLLNAKLITQRKFDNLTKAERGGLSELDKAGFIKRQLVETRQITKHVAQILDSRMNTKYDENDKLIREVKVITLKSKLVSDFRKDFQFYKVREINNYHHAHDAYLNAVVGTALIKKYPKLESEFVYGDYKVYDVRKMIAKSEQEIGKATAKYFFYSNIMNFFKTEITLANGEIRKRPLIETNGETGEIVWDKGRDFATVRKVLSMPQVNIVKKTEVQTGGFSKESILPKRNSDKLIARKKDWDPKKYGGFDSPTVAYSVLVVAKVEKGKSKKLKSVKELLGITIMERSSFEKNPIDFLEAKGYKEVKKDLIIKLPKYSLFELENGRKRMLASAGELQKGNELALPSKYVNFLYLASHYEKLKGSPEDNEQKQLFVEQHKHYLDEIIEQISEFSKRVILADANLDKVLSAYNKHRDKPIREQAENIIHLFTLTNLGAPAAFKYFDTTIDRKRYTSTKEVLDATLIHQSITGLYETRIDLSQLGGDKRTADGSEFESPKKKAKVE

SEQ ID NO: 16195 - protein, 2589 aa, synthetic construct
MPAAKRVKLDGGTAPLEEEYRLFLEAPIQNVTLLEQWKREIPKVWAEINPPGLASTQAPIHVQLLSTALPVRVRQYPITLEAKRSLRETIRKFRAAGILRPVHSPWNTPLLPVRKSGTSEYRMVQDLREVNKRVETIHPTVPNPYTLLSLLPPDRIWYSVLDLKDAFFCIPLAPESQLIFAFEWADAEEGESGQLTWTRLPQGFKNSPTLFNEALNRDLQGFRLDHPSVSLLQYVDDLLIAADTQAACLSATRDLLMTLAELGYRVSGKKAQLCQEEVTYLGFKIHKGSRSLSNSRTQAILQIPVPKTKRQVREFLGKIGYCRLFIPGFAELAQPLYAATRPGNDPLVWGEKEEEAFQSLKLALTQPPALALPSLDKPFQLFVEETSGAAKGVLTQALGPWKRPVAYLSKRLDPVAAGWPRCLRAIAAAALLTREASKLTFGQDIEITSSHNLESLLRSPPDKWLTNARITQYQVLLLDPPRVRFKQTAALNPATLLPETDDTLPIHHCLDTLDSLTSTRPDLTDQPLAQAEATLFTDGSSYIRDGKRYAGAAVVTLDSVIWAEPLPIGTSAQKAELIALTKALEWSKDKSVNIYTDSRYAFATLHVHGMIYRERGWLTAGGKAIKNAPEILALLTAVWLPKRVAVMHCKGHQKDDAPTSTGNRRADEVAREVAIRPLSTQATISGSSGGGEAAAKMASNFTQFVLVDNGGTGDVTVAPSNFANGIAEWISSNSRSQAYKVTCSVRQSSAQNRKYTIKVEVPKGAWRSYLNMELTIPIFATNSDCELIVKAMQGLLKDGNPIPSAIAANSGIYGGSGGSMASNFTQFVLVDNGGTGDVTVAPSNFANGIAEWISSNSRSQAYKVTCSVRQSSAQNRKYTIKVEVPKGAWRSYLNMELTIPIFATNSDCELIVKAMQGLLKDGNPIPSAIAANSGIYGGGSGGGSGGGSGGGSMASNFTQFVLVDNGGTGDVTVAPSNFANGIAEWISSNSRSQAYKVTCSVRQSSAQNRKYTIKVEVPKGAWRSYLNMELTIPIFATNSDCELIVKAMQGLLKDGNPIPSAIAANSGIYGGSGGSMASNFTQFVLVDNGGTGDVTVAPSNFANGIAEWISSNSRSQAYKVTCSVRQSSAQNRKYTIKVEVPKGAWRSYLNMELTIPIFATNSDCELIVKAMQGLLKDGNPIPSAIAANSGIYGSSGGGEAAAKDKKYSIGLDIGTNSVGWAVITDEYKVPSKKFKVLGNTDRHSIKKNLIGALLFDSGETAEATRLKRTARRRYTRRKNRICYLQEIFSNEMAKVDDSFFHRLEESFLVEEDKKHERHPIFGNIVDEVAYHEKYPTIYHLRKKLVDSTDKADLRLIYLALAHMIKFRGHFLIEGDLNPDNSDVDKLFIQLVQTYNQLFEENPINASGVDAKAILSARLSKSRRLENLIAQLPGEKKNGLFGNLIALSLGLTPNFKSNFDLAEDAKLQLSKDTYDDDLDNLLAQIGDQYADLFLAAKNLSDAILLSDILRVNTEITKAPLSASMIKRYDEHHQDLTLLKALVRQQLPEKYKEIFFDQSKNGYAGYIDGGASQEEFYKFIKPILEKMDGTEELLVKLNREDLLRKQRTFDNGSIPHQIHLGELHAILRRQEDFYPFLKDNREKIEKILTFRIPYYVGPLARGNSRFAWMTRKSEETITPWNFEEVVDKGASAQSFIERMTNFDKNLPNEKVLPKHSLLYEYFTVYNELTKVKYVTEGMRKPAFLSGEQKKAIVDLLFKTNRKVTVKQLKEDYFKKIECFDSVEISGVEDRFNASLGTYHDLLKIIKDKDFLDNEENEDILEDIVLTLTLFEDREMIEERLKTYAHLFDDKVMKQLKRRRYTGWGRLSRKLINGIRDKQSGKTILDFLKSDGFANRNFMQLIHDDSLTFKEDIQKAQVSGQGDSLHEHIANLAGSPAIKKGILQTVKVVDELVKVMGRHKPENIVIEMARENQTTQKGQKNSRERMKRIEEGIKELGSQILKEHPVENTQLQNEKLYLYYLQNGRDMYVDQELDINRLSDYDVDHIVPQSFLKDDSIDNKVLTRSDKARGKSDNVPSEEVVKKMKNYWRQLLNAKLITQRKFDNLTKAERGGLSELDKAGFIKRQLVETRQITKHVAQILDSRMNTKYDENDKLIREVKVITLKSKLVSDFRKDFQFYKVREINNYHHAHDAYLNAVVGTALIKKYPKLESEFVYGDYKVYDVRKMIAKSEQEIGKATAKYFFYSNIMNFFKTEITLANGEIRKRPLIETNGETGEIVWDKGRDFATVRKVLSMPQVNIVKKTEVQTGGFSKESILPKRNSDKLIARKKDWDPKKYGGFDSPTVAYSVLVVAKVEKGKSKKLKSVKELLGITIMERSSFEKNPIDFLEAKGYKEVKKDLIIKLPKYSLFELENGRKRMLASAGELQKGNELALPSKYVNFLYLASHYEKLKGSPEDNEQKQLFVEQHKHYLDEIIEQISEFSKRVILADANLDKVLSAYNKHRDKPIREQAENIIHLFTLTNLGAPAAFKYFDTTIDRKRYTSTKEVLDATLIHQSITGLYETRIDLSQLGGDKRTADGSEFESPKKKAKVE

SEQ ID NO: 16196-16199 - skipped (4 entries)

SEQ ID NO: 16200 - protein, 2280 aa, synthetic construct
MPAAKRVKLDGGDKKYSIGLDIGTNSVGWAVITDEYKVPSKKFKVLGNTDRHSIKKNLIGALLFDSGETAEATRLKRTARRRYTRRKNRICYLQEIFSNEMAKVDDSFFHRLEESFLVEEDKKHERHPIFGNIVDEVAYHEKYPTIYHLRKKLVDSTDKADLRLIYLALAHMIKFRGHFLIEGDLNPDNSDVDKLFIQLVQTYNQLFEENPINASGVDAKAILSARLSKSRRLENLIAQLPGEKKNGLFGNLIALSLGLTPNFKSNFDLAEDAKLQLSKDTYDDDLDNLLAQIGDQYADLFLAAKNLSDAILLSDILRVNTEITKAPLSASMIKRYDEHHQDLTLLKALVRQQLPEKYKEIFFDQSKNGYAGYIDGGASQEEFYKFIKPILEKMDGTEELLVKLNREDLLRKQRTFDNGSIPHQIHLGELHAILRRQEDFYPFLKDNREKIEKILTFRIPYYVGPLARGNSRFAWMTRKSEETITPWNFEEVVDKGASAQSFIERMTNFDKNLPNEKVLPKHSLLYEYFTVYNELTKVKYVTEGMRKPAFLSGEQKKAIVDLLFKTNRKVTVKQLKEDYFKKIECFDSVEISGVEDRFNASLGTYHDLLKIIKDKDFLDNEENEDILEDIVLTLTLFEDREMIEERLKTYAHLFDDKVMKQLKRRRYTGWGRLSRKLINGIRDKQSGKTILDFLKSDGFANRNFMQLIHDDSLTFKEDIQKAQVSGQGDSLHEHIANLAGSPAIKKGILQTVKVVDELVKVMGRHKPENIVIEMARENQTTQKGQKNSRERMKRIEEGIKELGSQILKEHPVENTQLQNEKLYLYYLQNGRDMYVDQELDINRLSDYDVDHIVPQSFLKDDSIDNKVLTRSDKARGKSDNVPSEEVVKKMKNYWRQLLNAKLITQRKFDNLTKAERGGLSELDKAGFIKRQLVETRQITKHVAQILDSRMNTKYDENDKLIREVKVITLKSKLVSDFRKDFQFYKVREINNYHHAHDAYLNAVVGTALIKKYPKLESEFVYGDYKVYDVRKMIAKSEQEIGKATAKYFFYSNIMNFFKTEITLANGEIRKRPLIETNGETGEIVWDKGRDFATVRKVLSMPQVNIVKKTEVQTGGFSKESILPKRNSDKLIARKKDWDPKKYGGFDSPTVAYSVLVVAKVEKGKSKKLKSVKELLGITIMERSSFEKNPIDFLEAKGYKEVKKDLIIKLPKYSLFELENGRKRMLASAGELQKGNELALPSKYVNFLYLASHYEKLKGSPEDNEQKQLFVEQHKHYLDEIIEQISEFSKRVILADANLDKVLSAYNKHRDKPIREQAENIIHLFTLTNLGAPAAFKYFDTTIDRKRYTSTKEVLDATLIHQSITGLYETRIDLSQLGGDAEAAAKEAAAKEAAAKEAAAKALEAEAAAKEAAAKEAAAKEAAAKATAPLEEEYRLFLEAPIQNVTLLEQWKREIPKVWAEINPPGLASTQAPIHVQLLSTALPVRVRQYPITLEAKRSLRETIRKFRAAGILRPVHSPWNTPLLPVRKSGTSEYRMVQDLREVNKRVETIHPTVPNPYTLLSLLPPDRIWYSVLDLKDAFFCIPLAPESQLIFAFEWADAEEGESGQLTWTRLPQGFKNSPTLFNEALNRDLQGFRLDHPSVSLLQYVDDLLIAADTQAACLSATRDLLMTLAELGYRVSGKKAQLCQEEVTYLGFKIHKGSRSLSNSRTQAILQIPVPKTKRQVREFLGKIGYCRLFIPGFAELAQPLYAATRPGNDPLVWGEKEEEAFQSLKLALTQPPALALPSLDKPFQLFVEETSGAAKGVLTQALGPWKRPVAYLSKRLDPVAAGWPRCLRAIAAAALLTREASKLTFGQDIEITSSHNLESLLRSPPDKWLTNARITQYQVLLLDPPRVRFKQTAALNPATLLPETDDTLPIHHCLDTLDSLTSTRPDLTDQPLAQAEATLFTDGSSYIRDGKRYAGAAVVTLDSVIWAEPLPIGTSAQKAELIALTKALEWSKDKSVNIYTDSRYAFATLHVHGMIYRERGWLTAGGKAIKNAPEILALLTAVWLPKRVAVMHCKGHQKDDAPTSTGNRRADEVAREVAIRPLSTQATISAEAAAKEAAAKEAAAKEAAAKALEAEAAAKEAAAKEAAAKEAAAKAMASNFTQFVLVDNGGTGDVTVAPSNFANGIAEWISSNSRSQAYKVTCSVRQSSAQNRKYTIKVEVPKGAWRSYLNMELTIPIFATNSDCELIVKAMQGLLKDGNPIPSAIAANSGIYKRTADGSEFESPKKKAKVE

SEQ ID NO: 16201 - protein, 2403 aa, synthetic construct
MPAAKRVKLDGGDKKYSIGLDIGTNSVGWAVITDEYKVPSKKFKVLGNTDRHSIKKNLIGALLFDSGETAEATRLKRTARRRYTRRKNRICYLQEIFSNEMAKVDDSFFHRLEESFLVEEDKKHERHPIFGNIVDEVAYHEKYPTIYHLRKKLVDSTDKADLRLIYLALAHMIKFRGHFLIEGDLNPDNSDVDKLFIQLVQTYNQLFEENPINASGVDAKAILSARLSKSRRLENLIAQLPGEKKNGLFGNLIALSLGLTPNFKSNFDLAEDAKLQLSKDTYDDDLDNLLAQIGDQYADLFLAAKNLSDAILLSDILRVNTEITKAPLSASMIKRYDEHHQDLTLLKALVRQQLPEKYKEIFFDQSKNGYAGYIDGGASQEEFYKFIKPILEKMDGTEELLVKLNREDLLRKQRTFDNGSIPHQIHLGELHAILRRQEDFYPFLKDNREKIEKILTFRIPYYVGPLARGNSRFAWMTRKSEETITPWNFEEVVDKGASAQSFIERMTNFDKNLPNEKVLPKHSLLYEYFTVYNELTKVKYVTEGMRKPAFLSGEQKKAIVDLLFKTNRKVTVKQLKEDYFKKIECFDSVEISGVEDRFNASLGTYHDLLKIIKDKDFLDNEENEDILEDIVLTLTLFEDREMIEERLKTYAHLFDDKVMKQLKRRRYTGWGRLSRKLINGIRDKQSGKTILDFLKSDGFANRNFMQLIHDDSLTFKEDIQKAQVSGQGDSLHEHIANLAGSPAIKKGILQTVKVVDELVKVMGRHKPENIVIEMARENQTTQKGQKNSRERMKRIEEGIKELGSQILKEHPVENTQLQNEKLYLYYLQNGRDMYVDQELDINRLSDYDVDHIVPQSFLKDDSIDNKVLTRSDKARGKSDNVPSEEVVKKMKNYWRQLLNAKLITQRKFDNLTKAERGGLSELDKAGFIKRQLVETRQITKHVAQILDSRMNTKYDENDKLIREVKVITLKSKLVSDFRKDFQFYKVREINNYHHAHDAYLNAVVGTALIKKYPKLESEFVYGDYKVYDVRKMIAKSEQEIGKATAKYFFYSNIMNFFKTEITLANGEIRKRPLIETNGETGEIVWDKGRDFATVRKVLSMPQVNIVKKTEVQTGGFSKESILPKRNSDKLIARKKDWDPKKYGGFDSPTVAYSVLVVAKVEKGKSKKLKSVKELLGITIMERSSFEKNPIDFLEAKGYKEVKKDLIIKLPKYSLFELENGRKRMLASAGELQKGNELALPSKYVNFLYLASHYEKLKGSPEDNEQKQLFVEQHKHYLDEIIEQISEFSKRVILADANLDKVLSAYNKHRDKPIREQAENIIHLFTLTNLGAPAAFKYFDTTIDRKRYTSTKEVLDATLIHQSITGLYETRIDLSQLGGDAEAAAKEAAAKEAAAKEAAAKALEAEAAAKEAAAKEAAAKEAAAKATAPLEEEYRLFLEAPIQNVTLLEQWKREIPKVWAEINPPGLASTQAPIHVQLLSTALPVRVRQYPITLEAKRSLRETIRKFRAAGILRPVHSPWNTPLLPVRKSGTSEYRMVQDLREVNKRVETIHPTVPNPYTLLSLLPPDRIWYSVLDLKDAFFCIPLAPESQLIFAFEWADAEEGESGQLTWTRLPQGFKNSPTLFNEALNRDLQGFRLDHPSVSLLQYVDDLLIAADTQAACLSATRDLLMTLAELGYRVSGKKAQLCQEEVTYLGFKIHKGSRSLSNSRTQAILQIPVPKTKRQVREFLGKIGYCRLFIPGFAELAQPLYAATRPGNDPLVWGEKEEEAFQSLKLALTQPPALALPSLDKPFQLFVEETSGAAKGVLTQALGPWKRPVAYLSKRLDPVAAGWPRCLRAIAAAALLTREASKLTFGQDIEITSSHNLESLLRSPPDKWLTNARITQYQVLLLDPPRVRFKQTAALNPATLLPETDDTLPIHHCLDTLDSLTSTRPDLTDQPLAQAEATLFTDGSSYIRDGKRYAGAAVVTLDSVIWAEPLPIGTSAQKAELIALTKALEWSKDKSVNIYTDSRYAFATLHVHGMIYRERGWLTAGGKAIKNAPEILALLTAVWLPKRVAVMHCKGHQKDDAPTSTGNRRADEVAREVAIRPLSTQATISAEAAAKEAAAKEAAAKEAAAKALEAEAAAKEAAAKEAAAKEAAAKAMASNFTQFVLVDNGGTGDVTVAPSNFANGIAEWISSNSRSQAYKVTCSVRQSSAQNRKYTIKVEVPKGAWRSYLNMELTIPIFATNSDCELIVKAMQGLLKDGNPIPSAIAANSGIYGGSGGSMASNFTQFVLVDNGGTGDVTVAPSNFANGIAEWISSNSRSQAYKVTCSVRQSSAQNRKYTIKVEVPKGAWRSYLNMELTIPIFATNSDCELIVKAMQGLLKDGNPIPSAIAANSGIYKRTADGSEFESPKKKAKVE

SEQ ID NO: 16202 - protein, 2659 aa, synthetic construct
MPAAKRVKLDGGDKKYSIGLDIGTNSVGWAVITDEYKVPSKKFKVLGNTDRHSIKKNLIGALLFDSGETAEATRLKRTARRRYTRRKNRICYLQEIFSNEMAKVDDSFFHRLEESFLVEEDKKHERHPIFGNIVDEVAYHEKYPTIYHLRKKLVDSTDKADLRLIYLALAHMIKFRGHFLIEGDLNPDNSDVDKLFIQLVQTYNQLFEENPINASGVDAKAILSARLSKSRRLENLIAQLPGEKKNGLFGNLIALSLGLTPNFKSNFDLAEDAKLQLSKDTYDDDLDNLLAQIGDQYADLFLAAKNLSDAILLSDILRVNTEITKAPLSASMIKRYDEHHQDLTLLKALVRQQLPEKYKEIFFDQSKNGYAGYIDGGASQEEFYKFIKPILEKMDGTEELLVKLNREDLLRKQRTFDNGSIPHQIHLGELHAILRRQEDFYPFLKDNREKIEKILTFRIPYYVGPLARGNSRFAWMTRKSEETITPWNFEEVVDKGASAQSFIERMTNFDKNLPNEKVLPKHSLLYEYFTVYNELTKVKYVTEGMRKPAFLSGEQKKAIVDLLFKTNRKVTVKQLKEDYFKKIECFDSVEISGVEDRFNASLGTYHDLLKIIKDKDFLDNEENEDILEDIVLTLTLFEDREMIEERLKTYAHLFDDKVMKQLKRRRYTGWGRLSRKLINGIRDKQSGKTILDFLKSDGFANRNFMQLIHDDSLTFKEDIQKAQVSGQGDSLHEHIANLAGSPAIKKGILQTVKVVDELVKVMGRHKPENIVIEMARENQTTQKGQKNSRERMKRIEEGIKELGSQILKEHPVENTQLQNEKLYLYYLQNGRDMYVDQELDINRLSDYDVDHIVPQSFLKDDSIDNKVLTRSDKARGKSDNVPSEEVVKKMKNYWRQLLNAKLITQRKFDNLTKAERGGLSELDKAGFIKRQLVETRQITKHVAQILDSRMNTKYDENDKLIREVKVITLKSKLVSDFRKDFQFYKVREINNYHHAHDAYLNAVVGTALIKKYPKLESEFVYGDYKVYDVRKMIAKSEQEIGKATAKYFFYSNIMNFFKTEITLANGEIRKRPLIETNGETGEIVWDKGRDFATVRKVLSMPQVNIVKKTEVQTGGFSKESILPKRNSDKLIARKKDWDPKKYGGFDSPTVAYSVLVVAKVEKGKSKKLKSVKELLGITIMERSSFEKNPIDFLEAKGYKEVKKDLIIKLPKYSLFELENGRKRMLASAGELQKGNELALPSKYVNFLYLASHYEKLKGSPEDNEQKQLFVEQHKHYLDEIIEQISEFSKRVILADANLDKVLSAYNKHRDKPIREQAENIIHLFTLTNLGAPAAFKYFDTTIDRKRYTSTKEVLDATLIHQSITGLYETRIDLSQLGGDAEAAAKEAAAKEAAAKEAAAKALEAEAAAKEAAAKEAAAKEAAAKATAPLEEEYRLFLEAPIQNVTLLEQWKREIPKVWAEINPPGLASTQAPIHVQLLSTALPVRVRQYPITLEAKRSLRETIRKFRAAGILRPVHSPWNTPLLPVRKSGTSEYRMVQDLREVNKRVETIHPTVPNPYTLLSLLPPDRIWYSVLDLKDAFFCIPLAPESQLIFAFEWADAEEGESGQLTWTRLPQGFKNSPTLFNEALNRDLQGFRLDHPSVSLLQYVDDLLIAADTQAACLSATRDLLMTLAELGYRVSGKKAQLCQEEVTYLGFKIHKGSRSLSNSRTQAILQIPVPKTKRQVREFLGKIGYCRLFIPGFAELAQPLYAATRPGNDPLVWGEKEEEAFQSLKLALTQPPALALPSLDKPFQLFVEETSGAAKGVLTQALGPWKRPVAYLSKRLDPVAAGWPRCLRAIAAAALLTREASKLTFGQDIEITSSHNLESLLRSPPDKWLTNARITQYQVLLLDPPRVRFKQTAALNPATLLPETDDTLPIHHCLDTLDSLTSTRPDLTDQPLAQAEATLFTDGSSYIRDGKRYAGAAVVTLDSVIWAEPLPIGTSAQKAELIALTKALEWSKDKSVNIYTDSRYAFATLHVHGMIYRERGWLTAGGKAIKNAPEILALLTAVWLPKRVAVMHCKGHQKDDAPTSTGNRRADEVAREVAIRPLSTQATISAEAAAKEAAAKEAAAKEAAAKALEAEAAAKEAAAKEAAAKEAAAKAMASNFTQFVLVDNGGTGDVTVAPSNFANGIAEWISSNSRSQAYKVTCSVRQSSAQNRKYTIKVEVPKGAWRSYLNMELTIPIFATNSDCELIVKAMQGLLKDGNPIPSAIAANSGIYGGSGGSMASNFTQFVLVDNGGTGDVTVAPSNFANGIAEWISSNSRSQAYKVTCSVRQSSAQNRKYTIKVEVPKGAWRSYLNMELTIPIFATNSDCELIVKAMQGLLKDGNPIPSAIAANSGIYGGGSGGGSGGGSGGGSMASNFTQFVLVDNGGTGDVTVAPSNFANGIAEWISSNSRSQAYKVTCSVRQSSAQNRKYTIKVEVPKGAWRSYLNMELTIPIFATNSDCELIVKAMQGLLKDGNPIPSAIAANSGIYGGSGGSMASNFTQFVLVDNGGTGDVTVAPSNFANGIAEWISSNSRSQAYKVTCSVRQSSAQNRKYTIKVEVPKGAWRSYLNMELTIPIFATNSDCELIVKAMQGLLKDGNPIPSAIAANSGIYKRTADGSEFESPKKKAKVE

SEQ ID NO: 16203 - protein, 2267 aa, synthetic construct
MPAAKRVKLDGGDKKYSIGLDIGTNSVGWAVITDEYKVPSKKFKVLGNTDRHSIKKNLIGALLFDSGETAEATRLKRTARRRYTRRKNRICYLQEIFSNEMAKVDDSFFHRLEESFLVEEDKKHERHPIFGNIVDEVAYHEKYPTIYHLRKKLVDSTDKADLRLIYLALAHMIKFRGHFLIEGDLNPDNSDVDKLFIQLVQTYNQLFEENPINASGVDAKAILSARLSKSRRLENLIAQLPGEKKNGLFGNLIALSLGLTPNFKSNFDLAEDAKLQLSKDTYDDDLDNLLAQIGDQYADLFLAAKNLSDAILLSDILRVNTEITKAPLSASMIKRYDEHHQDLTLLKALVRQQLPEKYKEIFFDQSKNGYAGYIDGGASQEEFYKFIKPILEKMDGTEELLVKLNREDLLRKQRTFDNGSIPHQIHLGELHAILRRQEDFYPFLKDNREKIEKILTFRIPYYVGPLARGNSRFAWMTRKSEETITPWNFEEVVDKGASAQSFIERMTNFDKNLPNEKVLPKHSLLYEYFTVYNELTKVKYVTEGMRKPAFLSGEQKKAIVDLLFKTNRKVTVKQLKEDYFKKIECFDSVEISGVEDRFNASLGTYHDLLKIIKDKDFLDNEENEDILEDIVLTLTLFEDREMIEERLKTYAHLFDDKVMKQLKRRRYTGWGRLSRKLINGIRDKQSGKTILDFLKSDGFANRNFMQLIHDDSLTFKEDIQKAQVSGQGDSLHEHIANLAGSPAIKKGILQTVKVVDELVKVMGRHKPENIVIEMARENQTTQKGQKNSRERMKRIEEGIKELGSQILKEHPVENTQLQNEKLYLYYLQNGRDMYVDQELDINRLSDYDVDHIVPQSFLKDDSIDNKVLTRSDKARGKSDNVPSEEVVKKMKNYWRQLLNAKLITQRKFDNLTKAERGGLSELDKAGFIKRQLVETRQITKHVAQILDSRMNTKYDENDKLIREVKVITLKSKLVSDFRKDFQFYKVREINNYHHAHDAYLNAVVGTALIKKYPKLESEFVYGDYKVYDVRKMIAKSEQEIGKATAKYFFYSNIMNFFKTEITLANGEIRKRPLIETNGETGEIVWDKGRDFATVRKVLSMPQVNIVKKTEVQTGGFSKESILPKRNSDKLIARKKDWDPKKYGGFDSPTVAYSVLVVAKVEKGKSKKLKSVKELLGITIMERSSFEKNPIDFLEAKGYKEVKKDLIIKLPKYSLFELENGRKRMLASAGELQKGNELALPSKYVNFLYLASHYEKLKGSPEDNEQKQLFVEQHKHYLDEIIEQISEFSKRVILADANLDKVLSAYNKHRDKPIREQAENIIHLFTLTNLGAPAAFKYFDTTIDRKRYTSTKEVLDATLIHQSITGLYETRIDLSQLGGDAEAAAKEAAAKEAAAKEAAAKALEAEAAAKEAAAKEAAAKEAAAKATAPLEEEYRLFLEAPIQNVTLLEQWKREIPKVWAEINPPGLASTQAPIHVQLLSTALPVRVRQYPITLEAKRSLRETIRKFRAAGILRPVHSPWNTPLLPVRKSGTSEYRMVQDLREVNKRVETIHPTVPNPYTLLSLLPPDRIWYSVLDLKDAFFCIPLAPESQLIFAFEWADAEEGESGQLTWTRLPQGFKNSPTLFNEALNRDLQGFRLDHPSVSLLQYVDDLLIAADTQAACLSATRDLLMTLAELGYRVSGKKAQLCQEEVTYLGFKIHKGSRSLSNSRTQAILQIPVPKTKRQVREFLGKIGYCRLFIPGFAELAQPLYAATRPGNDPLVWGEKEEEAFQSLKLALTQPPALALPSLDKPFQLFVEETSGAAKGVLTQALGPWKRPVAYLSKRLDPVAAGWPRCLRAIAAAALLTREASKLTFGQDIEITSSHNLESLLRSPPDKWLTNARITQYQVLLLDPPRVRFKQTAALNPATLLPETDDTLPIHHCLDTLDSLTSTRPDLTDQPLAQAEATLFTDGSSYIRDGKRYAGAAVVTLDSVIWAEPLPIGTSAQKAELIALTKALEWSKDKSVNIYTDSRYAFATLHVHGMIYRERGWLTAGGKAIKNAPEILALLTAVWLPKRVAVMHCKGHQKDDAPTSTGNRRADEVAREVAIRPLSTQATISSGGSSGGSSGSETPGTSESATPESSGGSSGGSSMASNFTQFVLVDNGGTGDVTVAPSNFANGIAEWISSNSRSQAYKVTCSVRQSSAQNRKYTIKVEVPKGAWRSYLNMELTIPIFATNSDCELIVKAMQGLLKDGNPIPSAIAANSGIYKRTADGSEFESPKKKAKVE

SEQ ID NO: 16204 - protein, 2390 aa, synthetic construct
MPAAKRVKLDGGDKKYSIGLDIGTNSVGWAVITDEYKVPSKKFKVLGNTDRHSIKKNLIGALLFDSGETAEATRLKRTARRRYTRRKNRICYLQEIFSNEMAKVDDSFFHRLEESFLVEEDKKHERHPIFGNIVDEVAYHEKYPTIYHLRKKLVDSTDKADLRLIYLALAHMIKFRGHFLIEGDLNPDNSDVDKLFIQLVQTYNQLFEENPINASGVDAKAILSARLSKSRRLENLIAQLPGEKKNGLFGNLIALSLGLTPNFKSNFDLAEDAKLQLSKDTYDDDLDNLLAQIGDQYADLFLAAKNLSDAILLSDILRVNTEITKAPLSASMIKRYDEHHQDLTLLKALVRQQLPEKYKEIFFDQSKNGYAGYIDGGASQEEFYKFIKPILEKMDGTEELLVKLNREDLLRKQRTFDNGSIPHQIHLGELHAILRRQEDFYPFLKDNREKIEKILTFRIPYYVGPLARGNSRFAWMTRKSEETITPWNFEEVVDKGASAQSFIERMTNFDKNLPNEKVLPKHSLLYEYFTVYNELTKVKYVTEGMRKPAFLSGEQKKAIVDLLFKTNRKVTVKQLKEDYFKKIECFDSVEISGVEDRFNASLGTYHDLLKIIKDKDFLDNEENEDILEDIVLTLTLFEDREMIEERLKTYAHLFDDKVMKQLKRRRYTGWGRLSRKLINGIRDKQSGKTILDFLKSDGFANRNFMQLIHDDSLTFKEDIQKAQVSGQGDSLHEHIANLAGSPAIKKGILQTVKVVDELVKVMGRHKPENIVIEMARENQTTQKGQKNSRERMKRIEEGIKELGSQILKEHPVENTQLQNEKLYLYYLQNGRDMYVDQELDINRLSDYDVDHIVPQSFLKDDSIDNKVLTRSDKARGKSDNVPSEEVVKKMKNYWRQLLNAKLITQRKFDNLTKAERGGLSELDKAGFIKRQLVETRQITKHVAQILDSRMNTKYDENDKLIREVKVITLKSKLVSDFRKDFQFYKVREINNYHHAHDAYLNAVVGTALIKKYPKLESEFVYGDYKVYDVRKMIAKSEQEIGKATAKYFFYSNIMNFFKTEITLANGEIRKRPLIETNGETGEIVWDKGRDFATVRKVLSMPQVNIVKKTEVQTGGFSKESILPKRNSDKLIARKKDWDPKKYGGFDSPTVAYSVLVVAKVEKGKSKKLKSVKELLGITIMERSSFEKNPIDFLEAKGYKEVKKDLIIKLPKYSLFELENGRKRMLASAGELQKGNELALPSKYVNFLYLASHYEKLKGSPEDNEQKQLFVEQHKHYLDEIIEQISEFSKRVILADANLDKVLSAYNKHRDKPIREQAENIIHLFTLTNLGAPAAFKYFDTTIDRKRYTSTKEVLDATLIHQSITGLYETRIDLSQLGGDAEAAAKEAAAKEAAAKEAAAKALEAEAAAKEAAAKEAAAKEAAAKATAPLEEEYRLFLEAPIQNVTLLEQWKREIPKVWAEINPPGLASTQAPIHVQLLSTALPVRVRQYPITLEAKRSLRETIRKFRAAGILRPVHSPWNTPLLPVRKSGTSEYRMVQDLREVNKRVETIHPTVPNPYTLLSLLPPDRIWYSVLDLKDAFFCIPLAPESQLIFAFEWADAEEGESGQLTWTRLPQGFKNSPTLFNEALNRDLQGFRLDHPSVSLLQYVDDLLIAADTQAACLSATRDLLMTLAELGYRVSGKKAQLCQEEVTYLGFKIHKGSRSLSNSRTQAILQIPVPKTKRQVREFLGKIGYCRLFIPGFAELAQPLYAATRPGNDPLVWGEKEEEAFQSLKLALTQPPALALPSLDKPFQLFVEETSGAAKGVLTQALGPWKRPVAYLSKRLDPVAAGWPRCLRAIAAAALLTREASKLTFGQDIEITSSHNLESLLRSPPDKWLTNARITQYQVLLLDPPRVRFKQTAALNPATLLPETDDTLPIHHCLDTLDSLTSTRPDLTDQPLAQAEATLFTDGSSYIRDGKRYAGAAVVTLDSVIWAEPLPIGTSAQKAELIALTKALEWSKDKSVNIYTDSRYAFATLHVHGMIYRERGWLTAGGKAIKNAPEILALLTAVWLPKRVAVMHCKGHQKDDAPTSTGNRRADEVAREVAIRPLSTQATISSGGSSGGSSGSETPGTSESATPESSGGSSGGSSMASNFTQFVLVDNGGTGDVTVAPSNFANGIAEWISSNSRSQAYKVTCSVRQSSAQNRKYTIKVEVPKGAWRSYLNMELTIPIFATNSDCELIVKAMQGLLKDGNPIPSAIAANSGIYGGSGGSMASNFTQFVLVDNGGTGDVTVAPSNFANGIAEWISSNSRSQAYKVTCSVRQSSAQNRKYTIKVEVPKGAWRSYLNMELTIPIFATNSDCELIVKAMQGLLKDGNPIPSAIAANSGIYKRTADGSEFESPKKKAKVE

SEQ ID NO: 16205 - protein, 2646 aa, synthetic construct
MPAAKRVKLDGGDKKYSIGLDIGTNSVGWAVITDEYKVPSKKFKVLGNTDRHSIKKNLIGALLFDSGETAEATRLKRTARRRYTRRKNRICYLQEIFSNEMAKVDDSFFHRLEESFLVEEDKKHERHPIFGNIVDEVAYHEKYPTIYHLRKKLVDSTDKADLRLIYLALAHMIKFRGHFLIEGDLNPDNSDVDKLFIQLVQTYNQLFEENPINASGVDAKAILSARLSKSRRLENLIAQLPGEKKNGLFGNLIALSLGLTPNFKSNFDLAEDAKLQLSKDTYDDDLDNLLAQIGDQYADLFLAAKNLSDAILLSDILRVNTEITKAPLSASMIKRYDEHHQDLTLLKALVRQQLPEKYKEIFFDQSKNGYAGYIDGGASQEEFYKFIKPILEKMDGTEELLVKLNREDLLRKQRTFDNGSIPHQIHLGELHAILRRQEDFYPFLKDNREKIEKILTFRIPYYVGPLARGNSRFAWMTRKSEETITPWNFEEVVDKGASAQSFIERMTNFDKNLPNEKVLPKHSLLYEYFTVYNELTKVKYVTEGMRKPAFLSGEQKKAIVDLLFKTNRKVTVKQLKEDYFKKIECFDSVEISGVEDRFNASLGTYHDLLKIIKDKDFLDNEENEDILEDIVLTLTLFEDREMIEERLKTYAHLFDDKVMKQLKRRRYTGWGRLSRKLINGIRDKQSGKTILDFLKSDGFANRNFMQLIHDDSLTFKEDIQKAQVSGQGDSLHEHIANLAGSPAIKKGILQTVKVVDELVKVMGRHKPENIVIEMARENQTTQKGQKNSRERMKRIEEGIKELGSQILKEHPVENTQLQNEKLYLYYLQNGRDMYVDQELDINRLSDYDVDHIVPQSFLKDDSIDNKVLTRSDKARGKSDNVPSEEVVKKMKNYWRQLLNAKLITQRKFDNLTKAERGGLSELDKAGFIKRQLVETRQITKHVAQILDSRMNTKYDENDKLIREVKVITLKSKLVSDFRKDFQFYKVREINNYHHAHDAYLNAVVGTALIKKYPKLESEFVYGDYKVYDVRKMIAKSEQEIGKATAKYFFYSNIMNFFKTEITLANGEIRKRPLIETNGETGEIVWDKGRDFATVRKVLSMPQVNIVKKTEVQTGGFSKESILPKRNSDKLIARKKDWDPKKYGGFDSPTVAYSVLVVAKVEKGKSKKLKSVKELLGITIMERSSFEKNPIDFLEAKGYKEVKKDLIIKLPKYSLFELENGRKRMLASAGELQKGNELALPSKYVNFLYLASHYEKLKGSPEDNEQKQLFVEQHKHYLDEIIEQISEFSKRVILADANLDKVLSAYNKHRDKPIREQAENIIHLFTLTNLGAPAAFKYFDTTIDRKRYTSTKEVLDATLIHQSITGLYETRIDLSQLGGDAEAAAKEAAAKEAAAKEAAAKALEAEAAAKEAAAKEAAAKEAAAKATAPLEEEYRLFLEAPIQNVTLLEQWKREIPKVWAEINPPGLASTQAPIHVQLLSTALPVRVRQYPITLEAKRSLRETIRKFRAAGILRPVHSPWNTPLLPVRKSGTSEYRMVQDLREVNKRVETIHPTVPNPYTLLSLLPPDRIWYSVLDLKDAFFCIPLAPESQLIFAFEWADAEEGESGQLTWTRLPQGFKNSPTLFNEALNRDLQGFRLDHPSVSLLQYVDDLLIAADTQAACLSATRDLLMTLAELGYRVSGKKAQLCQEEVTYLGFKIHKGSRSLSNSRTQAILQIPVPKTKRQVREFLGKIGYCRLFIPGFAELAQPLYAATRPGNDPLVWGEKEEEAFQSLKLALTQPPALALPSLDKPFQLFVEETSGAAKGVLTQALGPWKRPVAYLSKRLDPVAAGWPRCLRAIAAAALLTREASKLTFGQDIEITSSHNLESLLRSPPDKWLTNARITQYQVLLLDPPRVRFKQTAALNPATLLPETDDTLPIHHCLDTLDSLTSTRPDLTDQPLAQAEATLFTDGSSYIRDGKRYAGAAVVTLDSVIWAEPLPIGTSAQKAELIALTKALEWSKDKSVNIYTDSRYAFATLHVHGMIYRERGWLTAGGKAIKNAPEILALLTAVWLPKRVAVMHCKGHQKDDAPTSTGNRRADEVAREVAIRPLSTQATISSGGSSGGSSGSETPGTSESATPESSGGSSGGSSMASNFTQFVLVDNGGTGDVTVAPSNFANGIAEWISSNSRSQAYKVTCSVRQSSAQNRKYTIKVEVPKGAWRSYLNMELTIPIFATNSDCELIVKAMQGLLKDGNPIPSAIAANSGIYGGSGGSMASNFTQFVLVDNGGTGDVTVAPSNFANGIAEWISSNSRSQAYKVTCSVRQSSAQNRKYTIKVEVPKGAWRSYLNMELTIPIFATNSDCELIVKAMQGLLKDGNPIPSAIAANSGIYGGGSGGGSGGGSGGGSMASNFTQFVLVDNGGTGDVTVAPSNFANGIAEWISSNSRSQAYKVTCSVRQSSAQNRKYTIKVEVPKGAWRSYLNMELTIPIFATNSDCELIVKAMQGLLKDGNPIPSAIAANSGIYGGSGGSMASNFTQFVLVDNGGTGDVTVAPSNFANGIAEWISSNSRSQAYKVTCSVRQSSAQNRKYTIKVEVPKGAWRSYLNMELTIPIFATNSDCELIVKAMQGLLKDGNPIPSAIAANSGIYKRTADGSEFESPKKKAKVE

SEQ ID NO: 16206 - protein, 2252 aa, synthetic construct
MPAAKRVKLDGGDKKYSIGLDIGTNSVGWAVITDEYKVPSKKFKVLGNTDRHSIKKNLIGALLFDSGETAEATRLKRTARRRYTRRKNRICYLQEIFSNEMAKVDDSFFHRLEESFLVEEDKKHERHPIFGNIVDEVAYHEKYPTIYHLRKKLVDSTDKADLRLIYLALAHMIKFRGHFLIEGDLNPDNSDVDKLFIQLVQTYNQLFEENPINASGVDAKAILSARLSKSRRLENLIAQLPGEKKNGLFGNLIALSLGLTPNFKSNFDLAEDAKLQLSKDTYDDDLDNLLAQIGDQYADLFLAAKNLSDAILLSDILRVNTEITKAPLSASMIKRYDEHHQDLTLLKALVRQQLPEKYKEIFFDQSKNGYAGYIDGGASQEEFYKFIKPILEKMDGTEELLVKLNREDLLRKQRTFDNGSIPHQIHLGELHAILRRQEDFYPFLKDNREKIEKILTFRIPYYVGPLARGNSRFAWMTRKSEETITPWNFEEVVDKGASAQSFIERMTNFDKNLPNEKVLPKHSLLYEYFTVYNELTKVKYVTEGMRKPAFLSGEQKKAIVDLLFKTNRKVTVKQLKEDYFKKIECFDSVEISGVEDRFNASLGTYHDLLKIIKDKDFLDNEENEDILEDIVLTLTLFEDREMIEERLKTYAHLFDDKVMKQLKRRRYTGWGRLSRKLINGIRDKQSGKTILDFLKSDGFANRNFMQLIHDDSLTFKEDIQKAQVSGQGDSLHEHIANLAGSPAIKKGILQTVKVVDELVKVMGRHKPENIVIEMARENQTTQKGQKNSRERMKRIEEGIKELGSQILKEHPVENTQLQNEKLYLYYLQNGRDMYVDQELDINRLSDYDVDHIVPQSFLKDDSIDNKVLTRSDKARGKSDNVPSEEVVKKMKNYWRQLLNAKLITQRKFDNLTKAERGGLSELDKAGFIKRQLVETRQITKHVAQILDSRMNTKYDENDKLIREVKVITLKSKLVSDFRKDFQFYKVREINNYHHAHDAYLNAVVGTALIKKYPKLESEFVYGDYKVYDVRKMIAKSEQEIGKATAKYFFYSNIMNFFKTEITLANGEIRKRPLIETNGETGEIVWDKGRDFATVRKVLSMPQVNIVKKTEVQTGGFSKESILPKRNSDKLIARKKDWDPKKYGGFDSPTVAYSVLVVAKVEKGKSKKLKSVKELLGITIMERSSFEKNPIDFLEAKGYKEVKKDLIIKLPKYSLFELENGRKRMLASAGELQKGNELALPSKYVNFLYLASHYEKLKGSPEDNEQKQLFVEQHKHYLDEIIEQISEFSKRVILADANLDKVLSAYNKHRDKPIREQAENIIHLFTLTNLGAPAAFKYFDTTIDRKRYTSTKEVLDATLIHQSITGLYETRIDLSQLGGDAEAAAKEAAAKEAAAKEAAAKALEAEAAAKEAAAKEAAAKEAAAKATAPLEEEYRLFLEAPIQNVTLLEQWKREIPKVWAEINPPGLASTQAPIHVQLLSTALPVRVRQYPITLEAKRSLRETIRKFRAAGILRPVHSPWNTPLLPVRKSGTSEYRMVQDLREVNKRVETIHPTVPNPYTLLSLLPPDRIWYSVLDLKDAFFCIPLAPESQLIFAFEWADAEEGESGQLTWTRLPQGFKNSPTLFNEALNRDLQGFRLDHPSVSLLQYVDDLLIAADTQAACLSATRDLLMTLAELGYRVSGKKAQLCQEEVTYLGFKIHKGSRSLSNSRTQAILQIPVPKTKRQVREFLGKIGYCRLFIPGFAELAQPLYAATRPGNDPLVWGEKEEEAFQSLKLALTQPPALALPSLDKPFQLFVEETSGAAKGVLTQALGPWKRPVAYLSKRLDPVAAGWPRCLRAIAAAALLTREASKLTFGQDIEITSSHNLESLLRSPPDKWLTNARITQYQVLLLDPPRVRFKQTAALNPATLLPETDDTLPIHHCLDTLDSLTSTRPDLTDQPLAQAEATLFTDGSSYIRDGKRYAGAAVVTLDSVIWAEPLPIGTSAQKAELIALTKALEWSKDKSVNIYTDSRYAFATLHVHGMIYRERGWLTAGGKAIKNAPEILALLTAVWLPKRVAVMHCKGHQKDDAPTSTGNRRADEVAREVAIRPLSTQATISGSSGSSGSSGSSGSSGSSMASNFTQFVLVDNGGTGDVTVAPSNFANGIAEWISSNSRSQAYKVTCSVRQSSAQNRKYTIKVEVPKGAWRSYLNMELTIPIFATNSDCELIVKAMQGLLKDGNPIPSAIAANSGIYKRTADGSEFESPKKKAKVE

SEQ ID NO: 16207 - protein, 2375 aa, synthetic construct
MPAAKRVKLDGGDKKYSIGLDIGTNSVGWAVITDEYKVPSKKFKVLGNTDRHSIKKNLIGALLFDSGETAEATRLKRTARRRYTRRKNRICYLQEIFSNEMAKVDDSFFHRLEESFLVEEDKKHERHPIFGNIVDEVAYHEKYPTIYHLRKKLVDSTDKADLRLIYLALAHMIKFRGHFLIEGDLNPDNSDVDKLFIQLVQTYNQLFEENPINASGVDAKAILSARLSKSRRLENLIAQLPGEKKNGLFGNLIALSLGLTPNFKSNFDLAEDAKLQLSKDTYDDDLDNLLAQIGDQYADLFLAAKNLSDAILLSDILRVNTEITKAPLSASMIKRYDEHHQDLTLLKALVRQQLPEKYKEIFFDQSKNGYAGYIDGGASQEEFYKFIKPILEKMDGTEELLVKLNREDLLRKQRTFDNGSIPHQIHLGELHAILRRQEDFYPFLKDNREKIEKILTFRIPYYVGPLARGNSRFAWMTRKSEETITPWNFEEVVDKGASAQSFIERMTNFDKNLPNEKVLPKHSLLYEYFTVYNELTKVKYVTEGMRKPAFLSGEQKKAIVDLLFKTNRKVTVKQLKEDYFKKIECFDSVEISGVEDRFNASLGTYHDLLKIIKDKDFLDNEENEDILEDIVLTLTLFEDREMIEERLKTYAHLFDDKVMKQLKRRRYTGWGRLSRKLINGIRDKQSGKTILDFLKSDGFANRNFMQLIHDDSLTFKEDIQKAQVSGQGDSLHEHIANLAGSPAIKKGILQTVKVVDELVKVMGRHKPENIVIEMARENQTTQKGQKNSRERMKRIEEGIKELGSQILKEHPVENTQLQNEKLYLYYLQNGRDMYVDQELDINRLSDYDVDHIVPQSFLKDDSIDNKVLTRSDKARGKSDNVPSEEVVKKMKNYWRQLLNAKLITQRKFDNLTKAERGGLSELDKAGFIKRQLVETRQITKHVAQILDSRMNTKYDENDKLIREVKVITLKSKLVSDFRKDFQFYKVREINNYHHAHDAYLNAVVGTALIKKYPKLESEFVYGDYKVYDVRKMIAKSEQEIGKATAKYFFYSNIMNFFKTEITLANGEIRKRPLIETNGETGEIVWDKGRDFATVRKVLSMPQVNIVKKTEVQTGGFSKESILPKRNSDKLIARKKDWDPKKYGGFDSPTVAYSVLVVAKVEKGKSKKLKSVKELLGITIMERSSFEKNPIDFLEAKGYKEVKKDLIIKLPKYSLFELENGRKRMLASAGELQKGNELALPSKYVNFLYLASHYEKLKGSPEDNEQKQLFVEQHKHYLDEIIEQISEFSKRVILADANLDKVLSAYNKHRDKPIREQAENIIHLFTLTNLGAPAAFKYFDTTIDRKRYTSTKEVLDATLIHQSITGLYETRIDLSQLGGDAEAAAKEAAAKEAAAKEAAAKALEAEAAAKEAAAKEAAAKEAAAKATAPLEEEYRLFLEAPIQNVTLLEQWKREIPKVWAEINPPGLASTQAPIHVQLLSTALPVRVRQYPITLEAKRSLRETIRKFRAAGILRPVHSPWNTPLLPVRKSGTSEYRMVQDLREVNKRVETIHPTVPNPYTLLSLLPPDRIWYSVLDLKDAFFCIPLAPESQLIFAFEWADAEEGESGQLTWTRLPQGFKNSPTLFNEALNRDLQGFRLDHPSVSLLQYVDDLLIAADTQAACLSATRDLLMTLAELGYRVSGKKAQLCQEEVTYLGFKIHKGSRSLSNSRTQAILQIPVPKTKRQVREFLGKIGYCRLFIPGFAELAQPLYAATRPGNDPLVWGEKEEEAFQSLKLALTQPPALALPSLDKPFQLFVEETSGAAKGVLTQALGPWKRPVAYLSKRLDPVAAGWPRCLRAIAAAALLTREASKLTFGQDIEITSSHNLESLLRSPPDKWLTNARITQYQVLLLDPPRVRFKQTAALNPATLLPETDDTLPIHHCLDTLDSLTSTRPDLTDQPLAQAEATLFTDGSSYIRDGKRYAGAAVVTLDSVIWAEPLPIGTSAQKAELIALTKALEWSKDKSVNIYTDSRYAFATLHVHGMIYRERGWLTAGGKAIKNAPEILALLTAVWLPKRVAVMHCKGHQKDDAPTSTGNRRADEVAREVAIRPLSTQATISGSSGSSGSSGSSGSSGSSMASNFTQFVLVDNGGTGDVTVAPSNFANGIAEWISSNSRSQAYKVTCSVRQSSAQNRKYTIKVEVPKGAWRSYLNMELTIPIFATNSDCELIVKAMQGLLKDGNPIPSAIAANSGIYGGSGGSMASNFTQFVLVDNGGTGDVTVAPSNFANGIAEWISSNSRSQAYKVTCSVRQSSAQNRKYTIKVEVPKGAWRSYLNMELTIPIFATNSDCELIVKAMQGLLKDGNPIPSAIAANSGIYKRTADGSEFESPKKKAKVE

SEQ ID NO: 16208 - protein, 2631 aa, synthetic construct
MPAAKRVKLDGGDKKYSIGLDIGTNSVGWAVITDEYKVPSKKFKVLGNTDRHSIKKNLIGALLFDSGETAEATRLKRTARRRYTRRKNRICYLQEIFSNEMAKVDDSFFHRLEESFLVEEDKKHERHPIFGNIVDEVAYHEKYPTIYHLRKKLVDSTDKADLRLIYLALAHMIKFRGHFLIEGDLNPDNSDVDKLFIQLVQTYNQLFEENPINASGVDAKAILSARLSKSRRLENLIAQLPGEKKNGLFGNLIALSLGLTPNFKSNFDLAEDAKLQLSKDTYDDDLDNLLAQIGDQYADLFLAAKNLSDAILLSDILRVNTEITKAPLSASMIKRYDEHHQDLTLLKALVRQQLPEKYKEIFFDQSKNGYAGYIDGGASQEEFYKFIKPILEKMDGTEELLVKLNREDLLRKQRTFDNGSIPHQIHLGELHAILRRQEDFYPFLKDNREKIEKILTFRIPYYVGPLARGNSRFAWMTRKSEETITPWNFEEVVDKGASAQSFIERMTNFDKNLPNEKVLPKHSLLYEYFTVYNELTKVKYVTEGMRKPAFLSGEQKKAIVDLLFKTNRKVTVKQLKEDYFKKIECFDSVEISGVEDRFNASLGTYHDLLKIIKDKDFLDNEENEDILEDIVLTLTLFEDREMIEERLKTYAHLFDDKVMKQLKRRRYTGWGRLSRKLINGIRDKQSGKTILDFLKSDGFANRNFMQLIHDDSLTFKEDIQKAQVSGQGDSLHEHIANLAGSPAIKKGILQTVKVVDELVKVMGRHKPENIVIEMARENQTTQKGQKNSRERMKRIEEGIKELGSQILKEHPVENTQLQNEKLYLYYLQNGRDMYVDQELDINRLSDYDVDHIVPQSFLKDDSIDNKVLTRSDKARGKSDNVPSEEVVKKMKNYWRQLLNAKLITQRKFDNLTKAERGGLSELDKAGFIKRQLVETRQITKHVAQILDSRMNTKYDENDKLIREVKVITLKSKLVSDFRKDFQFYKVREINNYHHAHDAYLNAVVGTALIKKYPKLESEFVYGDYKVYDVRKMIAKSEQEIGKATAKYFFYSNIMNFFKTEITLANGEIRKRPLIETNGETGEIVWDKGRDFATVRKVLSMPQVNIVKKTEVQTGGFSKESILPKRNSDKLIARKKDWDPKKYGGFDSPTVAYSVLVVAKVEKGKSKKLKSVKELLGITIMERSSFEKNPIDFLEAKGYKEVKKDLIIKLPKYSLFELENGRKRMLASAGELQKGNELALPSKYVNFLYLASHYEKLKGSPEDNEQKQLFVEQHKHYLDEIIEQISEFSKRVILADANLDKVLSAYNKHRDKPIREQAENIIHLFTLTNLGAPAAFKYFDTTIDRKRYTSTKEVLDATLIHQSITGLYETRIDLSQLGGDAEAAAKEAAAKEAAAKEAAAKALEAEAAAKEAAAKEAAAKEAAAKATAPLEEEYRLFLEAPIQNVTLLEQWKREIPKVWAEINPPGLASTQAPIHVQLLSTALPVRVRQYPITLEAKRSLRETIRKFRAAGILRPVHSPWNTPLLPVRKSGTSEYRMVQDLREVNKRVETIHPTVPNPYTLLSLLPPDRIWYSVLDLKDAFFCIPLAPESQLIFAFEWADAEEGESGQLTWTRLPQGFKNSPTLFNEALNRDLQGFRLDHPSVSLLQYVDDLLIAADTQAACLSATRDLLMTLAELGYRVSGKKAQLCQEEVTYLGFKIHKGSRSLSNSRTQAILQIPVPKTKRQVREFLGKIGYCRLFIPGFAELAQPLYAATRPGNDPLVWGEKEEEAFQSLKLALTQPPALALPSLDKPFQLFVEETSGAAKGVLTQALGPWKRPVAYLSKRLDPVAAGWPRCLRAIAAAALLTREASKLTFGQDIEITSSHNLESLLRSPPDKWLTNARITQYQVLLLDPPRVRFKQTAALNPATLLPETDDTLPIHHCLDTLDSLTSTRPDLTDQPLAQAEATLFTDGSSYIRDGKRYAGAAVVTLDSVIWAEPLPIGTSAQKAELIALTKALEWSKDKSVNIYTDSRYAFATLHVHGMIYRERGWLTAGGKAIKNAPEILALLTAVWLPKRVAVMHCKGHQKDDAPTSTGNRRADEVAREVAIRPLSTQATISGSSGSSGSSGSSGSSGSSMASNFTQFVLVDNGGTGDVTVAPSNFANGIAEWISSNSRSQAYKVTCSVRQSSAQNRKYTIKVEVPKGAWRSYLNMELTIPIFATNSDCELIVKAMQGLLKDGNPIPSAIAANSGIYGGSGGSMASNFTQFVLVDNGGTGDVTVAPSNFANGIAEWISSNSRSQAYKVTCSVRQSSAQNRKYTIKVEVPKGAWRSYLNMELTIPIFATNSDCELIVKAMQGLLKDGNPIPSAIAANSGIYGGGSGGGSGGGSGGGSMASNFTQFVLVDNGGTGDVTVAPSNFANGIAEWISSNSRSQAYKVTCSVRQSSAQNRKYTIKVEVPKGAWRSYLNMELTIPIFATNSDCELIVKAMQGLLKDGNPIPSAIAANSGIYGGSGGSMASNFTQFVLVDNGGTGDVTVAPSNFANGIAEWISSNSRSQAYKVTCSVRQSSAQNRKYTIKVEVPKGAWRSYLNMELTIPIFATNSDCELIVKAMQGLLKDGNPIPSAIAANSGIYKRTADGSEFESPKKKAKVE

SEQ ID NO: 16209 - protein, 2245 aa, synthetic construct
MPAAKRVKLDGGDKKYSIGLDIGTNSVGWAVITDEYKVPSKKFKVLGNTDRHSIKKNLIGALLFDSGETAEATRLKRTARRRYTRRKNRICYLQEIFSNEMAKVDDSFFHRLEESFLVEEDKKHERHPIFGNIVDEVAYHEKYPTIYHLRKKLVDSTDKADLRLIYLALAHMIKFRGHFLIEGDLNPDNSDVDKLFIQLVQTYNQLFEENPINASGVDAKAILSARLSKSRRLENLIAQLPGEKKNGLFGNLIALSLGLTPNFKSNFDLAEDAKLQLSKDTYDDDLDNLLAQIGDQYADLFLAAKNLSDAILLSDILRVNTEITKAPLSASMIKRYDEHHQDLTLLKALVRQQLPEKYKEIFFDQSKNGYAGYIDGGASQEEFYKFIKPILEKMDGTEELLVKLNREDLLRKQRTFDNGSIPHQIHLGELHAILRRQEDFYPFLKDNREKIEKILTFRIPYYVGPLARGNSRFAWMTRKSEETITPWNFEEVVDKGASAQSFIERMTNFDKNLPNEKVLPKHSLLYEYFTVYNELTKVKYVTEGMRKPAFLSGEQKKAIVDLLFKTNRKVTVKQLKEDYFKKIECFDSVEISGVEDRFNASLGTYHDLLKIIKDKDFLDNEENEDILEDIVLTLTLFEDREMIEERLKTYAHLFDDKVMKQLKRRRYTGWGRLSRKLINGIRDKQSGKTILDFLKSDGFANRNFMQLIHDDSLTFKEDIQKAQVSGQGDSLHEHIANLAGSPAIKKGILQTVKVVDELVKVMGRHKPENIVIEMARENQTTQKGQKNSRERMKRIEEGIKELGSQILKEHPVENTQLQNEKLYLYYLQNGRDMYVDQELDINRLSDYDVDHIVPQSFLKDDSIDNKVLTRSDKARGKSDNVPSEEVVKKMKNYWRQLLNAKLITQRKFDNLTKAERGGLSELDKAGFIKRQLVETRQITKHVAQILDSRMNTKYDENDKLIREVKVITLKSKLVSDFRKDFQFYKVREINNYHHAHDAYLNAVVGTALIKKYPKLESEFVYGDYKVYDVRKMIAKSEQEIGKATAKYFFYSNIMNFFKTEITLANGEIRKRPLIETNGETGEIVWDKGRDFATVRKVLSMPQVNIVKKTEVQTGGFSKESILPKRNSDKLIARKKDWDPKKYGGFDSPTVAYSVLVVAKVEKGKSKKLKSVKELLGITIMERSSFEKNPIDFLEAKGYKEVKKDLIIKLPKYSLFELENGRKRMLASAGELQKGNELALPSKYVNFLYLASHYEKLKGSPEDNEQKQLFVEQHKHYLDEIIEQISEFSKRVILADANLDKVLSAYNKHRDKPIREQAENIIHLFTLTNLGAPAAFKYFDTTIDRKRYTSTKEVLDATLIHQSITGLYETRIDLSQLGGDAEAAAKEAAAKEAAAKEAAAKALEAEAAAKEAAAKEAAAKEAAAKATAPLEEEYRLFLEAPIQNVTLLEQWKREIPKVWAEINPPGLASTQAPIHVQLLSTALPVRVRQYPITLEAKRSLRETIRKFRAAGILRPVHSPWNTPLLPVRKSGTSEYRMVQDLREVNKRVETIHPTVPNPYTLLSLLPPDRIWYSVLDLKDAFFCIPLAPESQLIFAFEWADAEEGESGQLTWTRLPQGFKNSPTLFNEALNRDLQGFRLDHPSVSLLQYVDDLLIAADTQAACLSATRDLLMTLAELGYRVSGKKAQLCQEEVTYLGFKIHKGSRSLSNSRTQAILQIPVPKTKRQVREFLGKIGYCRLFIPGFAELAQPLYAATRPGNDPLVWGEKEEEAFQSLKLALTQPPALALPSLDKPFQLFVEETSGAAKGVLTQALGPWKRPVAYLSKRLDPVAAGWPRCLRAIAAAALLTREASKLTFGQDIEITSSHNLESLLRSPPDKWLTNARITQYQVLLLDPPRVRFKQTAALNPATLLPETDDTLPIHHCLDTLDSLTSTRPDLTDQPLAQAEATLFTDGSSYIRDGKRYAGAAVVTLDSVIWAEPLPIGTSAQKAELIALTKALEWSKDKSVNIYTDSRYAFATLHVHGMIYRERGWLTAGGKAIKNAPEILALLTAVWLPKRVAVMHCKGHQKDDAPTSTGNRRADEVAREVAIRPLSTQATISGSSGGGEAAAKMASNFTQFVLVDNGGTGDVTVAPSNFANGIAEWISSNSRSQAYKVTCSVRQSSAQNRKYTIKVEVPKGAWRSYLNMELTIPIFATNSDCELIVKAMQGLLKDGNPIPSAIAANSGIYKRTADGSEFESPKKKAKVE

SEQ ID NO: 16210 - protein, 2368 aa, synthetic construct
MPAAKRVKLDGGDKKYSIGLDIGTNSVGWAVITDEYKVPSKKFKVLGNTDRHSIKKNLIGALLFDSGETAEATRLKRTARRRYTRRKNRICYLQEIFSNEMAKVDDSFFHRLEESFLVEEDKKHERHPIFGNIVDEVAYHEKYPTIYHLRKKLVDSTDKADLRLIYLALAHMIKFRGHFLIEGDLNPDNSDVDKLFIQLVQTYNQLFEENPINASGVDAKAILSARLSKSRRLENLIAQLPGEKKNGLFGNLIALSLGLTPNFKSNFDLAEDAKLQLSKDTYDDDLDNLLAQIGDQYADLFLAAKNLSDAILLSDILRVNTEITKAPLSASMIKRYDEHHQDLTLLKALVRQQLPEKYKEIFFDQSKNGYAGYIDGGASQEEFYKFIKPILEKMDGTEELLVKLNREDLLRKQRTFDNGSIPHQIHLGELHAILRRQEDFYPFLKDNREKIEKILTFRIPYYVGPLARGNSRFAWMTRKSEETITPWNFEEVVDKGASAQSFIERMTNFDKNLPNEKVLPKHSLLYEYFTVYNELTKVKYVTEGMRKPAFLSGEQKKAIVDLLFKTNRKVTVKQLKEDYFKKIECFDSVEISGVEDRFNASLGTYHDLLKIIKDKDFLDNEENEDILEDIVLTLTLFEDREMIEERLKTYAHLFDDKVMKQLKRRRYTGWGRLSRKLINGIRDKQSGKTILDFLKSDGFANRNFMQLIHDDSLTFKEDIQKAQVSGQGDSLHEHIANLAGSPAIKKGILQTVKVVDELVKVMGRHKPENIVIEMARENQTTQKGQKNSRERMKRIEEGIKELGSQILKEHPVENTQLQNEKLYLYYLQNGRDMYVDQELDINRLSDYDVDHIVPQSFLKDDSIDNKVLTRSDKARGKSDNVPSEEVVKKMKNYWRQLLNAKLITQRKFDNLTKAERGGLSELDKAGFIKRQLVETRQITKHVAQILDSRMNTKYDENDKLIREVKVITLKSKLVSDFRKDFQFYKVREINNYHHAHDAYLNAVVGTALIKKYPKLESEFVYGDYKVYDVRKMIAKSEQEIGKATAKYFFYSNIMNFFKTEITLANGEIRKRPLIETNGETGEIVWDKGRDFATVRKVLSMPQVNIVKKTEVQTGGFSKESILPKRNSDKLIARKKDWDPKKYGGFDSPTVAYSVLVVAKVEKGKSKKLKSVKELLGITIMERSSFEKNPIDFLEAKGYKEVKKDLIIKLPKYSLFELENGRKRMLASAGELQKGNELALPSKYVNFLYLASHYEKLKGSPEDNEQKQLFVEQHKHYLDEIIEQISEFSKRVILADANLDKVLSAYNKHRDKPIREQAENIIHLFTLTNLGAPAAFKYFDTTIDRKRYTSTKEVLDATLIHQSITGLYETRIDLSQLGGDAEAAAKEAAAKEAAAKEAAAKALEAEAAAKEAAAKEAAAKEAAAKATAPLEEEYRLFLEAPIQNVTLLEQWKREIPKVWAEINPPGLASTQAPIHVQLLSTALPVRVRQYPITLEAKRSLRETIRKFRAAGILRPVHSPWNTPLLPVRKSGTSEYRMVQDLREVNKRVETIHPTVPNPYTLLSLLPPDRIWYSVLDLKDAFFCIPLAPESQLIFAFEWADAEEGESGQLTWTRLPQGFKNSPTLFNEALNRDLQGFRLDHPSVSLLQYVDDLLIAADTQAACLSATRDLLMTLAELGYRVSGKKAQLCQEEVTYLGFKIHKGSRSLSNSRTQAILQIPVPKTKRQVREFLGKIGYCRLFIPGFAELAQPLYAATRPGNDPLVWGEKEEEAFQSLKLALTQPPALALPSLDKPFQLFVEETSGAAKGVLTQALGPWKRPVAYLSKRLDPVAAGWPRCLRAIAAAALLTREASKLTFGQDIEITSSHNLESLLRSPPDKWLTNARITQYQVLLLDPPRVRFKQTAALNPATLLPETDDTLPIHHCLDTLDSLTSTRPDLTDQPLAQAEATLFTDGSSYIRDGKRYAGAAVVTLDSVIWAEPLPIGTSAQKAELIALTKALEWSKDKSVNIYTDSRYAFATLHVHGMIYRERGWLTAGGKAIKNAPEILALLTAVWLPKRVAVMHCKGHQKDDAPTSTGNRRADEVAREVAIRPLSTQATISGSSGGGEAAAKMASNFTQFVLVDNGGTGDVTVAPSNFANGIAEWISSNSRSQAYKVTCSVRQSSAQNRKYTIKVEVPKGAWRSYLNMELTIPIFATNSDCELIVKAMQGLLKDGNPIPSAIAANSGIYGGSGGSMASNFTQFVLVDNGGTGDVTVAPSNFANGIAEWISSNSRSQAYKVTCSVRQSSAQNRKYTIKVEVPKGAWRSYLNMELTIPIFATNSDCELIVKAMQGLLKDGNPIPSAIAANSGIYKRTADGSEFESPKKKAKVE

SEQ ID NO: 16211 - protein, 2624 aa, synthetic construct
MPAAKRVKLDGGDKKYSIGLDIGTNSVGWAVITDEYKVPSKKFKVLGNTDRHSIKKNLIGALLFDSGETAEATRLKRTARRRYTRRKNRICYLQEIFSNEMAKVDDSFFHRLEESFLVEEDKKHERHPIFGNIVDEVAYHEKYPTIYHLRKKLVDSTDKADLRLIYLALAHMIKFRGHFLIEGDLNPDNSDVDKLFIQLVQTYNQLFEENPINASGVDAKAILSARLSKSRRLENLIAQLPGEKKNGLFGNLIALSLGLTPNFKSNFDLAEDAKLQLSKDTYDDDLDNLLAQIGDQYADLFLAAKNLSDAILLSDILRVNTEITKAPLSASMIKRYDEHHQDLTLLKALVRQQLPEKYKEIFFDQSKNGYAGYIDGGASQEEFYKFIKPILEKMDGTEELLVKLNREDLLRKQRTFDNGSIPHQIHLGELHAILRRQEDFYPFLKDNREKIEKILTFRIPYYVGPLARGNSRFAWMTRKSEETITPWNFEEVVDKGASAQSFIERMTNFDKNLPNEKVLPKHSLLYEYFTVYNELTKVKYVTEGMRKPAFLSGEQKKAIVDLLFKTNRKVTVKQLKEDYFKKIECFDSVEISGVEDRFNASLGTYHDLLKIIKDKDFLDNEENEDILEDIVLTLTLFEDREMIEERLKTYAHLFDDKVMKQLKRRRYTGWGRLSRKLINGIRDKQSGKTILDFLKSDGFANRNFMQLIHDDSLTFKEDIQKAQVSGQGDSLHEHIANLAGSPAIKKGILQTVKVVDELVKVMGRHKPENIVIEMARENQTTQKGQKNSRERMKRIEEGIKELGSQILKEHPVENTQLQNEKLYLYYLQNGRDMYVDQELDINRLSDYDVDHIVPQSFLKDDSIDNKVLTRSDKARGKSDNVPSEEVVKKMKNYWRQLLNAKLITQRKFDNLTKAERGGLSELDKAGFIKRQLVETRQITKHVAQILDSRMNTKYDENDKLIREVKVITLKSKLVSDFRKDFQFYKVREINNYHHAHDAYLNAVVGTALIKKYPKLESEFVYGDYKVYDVRKMIAKSEQEIGKATAKYFFYSNIMNFFKTEITLANGEIRKRPLIETNGETGEIVWDKGRDFATVRKVLSMPQVNIVKKTEVQTGGFSKESILPKRNSDKLIARKKDWDPKKYGGFDSPTVAYSVLVVAKVEKGKSKKLKSVKELLGITIMERSSFEKNPIDFLEAKGYKEVKKDLIIKLPKYSLFELENGRKRMLASAGELQKGNELALPSKYVNFLYLASHYEKLKGSPEDNEQKQLFVEQHKHYLDEIIEQISEFSKRVILADANLDKVLSAYNKHRDKPIREQAENIIHLFTLTNLGAPAAFKYFDTTIDRKRYTSTKEVLDATLIHQSITGLYETRIDLSQLGGDAEAAAKEAAAKEAAAKEAAAKALEAEAAAKEAAAKEAAAKEAAAKATAPLEEEYRLFLEAPIQNVTLLEQWKREIPKVWAEINPPGLASTQAPIHVQLLSTALPVRVRQYPITLEAKRSLRETIRKFRAAGILRPVHSPWNTPLLPVRKSGTSEYRMVQDLREVNKRVETIHPTVPNPYTLLSLLPPDRIWYSVLDLKDAFFCIPLAPESQLIFAFEWADAEEGESGQLTWTRLPQGFKNSPTLFNEALNRDLQGFRLDHPSVSLLQYVDDLLIAADTQAACLSATRDLLMTLAELGYRVSGKKAQLCQEEVTYLGFKIHKGSRSLSNSRTQAILQIPVPKTKRQVREFLGKIGYCRLFIPGFAELAQPLYAATRPGNDPLVWGEKEEEAFQSLKLALTQPPALALPSLDKPFQLFVEETSGAAKGVLTQALGPWKRPVAYLSKRLDPVAAGWPRCLRAIAAAALLTREASKLTFGQDIEITSSHNLESLLRSPPDKWLTNARITQYQVLLLDPPRVRFKQTAALNPATLLPETDDTLPIHHCLDTLDSLTSTRPDLTDQPLAQAEATLFTDGSSYIRDGKRYAGAAVVTLDSVIWAEPLPIGTSAQKAELIALTKALEWSKDKSVNIYTDSRYAFATLHVHGMIYRERGWLTAGGKAIKNAPEILALLTAVWLPKRVAVMHCKGHQKDDAPTSTGNRRADEVAREVAIRPLSTQATISGSSGGGEAAAKMASNFTQFVLVDNGGTGDVTVAPSNFANGIAEWISSNSRSQAYKVTCSVRQSSAQNRKYTIKVEVPKGAWRSYLNMELTIPIFATNSDCELIVKAMQGLLKDGNPIPSAIAANSGIYGGSGGSMASNFTQFVLVDNGGTGDVTVAPSNFANGIAEWISSNSRSQAYKVTCSVRQSSAQNRKYTIKVEVPKGAWRSYLNMELTIPIFATNSDCELIVKAMQGLLKDGNPIPSAIAANSGIYGGGSGGGSGGGSGGGSMASNFTQFVLVDNGGTGDVTVAPSNFANGIAEWISSNSRSQAYKVTCSVRQSSAQNRKYTIKVEVPKGAWRSYLNMELTIPIFATNSDCELIVKAMQGLLKDGNPIPSAIAANSGIYGGSGGSMASNFTQFVLVDNGGTGDVTVAPSNFANGIAEWISSNSRSQAYKVTCSVRQSSAQNRKYTIKVEVPKGAWRSYLNMELTIPIFATNSDCELIVKAMQGLLKDGNPIPSAIAANSGIYKRTADGSEFESPKKKAKVE

SEQ ID NO: 16212 - protein, 2278 aa, synthetic construct
MPAAKRVKLDGGDKKYSIGLDIGTNSVGWAVITDEYKVPSKKFKVLGNTDRHSIKKNLIGALLFDSGETAEATRLKRTARRRYTRRKNRICYLQEIFSNEMAKVDDSFFHRLEESFLVEEDKKHERHPIFGNIVDEVAYHEKYPTIYHLRKKLVDSTDKADLRLIYLALAHMIKFRGHFLIEGDLNPDNSDVDKLFIQLVQTYNQLFEENPINASGVDAKAILSARLSKSRRLENLIAQLPGEKKNGLFGNLIALSLGLTPNFKSNFDLAEDAKLQLSKDTYDDDLDNLLAQIGDQYADLFLAAKNLSDAILLSDILRVNTEITKAPLSASMIKRYDEHHQDLTLLKALVRQQLPEKYKEIFFDQSKNGYAGYIDGGASQEEFYKFIKPILEKMDGTEELLVKLNREDLLRKQRTFDNGSIPHQIHLGELHAILRRQEDFYPFLKDNREKIEKILTFRIPYYVGPLARGNSRFAWMTRKSEETITPWNFEEVVDKGASAQSFIERMTNFDKNLPNEKVLPKHSLLYEYFTVYNELTKVKYVTEGMRKPAFLSGEQKKAIVDLLFKTNRKVTVKQLKEDYFKKIECFDSVEISGVEDRFNASLGTYHDLLKIIKDKDFLDNEENEDILEDIVLTLTLFEDREMIEERLKTYAHLFDDKVMKQLKRRRYTGWGRLSRKLINGIRDKQSGKTILDFLKSDGFANRNFMQLIHDDSLTFKEDIQKAQVSGQGDSLHEHIANLAGSPAIKKGILQTVKVVDELVKVMGRHKPENIVIEMARENQTTQKGQKNSRERMKRIEEGIKELGSQILKEHPVENTQLQNEKLYLYYLQNGRDMYVDQELDINRLSDYDVDHIVPQSFLKDDSIDNKVLTRSDKARGKSDNVPSEEVVKKMKNYWRQLLNAKLITQRKFDNLTKAERGGLSELDKAGFIKRQLVETRQITKHVAQILDSRMNTKYDENDKLIREVKVITLKSKLVSDFRKDFQFYKVREINNYHHAHDAYLNAVVGTALIKKYPKLESEFVYGDYKVYDVRKMIAKSEQEIGKATAKYFFYSNIMNFFKTEITLANGEIRKRPLIETNGETGEIVWDKGRDFATVRKVLSMPQVNIVKKTEVQTGGFSKESILPKRNSDKLIARKKDWDPKKYGGFDSPTVAYSVLVVAKVEKGKSKKLKSVKELLGITIMERSSFEKNPIDFLEAKGYKEVKKDLIIKLPKYSLFELENGRKRMLASAGELQKGNELALPSKYVNFLYLASHYEKLKGSPEDNEQKQLFVEQHKHYLDEIIEQISEFSKRVILADANLDKVLSAYNKHRDKPIREQAENIIHLFTLTNLGAPAAFKYFDTTIDRKRYTSTKEVLDATLIHQSITGLYETRIDLSQLGGDAEAAAKEAAAKEAAAKEAAAKALEAEAAAKEAAAKEAAAKEAAAKATLNIEDEHRLHETSKEPDVSLGSTWLSDFPQAWAETGGMGLAVRQAPLIIPLKATSTPVSIKQYPMSQEARLGIKPHIQRLLDQGILVPCQSPWNTPLLPVKKPGTNDYRPVQDLREVNKRVEDIHPTVPNPYNLLSGLPPSHQWYTVLDLKDAFFCLRLHPTSQPLFAFEWRDPEMGISGQLTWTRLPQGFKNSPTLFNEALHRDLADFRIQHPDLILLQYVDDLLLAATSELDCQQGTRALLQTLGNLGYRASAKKAQICQKQVKYLGYLLKEGQRWLTEARKETVMGQPTPKTPRQLREFLGKAGFCRLFIPGFAEMAAPLYPLTKPGTLFNWGPDQQKAYQEIKQALLTAPALGLPDLTKPFELFVDEKQGYAKGVLTQKLGPWRRPVAYLSKKLDPVAAGWPPCLRMVAAIAVLTKDAGKLTMGQPLVILAPHAVEALVKQPPDRWLSNARMTHYQALLLDTDRVQFGPVVALNPATLLPLPEEGLQHNCLDILAEAHGTRPDLTDQPLPDADHTWYTDGSSLLQEGQRKAGAAVTTETEVIWAKALPAGTSAQRAELIALTQALKMAEGKKLNVYTDSRYAFATAHIHGEIYRRRGWLTSEGKEIKNKDEILALLKALFLPKRLSIIHCPGHQKGHSAEARGNRMADQAARKAAITETPDTSTLLAEAAAKEAAAKEAAAKEAAAKALEAEAAAKEAAAKEAAAKEAAAKAMASNFTQFVLVDNGGTGDVTVAPSNFANGIAEWISSNSRSQAYKVTCSVRQSSAQNRKYTIKVEVPKGAWRSYLNMELTIPIFATNSDCELIVKAMQGLLKDGNPIPSAIAANSGIYKRTADGSEFESPKKKAKVE

SEQ ID NO: 16213 - protein, 2401 aa, synthetic construct
MPAAKRVKLDGGDKKYSIGLDIGTNSVGWAVITDEYKVPSKKFKVLGNTDRHSIKKNLIGALLFDSGETAEATRLKRTARRRYTRRKNRICYLQEIFSNEMAKVDDSFFHRLEESFLVEEDKKHERHPIFGNIVDEVAYHEKYPTIYHLRKKLVDSTDKADLRLIYLALAHMIKFRGHFLIEGDLNPDNSDVDKLFIQLVQTYNQLFEENPINASGVDAKAILSARLSKSRRLENLIAQLPGEKKNGLFGNLIALSLGLTPNFKSNFDLAEDAKLQLSKDTYDDDLDNLLAQIGDQYADLFLAAKNLSDAILLSDILRVNTEITKAPLSASMIKRYDEHHQDLTLLKALVRQQLPEKYKEIFFDQSKNGYAGYIDGGASQEEFYKFIKPILEKMDGTEELLVKLNREDLLRKQRTFDNGSIPHQIHLGELHAILRRQEDFYPFLKDNREKIEKILTFRIPYYVGPLARGNSRFAWMTRKSEETITPWNFEEVVDKGASAQSFIERMTNFDKNLPNEKVLPKHSLLYEYFTVYNELTKVKYVTEGMRKPAFLSGEQKKAIVDLLFKTNRKVTVKQLKEDYFKKIECFDSVEISGVEDRFNASLGTYHDLLKIIKDKDFLDNEENEDILEDIVLTLTLFEDREMIEERLKTYAHLFDDKVMKQLKRRRYTGWGRLSRKLINGIRDKQSGKTILDFLKSDGFANRNFMQLIHDDSLTFKEDIQKAQVSGQGDSLHEHIANLAGSPAIKKGILQTVKVVDELVKVMGRHKPENIVIEMARENQTTQKGQKNSRERMKRIEEGIKELGSQILKEHPVENTQLQNEKLYLYYLQNGRDMYVDQELDINRLSDYDVDHIVPQSFLKDDSIDNKVLTRSDKARGKSDNVPSEEVVKKMKNYWRQLLNAKLITQRKFDNLTKAERGGLSELDKAGFIKRQLVETRQITKHVAQILDSRMNTKYDENDKLIREVKVITLKSKLVSDFRKDFQFYKVREINNYHHAHDAYLNAVVGTALIKKYPKLESEFVYGDYKVYDVRKMIAKSEQEIGKATAKYFFYSNIMNFFKTEITLANGEIRKRPLIETNGETGEIVWDKGRDFATVRKVLSMPQVNIVKKTEVQTGGFSKESILPKRNSDKLIARKKDWDPKKYGGFDSPTVAYSVLVVAKVEKGKSKKLKSVKELLGITIMERSSFEKNPIDFLEAKGYKEVKKDLIIKLPKYSLFELENGRKRMLASAGELQKGNELALPSKYVNFLYLASHYEKLKGSPEDNEQKQLFVEQHKHYLDEIIEQISEFSKRVILADANLDKVLSAYNKHRDKPIREQAENIIHLFTLTNLGAPAAFKYFDTTIDRKRYTSTKEVLDATLIHQSITGLYETRIDLSQLGGDAEAAAKEAAAKEAAAKEAAAKALEAEAAAKEAAAKEAAAKEAAAKATLNIEDEHRLHETSKEPDVSLGSTWLSDFPQAWAETGGMGLAVRQAPLIIPLKATSTPVSIKQYPMSQEARLGIKPHIQRLLDQGILVPCQSPWNTPLLPVKKPGTNDYRPVQDLREVNKRVEDIHPTVPNPYNLLSGLPPSHQWYTVLDLKDAFFCLRLHPTSQPLFAFEWRDPEMGISGQLTWTRLPQGFKNSPTLFNEALHRDLADFRIQHPDLILLQYVDDLLLAATSELDCQQGTRALLQTLGNLGYRASAKKAQICQKQVKYLGYLLKEGQRWLTEARKETVMGQPTPKTPRQLREFLGKAGFCRLFIPGFAEMAAPLYPLTKPGTLFNWGPDQQKAYQEIKQALLTAPALGLPDLTKPFELFVDEKQGYAKGVLTQKLGPWRRPVAYLSKKLDPVAAGWPPCLRMVAAIAVLTKDAGKLTMGQPLVILAPHAVEALVKQPPDRWLSNARMTHYQALLLDTDRVQFGPVVALNPATLLPLPEEGLQHNCLDILAEAHGTRPDLTDQPLPDADHTWYTDGSSLLQEGQRKAGAAVTTETEVIWAKALPAGTSAQRAELIALTQALKMAEGKKLNVYTDSRYAFATAHIHGEIYRRRGWLTSEGKEIKNKDEILALLKALFLPKRLSIIHCPGHQKGHSAEARGNRMADQAARKAAITETPDTSTLLAEAAAKEAAAKEAAAKEAAAKALEAEAAAKEAAAKEAAAKEAAAKAMASNFTQFVLVDNGGTGDVTVAPSNFANGIAEWISSNSRSQAYKVTCSVRQSSAQNRKYTIKVEVPKGAWRSYLNMELTIPIFATNSDCELIVKAMQGLLKDGNPIPSAIAANSGIYGGSGGSMASNFTQFVLVDNGGTGDVTVAPSNFANGIAEWISSNSRSQAYKVTCSVRQSSAQNRKYTIKVEVPKGAWRSYLNMELTIPIFATNSDCELIVKAMQGLLKDGNPIPSAIAANSGIYKRTADGSEFESPKKKAKVE

SEQ ID NO: 16214 - protein, 2657 aa, synthetic construct
MPAAKRVKLDGGDKKYSIGLDIGTNSVGWAVITDEYKVPSKKFKVLGNTDRHSIKKNLIGALLFDSGETAEATRLKRTARRRYTRRKNRICYLQEIFSNEMAKVDDSFFHRLEESFLVEEDKKHERHPIFGNIVDEVAYHEKYPTIYHLRKKLVDSTDKADLRLIYLALAHMIKFRGHFLIEGDLNPDNSDVDKLFIQLVQTYNQLFEENPINASGVDAKAILSARLSKSRRLENLIAQLPGEKKNGLFGNLIALSLGLTPNFKSNFDLAEDAKLQLSKDTYDDDLDNLLAQIGDQYADLFLAAKNLSDAILLSDILRVNTEITKAPLSASMIKRYDEHHQDLTLLKALVRQQLPEKYKEIFFDQSKNGYAGYIDGGASQEEFYKFIKPILEKMDGTEELLVKLNREDLLRKQRTFDNGSIPHQIHLGELHAILRRQEDFYPFLKDNREKIEKILTFRIPYYVGPLARGNSRFAWMTRKSEETITPWNFEEVVDKGASAQSFIERMTNFDKNLPNEKVLPKHSLLYEYFTVYNELTKVKYVTEGMRKPAFLSGEQKKAIVDLLFKTNRKVTVKQLKEDYFKKIECFDSVEISGVEDRFNASLGTYHDLLKIIKDKDFLDNEENEDILEDIVLTLTLFEDREMIEERLKTYAHLFDDKVMKQLKRRRYTGWGRLSRKLINGIRDKQSGKTILDFLKSDGFANRNFMQLIHDDSLTFKEDIQKAQVSGQGDSLHEHIANLAGSPAIKKGILQTVKVVDELVKVMGRHKPENIVIEMARENQTTQKGQKNSRERMKRIEEGIKELGSQILKEHPVENTQLQNEKLYLYYLQNGRDMYVDQELDINRLSDYDVDHIVPQSFLKDDSIDNKVLTRSDKARGKSDNVPSEEVVKKMKNYWRQLLNAKLITQRKFDNLTKAERGGLSELDKAGFIKRQLVETRQITKHVAQILDSRMNTKYDENDKLIREVKVITLKSKLVSDFRKDFQFYKVREINNYHHAHDAYLNAVVGTALIKKYPKLESEFVYGDYKVYDVRKMIAKSEQEIGKATAKYFFYSNIMNFFKTEITLANGEIRKRPLIETNGETGEIVWDKGRDFATVRKVLSMPQVNIVKKTEVQTGGFSKESILPKRNSDKLIARKKDWDPKKYGGFDSPTVAYSVLVVAKVEKGKSKKLKSVKELLGITIMERSSFEKNPIDFLEAKGYKEVKKDLIIKLPKYSLFELENGRKRMLASAGELQKGNELALPSKYVNFLYLASHYEKLKGSPEDNEQKQLFVEQHKHYLDEIIEQISEFSKRVILADANLDKVLSAYNKHRDKPIREQAENIIHLFTLTNLGAPAAFKYFDTTIDRKRYTSTKEVLDATLIHQSITGLYETRIDLSQLGGDAEAAAKEAAAKEAAAKEAAAKALEAEAAAKEAAAKEAAAKEAAAKATLNIEDEHRLHETSKEPDVSLGSTWLSDFPQAWAETGGMGLAVRQAPLIIPLKATSTPVSIKQYPMSQEARLGIKPHIQRLLDQGILVPCQSPWNTPLLPVKKPGTNDYRPVQDLREVNKRVEDIHPTVPNPYNLLSGLPPSHQWYTVLDLKDAFFCLRLHPTSQPLFAFEWRDPEMGISGQLTWTRLPQGFKNSPTLFNEALHRDLADFRIQHPDLILLQYVDDLLLAATSELDCQQGTRALLQTLGNLGYRASAKKAQICQKQVKYLGYLLKEGQRWLTEARKETVMGQPTPKTPRQLREFLGKAGFCRLFIPGFAEMAAPLYPLTKPGTLFNWGPDQQKAYQEIKQALLTAPALGLPDLTKPFELFVDEKQGYAKGVLTQKLGPWRRPVAYLSKKLDPVAAGWPPCLRMVAAIAVLTKDAGKLTMGQPLVILAPHAVEALVKQPPDRWLSNARMTHYQALLLDTDRVQFGPVVALNPATLLPLPEEGLQHNCLDILAEAHGTRPDLTDQPLPDADHTWYTDGSSLLQEGQRKAGAAVTTETEVIWAKALPAGTSAQRAELIALTQALKMAEGKKLNVYTDSRYAFATAHIHGEIYRRRGWLTSEGKEIKNKDEILALLKALFLPKRLSIIHCPGHQKGHSAEARGNRMADQAARKAAITETPDTSTLLAEAAAKEAAAKEAAAKEAAAKALEAEAAAKEAAAKEAAAKEAAAKAMASNFTQFVLVDNGGTGDVTVAPSNFANGIAEWISSNSRSQAYKVTCSVRQSSAQNRKYTIKVEVPKGAWRSYLNMELTIPIFATNSDCELIVKAMQGLLKDGNPIPSAIAANSGIYGGSGGSMASNFTQFVLVDNGGTGDVTVAPSNFANGIAEWISSNSRSQAYKVTCSVRQSSAQNRKYTIKVEVPKGAWRSYLNMELTIPIFATNSDCELIVKAMQGLLKDGNPIPSAIAANSGIYGGGSGGGSGGGSGGGSMASNFTQFVLVDNGGTGDVTVAPSNFANGIAEWISSNSRSQAYKVTCSVRQSSAQNRKYTIKVEVPKGAWRSYLNMELTIPIFATNSDCELIVKAMQGLLKDGNPIPSAIAANSGIYGGSGGSMASNFTQFVLVDNGGTGDVTVAPSNFANGIAEWISSNSRSQAYKVTCSVRQSSAQNRKYTIKVEVPKGAWRSYLNMELTIPIFATNSDCELIVKAMQGLLKDGNPIPSAIAANSGIYKRTADGSEFESPKKKAKVE

SEQ ID NO: 16215 - protein, 2265 aa, synthetic construct
MPAAKRVKLDGGDKKYSIGLDIGTNSVGWAVITDEYKVPSKKFKVLGNTDRHSIKKNLIGALLFDSGETAEATRLKRTARRRYTRRKNRICYLQEIFSNEMAKVDDSFFHRLEESFLVEEDKKHERHPIFGNIVDEVAYHEKYPTIYHLRKKLVDSTDKADLRLIYLALAHMIKFRGHFLIEGDLNPDNSDVDKLFIQLVQTYNQLFEENPINASGVDAKAILSARLSKSRRLENLIAQLPGEKKNGLFGNLIALSLGLTPNFKSNFDLAEDAKLQLSKDTYDDDLDNLLAQIGDQYADLFLAAKNLSDAILLSDILRVNTEITKAPLSASMIKRYDEHHQDLTLLKALVRQQLPEKYKEIFFDQSKNGYAGYIDGGASQEEFYKFIKPILEKMDGTEELLVKLNREDLLRKQRTFDNGSIPHQIHLGELHAILRRQEDFYPFLKDNREKIEKILTFRIPYYVGPLARGNSRFAWMTRKSEETITPWNFEEVVDKGASAQSFIERMTNFDKNLPNEKVLPKHSLLYEYFTVYNELTKVKYVTEGMRKPAFLSGEQKKAIVDLLFKTNRKVTVKQLKEDYFKKIECFDSVEISGVEDRFNASLGTYHDLLKIIKDKDFLDNEENEDILEDIVLTLTLFEDREMIEERLKTYAHLFDDKVMKQLKRRRYTGWGRLSRKLINGIRDKQSGKTILDFLKSDGFANRNFMQLIHDDSLTFKEDIQKAQVSGQGDSLHEHIANLAGSPAIKKGILQTVKVVDELVKVMGRHKPENIVIEMARENQTTQKGQKNSRERMKRIEEGIKELGSQILKEHPVENTQLQNEKLYLYYLQNGRDMYVDQELDINRLSDYDVDHIVPQSFLKDDSIDNKVLTRSDKARGKSDNVPSEEVVKKMKNYWRQLLNAKLITQRKFDNLTKAERGGLSELDKAGFIKRQLVETRQITKHVAQILDSRMNTKYDENDKLIREVKVITLKSKLVSDFRKDFQFYKVREINNYHHAHDAYLNAVVGTALIKKYPKLESEFVYGDYKVYDVRKMIAKSEQEIGKATAKYFFYSNIMNFFKTEITLANGEIRKRPLIETNGETGEIVWDKGRDFATVRKVLSMPQVNIVKKTEVQTGGFSKESILPKRNSDKLIARKKDWDPKKYGGFDSPTVAYSVLVVAKVEKGKSKKLKSVKELLGITIMERSSFEKNPIDFLEAKGYKEVKKDLIIKLPKYSLFELENGRKRMLASAGELQKGNELALPSKYVNFLYLASHYEKLKGSPEDNEQKQLFVEQHKHYLDEIIEQISEFSKRVILADANLDKVLSAYNKHRDKPIREQAENIIHLFTLTNLGAPAAFKYFDTTIDRKRYTSTKEVLDATLIHQSITGLYETRIDLSQLGGDAEAAAKEAAAKEAAAKEAAAKALEAEAAAKEAAAKEAAAKEAAAKATLNIEDEHRLHETSKEPDVSLGSTWLSDFPQAWAETGGMGLAVRQAPLIIPLKATSTPVSIKQYPMSQEARLGIKPHIQRLLDQGILVPCQSPWNTPLLPVKKPGTNDYRPVQDLREVNKRVEDIHPTVPNPYNLLSGLPPSHQWYTVLDLKDAFFCLRLHPTSQPLFAFEWRDPEMGISGQLTWTRLPQGFKNSPTLFNEALHRDLADFRIQHPDLILLQYVDDLLLAATSELDCQQGTRALLQTLGNLGYRASAKKAQICQKQVKYLGYLLKEGQRWLTEARKETVMGQPTPKTPRQLREFLGKAGFCRLFIPGFAEMAAPLYPLTKPGTLFNWGPDQQKAYQEIKQALLTAPALGLPDLTKPFELFVDEKQGYAKGVLTQKLGPWRRPVAYLSKKLDPVAAGWPPCLRMVAAIAVLTKDAGKLTMGQPLVILAPHAVEALVKQPPDRWLSNARMTHYQALLLDTDRVQFGPVVALNPATLLPLPEEGLQHNCLDILAEAHGTRPDLTDQPLPDADHTWYTDGSSLLQEGQRKAGAAVTTETEVIWAKALPAGTSAQRAELIALTQALKMAEGKKLNVYTDSRYAFATAHIHGEIYRRRGWLTSEGKEIKNKDEILALLKALFLPKRLSIIHCPGHQKGHSAEARGNRMADQAARKAAITETPDTSTLLSGGSSGGSSGSETPGTSESATPESSGGSSGGSSMASNFTQFVLVDNGGTGDVTVAPSNFANGIAEWISSNSRSQAYKVTCSVRQSSAQNRKYTIKVEVPKGAWRSYLNMELTIPIFATNSDCELIVKAMQGLLKDGNPIPSAIAANSGIYKRTADGSEFESPKKKAKVE

SEQ ID NO: 16216 - protein, 2388 aa, synthetic construct
MPAAKRVKLDGGDKKYSIGLDIGTNSVGWAVITDEYKVPSKKFKVLGNTDRHSIKKNLIGALLFDSGETAEATRLKRTARRRYTRRKNRICYLQEIFSNEMAKVDDSFFHRLEESFLVEEDKKHERHPIFGNIVDEVAYHEKYPTIYHLRKKLVDSTDKADLRLIYLALAHMIKFRGHFLIEGDLNPDNSDVDKLFIQLVQTYNQLFEENPINASGVDAKAILSARLSKSRRLENLIAQLPGEKKNGLFGNLIALSLGLTPNFKSNFDLAEDAKLQLSKDTYDDDLDNLLAQIGDQYADLFLAAKNLSDAILLSDILRVNTEITKAPLSASMIKRYDEHHQDLTLLKALVRQQLPEKYKEIFFDQSKNGYAGYIDGGASQEEFYKFIKPILEKMDGTEELLVKLNREDLLRKQRTFDNGSIPHQIHLGELHAILRRQEDFYPFLKDNREKIEKILTFRIPYYVGPLARGNSRFAWMTRKSEETITPWNFEEVVDKGASAQSFIERMTNFDKNLPNEKVLPKHSLLYEYFTVYNELTKVKYVTEGMRKPAFLSGEQKKAIVDLLFKTNRKVTVKQLKEDYFKKIECFDSVEISGVEDRFNASLGTYHDLLKIIKDKDFLDNEENEDILEDIVLTLTLFEDREMIEERLKTYAHLFDDKVMKQLKRRRYTGWGRLSRKLINGIRDKQSGKTILDFLKSDGFANRNFMQLIHDDSLTFKEDIQKAQVSGQGDSLHEHIANLAGSPAIKKGILQTVKVVDELVKVMGRHKPENIVIEMARENQTTQKGQKNSRERMKRIEEGIKELGSQILKEHPVENTQLQNEKLYLYYLQNGRDMYVDQELDINRLSDYDVDHIVPQSFLKDDSIDNKVLTRSDKARGKSDNVPSEEVVKKMKNYWRQLLNAKLITQRKFDNLTKAERGGLSELDKAGFIKRQLVETRQITKHVAQILDSRMNTKYDENDKLIREVKVITLKSKLVSDFRKDFQFYKVREINNYHHAHDAYLNAVVGTALIKKYPKLESEFVYGDYKVYDVRKMIAKSEQEIGKATAKYFFYSNIMNFFKTEITLANGEIRKRPLIETNGETGEIVWDKGRDFATVRKVLSMPQVNIVKKTEVQTGGFSKESILPKRNSDKLIARKKDWDPKKYGGFDSPTVAYSVLVVAKVEKGKSKKLKSVKELLGITIMERSSFEKNPIDFLEAKGYKEVKKDLIIKLPKYSLFELENGRKRMLASAGELQKGNELALPSKYVNFLYLASHYEKLKGSPEDNEQKQLFVEQHKHYLDEIIEQISEFSKRVILADANLDKVLSAYNKHRDKPIREQAENIIHLFTLTNLGAPAAFKYFDTTIDRKRYTSTKEVLDATLIHQSITGLYETRIDLSQLGGDAEAAAKEAAAKEAAAKEAAAKALEAEAAAKEAAAKEAAAKEAAAKATLNIEDEHRLHETSKEPDVSLGSTWLSDFPQAWAETGGMGLAVRQAPLIIPLKATSTPVSIKQYPMSQEARLGIKPHIQRLLDQGILVPCQSPWNTPLLPVKKPGTNDYRPVQDLREVNKRVEDIHPTVPNPYNLLSGLPPSHQWYTVLDLKDAFFCLRLHPTSQPLFAFEWRDPEMGISGQLTWTRLPQGFKNSPTLFNEALHRDLADFRIQHPDLILLQYVDDLLLAATSELDCQQGTRALLQTLGNLGYRASAKKAQICQKQVKYLGYLLKEGQRWLTEARKETVMGQPTPKTPRQLREFLGKAGFCRLFIPGFAEMAAPLYPLTKPGTLFNWGPDQQKAYQEIKQALLTAPALGLPDLTKPFELFVDEKQGYAKGVLTQKLGPWRRPVAYLSKKLDPVAAGWPPCLRMVAAIAVLTKDAGKLTMGQPLVILAPHAVEALVKQPPDRWLSNARMTHYQALLLDTDRVQFGPVVALNPATLLPLPEEGLQHNCLDILAEAHGTRPDLTDQPLPDADHTWYTDGSSLLQEGQRKAGAAVTTETEVIWAKALPAGTSAQRAELIALTQALKMAEGKKLNVYTDSRYAFATAHIHGEIYRRRGWLTSEGKEIKNKDEILALLKALFLPKRLSIIHCPGHQKGHSAEARGNRMADQAARKAAITETPDTSTLLSGGSSGGSSGSETPGTSESATPESSGGSSGGSSMASNFTQFVLVDNGGTGDVTVAPSNFANGIAEWISSNSRSQAYKVTCSVRQSSAQNRKYTIKVEVPKGAWRSYLNMELTIPIFATNSDCELIVKAMQGLLKDGNPIPSAIAANSGIYGGSGGSMASNFTQFVLVDNGGTGDVTVAPSNFANGIAEWISSNSRSQAYKVTCSVRQSSAQNRKYTIKVEVPKGAWRSYLNMELTIPIFATNSDCELIVKAMQGLLKDGNPIPSAIAANSGIYKRTADGSEFESPKKKAKVE

SEQ ID NO: 16217 - protein, 2644 aa, synthetic construct
MPAAKRVKLDGGDKKYSIGLDIGTNSVGWAVITDEYKVPSKKFKVLGNTDRHSIKKNLIGALLFDSGETAEATRLKRTARRRYTRRKNRICYLQEIFSNEMAKVDDSFFHRLEESFLVEEDKKHERHPIFGNIVDEVAYHEKYPTIYHLRKKLVDSTDKADLRLIYLALAHMIKFRGHFLIEGDLNPDNSDVDKLFIQLVQTYNQLFEENPINASGVDAKAILSARLSKSRRLENLIAQLPGEKKNGLFGNLIALSLGLTPNFKSNFDLAEDAKLQLSKDTYDDDLDNLLAQIGDQYADLFLAAKNLSDAILLSDILRVNTEITKAPLSASMIKRYDEHHQDLTLLKALVRQQLPEKYKEIFFDQSKNGYAGYIDGGASQEEFYKFIKPILEKMDGTEELLVKLNREDLLRKQRTFDNGSIPHQIHLGELHAILRRQEDFYPFLKDNREKIEKILTFRIPYYVGPLARGNSRFAWMTRKSEETITPWNFEEVVDKGASAQSFIERMTNFDKNLPNEKVLPKHSLLYEYFTVYNELTKVKYVTEGMRKPAFLSGEQKKAIVDLLFKTNRKVTVKQLKEDYFKKIECFDSVEISGVEDRFNASLGTYHDLLKIIKDKDFLDNEENEDILEDIVLTLTLFEDREMIEERLKTYAHLFDDKVMKQLKRRRYTGWGRLSRKLINGIRDKQSGKTILDFLKSDGFANRNFMQLIHDDSLTFKEDIQKAQVSGQGDSLHEHIANLAGSPAIKKGILQTVKVVDELVKVMGRHKPENIVIEMARENQTTQKGQKNSRERMKRIEEGIKELGSQILKEHPVENTQLQNEKLYLYYLQNGRDMYVDQELDINRLSDYDVDHIVPQSFLKDDSIDNKVLTRSDKARGKSDNVPSEEVVKKMKNYWRQLLNAKLITQRKFDNLTKAERGGLSELDKAGFIKRQLVETRQITKHVAQILDSRMNTKYDENDKLIREVKVITLKSKLVSDFRKDFQFYKVREINNYHHAHDAYLNAVVGTALIKKYPKLESEFVYGDYKVYDVRKMIAKSEQEIGKATAKYFFYSNIMNFFKTEITLANGEIRKRPLIETNGETGEIVWDKGRDFATVRKVLSMPQVNIVKKTEVQTGGFSKESILPKRNSDKLIARKKDWDPKKYGGFDSPTVAYSVLVVAKVEKGKSKKLKSVKELLGITIMERSSFEKNPIDFLEAKGYKEVKKDLIIKLPKYSLFELENGRKRMLASAGELQKGNELALPSKYVNFLYLASHYEKLKGSPEDNEQKQLFVEQHKHYLDEIIEQISEFSKRVILADANLDKVLSAYNKHRDKPIREQAENIIHLFTLTNLGAPAAFKYFDTTIDRKRYTSTKEVLDATLIHQSITGLYETRIDLSQLGGDAEAAAKEAAAKEAAAKEAAAKALEAEAAAKEAAAKEAAAKEAAAKATLNIEDEHRLHETSKEPDVSLGSTWLSDFPQAWAETGGMGLAVRQAPLIIPLKATSTPVSIKQYPMSQEARLGIKPHIQRLLDQGILVPCQSPWNTPLLPVKKPGTNDYRPVQDLREVNKRVEDIHPTVPNPYNLLSGLPPSHQWYTVLDLKDAFFCLRLHPTSQPLFAFEWRDPEMGISGQLTWTRLPQGFKNSPTLFNEALHRDLADFRIQHPDLILLQYVDDLLLAATSELDCQQGTRALLQTLGNLGYRASAKKAQICQKQVKYLGYLLKEGQRWLTEARKETVMGQPTPKTPRQLREFLGKAGFCRLFIPGFAEMAAPLYPLTKPGTLFNWGPDQQKAYQEIKQALLTAPALGLPDLTKPFELFVDEKQGYAKGVLTQKLGPWRRPVAYLSKKLDPVAAGWPPCLRMVAAIAVLTKDAGKLTMGQPLVILAPHAVEALVKQPPDRWLSNARMTHYQALLLDTDRVQFGPVVALNPATLLPLPEEGLQHNCLDILAEAHGTRPDLTDQPLPDADHTWYTDGSSLLQEGQRKAGAAVTTETEVIWAKALPAGTSAQRAELIALTQALKMAEGKKLNVYTDSRYAFATAHIHGEIYRRRGWLTSEGKEIKNKDEILALLKALFLPKRLSIIHCPGHQKGHSAEARGNRMADQAARKAAITETPDTSTLLSGGSSGGSSGSETPGTSESATPESSGGSSGGSSMASNFTQFVLVDNGGTGDVTVAPSNFANGIAEWISSNSRSQAYKVTCSVRQSSAQNRKYTIKVEVPKGAWRSYLNMELTIPIFATNSDCELIVKAMQGLLKDGNPIPSAIAANSGIYGGSGGSMASNFTQFVLVDNGGTGDVTVAPSNFANGIAEWISSNSRSQAYKVTCSVRQSSAQNRKYTIKVEVPKGAWRSYLNMELTIPIFATNSDCELIVKAMQGLLKDGNPIPSAIAANSGIYGGGSGGGSGGGSGGGSMASNFTQFVLVDNGGTGDVTVAPSNFANGIAEWISSNSRSQAYKVTCSVRQSSAQNRKYTIKVEVPKGAWRSYLNMELTIPIFATNSDCELIVKAMQGLLKDGNPIPSAIAANSGIYGGSGGSMASNFTQFVLVDNGGTGDVTVAPSNFANGIAEWISSNSRSQAYKVTCSVRQSSAQNRKYTIKVEVPKGAWRSYLNMELTIPIFATNSDCELIVKAMQGLLKDGNPIPSAIAANSGIYKRTADGSEFESPKKKAKVE

SEQ ID NO: 16218 - protein, 2250 aa, synthetic construct
MPAAKRVKLDGGDKKYSIGLDIGTNSVGWAVITDEYKVPSKKFKVLGNTDRHSIKKNLIGALLFDSGETAEATRLKRTARRRYTRRKNRICYLQEIFSNEMAKVDDSFFHRLEESFLVEEDKKHERHPIFGNIVDEVAYHEKYPTIYHLRKKLVDSTDKADLRLIYLALAHMIKFRGHFLIEGDLNPDNSDVDKLFIQLVQTYNQLFEENPINASGVDAKAILSARLSKSRRLENLIAQLPGEKKNGLFGNLIALSLGLTPNFKSNFDLAEDAKLQLSKDTYDDDLDNLLAQIGDQYADLFLAAKNLSDAILLSDILRVNTEITKAPLSASMIKRYDEHHQDLTLLKALVRQQLPEKYKEIFFDQSKNGYAGYIDGGASQEEFYKFIKPILEKMDGTEELLVKLNREDLLRKQRTFDNGSIPHQIHLGELHAILRRQEDFYPFLKDNREKIEKILTFRIPYYVGPLARGNSRFAWMTRKSEETITPWNFEEVVDKGASAQSFIERMTNFDKNLPNEKVLPKHSLLYEYFTVYNELTKVKYVTEGMRKPAFLSGEQKKAIVDLLFKTNRKVTVKQLKEDYFKKIECFDSVEISGVEDRFNASLGTYHDLLKIIKDKDFLDNEENEDILEDIVLTLTLFEDREMIEERLKTYAHLFDDKVMKQLKRRRYTGWGRLSRKLINGIRDKQSGKTILDFLKSDGFANRNFMQLIHDDSLTFKEDIQKAQVSGQGDSLHEHIANLAGSPAIKKGILQTVKVVDELVKVMGRHKPENIVIEMARENQTTQKGQKNSRERMKRIEEGIKELGSQILKEHPVENTQLQNEKLYLYYLQNGRDMYVDQELDINRLSDYDVDHIVPQSFLKDDSIDNKVLTRSDKARGKSDNVPSEEVVKKMKNYWRQLLNAKLITQRKFDNLTKAERGGLSELDKAGFIKRQLVETRQITKHVAQILDSRMNTKYDENDKLIREVKVITLKSKLVSDFRKDFQFYKVREINNYHHAHDAYLNAVVGTALIKKYPKLESEFVYGDYKVYDVRKMIAKSEQEIGKATAKYFFYSNIMNFFKTEITLANGEIRKRPLIETNGETGEIVWDKGRDFATVRKVLSMPQVNIVKKTEVQTGGFSKESILPKRNSDKLIARKKDWDPKKYGGFDSPTVAYSVLVVAKVEKGKSKKLKSVKELLGITIMERSSFEKNPIDFLEAKGYKEVKKDLIIKLPKYSLFELENGRKRMLASAGELQKGNELALPSKYVNFLYLASHYEKLKGSPEDNEQKQLFVEQHKHYLDEIIEQISEFSKRVILADANLDKVLSAYNKHRDKPIREQAENIIHLFTLTNLGAPAAFKYFDTTIDRKRYTSTKEVLDATLIHQSITGLYETRIDLSQLGGDAEAAAKEAAAKEAAAKEAAAKALEAEAAAKEAAAKEAAAKEAAAKATLNIEDEHRLHETSKEPDVSLGSTWLSDFPQAWAETGGMGLAVRQAPLIIPLKATSTPVSIKQYPMSQEARLGIKPHIQRLLDQGILVPCQSPWNTPLLPVKKPGTNDYRPVQDLREVNKRVEDIHPTVPNPYNLLSGLPPSHQWYTVLDLKDAFFCLRLHPTSQPLFAFEWRDPEMGISGQLTWTRLPQGFKNSPTLFNEALHRDLADFRIQHPDLILLQYVDDLLLAATSELDCQQGTRALLQTLGNLGYRASAKKAQICQKQVKYLGYLLKEGQRWLTEARKETVMGQPTPKTPRQLREFLGKAGFCRLFIPGFAEMAAPLYPLTKPGTLFNWGPDQQKAYQEIKQALLTAPALGLPDLTKPFELFVDEKQGYAKGVLTQKLGPWRRPVAYLSKKLDPVAAGWPPCLRMVAAIAVLTKDAGKLTMGQPLVILAPHAVEALVKQPPDRWLSNARMTHYQALLLDTDRVQFGPVVALNPATLLPLPEEGLQHNCLDILAEAHGTRPDLTDQPLPDADHTWYTDGSSLLQEGQRKAGAAVTTETEVIWAKALPAGTSAQRAELIALTQALKMAEGKKLNVYTDSRYAFATAHIHGEIYRRRGWLTSEGKEIKNKDEILALLKALFLPKRLSIIHCPGHQKGHSAEARGNRMADQAARKAAITETPDTSTLLGSSGSSGSSGSSGSSGSSMASNFTQFVLVDNGGTGDVTVAPSNFANGIAEWISSNSRSQAYKVTCSVRQSSAQNRKYTIKVEVPKGAWRSYLNMELTIPIFATNSDCELIVKAMQGLLKDGNPIPSAIAANSGIYKRTADGSEFESPKKKAKVE

SEQ ID NO: 16219 - protein, 2373 aa, synthetic construct
MPAAKRVKLDGGDKKYSIGLDIGTNSVGWAVITDEYKVPSKKFKVLGNTDRHSIKKNLIGALLFDSGETAEATRLKRTARRRYTRRKNRICYLQEIFSNEMAKVDDSFFHRLEESFLVEEDKKHERHPIFGNIVDEVAYHEKYPTIYHLRKKLVDSTDKADLRLIYLALAHMIKFRGHFLIEGDLNPDNSDVDKLFIQLVQTYNQLFEENPINASGVDAKAILSARLSKSRRLENLIAQLPGEKKNGLFGNLIALSLGLTPNFKSNFDLAEDAKLQLSKDTYDDDLDNLLAQIGDQYADLFLAAKNLSDAILLSDILRVNTEITKAPLSASMIKRYDEHHQDLTLLKALVRQQLPEKYKEIFFDQSKNGYAGYIDGGASQEEFYKFIKPILEKMDGTEELLVKLNREDLLRKQRTFDNGSIPHQIHLGELHAILRRQEDFYPFLKDNREKIEKILTFRIPYYVGPLARGNSRFAWMTRKSEETITPWNFEEVVDKGASAQSFIERMTNFDKNLPNEKVLPKHSLLYEYFTVYNELTKVKYVTEGMRKPAFLSGEQKKAIVDLLFKTNRKVTVKQLKEDYFKKIECFDSVEISGVEDRFNASLGTYHDLLKIIKDKDFLDNEENEDILEDIVLTLTLFEDREMIEERLKTYAHLFDDKVMKQLKRRRYTGWGRLSRKLINGIRDKQSGKTILDFLKSDGFANRNFMQLIHDDSLTFKEDIQKAQVSGQGDSLHEHIANLAGSPAIKKGILQTVKVVDELVKVMGRHKPENIVIEMARENQTTQKGQKNSRERMKRIEEGIKELGSQILKEHPVENTQLQNEKLYLYYLQNGRDMYVDQELDINRLSDYDVDHIVPQSFLKDDSIDNKVLTRSDKARGKSDNVPSEEVVKKMKNYWRQLLNAKLITQRKFDNLTKAERGGLSELDKAGFIKRQLVETRQITKHVAQILDSRMNTKYDENDKLIREVKVITLKSKLVSDFRKDFQFYKVREINNYHHAHDAYLNAVVGTALIKKYPKLESEFVYGDYKVYDVRKMIAKSEQEIGKATAKYFFYSNIMNFFKTEITLANGEIRKRPLIETNGETGEIVWDKGRDFATVRKVLSMPQVNIVKKTEVQTGGFSKESILPKRNSDKLIARKKDWDPKKYGGFDSPTVAYSVLVVAKVEKGKSKKLKSVKELLGITIMERSSFEKNPIDFLEAKGYKEVKKDLIIKLPKYSLFELENGRKRMLASAGELQKGNELALPSKYVNFLYLASHYEKLKGSPEDNEQKQLFVEQHKHYLDEIIEQISEFSKRVILADANLDKVLSAYNKHRDKPIREQAENIIHLFTLTNLGAPAAFKYFDTTIDRKRYTSTKEVLDATLIHQSITGLYETRIDLSQLGGDAEAAAKEAAAKEAAAKEAAAKALEAEAAAKEAAAKEAAAKEAAAKATLNIEDEHRLHETSKEPDVSLGSTWLSDFPQAWAETGGMGLAVRQAPLIIPLKATSTPVSIKQYPMSQEARLGIKPHIQRLLDQGILVPCQSPWNTPLLPVKKPGTNDYRPVQDLREVNKRVEDIHPTVPNPYNLLSGLPPSHQWYTVLDLKDAFFCLRLHPTSQPLFAFEWRDPEMGISGQLTWTRLPQGFKNSPTLFNEALHRDLADFRIQHPDLILLQYVDDLLLAATSELDCQQGTRALLQTLGNLGYRASAKKAQICQKQVKYLGYLLKEGQRWLTEARKETVMGQPTPKTPRQLREFLGKAGFCRLFIPGFAEMAAPLYPLTKPGTLFNWGPDQQKAYQEIKQALLTAPALGLPDLTKPFELFVDEKQGYAKGVLTQKLGPWRRPVAYLSKKLDPVAAGWPPCLRMVAAIAVLTKDAGKLTMGQPLVILAPHAVEALVKQPPDRWLSNARMTHYQALLLDTDRVQFGPVVALNPATLLPLPEEGLQHNCLDILAEAHGTRPDLTDQPLPDADHTWYTDGSSLLQEGQRKAGAAVTTETEVIWAKALPAGTSAQRAELIALTQALKMAEGKKLNVYTDSRYAFATAHIHGEIYRRRGWLTSEGKEIKNKDEILALLKALFLPKRLSIIHCPGHQKGHSAEARGNRMADQAARKAAITETPDTSTLLGSSGSSGSSGSSGSSGSSMASNFTQFVLVDNGGTGDVTVAPSNFANGIAEWISSNSRSQAYKVTCSVRQSSAQNRKYTIKVEVPKGAWRSYLNMELTIPIFATNSDCELIVKAMQGLLKDGNPIPSAIAANSGIYGGSGGSMASNFTQFVLVDNGGTGDVTVAPSNFANGIAEWISSNSRSQAYKVTCSVRQSSAQNRKYTIKVEVPKGAWRSYLNMELTIPIFATNSDCELIVKAMQGLLKDGNPIPSAIAANSGIYKRTADGSEFESPKKKAKVE

SEQ ID NO: 16220 - protein, 2629 aa, synthetic construct
MPAAKRVKLDGGDKKYSIGLDIGTNSVGWAVITDEYKVPSKKFKVLGNTDRHSIKKNLIGALLFDSGETAEATRLKRTARRRYTRRKNRICYLQEIFSNEMAKVDDSFFHRLEESFLVEEDKKHERHPIFGNIVDEVAYHEKYPTIYHLRKKLVDSTDKADLRLIYLALAHMIKFRGHFLIEGDLNPDNSDVDKLFIQLVQTYNQLFEENPINASGVDAKAILSARLSKSRRLENLIAQLPGEKKNGLFGNLIALSLGLTPNFKSNFDLAEDAKLQLSKDTYDDDLDNLLAQIGDQYADLFLAAKNLSDAILLSDILRVNTEITKAPLSASMIKRYDEHHQDLTLLKALVRQQLPEKYKEIFFDQSKNGYAGYIDGGASQEEFYKFIKPILEKMDGTEELLVKLNREDLLRKQRTFDNGSIPHQIHLGELHAILRRQEDFYPFLKDNREKIEKILTFRIPYYVGPLARGNSRFAWMTRKSEETITPWNFEEVVDKGASAQSFIERMTNFDKNLPNEKVLPKHSLLYEYFTVYNELTKVKYVTEGMRKPAFLSGEQKKAIVDLLFKTNRKVTVKQLKEDYFKKIECFDSVEISGVEDRFNASLGTYHDLLKIIKDKDFLDNEENEDILEDIVLTLTLFEDREMIEERLKTYAHLFDDKVMKQLKRRRYTGWGRLSRKLINGIRDKQSGKTILDFLKSDGFANRNFMQLIHDDSLTFKEDIQKAQVSGQGDSLHEHIANLAGSPAIKKGILQTVKVVDELVKVMGRHKPENIVIEMARENQTTQKGQKNSRERMKRIEEGIKELGSQILKEHPVENTQLQNEKLYLYYLQNGRDMYVDQELDINRLSDYDVDHIVPQSFLKDDSIDNKVLTRSDKARGKSDNVPSEEVVKKMKNYWRQLLNAKLITQRKFDNLTKAERGGLSELDKAGFIKRQLVETRQITKHVAQILDSRMNTKYDENDKLIREVKVITLKSKLVSDFRKDFQFYKVREINNYHHAHDAYLNAVVGTALIKKYPKLESEFVYGDYKVYDVRKMIAKSEQEIGKATAKYFFYSNIMNFFKTEITLANGEIRKRPLIETNGETGEIVWDKGRDFATVRKVLSMPQVNIVKKTEVQTGGFSKESILPKRNSDKLIARKKDWDPKKYGGFDSPTVAYSVLVVAKVEKGKSKKLKSVKELLGITIMERSSFEKNPIDFLEAKGYKEVKKDLIIKLPKYSLFELENGRKRMLASAGELQKGNELALPSKYVNFLYLASHYEKLKGSPEDNEQKQLFVEQHKHYLDEIIEQISEFSKRVILADANLDKVLSAYNKHRDKPIREQAENIIHLFTLTNLGAPAAFKYFDTTIDRKRYTSTKEVLDATLIHQSITGLYETRIDLSQLGGDAEAAAKEAAAKEAAAKEAAAKALEAEAAAKEAAAKEAAAKEAAAKATLNIEDEHRLHETSKEPDVSLGSTWLSDFPQAWAETGGMGLAVRQAPLIIPLKATSTPVSIKQYPMSQEARLGIKPHIQRLLDQGILVPCQSPWNTPLLPVKKPGTNDYRPVQDLREVNKRVEDIHPTVPNPYNLLSGLPPSHQWYTVLDLKDAFFCLRLHPTSQPLFAFEWRDPEMGISGQLTWTRLPQGFKNSPTLFNEALHRDLADFRIQHPDLILLQYVDDLLLAATSELDCQQGTRALLQTLGNLGYRASAKKAQICQKQVKYLGYLLKEGQRWLTEARKETVMGQPTPKTPRQLREFLGKAGFCRLFIPGFAEMAAPLYPLTKPGTLFNWGPDQQKAYQEIKQALLTAPALGLPDLTKPFELFVDEKQGYAKGVLTQKLGPWRRPVAYLSKKLDPVAAGWPPCLRMVAAIAVLTKDAGKLTMGQPLVILAPHAVEALVKQPPDRWLSNARMTHYQALLLDTDRVQFGPVVALNPATLLPLPEEGLQHNCLDILAEAHGTRPDLTDQPLPDADHTWYTDGSSLLQEGQRKAGAAVTTETEVIWAKALPAGTSAQRAELIALTQALKMAEGKKLNVYTDSRYAFATAHIHGEIYRRRGWLTSEGKEIKNKDEILALLKALFLPKRLSIIHCPGHQKGHSAEARGNRMADQAARKAAITETPDTSTLLGSSGSSGSSGSSGSSGSSMASNFTQFVLVDNGGTGDVTVAPSNFANGIAEWISSNSRSQAYKVTCSVRQSSAQNRKYTIKVEVPKGAWRSYLNMELTIPIFATNSDCELIVKAMQGLLKDGNPIPSAIAANSGIYGGSGGSMASNFTQFVLVDNGGTGDVTVAPSNFANGIAEWISSNSRSQAYKVTCSVRQSSAQNRKYTIKVEVPKGAWRSYLNMELTIPIFATNSDCELIVKAMQGLLKDGNPIPSAIAANSGIYGGGSGGGSGGGSGGGSMASNFTQFVLVDNGGTGDVTVAPSNFANGIAEWISSNSRSQAYKVTCSVRQSSAQNRKYTIKVEVPKGAWRSYLNMELTIPIFATNSDCELIVKAMQGLLKDGNPIPSAIAANSGIYGGSGGSMASNFTQFVLVDNGGTGDVTVAPSNFANGIAEWISSNSRSQAYKVTCSVRQSSAQNRKYTIKVEVPKGAWRSYLNMELTIPIFATNSDCELIVKAMQGLLKDGNPIPSAIAANSGIYKRTADGSEFESPKKKAKVE

SEQ ID NO: 16221 - protein, 2243 aa, synthetic construct
MPAAKRVKLDGGDKKYSIGLDIGTNSVGWAVITDEYKVPSKKFKVLGNTDRHSIKKNLIGALLFDSGETAEATRLKRTARRRYTRRKNRICYLQEIFSNEMAKVDDSFFHRLEESFLVEEDKKHERHPIFGNIVDEVAYHEKYPTIYHLRKKLVDSTDKADLRLIYLALAHMIKFRGHFLIEGDLNPDNSDVDKLFIQLVQTYNQLFEENPINASGVDAKAILSARLSKSRRLENLIAQLPGEKKNGLFGNLIALSLGLTPNFKSNFDLAEDAKLQLSKDTYDDDLDNLLAQIGDQYADLFLAAKNLSDAILLSDILRVNTEITKAPLSASMIKRYDEHHQDLTLLKALVRQQLPEKYKEIFFDQSKNGYAGYIDGGASQEEFYKFIKPILEKMDGTEELLVKLNREDLLRKQRTFDNGSIPHQIHLGELHAILRRQEDFYPFLKDNREKIEKILTFRIPYYVGPLARGNSRFAWMTRKSEETITPWNFEEVVDKGASAQSFIERMTNFDKNLPNEKVLPKHSLLYEYFTVYNELTKVKYVTEGMRKPAFLSGEQKKAIVDLLFKTNRKVTVKQLKEDYFKKIECFDSVEISGVEDRFNASLGTYHDLLKIIKDKDFLDNEENEDILEDIVLTLTLFEDREMIEERLKTYAHLFDDKVMKQLKRRRYTGWGRLSRKLINGIRDKQSGKTILDFLKSDGFANRNFMQLIHDDSLTFKEDIQKAQVSGQGDSLHEHIANLAGSPAIKKGILQTVKVVDELVKVMGRHKPENIVIEMARENQTTQKGQKNSRERMKRIEEGIKELGSQILKEHPVENTQLQNEKLYLYYLQNGRDMYVDQELDINRLSDYDVDHIVPQSFLKDDSIDNKVLTRSDKARGKSDNVPSEEVVKKMKNYWRQLLNAKLITQRKFDNLTKAERGGLSELDKAGFIKRQLVETRQITKHVAQILDSRMNTKYDENDKLIREVKVITLKSKLVSDFRKDFQFYKVREINNYHHAHDAYLNAVVGTALIKKYPKLESEFVYGDYKVYDVRKMIAKSEQEIGKATAKYFFYSNIMNFFKTEITLANGEIRKRPLIETNGETGEIVWDKGRDFATVRKVLSMPQVNIVKKTEVQTGGFSKESILPKRNSDKLIARKKDWDPKKYGGFDSPTVAYSVLVVAKVEKGKSKKLKSVKELLGITIMERSSFEKNPIDFLEAKGYKEVKKDLIIKLPKYSLFELENGRKRMLASAGELQKGNELALPSKYVNFLYLASHYEKLKGSPEDNEQKQLFVEQHKHYLDEIIEQISEFSKRVILADANLDKVLSAYNKHRDKPIREQAENIIHLFTLTNLGAPAAFKYFDTTIDRKRYTSTKEVLDATLIHQSITGLYETRIDLSQLGGDAEAAAKEAAAKEAAAKEAAAKALEAEAAAKEAAAKEAAAKEAAAKATLNIEDEHRLHETSKEPDVSLGSTWLSDFPQAWAETGGMGLAVRQAPLIIPLKATSTPVSIKQYPMSQEARLGIKPHIQRLLDQGILVPCQSPWNTPLLPVKKPGTNDYRPVQDLREVNKRVEDIHPTVPNPYNLLSGLPPSHQWYTVLDLKDAFFCLRLHPTSQPLFAFEWRDPEMGISGQLTWTRLPQGFKNSPTLFNEALHRDLADFRIQHPDLILLQYVDDLLLAATSELDCQQGTRALLQTLGNLGYRASAKKAQICQKQVKYLGYLLKEGQRWLTEARKETVMGQPTPKTPRQLREFLGKAGFCRLFIPGFAEMAAPLYPLTKPGTLFNWGPDQQKAYQEIKQALLTAPALGLPDLTKPFELFVDEKQGYAKGVLTQKLGPWRRPVAYLSKKLDPVAAGWPPCLRMVAAIAVLTKDAGKLTMGQPLVILAPHAVEALVKQPPDRWLSNARMTHYQALLLDTDRVQFGPVVALNPATLLPLPEEGLQHNCLDILAEAHGTRPDLTDQPLPDADHTWYTDGSSLLQEGQRKAGAAVTTETEVIWAKALPAGTSAQRAELIALTQALKMAEGKKLNVYTDSRYAFATAHIHGEIYRRRGWLTSEGKEIKNKDEILALLKALFLPKRLSIIHCPGHQKGHSAEARGNRMADQAARKAAITETPDTSTLLGSSGGGEAAAKMASNFTQFVLVDNGGTGDVTVAPSNFANGIAEWISSNSRSQAYKVTCSVRQSSAQNRKYTIKVEVPKGAWRSYLNMELTIPIFATNSDCELIVKAMQGLLKDGNPIPSAIAANSGIYKRTADGSEFESPKKKAKVE

SEQ ID NO: 16222 - protein, 2366 aa, synthetic construct
MPAAKRVKLDGGDKKYSIGLDIGTNSVGWAVITDEYKVPSKKFKVLGNTDRHSIKKNLIGALLFDSGETAEATRLKRTARRRYTRRKNRICYLQEIFSNEMAKVDDSFFHRLEESFLVEEDKKHERHPIFGNIVDEVAYHEKYPTIYHLRKKLVDSTDKADLRLIYLALAHMIKFRGHFLIEGDLNPDNSDVDKLFIQLVQTYNQLFEENPINASGVDAKAILSARLSKSRRLENLIAQLPGEKKNGLFGNLIALSLGLTPNFKSNFDLAEDAKLQLSKDTYDDDLDNLLAQIGDQYADLFLAAKNLSDAILLSDILRVNTEITKAPLSASMIKRYDEHHQDLTLLKALVRQQLPEKYKEIFFDQSKNGYAGYIDGGASQEEFYKFIKPILEKMDGTEELLVKLNREDLLRKQRTFDNGSIPHQIHLGELHAILRRQEDFYPFLKDNREKIEKILTFRIPYYVGPLARGNSRFAWMTRKSEETITPWNFEEVVDKGASAQSFIERMTNFDKNLPNEKVLPKHSLLYEYFTVYNELTKVKYVTEGMRKPAFLSGEQKKAIVDLLFKTNRKVTVKQLKEDYFKKIECFDSVEISGVEDRFNASLGTYHDLLKIIKDKDFLDNEENEDILEDIVLTLTLFEDREMIEERLKTYAHLFDDKVMKQLKRRRYTGWGRLSRKLINGIRDKQSGKTILDFLKSDGFANRNFMQLIHDDSLTFKEDIQKAQVSGQGDSLHEHIANLAGSPAIKKGILQTVKVVDELVKVMGRHKPENIVIEMARENQTTQKGQKNSRERMKRIEEGIKELGSQILKEHPVENTQLQNEKLYLYYLQNGRDMYVDQELDINRLSDYDVDHIVPQSFLKDDSIDNKVLTRSDKARGKSDNVPSEEVVKKMKNYWRQLLNAKLITQRKFDNLTKAERGGLSELDKAGFIKRQLVETRQITKHVAQILDSRMNTKYDENDKLIREVKVITLKSKLVSDFRKDFQFYKVREINNYHHAHDAYLNAVVGTALIKKYPKLESEFVYGDYKVYDVRKMIAKSEQEIGKATAKYFFYSNIMNFFKTEITLANGEIRKRPLIETNGETGEIVWDKGRDFATVRKVLSMPQVNIVKKTEVQTGGFSKESILPKRNSDKLIARKKDWDPKKYGGFDSPTVAYSVLVVAKVEKGKSKKLKSVKELLGITIMERSSFEKNPIDFLEAKGYKEVKKDLIIKLPKYSLFELENGRKRMLASAGELQKGNELALPSKYVNFLYLASHYEKLKGSPEDNEQKQLFVEQHKHYLDEIIEQISEFSKRVILADANLDKVLSAYNKHRDKPIREQAENIIHLFTLTNLGAPAAFKYFDTTIDRKRYTSTKEVLDATLIHQSITGLYETRIDLSQLGGDAEAAAKEAAAKEAAAKEAAAKALEAEAAAKEAAAKEAAAKEAAAKATLNIEDEHRLHETSKEPDVSLGSTWLSDFPQAWAETGGMGLAVRQAPLIIPLKATSTPVSIKQYPMSQEARLGIKPHIQRLLDQGILVPCQSPWNTPLLPVKKPGTNDYRPVQDLREVNKRVEDIHPTVPNPYNLLSGLPPSHQWYTVLDLKDAFFCLRLHPTSQPLFAFEWRDPEMGISGQLTWTRLPQGFKNSPTLFNEALHRDLADFRIQHPDLILLQYVDDLLLAATSELDCQQGTRALLQTLGNLGYRASAKKAQICQKQVKYLGYLLKEGQRWLTEARKETVMGQPTPKTPRQLREFLGKAGFCRLFIPGFAEMAAPLYPLTKPGTLFNWGPDQQKAYQEIKQALLTAPALGLPDLTKPFELFVDEKQGYAKGVLTQKLGPWRRPVAYLSKKLDPVAAGWPPCLRMVAAIAVLTKDAGKLTMGQPLVILAPHAVEALVKQPPDRWLSNARMTHYQALLLDTDRVQFGPVVALNPATLLPLPEEGLQHNCLDILAEAHGTRPDLTDQPLPDADHTWYTDGSSLLQEGQRKAGAAVTTETEVIWAKALPAGTSAQRAELIALTQALKMAEGKKLNVYTDSRYAFATAHIHGEIYRRRGWLTSEGKEIKNKDEILALLKALFLPKRLSIIHCPGHQKGHSAEARGNRMADQAARKAAITETPDTSTLLGSSGGGEAAAKMASNFTQFVLVDNGGTGDVTVAPSNFANGIAEWISSNSRSQAYKVTCSVRQSSAQNRKYTIKVEVPKGAWRSYLNMELTIPIFATNSDCELIVKAMQGLLKDGNPIPSAIAANSGIYGGSGGSMASNFTQFVLVDNGGTGDVTVAPSNFANGIAEWISSNSRSQAYKVTCSVRQSSAQNRKYTIKVEVPKGAWRSYLNMELTIPIFATNSDCELIVKAMQGLLKDGNPIPSAIAANSGIYKRTADGSEFESPKKKAKVE

SEQ ID NO: 16223 - protein, 2622 aa, synthetic construct
MPAAKRVKLDGGDKKYSIGLDIGTNSVGWAVITDEYKVPSKKFKVLGNTDRHSIKKNLIGALLFDSGETAEATRLKRTARRRYTRRKNRICYLQEIFSNEMAKVDDSFFHRLEESFLVEEDKKHERHPIFGNIVDEVAYHEKYPTIYHLRKKLVDSTDKADLRLIYLALAHMIKFRGHFLIEGDLNPDNSDVDKLFIQLVQTYNQLFEENPINASGVDAKAILSARLSKSRRLENLIAQLPGEKKNGLFGNLIALSLGLTPNFKSNFDLAEDAKLQLSKDTYDDDLDNLLAQIGDQYADLFLAAKNLSDAILLSDILRVNTEITKAPLSASMIKRYDEHHQDLTLLKALVRQQLPEKYKEIFFDQSKNGYAGYIDGGASQEEFYKFIKPILEKMDGTEELLVKLNREDLLRKQRTFDNGSIPHQIHLGELHAILRRQEDFYPFLKDNREKIEKILTFRIPYYVGPLARGNSRFAWMTRKSEETITPWNFEEVVDKGASAQSFIERMTNFDKNLPNEKVLPKHSLLYEYFTVYNELTKVKYVTEGMRKPAFLSGEQKKAIVDLLFKTNRKVTVKQLKEDYFKKIECFDSVEISGVEDRFNASLGTYHDLLKIIKDKDFLDNEENEDILEDIVLTLTLFEDREMIEERLKTYAHLFDDKVMKQLKRRRYTGWGRLSRKLINGIRDKQSGKTILDFLKSDGFANRNFMQLIHDDSLTFKEDIQKAQVSGQGDSLHEHIANLAGSPAIKKGILQTVKVVDELVKVMGRHKPENIVIEMARENQTTQKGQKNSRERMKRIEEGIKELGSQILKEHPVENTQLQNEKLYLYYLQNGRDMYVDQELDINRLSDYDVDHIVPQSFLKDDSIDNKVLTRSDKARGKSDNVPSEEVVKKMKNYWRQLLNAKLITQRKFDNLTKAERGGLSELDKAGFIKRQLVETRQITKHVAQILDSRMNTKYDENDKLIREVKVITLKSKLVSDFRKDFQFYKVREINNYHHAHDAYLNAVVGTALIKKYPKLESEFVYGDYKVYDVRKMIAKSEQEIGKATAKYFFYSNIMNFFKTEITLANGEIRKRPLIETNGETGEIVWDKGRDFATVRKVLSMPQVNIVKKTEVQTGGFSKESILPKRNSDKLIARKKDWDPKKYGGFDSPTVAYSVLVVAKVEKGKSKKLKSVKELLGITIMERSSFEKNPIDFLEAKGYKEVKKDLIIKLPKYSLFELENGRKRMLASAGELQKGNELALPSKYVNFLYLASHYEKLKGSPEDNEQKQLFVEQHKHYLDEIIEQISEFSKRVILADANLDKVLSAYNKHRDKPIREQAENIIHLFTLTNLGAPAAFKYFDTTIDRKRYTSTKEVLDATLIHQSITGLYETRIDLSQLGGDAEAAAKEAAAKEAAAKEAAAKALEAEAAAKEAAAKEAAAKEAAAKATLNIEDEHRLHETSKEPDVSLGSTWLSDFPQAWAETGGMGLAVRQAPLIIPLKATSTPVSIKQYPMSQEARLGIKPHIQRLLDQGILVPCQSPWNTPLLPVKKPGTNDYRPVQDLREVNKRVEDIHPTVPNPYNLLSGLPPSHQWYTVLDLKDAFFCLRLHPTSQPLFAFEWRDPEMGISGQLTWTRLPQGFKNSPTLFNEALHRDLADFRIQHPDLILLQYVDDLLLAATSELDCQQGTRALLQTLGNLGYRASAKKAQICQKQVKYLGYLLKEGQRWLTEARKETVMGQPTPKTPRQLREFLGKAGFCRLFIPGFAEMAAPLYPLTKPGTLFNWGPDQQKAYQEIKQALLTAPALGLPDLTKPFELFVDEKQGYAKGVLTQKLGPWRRPVAYLSKKLDPVAAGWPPCLRMVAAIAVLTKDAGKLTMGQPLVILAPHAVEALVKQPPDRWLSNARMTHYQALLLDTDRVQFGPVVALNPATLLPLPEEGLQHNCLDILAEAHGTRPDLTDQPLPDADHTWYTDGSSLLQEGQRKAGAAVTTETEVIWAKALPAGTSAQRAELIALTQALKMAEGKKLNVYTDSRYAFATAHIHGEIYRRRGWLTSEGKEIKNKDEILALLKALFLPKRLSIIHCPGHQKGHSAEARGNRMADQAARKAAITETPDTSTLLGSSGGGEAAAKMASNFTQFVLVDNGGTGDVTVAPSNFANGIAEWISSNSRSQAYKVTCSVRQSSAQNRKYTIKVEVPKGAWRSYLNMELTIPIFATNSDCELIVKAMQGLLKDGNPIPSAIAANSGIYGGSGGSMASNFTQFVLVDNGGTGDVTVAPSNFANGIAEWISSNSRSQAYKVTCSVRQSSAQNRKYTIKVEVPKGAWRSYLNMELTIPIFATNSDCELIVKAMQGLLKDGNPIPSAIAANSGIYGGGSGGGSGGGSGGGSMASNFTQFVLVDNGGTGDVTVAPSNFANGIAEWISSNSRSQAYKVTCSVRQSSAQNRKYTIKVEVPKGAWRSYLNMELTIPIFATNSDCELIVKAMQGLLKDGNPIPSAIAANSGIYGGSGGSMASNFTQFVLVDNGGTGDVTVAPSNFANGIAEWISSNSRSQAYKVTCSVRQSSAQNRKYTIKVEVPKGAWRSYLNMELTIPIFATNSDCELIVKAMQGLLKDGNPIPSAIAANSGIYKRTADGSEFESPKKKAKVE

SEQ ID NO: 16224-16700 - skipped (477 entries)

SEQ ID NO: 16701 - DNA, 96 bp, synthetic construct
  source 1..96: mol_type = other DNA
gccgaagcactgcacgccgtgttttagagctagaaatagcaagttaaaataaggctagtccgttatcaacttgaaaaagtggcaccgagtcggtgc

SEQ ID NO: 16702 - DNA, 20 bp, synthetic construct
  source 1..20: mol_type = other DNA
actaacatacaactaacata

SEQ ID NO: 16703-16705 - skipped (3 entries)

SEQ ID NO: 16706 - protein, 673 aa, synthetic construct
TAPLEEEYRLFLEAPIQNVTLLEQWKREIPKVWAEINPPGLASTQAPIHVQLLSTALPVRVRQYPITLEAKRSLRETIRKFRAAGILRPVHSPWNTPLLPVRKSGTSEYRMVQDLREVNKRVETIHPTVPNPYTLLSLLPPDRIWYSVLDLKDAFFCIPLAPESQLIFAFEWADAEEGESGQLTWTRLPQGFKNSPTLFNEALNRDLQGFRLDHPSVSLLQYVDDLLIAADTQAACLSATRDLLMTLAELGYRVSGKKAQLCQEEVTYLGFKIHKGSRSLSNSRTQAILQIPVPKTKRQVREFLGKIGYCRLFIPGFAELAQPLYAATRPGNDPLVWGEKEEEAFQSLKLALTQPPALALPSLDKPFQLFVEETSGAAKGVLTQALGPWKRPVAYLSKRLDPVAAGWPRCLRAIAAAALLTREASKLTFGQDIEITSSHNLESLLRSPPDKWLTNARITQYQVLLLDPPRVRFKQTAALNPATLLPETDDTLPIHHCLDTLDSLTSTRPDLTDQPLAQAEATLFTDGSSYIRDGKRYAGAAVVTLDSVIWAEPLPIGTSAQKAELIALTKALEWSKDKSVNIYTDSRYAFATLHVHGMIYRERGWLTAGGKAIKNAPEILALLTAVWLPKRVAVMHCKGHQKDDAPTSTGNRRADEVAREVAIRPLSTQATIS

SEQ ID NO: 16707 - protein, 671 aa, synthetic construct
TLNIEDEHRLHETSKEPDVSLGSTWLSDFPQAWAETGGMGLAVRQAPLIIPLKATSTPVSIKQYPMSQEARLGIKPHIQRLLDQGILVPCQSPWNTPLLPVKKPGTNDYRPVQDLREVNKRVEDIHPTVPNPYNLLSGLPPSHQWYTVLDLKDAFFCLRLHPTSQPLFAFEWRDPEMGISGQLTWTRLPQGFKNSPTLFNEALHRDLADFRIQHPDLILLQYVDDLLLAATSELDCQQGTRALLQTLGNLGYRASAKKAQICQKQVKYLGYLLKEGQRWLTEARKETVMGQPTPKTPRQLREFLGKAGFCRLFIPGFAEMAAPLYPLTKPGTLFNWGPDQQKAYQEIKQALLTAPALGLPDLTKPFELFVDEKQGYAKGVLTQKLGPWRRPVAYLSKKLDPVAAGWPPCLRMVAAIAVLTKDAGKLTMGQPLVILAPHAVEALVKQPPDRWLSNARMTHYQALLLDTDRVQFGPVVALNPATLLPLPEEGLQHNCLDILAEAHGTRPDLTDQPLPDADHTWYTDGSSLLQEGQRKAGAAVTTETEVIWAKALPAGTSAQRAELIALTQALKMAEGKKLNVYTDSRYAFATAHIHGEIYRRRGWLTSEGKEIKNKDEILALLKALFLPKRLSIIHCPGHQKGHSAEARGNRMADQAARKAAITETPDTSTLL

SEQ ID NO: 16708 - DNA, 96 bp, synthetic construct; identical to SEQ ID NO: 16701
  source 1..96: mol_type = other DNA

SEQ ID NO: 16709-16713 - skipped (5 entries)

SEQ ID NO: 16714 - DNA, 96 bp, synthetic construct; identical to SEQ ID NO: 16701
  source 1..96: mol_type = other DNA

SEQ ID NO: 16715-17000 - skipped (286 entries)

SEQ ID NO: 17001 - protein, 2280 aa, synthetic construct
MPAAKRVKLDGGTAPLEEEYRLFLEAPIQNVTLLEQWKREIPKVWAEINPPGLASTQAPIHVQLLSTALPVRVRQYPITLEAKRSLRETIRKFRAAGILRPVHSPWNTPLLPVRKSGTSEYRMVQDLREVNKRVETIHPTVPNPYTLLSLLPPDRIWYSVLDLKDAFFCIPLAPESQLIFAFEWADAEEGESGQLTWTRLPQGFKNSPTLFNEALNRDLQGFRLDHPSVSLLQYVDDLLIAADTQAACLSATRDLLMTLAELGYRVSGKKAQLCQEEVTYLGFKIHKGSRSLSNSRTQAILQIPVPKTKRQVREFLGKIGYCRLFIPGFAELAQPLYAATRPGNDPLVWGEKEEEAFQSLKLALTQPPALALPSLDKPFQLFVEETSGAAKGVLTQALGPWKRPVAYLSKRLDPVAAGWPRCLRAIAAAALLTREASKLTFGQDIEITSSHNLESLLRSPPDKWLTNARITQYQVLLLDPPRVRFKQTAALNPATLLPETDDTLPIHHCLDTLDSLTSTRPDLTDQPLAQAEATLFTDGSSYIRDGKRYAGAAVVTLDSVIWAEPLPIGTSAQKAELIALTKALEWSKDKSVNIYTDSRYAFATLHVHGMIYRERGWLTAGGKAIKNAPEILALLTAVWLPKRVAVMHCKGHQKDDAPTSTGNRRADEVAREVAIRPLSTQATISAEAAAKEAAAKEAAAKEAAAKALEAEAAAKEAAAKEAAAKEAAAKADKKYSIGLDIGTNSVGWAVITDEYKVPSKKFKVLGNTDRHSIKKNLIGALLFDSGETAEATRLKRTARRRYTRRKNRICYLQEIFSNEMAKVDDSFFHRLEESFLVEEDKKHERHPIFGNIVDEVAYHEKYPTIYHLRKKLVDSTDKADLRLIYLALAHMIKFRGHFLIEGDLNPDNSDVDKLFIQLVQTYNQLFEENPINASGVDAKAILSARLSKSRRLENLIAQLPGEKKNGLFGNLIALSLGLTPNFKSNFDLAEDAKLQLSKDTYDDDLDNLLAQIGDQYADLFLAAKNLSDAILLSDILRVNTEITKAPLSASMIKRYDEHHQDLTLLKALVRQQLPEKYKEIFFDQSKNGYAGYIDGGASQEEFYKFIKPILEKMDGTEELLVKLNREDLLRKQRTFDNGSIPHQIHLGELHAILRRQEDFYPFLKDNREKIEKILTFRIPYYVGPLARGNSRFAWMTRKSEETITPWNFEEVVDKGASAQSFIERMTNFDKNLPNEKVLPKHSLLYEYFTVYNELTKVKYVTEGMRKPAFLSGEQKKAIVDLLFKTNRKVTVKQLKEDYFKKIECFDSVEISGVEDRFNASLGTYHDLLKIIKDKDFLDNEENEDILEDIVLTLTLFEDREMIEERLKTYAHLFDDKVMKQLKRRRYTGWGRLSRKLINGIRDKQSGKTILDFLKSDGFANRNFMQLIHDDSLTFKEDIQKAQVSGQGDSLHEHIANLAGSPAIKKGILQTVKVVDELVKVMGRHKPENIVIEMARENQTTQKGQKNSRERMKRIEEGIKELGSQILKEHPVENTQLQNEKLYLYYLQNGRDMYVDQELDINRLSDYDVDHIVPQSFLKDDSIDNKVLTRSDKARGKSDNVPSEEVVKKMKNYWRQLLNAKLITQRKFDNLTKAERGGLSELDKAGFIKRQLVETRQITKHVAQILDSRMNTKYDENDKLIREVKVITLKSKLVSDFRKDFQFYKVREINNYHHAHDAYLNAVVGTALIKKYPKLESEFVYGDYKVYDVRKMIAKSEQEIGKATAKYFFYSNIMNFFKTEITLANGEIRKRPLIETNGETGEIVWDKGRDFATVRKVLSMPQVNIVKKTEVQTGGFSKESILPKRNSDKLIARKKDWDPKKYGGFDSPTVAYSVLVVAKVEKGKSKKLKSVKELLGITIMERSSFEKNPIDFLEAKGYKEVKKDLIIKLPKYSLFELENGRKRMLASAGELQKGNELALPSKYVNFLYLASHYEKLKGSPEDNEQKQLFVEQHKHYLDEIIEQISEFSKRVILADANLDKVLSAYNKHRDKPIREQAENIIHLFTLTNLGAPAAFKYFDTTIDRKRYTSTKEVLDATLIHQSITGLYETRIDLSQLGGDAEAAAKEAAAKEAAAKEAAAKALEAEAAAKEAAAKEAAAKEAAAKAMASNFTQFVLVDNGGTGDVTVAPSNFANGIAEWISSNSRSQAYKVTCSVRQSSAQNRKYTIKVEVPKGAWRSYLNMELTIPIFATNSDCELIVKAMQGLLKDGNPIPSAIAANSGIYKRTADGSEFESPKKKAKVE

SEQ ID NO: 17002 - protein, 2403 aa, synthetic construct
MPAAKRVKLDGGTAPLEEEYRLFLEAPIQNVTLLEQWKREIPKVWAEINPPGLASTQAPIHVQLLSTALPVRVRQYPITLEAKRSLRETIRKFRAAGILRPVHSPWNTPLLPVRKSGTSEYRMVQDLREVNKRVETIHPTVPNPYTLLSLLPPDRIWYSVLDLKDAFFCIPLAPESQLIFAFEWADAEEGESGQLTWTRLPQGFKNSPTLFNEALNRDLQGFRLDHPSVSLLQYVDDLLIAADTQAACLSATRDLLMTLAELGYRVSGKKAQLCQEEVTYLGFKIHKGSRSLSNSRTQAILQIPVPKTKRQVREFLGKIGYCRLFIPGFAELAQPLYAATRPGNDPLVWGEKEEEAFQSLKLALTQPPALALPSLDKPFQLFVEETSGAAKGVLTQALGPWKRPVAYLSKRLDPVAAGWPRCLRAIAAAALLTREASKLTFGQDIEITSSHNLESLLRSPPDKWLTNARITQYQVLLLDPPRVRFKQTAALNPATLLPETDDTLPIHHCLDTLDSLTSTRPDLTDQPLAQAEATLFTDGSSYIRDGKRYAGAAVVTLDSVIWAEPLPIGTSAQKAELIALTKALEWSKDKSVNIYTDSRYAFATLHVHGMIYRERGWLTAGGKAIKNAPEILALLTAVWLPKRVAVMHCKGHQKDDAPTSTGNRRADEVAREVAIRPLSTQATISAEAAAKEAAAKEAAAKEAAAKALEAEAAAKEAAAKEAAAKEAAAKADKKYSIGLDIGTNSVGWAVITDEYKVPSKKFKVLGNTDRHSIKKNLIGALLFDSGETAEATRLKRTARRRYTRRKNRICYLQEIFSNEMAKVDDSFFHRLEESFLVEEDKKHERHPIFGNIVDEVAYHEKYPTIYHLRKKLVDSTDKADLRLIYLALAHMIKFRGHFLIEGDLNPDNSDVDKLFIQLVQTYNQLFEENPINASGVDAKAILSARLSKSRRLENLIAQLPGEKKNGLFGNLIALSLGLTPNFKSNFDLAEDAKLQLSKDTYDDDLDNLLAQIGDQYADLFLAAKNLSDAILLSDILRVNTEITKAPLSASMIKRYDEHHQDLTLLKALVRQQLPEKYKEIFFDQSKNGYAGYIDGGASQEEFYKFIKPILEKMDGTEELLVKLNREDLLRKQRTFDNGSIPHQIHLGELHAILRRQEDFYPFLKDNREKIEKILTFRIPYYVGPLARGNSRFAWMTRKSEETITPWNFEEVVDKGASAQSFIERMTNFDKNLPNEKVLPKHSLLYEYFTVYNELTKVKYVTEGMRKPAFLSGEQKKAIVDLLFKTNRKVTVKQLKEDYFKKIECFDSVEISGVEDRFNASLGTYHDLLKIIKDKDFLDNEENEDILEDIVLTLTLFEDREMIEERLKTYAHLFDDKVMKQLKRRRYTGWGRLSRKLINGIRDKQSGKTILDFLKSDGFANRNFMQLIHDDSLTFKEDIQKAQVSGQGDSLHEHIANLAGSPAIKKGILQTVKVVDELVKVMGRHKPENIVIEMARENQTTQKGQKNSRERMKRIEEGIKELGSQILKEHPVENTQLQNEKLYLYYLQNGRDMYVDQELDINRLSDYDVDHIVPQSFLKDDSIDNKVLTRSDKARGKSDNVPSEEVVKKMKNYWRQLLNAKLITQRKFDNLTKAERGGLSELDKAGFIKRQLVETRQITKHVAQILDSRMNTKYDENDKLIREVKVITLKSKLVSDFRKDFQFYKVREINNYHHAHDAYLNAVVGTALIKKYPKLESEFVYGDYKVYDVRKMIAKSEQEIGKATAKYFFYSNIMNFFKTEITLANGEIRKRPLIETNGETGEIVWDKGRDFATVRKVLSMPQVNIVKKTEVQTGGFSKESILPKRNSDKLIARKKDWDPKKYGGFDSPTVAYSVLVVAKVEKGKSKKLKSVKELLGITIMERSSFEKNPIDFLEAKGYKEVKKDLIIKLPKYSLFELENGRKRMLASAGELQKGNELALPSKYVNFLYLASHYEKLKGSPEDNEQKQLFVEQHKHYLDEIIEQISEFSKRVILADANLDKVLSAYNKHRDKPIREQAENIIHLFTLTNLGAPAAFKYFDTTIDRKRYTSTKEVLDATLIHQSITGLYETRIDLSQLGGDAEAAAKEAAAKEAAAKEAAAKALEAEAAAKEAAAKEAAAKEAAAKAMASNFTQFVLVDNGGTGDVTVAPSNFANGIAEWISSNSRSQAYKVTCSVRQSSAQNRKYTIKVEVPKGAWRSYLNMELTIPIFATNSDCELIVKAMQGLLKDGNPIPSAIAANSGIYGGSGGSMASNFTQFVLVDNGGTGDVTVAPSNFANGIAEWISSNSRSQAYKVTCSVRQSSAQNRKYTIKVEVPKGAWRSYLNMELTIPIFATNSDCELIVKAMQGLLKDGNPIPSAIAANSGIYKRTADGSEFESPKKKAKVE

SEQ ID NO: 17003 - protein, 2395 aa, synthetic construct
MPAAKRVKLDGGTAPLEEEYRLFLEAPIQNVTLLEQWKREIPKVWAEINPPGLASTQAPIHVQLLSTALPVRVRQYPITLEAKRSLRETIRKFRAAGILRPVHSPWNTPLLPVRKSGTSEYRMVQDLREVNKRVETIHPTVPNPYTLLSLLPPDRIWYSVLDLKDAFFCIPLAPESQLIFAFEWADAEEGESGQLTWTRLPQGFKNSPTLFNEALNRDLQGFRLDHPSVSLLQYVDDLLIAADTQAACLSATRDLLMTLAELGYRVSGKKAQLCQEEVTYLGFKIHKGSRSLSNSRTQAILQIPVPKTKRQVREFLGKIGYCRLFIPGFAELAQPLYAATRPGNDPLVWGEKEEEAFQSLKLALTQPPALALPSLDKPFQLFVEETSGAAKGVLTQALGPWKRPVAYLSKRLDPVAAGWPRCLRAIAAAALLTREASKLTFGQDIEITSSHNLESLLRSPPDKWLTNARITQYQVLLLDPPRVRFKQTAALNPATLLPETDDTLPIHHCLDTLDSLTSTRPDLTDQPLAQAEATLFTDGSSYIRDGKRYAGAAVVTLDSVIWAEPLPIGTSAQKAELIALTKALEWSKDKSVNIYTDSRYAFATLHVHGMIYRERGWLTAGGKAIKNAPEILALLTAVWLPKRVAVMHCKGHQKDDAPTSTGNRRADEVAREVAIRPLSTQATISAEAAAKEAAAKEAAAKEAAAKALEAEAAAKEAAAKEAAAKEAAAKADKKYSIGLDIGTNSVGWAVITDEYKVPSKKFKVLGNTDRHSIKKNLIGALLFDSGETAEATRLKRTARRRYTRRKNRICYLQEIFSNEMAKVDDSFFHRLEESFLVEEDKKHERHPIFGNIVDEVAYHEKYPTIYHLRKKLVDSTDKADLRLIYLALAHMIKFRGHFLIEGDLNPDNSDVDKLFIQLVQTYNQLFEENPINASGVDAKAILSARLSKSRRLENLIAQLPGEKKNGLFGNLIALSLGLTPNFKSNFDLAEDAKLQLSKDTYDDDLDNLLAQIGDQYADLFLAAKNLSDAILLSDILRVNTEITKAPLSASMIKRYDEHHQDLTLLKALVRQQLPEKYKEIFFDQSKNGYAGYIDGGASQEEFYKFIKPILEKMDGTEELLVKLNREDLLRKQRTFDNGSIPHQIHLGELHAILRRQEDFYPFLKDNREKIEKILTFRIPYYVGPLARGNSRFAWMTRKSEETITPWNFEEVVDKGASAQSFIERMTNFDKNLPNEKVLPKHSLLYEYFTVYNELTKVKYVTEGMRKPAFLSGEQKKAIVDLLFKTNRKVTVKQLKEDYFKKIECFDSVEISGVEDRFNASLGTYHDLLKIIKDKDFLDNEENEDILEDIVLTLTLFEDREMIEERLKTYAHLFDDKVMKQLKRRRYTGWGRLSRKLINGIRDKQSGKTILDFLKSDGFANRNFMQLIHDDSLTFKEDIQKAQVSGQGDSLHEHIANLAGSPAIKKGILQTVKVVDELVKVMGRHKPENIVIEMARENQTTQKGQKNSRERMKRIEEGIKELGSQILKEHPVENTQLQNEKLYLYYLQNGRDMYVDQELDINRLSDYDVDHIVPQSFLKDDSIDNKVLTRSDKARGKSDNVPSEEVVKKMKNYWRQLLNAKLITQRKFDNLTKAERGGLSELDKAGFIKRQLVETRQITKHVAQILDSRMNTKYDENDKLIREVKVITLKSKLVSDFRKDFQFYKVREINNYHHAHDAYLNAVVGTALIKKYPKLESEFVYGDYKVYDVRKMIAKSEQEIGKATAKYFFYSNIMNFFKTEITLANGEIRKRPLIETNGETGEIVWDKGRDFATVRKVLSMPQVNIVKKTEVQTGGFSKESILPKRNSDKLIARKKDWDPKKYGGFDSPTVAYSVLVVAKVEKGKSKKLKSVKELLGITIMERSSFEKNPIDFLEAKGYKEVKKDLIIKLPKYSLFELENGRKRMLASAGELQKGNELALPSKYVNFLYLASHYEKLKGSPEDNEQKQLFVEQHKHYLDEIIEQISEFSKRVILADANLDKVLSAYNKHRDKPIREQAENIIHLFTLTNLGAPAAFKYFDTTIDRKRYTSTKEVLDATLIHQSITGLYETRIDLSQLGGDAEAAAKEAAAKEAAAKEAAAKALEAEAAAKEAAAKEAAAKEAAAKAMASNFTQFVLVDNGGTGDVTVAPSNFANGIAEWISSNSRSQAYKVTCSVRQSSAQNRKYTIKVEVPKGAWRSYLNMELTIPIFATNSDCELIVKAMQGLLKDGNPIPSAIAANSGIYANFTQFVLVDNGGTGDVTVAPSNFANGIAEWISSNSRSQAYKVTCSVRQSSAQNRKYTIKVEVPKGAWRSYLNMELTIPIFATNSDCELIVKAMQGLLKDGNPIPSAIAANSGIYKRTADGSEFESPKKKAKVE

SEQ ID NO: 17004 - protein, 2659 aa, synthetic construct
MPAAKRVKLDGGTAPLEEEYRLFLEAPIQNVTLLEQWKREIPKVWAEINPPGLASTQAPIHVQLLSTALPVRVRQYPITLEAKRSLRETIRKFRAAGILRPVHSPWNTPLLPVRKSGTSEYRMVQDLREVNKRVETIHPTVPNPYTLLSLLPPDRIWYSVLDLKDAFFCIPLAPESQLIFAFEWADAEEGESGQLTWTRLPQGFKNSPTLFNEALNRDLQGFRLDHPSVSLLQYVDDLLIAADTQAACLSATRDLLMTLAELGYRVSGKKAQLCQEEVTYLGFKIHKGSRSLSNSRTQAILQIPVPKTKRQVREFLGKIGYCRLFIPGFAELAQPLYAATRPGNDPLVWGEKEEEAFQSLKLALTQPPALALPSLDKPFQLFVEETSGAAKGVLTQALGPWKRPVAYLSKRLDPVAAGWPRCLRAIAAAALLTREASKLTFGQDIEITSSHNLESLLRSPPDKWLTNARITQYQVLLLDPPRVRFKQTAALNPATLLPETDDTLPIHHCLDTLDSLTSTRPDLTDQPLAQAEATLFTDGSSYIRDGKRYAGAAVVTLDSVIWAEPLPIGTSAQKAELIALTKALEWSKDKSVNIYTDSRYAFATLHVHGMIYRERGWLTAGGKAIKNAPEILALLTAVWLPKRVAVMHCKGHQKDDAPTSTGNRRADEVAREVAIRPLSTQATISAEAAAKEAAAKEAAAKEAAAKALEAEAAAKEAAAKEAAAKEAAAKADKKYSIGLDIGTNSVGWAVITDEYKVPSKKFKVLGNTDRHSIKKNLIGALLFDSGETAEATRLKRTARRRYTRRKNRICYLQEIFSNEMAKVDDSFFHRLEESFLVEEDKKHERHPIFGNIVDEVAYHEKYPTIYHLRKKLVDSTDKADLRLIYLALAHMIKFRGHFLIEGDLNPDNSDVDKLFIQLVQTYNQLFEENPINASGVDAKAILSARLSKSRRLENLIAQLPGEKKNGLFGNLIALSLGLTPNFKSNFDLAEDAKLQLSKDTYDDDLDNLLAQIGDQYADLFLAAKNLSDAILLSDILRVNTEITKAPLSASMIKRYDEHHQDLTLLKALVRQQLPEKYKEIFFDQSKNGYAGYIDGGASQEEFYKFIKPILEKMDGTEELLVKLNREDLLRKQRTFDNGSIPHQIHLGELHAILRRQEDFYPFLKDNREKIEKILTFRIPYYVGPLARGNSRFAWMTRKSEETITPWNFEEVVDKGASAQSFIERMTNFDKNLPNEKVLPKHSLLYEYFTVYNELTKVKYVTEGMRKPAFLSGEQKKAIVDLLFKTNRKVTVKQLKEDYFKKIECFDSVEISGVEDRFNASLGTYHDLLKIIKDKDFLDNEENEDILEDIVLTLTLFEDREMIEERLKTYAHLFDDKVMKQLKRRRYTGWGRLSRKLINGIRDKQSGKTILDFLKSDGFANRNFMQLIHDDSLTFKEDIQKAQVSGQGDSLHEHIANLAGSPAIKKGILQTVKVVDELVKVMGRHKPENIVIEMARENQTTQKGQKNSRERMKRIEEGIKELGSQILKEHPVENTQLQNEKLYLYYLQNGRDMYVDQELDINRLSDYDVDHIVPQSFLKDDSIDNKVLTRSDKARGKSDNVPSEEVVKKMKNYWRQLLNAKLITQRKFDNLTKAERGGLSELDKAGFIKRQLVETRQITKHVAQILDSRMNTKYDENDKLIREVKVITLKSKLVSDFRKDFQFYKVREINNYHHAHDAYLNAVVGTALIKKYPKLESEFVYGDYKVYDVRKMIAKSEQEIGKATAKYFFYSNIMNFFKTEITLANGEIRKRPLIETNGETGEIVWDKGRDFATVRKVLSMPQVNIVKKTEVQTGGFSKESILPKRNSDKLIARKKDWDPKKYGGFDSPTVAYSVLVVAKVEKGKSKKLKSVKELLGITIMERSSFEKNPIDFLEAKGYKEVKKDLIIKLPKYSLFELENGRKRMLASAGELQKGNELALPSKYVNFLYLASHYEKLKGSPEDNEQKQLFVEQHKHYLDEIIEQISEFSKRVILADANLDKVLSAYNKHRDKPIREQAENIIHLFTLTNLGAPAAFKYFDTTIDRKRYTSTKEVLDATLIHQSITGLYETRIDLSQLGGDAEAAAKEAAAKEAAAKEAAAKALEAEAAAKEAAAKEAAAKEAAAKAMASNFTQFVLVDNGGTGDVTVAPSNFANGIAEWISSNSRSQAYKVTCSVRQSSAQNRKYTIKVEVPKGAWRSYLNMELTIPIFATNSDCELIVKAMQGLLKDGNPIPSAIAANSGIYGGSGGSMASNFTQFVLVDNGGTGDVTVAPSNFANGIAEWISSNSRSQAYKVTCSVRQSSAQNRKYTIKVEVPKGAWRSYLNMELTIPIFATNSDCELIVKAMQGLLKDGNPIPSAIAANSGIYGGGSGGGSGGGSGGGSMASNFTQFVLVDNGGTGDVTVAPSNFANGIAEWISSNSRSQAYKVTCSVRQSSAQNRKYTIKVEVPKGAWRSYLNMELTIPIFATNSDCELIVKAMQGLLKDGNPIPSAIAANSGIYGGSGGSMASNFTQFVLVDNGGTGDVTVAPSNFANGIAEWISSNSRSQAYKVTCSVRQSSAQNRKYTIKVEVPKGAWRSYLNMELTIPIFATNSDCELIVKAMQGLLKDGNPIPSAIAANSGIYKRTADGSEFESPKKKAKVE

SEQ ID NO: 17005 - protein, 2643 aa, synthetic construct
MPAAKRVKLDGGTAPLEEEYRLFLEAPIQNVTLLEQWKREIPKVWAEINPPGLASTQAPIHVQLLSTALPVRVRQYPITLEAKRSLRETIRKFRAAGILRPVHSPWNTPLLPVRKSGTSEYRMVQDLREVNKRVETIHPTVPNPYTLLSLLPPDRIWYSVLDLKDAFFCIPLAPESQLIFAFEWADAEEGESGQLTWTRLPQGFKNSPTLFNEALNRDLQGFRLDHPSVSLLQYVDDLLIAADTQAACLSATRDLLMTLAELGYRVSGKKAQLCQEEVTYLGFKIHKGSRSLSNSRTQAILQIPVPKTKRQVREFLGKIGYCRLFIPGFAELAQPLYAATRPGNDPLVWGEKEEEAFQSLKLALTQPPALALPSLDKPFQLFVEETSGAAKGVLTQALGPWKRPVAYLSKRLDPVAAGWPRCLRAIAAAALLTREASKLTFGQDIEITSSHNLESLLRSPPDKWLTNARITQYQVLLLDPPRVRFKQTAALNPATLLPETDDTLPIHHCLDTLDSLTSTRPDLTDQPLAQAEATLFTDGSSYIRDGKRYAGAAVVTLDSVIWAEPLPIGTSAQKAELIALTKALEWSKDKSVNIYTDSRYAFATLHVHGMIYRERGWLTAGGKAIKNAPEILALLTAVWLPKRVAVMHCKGHQKDDAPTSTGNRRADEVAREVAIRPLSTQATISAEAAAKEAAAKEAAAKEAAAKALEAEAAAKEAAAKEAAAKEAAAKADKKYSIGLDIGTNSVGWAVITDEYKVPSKKFKVLGNTDRHSIKKNLIGALLFDSGETAEATRLKRTARRRYTRRKNRICYLQEIFSNEMAKVDDSFFHRLEESFLVEEDKKHERHPIFGNIVDEVAYHEKYPTIYHLRKKLVDSTDKADLRLIYLALAHMIKFRGHFLIEGDLNPDNSDVDKLFIQLVQTYNQLFEENPINASGVDAKAILSARLSKSRRLENLIAQLPGEKKNGLFGNLIALSLGLTPNFKSNFDLAEDAKLQLSKDTYDDDLDNLLAQIGDQYADLFLAAKNLSDAILLSDILRVNTEITKAPLSASMIKRYDEHHQDLTLLKALVRQQLPEKYKEIFFDQSKNGYAGYIDGGASQEEFYKFIKPILEKMDGTEELLVKLNREDLLRKQRTFDNGSIPHQIHLGELHAILRRQEDFYPFLKDNREKIEKILTFRIPYYVGPLARGNSRFAWMTRKSEETITPWNFEEVVDKGASAQSFIERMTNFDKNLPNEKVLPKHSLLYEYFTVYNELTKVKYVTEGMRKPAFLSGEQKKAIVDLLFKTNRKVTVKQLKEDYFKKIECFDSVEISGVEDRFNASLGTYHDLLKIIKDKDFLDNEENEDILEDIVLTLTLFEDREMIEERLKTYAHLFDDKVMKQLKRRRYTGWGRLSRKLINGIRDKQSGKTILDFLKSDGFANRNFMQLIHDDSLTFKEDIQKAQVSGQGDSLHEHIANLAGSPAIKKGILQTVKVVDELVKVMGRHKPENIVIEMARENQTTQKGQKNSRERMKRIEEGIKELGSQILKEHPVENTQLQNEKLYLYYLQNGRDMYVDQELDINRLSDYDVDHIVPQSFLKDDSIDNKVLTRSDKARGKSDNVPSEEVVKKMKNYWRQLLNAKLITQRKFDNLTKAERGGLSELDKAGFIKRQLVETRQITKHVAQILDSRMNTKYDENDKLIREVKVITLKSKLVSDFRKDFQFYKVREINNYHHAHDAYLNAVVGTALIKKYPKLESEFVYGDYKVYDVRKMIAKSEQEIGKATAKYFFYSNIMNFFKTEITLANGEIRKRPLIETNGETGEIVWDKGRDFATVRKVLSMPQVNIVKKTEVQTGGFSKESILPKRNSDKLIARKKDWDPKKYGGFDSPTVAYSVLVVAKVEKGKSKKLKSVKELLGITIMERSSFEKNPIDFLEAKGYKEVKKDLIIKLPKYSLFELENGRKRMLASAGELQKGNELALPSKYVNFLYLASHYEKLKGSPEDNEQKQLFVEQHKHYLDEIIEQISEFSKRVILADANLDKVLSAYNKHRDKPIREQAENIIHLFTLTNLGAPAAFKYFDTTIDRKRYTSTKEVLDATLIHQSITGLYETRIDLSQLGGDAEAAAKEAAAKEAAAKEAAAKALEAEAAAKEAAAKEAAAKEAAAKAMASNFTQFVLVDNGGTGDVTVAPSNFANGIAEWISSNSRSQAYKVTCSVRQSSAQNRKYTIKVEVPKGAWRSYLNMELTIPIFATNSDCELIVKAMQGLLKDGNPIPSAIAANSGIYANFTQFVLVDNGGTGDVTVAPSNFANGIAEWISSNSRSQAYKVTCSVRQSSAQNRKYTIKVEVPKGAWRSYLNMELTIPIFATNSDCELIVKAMQGLLKDGNPIPSAIAANSGIYGGGSGGGSGGGSGGGSMASNFTQFVLVDNGGTGDVTVAPSNFANGIAEWISSNSRSQAYKVTCSVRQSSAQNRKYTIKVEVPKGAWRSYLNMELTIPIFATNSDCELIVKAMQGLLKDGNPIPSAIAANSGIYANFTQFVLVDNGGTGDVTVAPSNFANGIAEWISSNSRSQAYKVTCSVRQSSAQNRKYTIKVEVPKGAWRSYLNMELTIPIFATNSDCELIVKAMQGLLKDGNPIPSAIAANSGIYKRTADGSEFESPKKKAKVE

SEQ ID NO: 17006 - protein, 2280 aa, synthetic construct
MPAAKRVKLDGGMASNFTQFVLVDNGGTGDVTVAPSNFANGIAEWISSNSRSQAYKVTCSVRQSSAQNRKYTIKVEVPKGAWRSYLNMELTIPIFATNSDCELIVKAMQGLLKDGNPIPSAIAANSGIYAEAAAKEAAAKEAAAKEAAAKALEAEAAAKEAAAKEAAAKEAAAKATAPLEEEYRLFLEAPIQNVTLLEQWKREIPKVWAEINPPGLASTQAPIHVQLLSTALPVRVRQYPITLEAKRSLRETIRKFRAAGILRPVHSPWNTPLLPVRKSGTSEYRMVQDLREVNKRVETIHPTVPNPYTLLSLLPPDRIWYSVLDLKDAFFCIPLAPESQLIFAFEWADAEEGESGQLTWTRLPQGFKNSPTLFNEALNRDLQGFRLDHPSVSLLQYVDDLLIAADTQAACLSATRDLLMTLAELGYRVSGKKAQLCQEEVTYLGFKIHKGSRSLSNSRTQAILQIPVPKTKRQVREFLGKIGYCRLFIPGFAELAQPLYAATRPGNDPLVWGEKEEEAFQSLKLALTQPPALALPSLDKPFQLFVEETSGAAKGVLTQALGPWKRPVAYLSKRLDPVAAGWPRCLRAIAAAALLTREASKLTFGQDIEITSSHNLESLLRSPPDKWLTNARITQYQVLLLDPPRVRFKQTAALNPATLLPETDDTLPIHHCLDTLDSLTSTRPDLTDQPLAQAEATLFTDGSSYIRDGKRYAGAAVVTLDSVIWAEPLPIGTSAQKAELIALTKALEWSKDKSVNIYTDSRYAFATLHVHGMIYRERGWLTAGGKAIKNAPEILALLTAVWLPKRVAVMHCKGHQKDDAPTSTGNRRADEVAREVAIRPLSTQATISAEAAAKEAAAKEAAAKEAAAKALEAEAAAKEAAAKEAAAKEAAAKADKKYSIGLDIGTNSVGWAVITDEYKVPSKKFKVLGNTDRHSIKKNLIGALLFDSGETAEATRLKRTARRRYTRRKNRICYLQEIFSNEMAKVDDSFFHRLEESFLVEEDKKHERHPIFGNIVDEVAYHEKYPTIYHLRKKLVDSTDKADLRLIYLALAHMIKFRGHFLIEGDLNPDNSDVDKLFIQLVQTYNQLFEENPINASGVDAKAILSARLSKSRRLENLIAQLPGEKKNGLFGNLIALSLGLTPNFKSNFDLAEDAKLQLSKDTYDDDLDNLLAQIGDQYADLFLAAKNLSDAILLSDILRVNTEITKAPLSASMIKRYDEHHQDLTLLKALVRQQLPEKYKEIFFDQSKNGYAGYIDGGASQEEFYKFIKPILEKMDGTEELLVKLNREDLLRKQRTFDNGSIPHQIHLGELHAILRRQEDFYPFLKDNREKIEKILTFRIPYYVGPLARGNSRFAWMTRKSEETITPWNFEEVVDKGASAQSFIERMTNFDKNLPNEKVLPKHSLLYEYFTVYNELTKVKYVTEGMRKPAFLSGEQKKAIVDLLFKTNRKVTVKQLKEDYFKKIECFDSVEISGVEDRFNASLGTYHDLLKIIKDKDFLDNEENEDILEDIVLTLTLFEDREMIEERLKTYAHLFDDKVMKQLKRRRYTGWGRLSRKLINGIRDKQSGKTILDFLKSDGFANRNFMQLIHDDSLTFKEDIQKAQVSGQGDSLHEHIANLAGSPAIKKGILQTVKVVDELVKVMGRHKPENIVIEMARENQTTQKGQKNSRERMKRIEEGIKELGSQILKEHPVENTQLQNEKLYLYYLQNGRDMYVDQELDINRLSDYDVDHIVPQSFLKDDSIDNKVLTRSDKARGKSDNVPSEEVVKKMKNYWRQLLNAKLITQRKFDNLTKAERGGLSELDKAGFIKRQLVETRQITKHVAQILDSRMNTKYDENDKLIREVKVITLKSKLVSDFRKDFQFYKVREINNYHHAHDAYLNAVVGTALIKKYPKLESEFVYGDYKVYDVRKMIAKSEQEIGKATAKYFFYSNIMNFFKTEITLANGEIRKRPLIETNGETGEIVWDKGRDFATVRKVLSMPQVNIVKKTEVQTGGFSKESILPKRNSDKLIARKKDWDPKKYGGFDSPTVAYSVLVVAKVEKGKSKKLKSVKELLGITIMERSSFEKNPIDFLEAKGYKEVKKDLIIKLPKYSLFELENGRKRMLASAGELQKGNELALPSKYVNFLYLASHYEKLKGSPEDNEQKQLFVEQHKHYLDEIIEQISEFSKRVILADANLDKVLSAYNKHRDKPIREQAENIIHLFTLTNLGAPAAFKYFDTTIDRKRYTSTKEVLDATLIHQSITGLYETRIDLSQLGGDKRTADGSEFESPKKKAKVE

SEQ ID NO: 17007 - protein, 2403 aa, synthetic construct
MPAAKRVKLDGGMASNFTQFVLVDNGGTGDVTVAPSNFANGIAEWISSNSRSQAYKVTCSVRQSSAQNRKYTIKVEVPKGAWRSYLNMELTIPIFATNSDCELIVKAMQGLLKDGNPIPSAIAANSGIYGGSGGSMASNFTQFVLVDNGGTGDVTVAPSNFANGIAEWISSNSRSQAYKVTCSVRQSSAQNRKYTIKVEVPKGAWRSYLNMELTIPIFATNSDCELIVKAMQGLLKDGNPIPSAIAANSGIYAEAAAKEAAAKEAAAKEAAAKALEAEAAAKEAAAKEAAAKEAAAKATAPLEEEYRLFLEAPIQNVTLLEQWKREIPKVWAEINPPGLASTQAPIHVQLLSTALPVRVRQYPITLEAKRSLRETIRKFRAAGILRPVHSPWNTPLLPVRKSGTSEYRMVQDLREVNKRVETIHPTVPNPYTLLSLLPPDRIWYSVLDLKDAFFCIPLAPESQLIFAFEWADAEEGESGQLTWTRLPQGFKNSPTLFNEALNRDLQGFRLDHPSVSLLQYVDDLLIAADTQAACLSATRDLLMTLAELGYRVSGKKAQLCQEEVTYLGFKIHKGSRSLSNSRTQAILQIPVPKTKRQVREFLGKIGYCRLFIPGFAELAQPLYAATRPGNDPLVWGEKEEEAFQSLKLALTQPPALALPSLDKPFQLFVEETSGAAKGVLTQALGPWKRPVAYLSKRLDPVAAGWPRCLRAIAAAALLTREASKLTFGQDIEITSSHNLESLLRSPPDKWLTNARITQYQVLLLDPPRVRFKQTAALNPATLLPETDDTLPIHHCLDTLDSLTSTRPDLTDQPLAQAEATLFTDGSSYIRDGKRYAGAAVVTLDSVIWAEPLPIGTSAQKAELIALTKALEWSKDKSVNIYTDSRYAFATLHVHGMIYRERGWLTAGGKAIKNAPEILALLTAVWLPKRVAVMHCKGHQKDDAPTSTGNRRADEVAREVAIRPLSTQATISAEAAAKEAAAKEAAAKEAAAKALEAEAAAKEAAAKEAAAKEAAAKADKKYSIGLDIGTNSVGWAVITDEYKVPSKKFKVLGNTDRHSIKKNLIGALLFDSGETAEATRLKRTARRRYTRRKNRICYLQEIFSNEMAKVDDSFFHRLEESFLVEEDKKHERHPIFGNIVDEVAYHEKYPTIYHLRKKLVDSTDKADLRLIYLALAHMIKFRGHFLIEGDLNPDNSDVDKLFIQLVQTYNQLFEENPINASGVDAKAILSARLSKSRRLENLIAQLPGEKKNGLFGNLIALSLGLTPNFKSNFDLAEDAKLQLSKDTYDDDLDNLLAQIGDQYADLFLAAKNLSDAILLSDILRVNTEITKAPLSASMIKRYDEHHQDLTLLKALVRQQLPEKYKEIFFDQSKNGYAGYIDGGASQEEFYKFIKPILEKMDGTEELLVKLNREDLLRKQRTFDNGSIPHQIHLGELHAILRRQEDFYPFLKDNREKIEKILTFRIPYYVGPLARGNSRFAWMTRKSEETITPWNFEEVVDKGASAQSFIERMTNFDKNLPNEKVLPKHSLLYEYFTVYNELTKVKYVTEGMRKPAFLSGEQKKAIVDLLFKTNRKVTVKQLKEDYFKKIECFDSVEISGVEDRFNASLGTYHDLLKIIKDKDFLDNEENEDILEDIVLTLTLFEDREMIEERLKTYAHLFDDKVMKQLKRRRYTGWGRLSRKLINGIRDKQSGKTILDFLKSDGFANRNFMQLIHDDSLTFKEDIQKAQVSGQGDSLHEHIANLAGSPAIKKGILQTVKVVDELVKVMGRHKPENIVIEMARENQTTQKGQKNSRERMKRIEEGIKELGSQILKEHPVENTQLQNEKLYLYYLQNGRDMYVDQELDINRLSDYDVDHIVPQSFLKDDSIDNKVLTRSDKARGKSDNVPSEEVVKKMKNYWRQLLNAKLITQRKFDNLTKAERGGLSELDKAGFIKRQLVETRQITKHVAQILDSRMNTKYDENDKLIREVKVITLKSKLVSDFRKDFQFYKVREINNYHHAHDAYLNAVVGTALIKKYPKLESEFVYGDYKVYDVRKMIAKSEQEIGKATAKYFFYSNIMNFFKTEITLANGEIRKRPLIETNGETGEIVWDKGRDFATVRKVLSMPQVNIVKKTEVQTGGFSKESILPKRNSDKLIARKKDWDPKKYGGFDSPTVAYSVLVVAKVEKGKSKKLKSVKELLGITIMERSSFEKNPIDFLEAKGYKEVKKDLIIKLPKYSLFELENGRKRMLASAGELQKGNELALPSKYVNFLYLASHYEKLKGSPEDNEQKQLFVEQHKHYLDEIIEQISEFSKRVILADANLDKVLSAYNKHRDKPIREQAENIIHLFTLTNLGAPAAFKYFDTTIDRKRYTSTKEVLDATLIHQSITGLYETRIDLSQLGGDKRTADGSEFESPKKKAKVE

SEQ ID NO: 17008 - protein, 2395 aa, synthetic construct
MPAAKRVKLDGGMASNFTQFVLVDNGGTGDVTVAPSNFANGIAEWISSNSRSQAYKVTCSVRQSSAQNRKYTIKVEVPKGAWRSYLNMELTIPIFATNSDCELIVKAMQGLLKDGNPIPSAIAANSGIYANFTQFVLVDNGGTGDVTVAPSNFANGIAEWISSNSRSQAYKVTCSVRQSSAQNRKYTIKVEVPKGAWRSYLNMELTIPIFATNSDCELIVKAMQGLLKDGNPIPSAIAANSGIYAEAAAKEAAAKEAAAKEAAAKALEAEAAAKEAAAKEAAAKEAAAKATAPLEEEYRLFLEAPIQNVTLLEQWKREIPKVWAEINPPGLASTQAPIHVQLLSTALPVRVRQYPITLEAKRSLRETIRKFRAAGILRPVHSPWNTPLLPVRKSGTSEYRMVQDLREVNKRVETIHPTVPNPYTLLSLLPPDRIWYSVLDLKDAFFCIPLAPESQLIFAFEWADAEEGESGQLTWTRLPQGFKNSPTLFNEALNRDLQGFRLDHPSVSLLQYVDDLLIAADTQAACLSATRDLLMTLAELGYRVSGKKAQLCQEEVTYLGFKIHKGSRSLSNSRTQAILQIPVPKTKRQVREFLGKIGYCRLFIPGFAELAQPLYAATRPGNDPLVWGEKEEEAFQSLKLALTQPPALALPSLDKPFQLFVEETSGAAKGVLTQALGPWKRPVAYLSKRLDPVAAGWPRCLRAIAAAALLTREASKLTFGQDIEITSSHNLESLLRSPPDKWLTNARITQYQVLLLDPPRVRFKQTAALNPATLLPETDDTLPIHHCLDTLDSLTSTRPDLTDQPLAQAEATLFTDGSSYIRDGKRYAGAAVVTLDSVIWAEPLPIGTSAQKAELIALTKALEWSKDKSVNIYTDSRYAFATLHVHGMIYRERGWLTAGGKAIKNAPEILALLTAVWLPKRVAVMHCKGHQKDDAPTSTGNRRADEVAREVAIRPLSTQATISAEAAAKEAAAKEAAAKEAAAKALEAEAAAKEAAAKEAAAKEAAAKADKKYSIGLDIGTNSVGWAVITDEYKVPSKKFKVLGNTDRHSIKKNLIGALLFDSGETAEATRLKRTARRRYTRRKNRICYLQEIFSNEMAKVDDSFFHRLEESFLVEEDKKHERHPIFGNIVDEVAYHEKYPTIYHLRKKLVDSTDKADLRLIYLALAHMIKFRGHFLIEGDLNPDNSDVDKLFIQLVQTYNQLFEENPINASGVDAKAILSARLSKSRRLENLIAQLPGEKKNGLFGNLIALSLGLTPNFKSNFDLAEDAKLQLSKDTYDDDLDNLLAQIGDQYADLFLAAKNLSDAILLSDILRVNTEITKAPLSASMIKRYDEHHQDLTLLKALVRQQLPEKYKEIFFDQSKNGYAGYIDGGASQEEFYKFIKPILEKMDGTEELLVKLNREDLLRKQRTFDNGSIPHQIHLGELHAILRRQEDFYPFLKDNREKIEKILTFRIPYYVGPLARGNSRFAWMTRKSEETITPWNFEEVVDKGASAQSFIERMTNFDKNLPNEKVLPKHSLLYEYFTVYNELTKVKYVTEGMRKPAFLSGEQKKAIVDLLFKTNRKVTVKQLKEDYFKKIECFDSVEISGVEDRFNASLGTYHDLLKIIKDKDFLDNEENEDILEDIVLTLTLFEDREMIEERLKTYAHLFDDKVMKQLKRRRYTGWGRLSRKLINGIRDKQSGKTILDFLKSDGFANRNFMQLIHDDSLTFKEDIQKAQVSGQGDSLHEHIANLAGSPAIKKGILQTVKVVDELVKVMGRHKPENIVIEMARENQTTQKGQKNSRERMKRIEEGIKELGSQILKEHPVENTQLQNEKLYLYYLQNGRDMYVDQELDINRLSDYDVDHIVPQSFLKDDSIDNKVLTRSDKARGKSDNVPSEEVVKKMKNYWRQLLNAKLITQRKFDNLTKAERGGLSELDKAGFIKRQLVETRQITKHVAQILDSRMNTKYDENDKLIREVKVITLKSKLVSDFRKDFQFYKVREINNYHHAHDAYLNAVVGTALIKKYPKLESEFVYGDYKVYDVRKMIAKSEQEIGKATAKYFFYSNIMNFFKTEITLANGEIRKRPLIETNGETGEIVWDKGRDFATVRKVLSMPQVNIVKKTEVQTGGFSKESILPKRNSDKLIARKKDWDPKKYGGFDSPTVAYSVLVVAKVEKGKSKKLKSVKELLGITIMERSSFEKNPIDFLEAKGYKEVKKDLIIKLPKYSLFELENGRKRMLASAGELQKGNELALPSKYVNFLYLASHYEKLKGSPEDNEQKQLFVEQHKHYLDEIIEQISEFSKRVILADANLDKVLSAYNKHRDKPIREQAENIIHLFTLTNLGAPAAFKYFDTTIDRKRYTSTKEVLDATLIHQSITGLYETRIDLSQLGGDKRTADGSEFESPKKKAKVE

SEQ ID NO: 17009 - protein, 2659 aa, synthetic construct
MPAAKRVKLDGGMASNFTQFVLVDNGGTGDVTVAPSNFANGIAEWISSNSRSQAYKVTCSVRQSSAQNRKYTIKVEVPKGAWRSYLNMELTIPIFATNSDCELIVKAMQGLLKDGNPIPSAIAANSGIYGGSGGSMASNFTQFVLVDNGGTGDVTVAPSNFANGIAEWISSNSRSQAYKVTCSVRQSSAQNRKYTIKVEVPKGAWRSYLNMELTIPIFATNSDCELIVKAMQGLLKDGNPIPSAIAANSGIYGGGSGGGSGGGSGGGSMASNFTQFVLVDNGGTGDVTVAPSNFANGIAEWISSNSRSQAYKVTCSVRQSSAQNRKYTIKVEVPKGAWRSYLNMELTIPIFATNSDCELIVKAMQGLLKDGNPIPSAIAANSGIYGGSGGSMASNFTQFVLVDNGGTGDVTVAPSNFANGIAEWISSNSRSQAYKVTCSVRQSSAQNRKYTIKVEVPKGAWRSYLNMELTIPIFATNSDCELIVKAMQGLLKDGNPIPSAIAANSGIYAEAAAKEAAAKEAAAKEAAAKALEAEAAAKEAAAKEAAAKEAAAKATAPLEEEYRLFLEAPIQNVTLLEQWKREIPKVWAEINPPGLASTQAPIHVQLLSTALPVRVRQYPITLEAKRSLRETIRKFRAAGILRPVHSPWNTPLLPVRKSGTSEYRMVQDLREVNKRVETIHPTVPNPYTLLSLLPPDRIWYSVLDLKDAFFCIPLAPESQLIFAFEWADAEEGESGQLTWTRLPQGFKNSPTLFNEALNRDLQGFRLDHPSVSLLQYVDDLLIAADTQAACLSATRDLLMTLAELGYRVSGKKAQLCQEEVTYLGFKIHKGSRSLSNSRTQAILQIPVPKTKRQVREFLGKIGYCRLFIPGFAELAQPLYAATRPGNDPLVWGEKEEEAFQSLKLALTQPPALALPSLDKPFQLFVEETSGAAKGVLTQALGPWKRPVAYLSKRLDPVAAGWPRCLRAIAAAALLTREASKLTFGQDIEITSSHNLESLLRSPPDKWLTNARITQYQVLLLDPPRVRFKQTAALNPATLLPETDDTLPIHHCLDTLDSLTSTRPDLTDQPLAQAEATLFTDGSSYIRDGKRYAGAAVVTLDSVIWAEPLPIGTSAQKAELIALTKALEWSKDKSVNIYTDSRYAFATLHVHGMIYRERGWLTAGGKAIKNAPEILALLTAVWLPKRVAVMHCKGHQKDDAPTSTGNRRADEVAREVAIRPLSTQATISAEAAAKEAAAKEAAAKEAAAKALEAEAAAKEAAAKEAAAKEAAAKADKKYSIGLDIGTNSVGWAVITDEYKVPSKKFKVLGNTDRHSIKKNLIGALLFDSGETAEATRLKRTARRRYTRRKNRICYLQEIFSNEMAKVDDSFFHRLEESFLVEEDKKHERHPIFGNIVDEVAYHEKYPTIYHLRKKLVDSTDKADLRLIYLALAHMIKFRGHFLIEGDLNPDNSDVDKLFIQLVQTYNQLFEENPINASGVDAKAILSARLSKSRRLENLIAQLPGEKKNGLFGNLIALSLGLTPNFKSNFDLAEDAKLQLSKDTYDDDLDNLLAQIGDQYADLFLAAKNLSDAILLSDILRVNTEITKAPLSASMIKRYDEHHQDLTLLKALVRQQLPEKYKEIFFDQSKNGYAGYIDGGASQEEFYKFIKPILEKMDGTEELLVKLNREDLLRKQRTFDNGSIPHQIHLGELHAILRRQEDFYPFLKDNREKIEKILTFRIPYYVGPLARGNSRFAWMTRKSEETITPWNFEEVVDKGASAQSFIERMTNFDKNLPNEKVLPKHSLLYEYFTVYNELTKVKYVTEGMRKPAFLSGEQKKAIVDLLFKTNRKVTVKQLKEDYFKKIECFDSVEISGVEDRFNASLGTYHDLLKIIKDKDFLDNEENEDILEDIVLTLTLFEDREMIEERLKTYAHLFDDKVMKQLKRRRYTGWGRLSRKLINGIRDKQSGKTILDFLKSDGFANRNFMQLIHDDSLTFKEDIQKAQVSGQGDSLHEHIANLAGSPAIKKGILQTVKVVDELVKVMGRHKPENIVIEMARENQTTQKGQKNSRERMKRIEEGIKELGSQILKEHPVENTQLQNEKLYLYYLQNGRDMYVDQELDINRLSDYDVDHIVPQSFLKDDSIDNKVLTRSDKARGKSDNVPSEEVVKKMKNYWRQLLNAKLITQRKFDNLTKAERGGLSELDKAGFIKRQLVETRQITKHVAQILDSRMNTKYDENDKLIREVKVITLKSKLVSDFRKDFQFYKVREINNYHHAHDAYLNAVVGTALIKKYPKLESEFVYGDYKVYDVRKMIAKSEQEIGKATAKYFFYSNIMNFFKTEITLANGEIRKRPLIETNGETGEIVWDKGRDFATVRKVLSMPQVNIVKKTEVQTGGFSKESILPKRNSDKLIARKKDWDPKKYGGFDSPTVAYSVLVVAKVEKGKSKKLKSVKELLGITIMERSSFEKNPIDFLEAKGYKEVKKDLIIKLPKYSLFELENGRKRMLASAGELQKGNELALPSKYVNFLYLASHYEKLKGSPEDNEQKQLFVEQHKHYLDEIIEQISEFSKRVILADANLDKVLSAYNKHRDKPIREQAENIIHLFTLTNLGAPAAFKYFDTTIDRKRYTSTKEVLDATLIHQSITGLYETRIDLSQLGGDKRTADGSEFESPKKKAKVE

SEQ ID NO: 17010 - protein, 2643 aa, synthetic construct
MPAAKRVKLDGGMASNFTQFVLVDNGGTGDVTVAPSNFANGIAEWISSNSRSQAYKVTCSVRQSSAQNRKYTIKVEVPKGAWRSYLNMELTIPIFATNSDCELIVKAMQGLLKDGNPIPSAIAANSGIYANFTQFVLVDNGGTGDVTVAPSNFANGIAEWISSNSRSQAYKVTCSVRQSSAQNRKYTIKVEVPKGAWRSYLNMELTIPIFATNSDCELIVKAMQGLLKDGNPIPSAIAANSGIYGGGSGGGSGGGSGGGSMASNFTQFVLVDNGGTGDVTVAPSNFANGIAEWISSNSRSQAYKVTCSVRQSSAQNRKYTIKVEVPKGAWRSYLNMELTIPIFATNSDCELIVKAMQGLLKDGNPIPSAIAANSGIYANFTQFVLVDNGGTGDVTVAPSNFANGIAEWISSNSRSQAYKVTCSVRQSSAQNRKYTIKVEVPKGAWRSYLNMELTIPIFATNSDCELIVKAMQGLLKDGNPIPSAIAANSGIYAEAAAKEAAAKEAAAKEAAAKALEAEAAAKEAAAKEAAAKEAAAKATAPLEEEYRLFLEAPIQNVTLLEQWKREIPKVWAEINPPGLASTQAPIHVQLLSTALPVRVRQYPITLEAKRSLRETIRKFRAAGILRPVHSPWNTPLLPVRKSGTSEYRMVQDLREVNKRVETIHPTVPNPYTLLSLLPPDRIWYSVLDLKDAFFCIPLAPESQLIFAFEWADAEEGESGQLTWTRLPQGFKNSPTLFNEALNRDLQGFRLDHPSVSLLQYVDDLLIAADTQAACLSATRDLLMTLAELGYRVSGKKAQLCQEEVTYLGFKIHKGSRSLSNSRTQAILQIPVPKTKRQVREFLGKIGYCRLFIPGFAELAQPLYAATRPGNDPLVWGEKEEEAFQSLKLALTQPPALALPSLDKPFQLFVEETSGAAKGVLTQALGPWKRPVAYLSKRLDPVAAGWPRCLRAIAAAALLTREASKLTFGQDIEITSSHNLESLLRSPPDKWLTNARITQYQVLLLDPPRVRFKQTAALNPATLLPETDDTLPIHHCLDTLDSLTSTRPDLTDQPLAQAEATLFTDGSSYIRDGKRYAGAAVVTLDSVIWAEPLPIGTSAQKAELIALTKALEWSKDKSVNIYTDSRYAFATLHVHGMIYRERGWLTAGGKAIKNAPEILALLTAVWLPKRVAVMHCKGHQKDDAPTSTGNRRADEVAREVAIRPLSTQATISAEAAAKEAAAKEAAAKEAAAKALEAEAAAKEAAAKEAAAKEAAAKADKKYSIGLDIGTNSVGWAVITDEYKVPSKKFKVLGNTDRHSIKKNLIGALLFDSGETAEATRLKRTARRRYTRRKNRICYLQEIFSNEMAKVDDSFFHRLEESFLVEEDKKHERHPIFGNIVDEVAYHEKYPTIYHLRKKLVDSTDKADLRLIYLALAHMIKFRGHFLIEGDLNPDNSDVDKLFIQLVQTYNQLFEENPINASGVDAKAILSARLSKSRRLENLIAQLPGEKKNGLFGNLIALSLGLTPNFKSNFDLAEDAKLQLSKDTYDDDLDNLLAQIGDQYADLFLAAKNLSDAILLSDILRVNTEITKAPLSASMIKRYDEHHQDLTLLKALVRQQLPEKYKEIFFDQSKNGYAGYIDGGASQEEFYKFIKPILEKMDGTEELLVKLNREDLLRKQRTFDNGSIPHQIHLGELHAILRRQEDFYPFLKDNREKIEKILTFRIPYYVGPLARGNSRFAWMTRKSEETITPWNFEEVVDKGASAQSFIERMTNFDKNLPNEKVLPKHSLLYEYFTVYNELTKVKYVTEGMRKPAFLSGEQKKAIVDLLFKTNRKVTVKQLKEDYFKKIECFDSVEISGVEDRFNASLGTYHDLLKIIKDKDFLDNEENEDILEDIVLTLTLFEDREMIEERLKTYAHLFDDKVMKQLKRRRYTGWGRLSRKLINGIRDKQSGKTILDFLKSDGFANRNFMQLIHDDSLTFKEDIQKAQVSGQGDSLHEHIANLAGSPAIKKGILQTVKVVDELVKVMGRHKPENIVIEMARENQTTQKGQKNSRERMKRIEEGIKELGSQILKEHPVENTQLQNEKLYLYYLQNGRDMYVDQELDINRLSDYDVDHIVPQSFLKDDSIDNKVLTRSDKARGKSDNVPSEEVVKKMKNYWRQLLNAKLITQRKFDNLTKAERGGLSELDKAGFIKRQLVETRQITKHVAQILDSRMNTKYDENDKLIREVKVITLKSKLVSDFRKDFQFYKVREINNYHHAHDAYLNAVVGTALIKKYPKLESEFVYGDYKVYDVRKMIAKSEQEIGKATAKYFFYSNIMNFFKTEITLANGEIRKRPLIETNGETGEIVWDKGRDFATVRKVLSMPQVNIVKKTEVQTGGFSKESILPKRNSDKLIARKKDWDPKKYGGFDSPTVAYSVLVVAKVEKGKSKKLKSVKELLGITIMERSSFEKNPIDFLEAKGYKEVKKDLIIKLPKYSLFELENGRKRMLASAGELQKGNELALPSKYVNFLYLASHYEKLKGSPEDNEQKQLFVEQHKHYLDEIIEQISEFSKRVILADANLDKVLSAYNKHRDKPIREQAENIIHLFTLTNLGAPAAFKYFDTTIDRKRYTSTKEVLDATLIHQSITGLYETRIDLSQLGGDKRTADGSEFESPKKKAKVE

SEQ ID NO: 17011 - DNA, 444 bp, synthetic construct
  source 1..444: mol_type = other DNA
cgaggagctgttcaccgggggtttaagagctagaaatagcaagtttaaataaggctagtccgttatcaacttgaaaaagtggcaccgagtcggtgcatggtgagcaagggcgaggagctgttcaccgtggtcgagctggacggcgacgtaaacggccacaagttcagcgtgtccggcgagggcgagggcgatgccacctacggcaagctgaccctgaagttcatctgcaccaccggcaagctgcccgtgccctggcccaccctcgtgaccaccctgacgtacggcgtgcagtgcttacatacaactaacatagggagcacatgaggatcacccatgtgcgactcccacagtcactggggagtcttccctctctctctctctctctctcgggagcacatgaggatcacccatgtgcgactcccacagtcactggggagtcttccc

SEQ ID NO: 17012 - DNA, 438 bp, synthetic construct
  source 1..438: mol_type = other DNA
cgaggagctgttcaccgggggtttaagagctagaaatagcaagtttaaataaggctagtccgttatcaacttgaaaaagtggcaccgagtcggtgcagcaagggcgaggagctgttcaccgtggtcgagctggacggcgacgtaaacggccacaagttcagcgtgtccggcgagggcgagggcgatgccacctacggcaagctgaccctgaagttcatctgcaccaccggcaagctgcccgtgccctggcccaccctcgtgaccaccctgacgtacggcgtgcagtgcttacatacaactaacatagggagcacatgaggatcacccatgtgcgactcccacagtcactggggagtcttccctctctctctctctctctctcgggagcacatgaggatcacccatgtgcgactcccacagtcactggggagtcttccc

SEQ ID NO: 17013 - DNA, 433 bp, synthetic construct
  source 1..433: mol_type = other DNA
cgaggagctgttcaccgggggtttaagagctagaaatagcaagtttaaataaggctagtccgttatcaacttgaaaaagtggcaccgagtcggtgcgggcgaggagctgttcaccgtggtcgagctggacggcgacgtaaacggccacaagttcagcgtgtccggcgagggcgagggcgatgccacctacggcaagctgaccctgaagttcatctgcaccaccggcaagctgcccgtgccctggcccaccctcgtgaccaccctgacgtacggcgtgcagtgcttacatacaactaacatagggagcacatgaggatcacccatgtgcgactcccacagtcactggggagtcttccctctctctctctctctctctcgggagcacatgaggatcacccatgtgcgactcccacagtcactggggagtcttccc

SEQ ID NO: 17014 - DNA, 430 bp, synthetic construct
  source 1..430: mol_type = other DNA
cgaggagctgttcaccgggggtttaagagctagaaatagcaagtttaaataaggctagtccgttatcaacttgaaaaagtggcaccgagtcggtgccgaggagctgttcaccgtggtcgagctggacggcgacgtaaacggccacaagttcagcgtgtccggcgagggcgagggcgatgccacctacggcaagctgaccctgaagttcatctgcaccaccggcaagctgcccgtgccctggcccaccctcgtgaccaccctgacgtacggcgtgcagtgcttacatacaactaacatagggagcacatgaggatcacccatgtgcgactcccacagtcactggggagtcttccctctctctctctctctctctcgggagcacatgaggatcacccatgtgcgactcccacagtcactggggagtcttccc

SEQ ID NO: 17015 - DNA, 426 bp, synthetic construct
  source 1..426: mol_type = other DNA
cgaggagctgttcaccgggggtttaagagctagaaatagcaagtttaaataaggctagtccgttatcaacttgaaaaagtggcaccgagtcggtgcgagctgttcaccgtggtcgagctggacggcgacgtaaacggccacaagttcagcgtgtccggcgagggcgagggcgatgccacctacggcaagctgaccctgaagttcatctgcaccaccggcaagctgcccgtgccctggcccaccctcgtgaccaccctgacgtacggcgtgcagtgcttacatacaactaacatagggagcacatgaggatcacccatgtgcgactcccacagtcactggggagtcttccctctctctctctctctctctcgggagcacatgaggatcacccatgtgcgactcccacagtcactggggagtcttccc

SEQ ID NO: 17016 - DNA, 420 bp, synthetic construct
  source 1..420: mol_type = other DNA
cgaggagctgttcaccgggggtttaagagctagaaatagcaagtttaaataaggctagtccgttatcaacttgaaaaagtggcaccgagtcggtgcttcaccgtggtcgagctggacggcgacgtaaacggccacaagttcagcgtgtccggcgagggcgagggcgatgccacctacggcaagctgaccctgaagttcatctgcaccaccggcaagctgcccgtgccctggcccaccctcgtgaccaccctgacgtacggcgtgcagtgcttacatacaactaacatagggagcacatgaggatcacccatgtgcgactcccacagtcactggggagtcttccctctctctctctctctctctcgggagcacatgaggatcacccatgtgcgactcccacagtcactggggagtcttccc

SEQ ID NO: 17017 - DNA, 452 bp, synthetic construct
  source 1..452: mol_type = other DNA
cgaggagctgttcaccgggggtttaagagctagaaatagcaagtttaaataaggctagtccgttatcaacttgaaaaagtggcaccgagtcggtgcatggtgagcaagggcgaggagctgttcaccggggtggtgtggtcgagctggacggcgacgtaaacggccacaagttcagcgtgtccggcgagggcgagggcgatgccacctacggcaagctgaccctgaagttcatctgcaccaccggcaagctgcccgtgccctggcccaccctcgtgaccaccctgacgtacggcgtgcagtgcttacatacaactaacatagggagcacatgaggatcacccatgtgcgactcccacagtcactggggagtcttccctctctctctctctctctctcgggagcacatgaggatcacccatgtgcgactcccacagtcactggggagtcttccc

SEQ ID NO: 17018 - DNA, 443 bp, synthetic construct
  source 1..443: mol_type = other DNA
cgaggagctgttcaccgggggtttaagagctagaaatagcaagtttaaataaggctagtccgttatcaacttgaaaaagtggcaccgagtcggtgcaggagctgttcaccggggtggtgcccatcctggtcgagctggacggcgacgtaaacggccacaagttcagcgtgtccggcgagggcgagggcgatgccacctacggcaagctgaccctgaagttcatctgcaccaccggcaagctgcccgtgccctggcccaccctcgtgaccaccctgacgtacggcgtgcagtgcttacatacaactaacatagggagcacatgaggatcacccatgtgcgactcccacagtcactggggagtcttccctctctctctctctctctctcgggagcacatgaggatcacccatgtgcgactcccacagtcactggggagtcttccc

SEQ ID NO: 17019 - DNA, 459 bp, synthetic construct
  source 1..459: mol_type = other DNA
gggcgaggagctgttcaccggtttaagagctagaaatagcaagtttaaataaggctagtccgttatcaacttgaaaaagtggcaccgagtcggtgcaccatggtgagcaagggcgaggagctgttcaccggggtggtgcccatggtcgagctggacggcgacgtaaacggccacaagttcagcgtgtccggcgagggcgagggcgatgccacctacggcaagctgaccctgaagttcatctgcaccaccggcaagctgcccgtgccctggcccaccctcgtgaccaccctgacgtacggcgtgcagtgcttacatacaactaacatagggagcacatgaggatcacccatgtgcgactcccacagtcactggggagtcttccctctctctctctctctctctcgggagcacatgaggatcacccatgtgcgactcccacagtcactggggagtcttccc

SEQ ID NO: 17020 - DNA, 449 bp, synthetic construct
  source 1..449: mol_type = other DNA
gggcgaggagctgttcaccggtttaagagctagaaatagcaagtttaaataaggctagtccgttatcaacttgaaaaagtggcaccgagtcggtgcagggcgaggagctgttcaccggggtggtgcccatcctggtcgagctggacggcgacgtaaacggccacaagttcagcgtgtccggcgagggcgagggcgatgccacctacggcaagctgaccctgaagttcatctgcaccaccggcaagctgcccgtgccctggcccaccctcgtgaccaccctgacgtacggcgtgcagtgcttacatacaactaacatagggagcacatgaggatcacccatgtgcgactcccacagtcactggggagtcttccctctctctctctctctctctcgggagcacatgaggatcacccatgtgcgactcccacagtcactggggagtcttccc

SEQ ID NO: 17021 - DNA, 459 bp, synthetic construct
  source 1..459: mol_type = other DNA
agggcgaggagctgttcaccgtttaagagctagaaatagcaagtttaaataaggctagtccgttatcaacttgaaaaagtggcaccgagtcggtgccaccatggtgagcaagggcgaggagctgttcaccggggtggtgccctggtcgagctggacggcgacgtaaacggccacaagttcagcgtgtccggcgagggcgagggcgatgccacctacggcaagctgaccctgaagttcatctgcaccaccggcaagctgcccgtgccctggcccaccctcgtgaccaccctgacgtacggcgtgcagtgcttacatacaactaacatagggagcacatgaggatcacccatgtgcgactcccacagtcactggggagtcttccctctctctctctctctctctcgggagcacatgaggatcacccatgtgcgactcccacagtcactggggagtcttccc

SEQ ID NO: 17022 - DNA, 451 bp, synthetic construct
  source 1..451: mol_type = other DNA
agggcgaggagctgttcaccgtttaagagctagaaatagcaagtttaaataaggctagtccgttatcaacttgaaaaagtggcaccgagtcggtgccaagggcgaggagctgttcaccggggtggtgcccatcctggtcgagctggacggcgacgtaaacggccacaagttcagcgtgtccggcgagggcgagggcgatgccacctacggcaagctgaccctgaagttcatctgcaccaccggcaagctgcccgtgccctggcccaccctcgtgaccaccctgacgtacggcgtgcagtgcttacatacaactaacatagggagcacatgaggatcacccatgtgcgactcccacagtcactggggagtcttccctctctctctctctctctctcgggagcacatgaggatcacccatgtgcgactcccacagtcactggggagtcttccc

SEQ ID NO: 17023 - DNA, 459 bp, synthetic construct
  source 1..459: mol_type = other DNA
aagggcgaggagctgttcacgtttaagagctagaaatagcaagtttaaataaggctagtccgttatcaacttgaaaaagtggcaccgagtcggtgcccaccatggtgagcaagggcgaggagctgttcaccggggtggtgcctggtcgagctggacggcgacgtaaacggccacaagttcagcgtgtccggcgagggcgagggcgatgccacctacggcaagctgaccctgaagttcatctgcaccaccggcaagctgcccgtgccctggcccaccctcgtgaccaccctgacgtacggcgtgcagtgcttacatacaactaacatagggagcacatgaggatcacccatgtgcgactcccacagtcactggggagtcttccctctctctctctctctctctcgggagcacatgaggatcacccatgtgcgactcccacagtcactggggagtcttccc

SEQ ID NO: 17024 - DNA, 453 bp, synthetic construct
  source 1..453: mol_type = other DNA
aagggcgaggagctgttcacgtttaagagctagaaatagcaagtttaaataaggctagtccgttatcaacttgaaaaagtggcaccgagtcggtgcagcaagggcgaggagctgttcaccggggtggtgcccatcctggtcgagctggacggcgacgtaaacggccacaagttcagcgtgtccggcgagggcgagggcgatgccacctacggcaagctgaccctgaagttcatctgcaccaccggcaagctgcccgtgccctggcccaccctcgtgaccaccctgacgtacggcgtgcagtgcttacatacaactaacatagggagcacatgaggatcacccatgtgcgactcccacagtcactggggagtcttccctctctctctctctctctctcgggagcacatgaggatcacccatgtgcgactcccacagtcactggggagtcttccc

SEQ ID NO: 17025 - DNA, 459 bp, synthetic construct
  source 1..459: mol_type = other DNA
caccatggtgagcaagggcggtttaagagctagaaatagcaagtttaaataaggctagtccgttatcaacttgaaaaagtggcaccgagtcggtgccgagccaccgccgccaccatggtgagcaagggcgaggagctgttcatggtcgagctggacggcgacgtaaacggccacaagttcagcgtgtccggcgagggcgagggcgatgccacctacggcaagctgaccctgaagttcatctgcaccaccggcaagctgcccgtgccctggcccaccctcgtgaccaccctgacgtacggcgtgcagtgcttacatacaactaacatagggagcacatgaggatcacccatgtgcgactcccacagtcactggggagtcttccctctctctctctctctctctcgggagcacatgaggatcacccatgtgcgactcccacagtcactggggagtcttccc

SEQ ID NO: 17026 - DNA, 459 bp, synthetic construct
  source 1..459: mol_type = other DNA
caccatggtgagcaagggcggtttaagagctagaaatagcaagtttaaataaggctagtccgttatcaacttgaaaaagtggcaccgagtcggtgccgccgccaccatggtgagcaagggcgaggagctgttcaccggggtgtggtcgagctggacggcgacgtaaacggccacaagttcagcgtgtccggcgagggcgagggcgatgccacctacggcaagctgaccctgaagttcatctgcaccaccggcaagctgcccgtgccctggcccaccctcgtgaccaccctgacgtacggcgtgcagtgcttacatacaactaacatagggagcacatgaggatcacccatgtgcgactcccacagtcactggggagtcttccctctctctctctctctctctcgggagcacatgaggatcacccatgtgcgactcccacagtcactggggagtcttccc

SEQ ID NO: 17027 - DNA, 459 bp, synthetic construct
  source 1..459: mol_type = other DNA
caccatggtgagcaagggcggtttaagagctagaaatagcaagtttaaataaggctagtccgttatcaacttgaaaaagtggcaccgagtcggtgcccatggtgagcaagggcgaggagctgttcaccggggtggtgcccattggtcgagctggacggcgacgtaaacggccacaagttcagcgtgtccggcgagggcgagggcgatgccacctacggcaagctgaccctgaagttcatctgcaccaccggcaagctgcccgtgccctggcccaccctcgtgaccaccctgacgtacggcgtgcagtgcttacatacaactaacatagggagcacatgaggatcacccatgtgcgactcccacagtcactggggagtcttccctctctctctctctctctctcgggagcacatgaggatcacccatgtgcgactcccacagtcactggggagtcttccc

SEQ ID NO: 17028 - DNA, 459 bp, synthetic construct
  source 1..459: mol_type = other DNA
gccgccaccatggtgagcaagtttaagagctagaaatagcaagtttaaataaggctagtccgttatcaacttgaaaaagtggcaccgagtcggtgcatcctcgagccaccgccgccaccatggtgagcaagggcgaggagcttggtcgagctggacggcgacgtaaacggccacaagttcagcgtgtccggcgagggcgagggcgatgccacctacggcaagctgaccctgaagttcatctgcaccaccggcaagctgcccgtgccctggcccaccctcgtgaccaccctgacgtacggcgtgcagtgcttacatacaactaacatagggagcacatgaggatcacccatgtgcgactcccacagtcactggggagtcttccctctctctctctctctctctcgggagcacatgaggatcacccatgtgcgactcccacagtcactggggagtcttccc

SEQ ID NO: 17029 - DNA, 459 bp, synthetic construct
  source 1..459: mol_type = other DNA
gccgccaccatggtgagcaagtttaagagctagaaatagcaagtttaaataaggctagtccgttatcaacttgaaaaagtggcaccgagtcggtgcgccaccgccgccaccatggtgagcaagggcgaggagctgttcaccgtggtcgagctggacggcgacgtaaacggccacaagttcagcgtgtccggcgagggcgagggcgatgccacctacggcaagctgaccctgaagttcatctgcaccaccggcaagctgcccgtgccctggcccaccctcgtgaccaccctgacgtacggcgtgcagtgcttacatacaactaacatagggagcacatgaggatcacccatgtgcgactcccacagtcactggggagtcttccctctctctctctctctctctcgggagcacatgaggatcacccatgtgcgactcccacagtcactggggagtcttccc

SEQ ID NO: 17030 - DNA, 459 bp, synthetic construct
  source 1..459: mol_type = other DNA
gccgccaccatggtgagcaagtttaagagctagaaatagcaagtttaaataaggctagtccgttatcaacttgaaaaagtggcaccgagtcggtgccgccaccatggtgagcaagggcgaggagctgttcaccggggtggtgtggtcgagctggacggcgacgtaaacggccacaagttcagcgtgtccggcgagggcgagggcgatgccacctacggcaagctgaccctgaagttcatctgcaccaccggcaagctgcccgtgccctggcccaccctcgtgaccaccctgacgtacggcgtgcagtgcttacatacaactaacatagggagcacatgaggatcacccatgtgcgactcccacagtcactggggagtcttccctctctctctctctctctctcgggagcacatgaggatcacccatgtgcgactcccacagtcactggggagtcttccc

SEQ ID NO: 17031 - DNA, 459 bp, synthetic construct
  source 1..459: mol_type = other DNA
cgccgccaccatggtgagcagtttaagagctagaaatagcaagtttaaataaggctagtccgttatcaacttgaaaaagtggcaccgagtcggtgcgatcctcgagccaccgccgccaccatggtgagcaagggcgaggagctggtcgagctggacggcgacgtaaacggccacaagttcagcgtgtccggcgagggcgagggcgatgccacctacggcaagctgaccctgaagttcatctgcaccaccggcaagctgcccgtgccctggcccaccctcgtgaccaccctgacgtacggcgtgcagtgcttacatacaactaacatagggagcacatgaggatcacccatgtgcgactcccacagtcactggggagtcttccctctctctctctctctctctcgggagcacatgaggatcacccatgtgcgactcccacagtcactggggagtcttccc

SEQ ID NO: 17032 - DNA, 459 bp, synthetic construct
  source 1..459: mol_type = other DNA
cgccgccaccatggtgagcagtttaagagctagaaatagcaagtttaaataaggctagtccgttatcaacttgaaaaagtggcaccgagtcggtgcagccaccgccgccaccatggtgagcaagggcgaggagctgttcacctggtcgagctggacggcgacgtaaacggccacaagttcagcgtgtccggcgagggcgagggcgatgccacctacggcaagctgaccctgaagttcatctgcaccaccggcaagctgcccgtgccctggcccaccctcgtgaccaccctgacgtacggcgtgcagtgcttacatacaactaacatagggagcacatgaggatcacccatgtgcgactcccacagtcactggggagtcttccctctctctctctctctctctcgggagcacatgaggatcacccatgtgcgactcccacagtcactggggagtcttccc

SEQ ID NO: 17033 - DNA, 459 bp, synthetic construct
  source 1..459: mol_type = other DNA
cgccgccaccatggtgagcagtttaagagctagaaatagcaagtttaaataaggctagtccgttatcaacttgaaaaagtggcaccgagtcggtgcccgccaccatggtgagcaagggcgaggagctgttcaccggggtggttggtcgagctggacggcgacgtaaacggccacaagttcagcgtgtccggcgagggcgagggcgatgccacctacggcaagctgaccctgaagttcatctgcaccaccggcaagctgcccgtgccctggcccaccctcgtgaccaccctgacgtacggcgtgcagtgcttacatacaactaacatagggagcacatgaggatcacccatgtgcgactcccacagtcactggggagtcttccctctctctctctctctctctcgggagcacatgaggatcacccatgtgcgactcccacagtcactggggagtcttccc

SEQ ID NO: 17034 - DNA, 459 bp, synthetic construct
  source 1..459: mol_type = other DNA
tcgagccaccgccgccaccagtttaagagctagaaatagcaagtttaaataaggctagtccgttatcaacttgaaaaagtggcaccgagtcggtgcggcgcctacgatcctcgagccaccgccgccaccatggtgagcaaggtggtcgagctggacggcgacgtaaacggccacaagttcagcgtgtccggcgagggcgagggcgatgccacctacggcaagctgaccctgaagttcatctgcaccaccggcaagctgcccgtgccctggcccaccctcgtgaccaccctgacgtacggcgtgcagtgcttacatacaactaacatagggagcacatgaggatcacccatgtgcgactcccacagtcactggggagtcttccctctctctctctctctctctcgggagcacatgaggatcacccatgtgcgactcccacagtcactggggagtcttccc

SEQ ID NO: 17035 - DNA, 459 bp, synthetic construct
  source 1..459: mol_type = other DNA
tcgagccaccgccgccaccagtttaagagctagaaatagcaagtttaaataaggctagtccgttatcaacttgaaaaagtggcaccgagtcggtgccgatcctcgagccaccgccgccaccatggtgagcaagggcgaggagtggtcgagctggacggcgacgtaaacggccacaagttcagcgtgtccggcgagggcgagggcgatgccacctacggcaagctgaccctgaagttcatctgcaccaccggcaagctgcccgtgccctggcccaccctcgtgaccaccctgacgtacggcgtgcagtgcttacatacaactaacatagggagcacatgaggatcacccatgtgcgactcccacagtcactggggagtcttccctctctctctctctctctctcgggagcacatgaggatcacccatgtgcgactcccacagtcactggggagtcttccc

SEQ ID NO: 17036 - DNA, 459 bp, synthetic construct
  source 1..459: mol_type = other DNA
tcgagccaccgccgccaccagtttaagagctagaaatagcaagtttaaataaggctagtccgttatcaacttgaaaaagtggcaccgagtcggtgcgagccaccgccgccaccatggtgagcaagggcgaggagctgttcactggtcgagctggacggcgacgtaaacggccacaagttcagcgtgtccggcgagggcgagggcgatgccacctacggcaagctgaccctgaagttcatctgcaccaccggcaagctgcccgtgccctggcccaccctcgtgaccaccctgacgtacggcgtgcagtgcttacatacaactaacatagggagcacatgaggatcacccatgtgcgactcccacagtcactggggagtcttccctctctctctctctctctctcgggagcacatgaggatcacccatgtgcgactcccacagtcactggggagtcttccc

SEQ ID NO: 17037 - DNA, 459 bp, synthetic construct
  source 1..459: mol_type = other DNA
ttacagatccaagctgtgacgtttaagagctagaaatagcaagtttaaataaggctagtccgttatcaacttgaaaaagtggcaccgagtcggtgctctgttctgcgccgttacagatccaagctgtgaccggcgcctacgatggtcgagctggacggcgacgtaaacggccacaagttcagcgtgtccggcgagggcgagggcgatgccacctacggcaagctgaccctgaagttcatctgcaccaccggcaagctgcccgtgccctggcccaccctcgtgaccaccctgacgtacggcgtgcagtgcttacatacaactaacatagggagcacatgaggatcacccatgtgcgactcccacagtcactggggagtcttccctctctctctctctctctctcgggagcacatgaggatcacccatgtgcgactcccacagtcactggggagtcttccc

SEQ ID NO: 17038 - DNA, 459 bp, synthetic construct
  source 1..459: mol_type = other DNA
ttacagatccaagctgtgacgtttaagagctagaaatagcaagtttaaataaggctagtccgttatcaacttgaaaaagtggcaccgagtcggtgcgcgccgttacagatccaagctgtgaccggcgcctacgatcctcgagtggtcgagctggacggcgacgtaaacggccacaagttcagcgtgtccggcgagggcgagggcgatgccacctacggcaagctgaccctgaagttcatctgcaccaccggcaagctgcccgtgccctggcccaccctcgtgaccaccctgacgtacggcgtgcagtgcttacatacaactaacatagggagcacatgaggatcacccatgtgcgactcccacagtcactggggagtcttccctctctctctctctctctctcgggagcacatgaggatcacccatgtgcgactcccacagtcactggggagtcttccc

SEQ ID NO: 17039 - DNA, 459 bp, synthetic construct
  source 1..459: mol_type = other DNA
ttacagatccaagctgtgacgtttaagagctagaaatagcaagtttaaataaggctagtccgttatcaacttgaaaaagtggcaccgagtcggtgcacagatccaagctgtgaccggcgcctacgatcctcgagccaccgcctggtcgagctggacggcgacgtaaacggccacaagttcagcgtgtccggcgagggcgagggcgatgccacctacggcaagctgaccctgaagttcatctgcaccaccggcaagctgcccgtgccctggcccaccctcgtgaccaccctgacgtacggcgtgcagtgcttacatacaactaacatagggagcacatgaggatcacccatgtgcgactcccacagtcactggggagtcttccctctctctctctctctctctcgggagcacatgaggatcacccatgtgcgactcccacagtcactggggagtcttccc

SEQ ID NO: 17040 - DNA, 459 bp, synthetic construct
  source 1..459: mol_type = other DNA
cgaggagctgttcaccgggggtttaagagctagaaatagcaagtttaaataaggctagtccgttatcaacttgaaaaagtggcaccgagtcggtgcatggtgagcaagggcgaggagctgttcaccggggtggtgcccatcctggtcgagctggacggcgacgtaaacggccacaagttcagcgtgtccggcgagggcgagggcgatgccacctacggcaagctgaccctgaagttcatctgcaccaccggcaagctgcccgtgccctggcccaccctcgtgaccaccctgacgtacggcgtgcagtgcttacatacaactaacatagggagcacatgaggatcacccatgtgcgactcccacagtcactggggagtcttccctctctctctctctctctctcgggagcacatgaggatcacccatgtgcgactcccacagtcactggggagtcttccc

SEQ ID NO: 17041 - DNA, 453 bp, synthetic construct
  source 1..453: mol_type = other DNA
cgaggagctgttcaccgggggtttaagagctagaaatagcaagtttaaataaggctagtccgttatcaacttgaaaaagtggcaccgagtcggtgcagcaagggcgaggagctgttcaccggggtggtgcccatcctggtcgagctggacggcgacgtaaacggccacaagttcagcgtgtccggcgagggcgagggcgatgccacctacggcaagctgaccctgaagttcatctgcaccaccggcaagctgcccgtgccctggcccaccctcgtgaccaccctgacgtacggcgtgcagtgcttacatacaactaacatagggagcacatgaggatcacccatgtgcgactcccacagtcactggggagtcttccctctctctctctctctctctcgggagcacatgaggatcacccatgtgcgactcccacagtcactggggagtcttccc

SEQ ID NO: 17042 - DNA, 448 bp, synthetic construct
  source 1..448: mol_type = other DNA
cgaggagctgttcaccgggggtttaagagctagaaatagcaagtttaaataaggctagtccgttatcaacttgaaaaagtggcaccgagtcggtgcgggcgaggagctgttcaccggggtggtgcccatcctggtcgagctggacggcgacgtaaacggccacaagttcagcgtgtccggcgagggcgagggcgatgccacctacggcaagctgaccctgaagttcatctgcaccaccggcaagctgcccgtgccctggcccaccctcgtgaccaccctgacgtacggcgtgcagtgcttacatacaactaacatagggagcacatgaggatcacccatgtgcgactcccacagtcactggggagtcttccctctctctctctctctctctcgggagcacatgaggatcacccatgtgcgactcccacagtcactggggagtcttccc

SEQ ID NO: 17043 - DNA, 445 bp, synthetic construct
  source 1..445: mol_type = other DNA
cgaggagctgttcaccgggggtttaagagctagaaatagcaagtttaaataaggctagtccgttatcaacttgaaaaagtggcaccgagtcggtgccgaggagctgttcaccggggtggtgcccatcctggtcgagctggacggcgacgtaaacggccacaagttcagcgtgtccggcgagggcgagggcgatgccacctacggcaagctgaccctgaagttcatctgcaccaccggcaagctgcccgtgccctggcccaccctcgtgaccaccctgacgtacggcgtgcagtgcttacatacaactaacatagggagcacatgaggatcacccatgtgcgactcccacagtcactggggagtcttccctctctctctctctctctctcgggagcacatgaggatcacccatgtgcgactcccacagtcactggggagtcttccc

SEQ ID NO: 17044 - DNA, 441 bp, synthetic construct
  source 1..441: mol_type = other DNA
cgaggagctgttcaccgggggtttaagagctagaaatagcaagtttaaataaggctagtccgttatcaacttgaaaaagtggcaccgagtcggtgcgagctgttcaccggggtggtgcccatcctggtcgagctggacggcgacgtaaacggccacaagttcagcgtgtccggcgagggcgagggcgatgccacctacggcaagctgaccctgaagttcatctgcaccaccggcaagctgcccgtgccctggcccaccctcgtgaccaccctgacgtacggcgtgcagtgcttacatacaactaacatagggagcacatgaggatcacccatgtgcgactcccacagtcactggggagtcttccctctctctctctctctctctcgggagcacatgaggatcacccatgtgcgactcccacagtcactggggagtcttccc

SEQ ID NO: 17045 - DNA, 435 bp, synthetic construct
  source 1..435: mol_type = other DNA
cgaggagctgttcaccgggggtttaagagctagaaatagcaagtttaaataaggctagtccgttatcaacttgaaaaagtggcaccgagtcggtgcttcaccggggtggtgcccatcctggtcgagctggacggcgacgtaaacggccacaagttcagcgtgtccggcgagggcgagggcgatgccacctacggcaagctgaccctgaagttcatctgcaccaccggcaagctgcccgtgccctggcccaccctcgtgaccaccctgacgtacggcgtgcagtgcttacatacaactaacatagggagcacatgaggatcacccatgtgcgactcccacagtcactggggagtcttccctctctctctctctctctctcgggagcacatgaggatcacccatgtgcgactcccacagtcactggggagtcttccc

SEQ ID NO: 17046 - DNA, 454 bp, synthetic construct
  source 1..454: mol_type = other DNA
agctgttcaccgggggtttaagagctagaaatagcaagtttaaataaggctagtccgttatcaacttgaaaaagtggcaccgagtcggtgcaccatggtgagcaagggcgaggagctgttcaccggggtggtgcccatggtcgagctggacggcgacgtaaacggccacaagttcagcgtgtccggcgagggcgagggcgatgccacctacggcaagctgaccctgaagttcatctgcaccaccggcaagctgcccgtgccctggcccaccctcgtgaccaccctgacgtacggcgtgcagtgcttacatacaactaacatagggagcacatgaggatcacccatgtgcgactcccacagtcactggggagtcttccctctctctctctctctctctcgggagcacatgaggatcacccatgtgcgactcccacagtcactggggagtcttccc

SEQ ID NO: 17047 - DNA, 454 bp, synthetic construct
  source 1..454: mol_type = other DNA
agctgttcaccgggggtttaagagctagaaatagcaagtttaaataaggctagtccgttatcaacttgaaaaagtggcaccgagtcggtgccaccatggtgagcaagggcgaggagctgttcaccggggtggtgccctggtcgagctggacggcgacgtaaacggccacaagttcagcgtgtccggcgagggcgagggcgatgccacctacggcaagctgaccctgaagttcatctgcaccaccggcaagctgcccgtgccctggcccaccctcgtgaccaccctgacgtacggcgtgcagtgcttacatacaactaacatagggagcacatgaggatcacccatgtgcgactcccacagtcactggggagtcttccctctctctctctctctctctcgggagcacatgaggatcacccatgtgcgactcccacagtcactggggagtcttccc

SEQ ID NO: 17048 - DNA, 454 bp, synthetic construct
  source 1..454: mol_type = other DNA
agctgttcaccgggggtttaagagctagaaatagcaagtttaaataaggctagtccgttatcaacttgaaaaagtggcaccgagtcggtgcccaccatggtgagcaagggcgaggagctgttcaccggggtggtgcctggtcgagctggacggcgacgtaaacggccacaagttcagcgtgtccggcgagggcgagggcgatgccacctacggcaagctgaccctgaagttcatctgcaccaccggcaagctgcccgtgccctggcccaccctcgtgaccaccctgacgtacggcgtgcagtgcttacatacaactaacatagggagcacatgaggatcacccatgtgcgactcccacagtcactggggagtcttccctctctctctctctctctctcgggagcacatgaggatcacccatgtgcgactcccacagtcactggggagtcttccc

SEQ ID NO: 17049 - DNA, 454 bp, synthetic construct
  source 1..454: mol_type = other DNA
agctgttcaccgggggtttaagagctagaaatagcaagtttaaataaggctagtccgttatcaacttgaaaaagtggcaccgagtcggtgccgagccaccgccgccaccatggtgagcaagggcgaggagctgttcatggtcgagctggacggcgacgtaaacggccacaagttcagcgtgtccggcgagggcgagggcgatgccacctacggcaagctgaccctgaagttcatctgcaccaccggcaagctgcccgtgccctggcccaccctcgtgaccaccctgacgtacggcgtgcagtgcttacatacaactaacatagggagcacatgaggatcacccatgtgcgactcccacagtcactggggagtcttccctctctctctctctctctctcgggagcacatgaggatcacccatgtgcgactcccacagtcactggggagtcttccc

SEQ ID NO: 17050 - DNA, 454 bp, synthetic construct
  source 1..454: mol_type = other DNA
agctgttcaccgggggtttaagagctagaaatagcaagtttaaataaggctagtccgttatcaacttgaaaaagtggcaccgagtcggtgcatcctcgagccaccgccgccaccatggtgagcaagggcgaggagcttggtcgagctggacggcgacgtaaacggccacaagttcagcgtgtccggcgagggcgagggcgatgccacctacggcaagctgaccctgaagttcatctgcaccaccggcaagctgcccgtgccctggcccaccctcgtgaccaccctgacgtacggcgtgcagtgcttacatacaactaacatagggagcacatgaggatcacccatgtgcgactcccacagtcactggggagtcttccctctctctctctctctctctcgggagcacatgaggatcacccatgtgcgactcccacagtcactggggagtcttccc

SEQ ID NO: 17051 - DNA, 454 bp, synthetic construct
  source 1..454: mol_type = other DNA
agctgttcaccgggggtttaagagctagaaatagcaagtttaaataaggctagtccgttatcaacttgaaaaagtggcaccgagtcggtgcgatcctcgagccaccgccgccaccatggtgagcaagggcgaggagctggtcgagctggacggcgacgtaaacggccacaagttcagcgtgtccggcgagggcgagggcgatgccacctacggcaagctgaccctgaagttcatctgcaccaccggcaagctgcccgtgccctggcccaccctcgtgaccaccctgacgtacggcgtgcagtgcttacatacaactaacatagggagcacatgaggatcacccatgtgcgactcccacagtcactggggagtcttccctctctctctctctctctctcgggagcacatgaggatcacccatgtgcgactcccacagtcactggggagtcttccc

SEQ ID NO: 17052 - DNA, 454 bp, synthetic construct
  source 1..454: mol_type = other DNA
agctgttcaccgggggtttaagagctagaaatagcaagtttaaataaggctagtccgttatcaacttgaaaaagtggcaccgagtcggtgcggcgcctacgatcctcgagccaccgccgccaccatggtgagcaaggtggtcgagctggacggcgacgtaaacggccacaagttcagcgtgtccggcgagggcgagggcgatgccacctacggcaagctgaccctgaagttcatctgcaccaccggcaagctgcccgtgccctggcccaccctcgtgaccaccctgacgtacggcgtgcagtgcttacatacaactaacatagggagcacatgaggatcacccatgtgcgactcccacagtcactggggagtcttccctctctctctctctctctctcgggagcacatgaggatcacccatgtgcgactcccacagtcactggggagtcttccc

SEQ ID NO: 17053 - DNA, 454 bp, synthetic construct
  source 1..454: mol_type = other DNA
agctgttcaccgggggtttaagagctagaaatagcaagtttaaataaggctagtccgttatcaacttgaaaaagtggcaccgagtcggtgctctgttctgcgccgttacagatccaagctgtgaccggcgcctacgatggtcgagctggacggcgacgtaaacggccacaagttcagcgtgtccggcgagggcgagggcgatgccacctacggcaagctgaccctgaagttcatctgcaccaccggcaagctgcccgtgccctggcccaccctcgtgaccaccctgacgtacggcgtgcagtgcttacatacaactaacatagggagcacatgaggatcacccatgtgcgactcccacagtcactggggagtcttccctctctctctctctctctctcgggagcacatgaggatcacccatgtgcgactcccacagtcactggggagtcttccc

SEQ ID NO: 17054 - DNA, 454 bp, synthetic construct
  source 1..454: mol_type = other DNA
aggagctgttcaccggtttaagagctagaaatagcaagtttaaataaggctagtccgttatcaacttgaaaaagtggcaccgagtcggtgcatggtgagcaagggcgaggagctgttcaccggggtggtgcccatcctggtcgagctggacggcgacgtaaacggccacaagttcagcgtgtccggcgagggcgagggcgatgccacctacggcaagctgaccctgaagttcatctgcaccaccggcaagctgcccgtgccctggcccaccctcgtgaccaccctgacgtacggcgtgcagtgcttacatacaactaacatagggagcacatgaggatcacccatgtgcgactcccacagtcactggggagtcttccctctctctctctctctctctcgggagcacatgaggatcacccatgtgcgactcccacagtcactggggagtcttccc

SEQ ID NO: 17055 - DNA, 454 bp, synthetic construct
  source 1..454: mol_type = other DNA
gaggagctgttcaccgtttaagagctagaaatagcaagtttaaataaggctagtccgttatcaacttgaaaaagtggcaccgagtcggtgcatggtgagcaagggcgaggagctgttcaccggggtggtgcccatcctggtcgagctggacggcgacgtaaacggccacaagttcagcgtgtccggcgagggcgagggcgatgccacctacggcaagctgaccctgaagttcatctgcaccaccggcaagctgcccgtgccctggcccaccctcgtgaccaccctgacgtacggcgtgcagtgcttacatacaactaacatagggagcacatgaggatcacccatgtgcgactcccacagtcactggggagtcttccctctctctctctctctctctcgggagcacatgaggatcacccatgtgcgactcccacagtcactggggagtcttccc

SEQ ID NO: 17056 - DNA, 454 bp, synthetic construct
  source 1..454: mol_type = other DNA
cgaggagctgttcacgtttaagagctagaaatagcaagtttaaataaggctagtccgttatcaacttgaaaaagtggcaccgagtcggtgcatggtgagcaagggcgaggagctgttcaccggggtggtgcccatcctggtcgagctggacggcgacgtaaacggccacaagttcagcgtgtccggcgagggcgagggcgatgccacctacggcaagctgaccctgaagttcatctgcaccaccggcaagctgcccgtgccctggcccaccctcgtgaccaccctgacgtacggcgtgcagtgcttacatacaactaacatagggagcacatgaggatcacccatgtgcgactcccacagtcactggggagtcttccctctctctctctctctctctcgggagcacatgaggatcacccatgtgcgactcccacagtcactggggagtcttccc

SEQ ID NO: 17057 - DNA, 454 bp, synthetic construct
  source 1..454: mol_type = other DNA
tggtgagcaagggcggtttaagagctagaaatagcaagtttaaataaggctagtccgttatcaacttgaaaaagtggcaccgagtcggtgcatggtgagcaagggcgaggagctgttcaccggggtggtgcccatcctggtcgagctggacggcgacgtaaacggccacaagttcagcgtgtccggcgagggcgagggcgatgccacctacggcaagctgaccctgaagttcatctgcaccaccggcaagctgcccgtgccctggcccaccctcgtgaccaccctgacgtacggcgtgcagtgcttacatacaactaacatagggagcacatgaggatcacccatgtgcgactcccacagtcactggggagtcttccctctctctctctctctctctcgggagcacatgaggatcacccatgtgcgactcccacagtcactggggagtcttccc

SEQ ID NO: 17058 - DNA, 454 bp, synthetic construct
  source 1..454: mol_type = other DNA
caccatggtgagcaagtttaagagctagaaatagcaagtttaaataaggctagtccgttatcaacttgaaaaagtggcaccgagtcggtgcatggtgagcaagggcgaggagctgttcaccggggtggtgcccatcctggtcgagctggacggcgacgtaaacggccacaagttcagcgtgtccggcgagggcgagggcgatgccacctacggcaagctgaccctgaagttcatctgcaccaccggcaagctgcccgtgccctggcccaccctcgtgaccaccctgacgtacggcgtgcagtgcttacatacaactaacatagggagcacatgaggatcacccatgtgcgactcccacagtcactggggagtcttccctctctctctctctctctctcgggagcacatgaggatcacccatgtgcgactcccacagtcactggggagtcttccc

SEQ ID NO: 17059 - DNA, 454 bp, synthetic construct
  source 1..454: mol_type = other DNA
ccaccatggtgagcagtttaagagctagaaatagcaagtttaaataaggctagtccgttatcaacttgaaaaagtggcaccgagtcggtgcatggtgagcaagggcgaggagctgttcaccggggtggtgcccatcctggtcgagctggacggcgacgtaaacggccacaagttcagcgtgtccggcgagggcgagggcgatgccacctacggcaagctgaccctgaagttcatctgcaccaccggcaagctgcccgtgccctggcccaccctcgtgaccaccctgacgtacggcgtgcagtgcttacatacaactaacatagggagcacatgaggatcacccatgtgcgactcccacagtcactggggagtcttccctctctctctctctctctctcgggagcacatgaggatcacccatgtgcgactcccacagtcactggggagtcttccc

SEQ ID NO: 17060 - DNA, 454 bp, synthetic construct
  source 1..454: mol_type = other DNA
ccaccgccgccaccagtttaagagctagaaatagcaagtttaaataaggctagtccgttatcaacttgaaaaagtggcaccgagtcggtgcatggtgagcaagggcgaggagctgttcaccggggtggtgcccatcctggtcgagctggacggcgacgtaaacggccacaagttcagcgtgtccggcgagggcgagggcgatgccacctacggcaagctgaccctgaagttcatctgcaccaccggcaagctgcccgtgccctggcccaccctcgtgaccaccctgacgtacggcgtgcagtgcttacatacaactaacatagggagcacatgaggatcacccatgtgcgactcccacagtcactggggagtcttccctctctctctctctctctctcgggagcacatgaggatcacccatgtgcgactcccacagtcactggggagtcttccc

SEQ ID NO: 17061 - DNA, 454 bp, synthetic construct
  source 1..454: mol_type = other DNA
gatccaagctgtgacgtttaagagctagaaatagcaagtttaaataaggctagtccgttatcaacttgaaaaagtggcaccgagtcggtgcatggtgagcaagggcgaggagctgttcaccggggtggtgcccatcctggtcgagctggacggcgacgtaaacggccacaagttcagcgtgtccggcgagggcgagggcgatgccacctacggcaagctgaccctgaagttcatctgcaccaccggcaagctgcccgtgccctggcccaccctcgtgaccaccctgacgtacggcgtgcagtgcttacatacaactaacatagggagcacatgaggatcacccatgtgcgactcccacagtcactggggagtcttccctctctctctctctctctctcgggagcacatgaggatcacccatgtgcgactcccacagtcactggggagtcttccc

SEQ ID NO: 17062-17070 - skipped (9 entries)

SEQ ID NO: 17071 - DNA, 20 bp, synthetic construct
  source 1..20: mol_type = other DNA
cgaggagctgttcaccgggg

SEQ ID NO: 17072 - DNA, 20 bp, synthetic construct
  source 1..20: mol_type = other DNA
gggcgaggagctgttcaccg

SEQ ID NO: 17073 - DNA, 20 bp, synthetic construct
  source 1..20: mol_type = other DNA
agggcgaggagctgttcacc

SEQ ID NO: 17074 - DNA, 20 bp, synthetic construct
  source 1..20: mol_type = other DNA
aagggcgaggagctgttcac

SEQ ID NO: 17075 - DNA, 20 bp, synthetic construct
  source 1..20: mol_type = other DNA
caccatggtgagcaagggcg

SEQ ID NO: 17076 - DNA, 20 bp, synthetic construct
  source 1..20: mol_type = other DNA
gccgccaccatggtgagcaa

SEQ ID NO: 17077 - DNA, 20 bp, synthetic construct
  source 1..20: mol_type = other DNA
cgccgccaccatggtgagca

SEQ ID NO: 17078 - DNA, 20 bp, synthetic construct
  source 1..20: mol_type = other DNA
tcgagccaccgccgccacca

SEQ ID NO: 17079 - DNA, 20 bp, synthetic construct
  source 1..20: mol_type = other DNA
ttacagatccaagctgtgac

SEQ ID NO: 17080-17100 - skipped (21 entries)

(The sequence listing continues in the following parts.)
